United States Patent Application Publication US 2013/0332133 A1 - sequence listing, part 33

SEQ ID NO: 244634 - DNA, 328 bp, Unknown
  Bacterial polypeptide expressing nucleotide sequence isolated from the Sargasso Sea
attgtatccacgggcaattttaattggtggtgcaacagctacaggtaaaacaaaactcgcatttgaaatttcaaaattgtttccgagcataattataaatgctgatagcatgcaggtttataaagatttaagaattttaaccaatcgcccatcaaaggaagatgaaaaaatttataattgtaaattatttgggtctgtatcctaccctgatgcattaaatgtagcattgtggataaaagaagttaaaaaaatattatctaaagaaaaaaaaaaaattccaatttttgttggaggtacgggtttgtatcttgaaaatcttattgaagaa

SEQ ID NO: 244635 - DNA, 562 bp, Unknown
  Bacterial polypeptide expressing nucleotide sequence isolated from the Sargasso Sea
ttgttatactttctaactggtatgactgcttcaggtaagtcagcccttgcacacaaaatagctattgaaagaaatttagatatcatttcacttgattcaatggctgtatataaaggtcttgatattttgactgataaacctactgaagtaatgcggtctcaggttttgtattacggtattgatatagccgattctgatcaaaatttttcagttgttgattatcttaattatttaatagaaatggaaatacctgagaaatcatttgttaaagattttttggttgttggtggaactggtctttattttagatcattaattaatagcttcgaatttagaccaaccgatccggccataagatctgaattagagttactaaatgttgatcaattattaaaatttcataaactttatgatattgaaccacctgaaactgaaattaataaaagacgtttgattagaaatattgaaaattctattcttgaagatgttaaatatgtctttccacctataaatattcctgaaaaaatagttggggtattttggaatcatcctgattattgaa

SEQ ID NO: 244636 - DNA, 862 bp, Unknown
  Bacterial polypeptide expressing nucleotide sequence isolated from the Sargasso Sea
tttgaaagcgatattaattgcaggaccaacaggaataggaaagtcaaaactagttagcttgttagagaaaaaaataaactcagcggtaattaatgctgatgcaatgcaggtgtactcctctcttagaataattaccgctcgtccccctagtaaacctaactattatttgtatggtcatgtggaggataatgttaaatatagtgtgggtaattggttaaaagatgtcgctcacactatcgaagagttatccaaaaatagtccagataaaattttaatctttgtgggtggaacaggtttatatttcaatacattggttaacggaatttcatttattcctgatgtggatcccgagataaagagtaaatcttctgaattatttcgggaacatggaataaaatatttcctaaatgcattggaaaaatttgatcaaattactttctcaagtattgataagagcaaccccagaagagtattacgcgcttgggaagtattaaatgctactggaaaaccaatcagttatttccacaggcatagaatgccttcgttaatttctgcaaaggaatccgttaaatgtgtgctcaaattgaagaaacccacacttgaccatttaaatgctgaaagatttagaggaatgcttaacgcgggcgctattgaagaatgtgatctggcacgtaaaaatggaatggggcccctttctcaaagttttaaagctattggagtctccgagattgccaattttttagatggaggtgtgacacttaaggattctgaaaagaatgccattaccagaaccagacaatattcaaagcgacaagttacttggtttcggaataacttttcagattggaaatgttacagcctt

SEQ ID NO: 244637 - DNA, 554 bp, Unknown
  Bacterial polypeptide expressing nucleotide sequence isolated from the Sargasso Sea
aattcctagcaattttagaaatgaaataagaaatttacataagagaataggacaaaaaaaattttttttaaaattattaaaaatagatcctttgatcaaagatcgagttaactacttagatgtacaaagatctataagagcatatgaaattaaatcatttacaaaaaaatctatgatcaattggtttaagaatacaaagtcaaattatgatcataatgacttttttaaaatttgtattgattttccaaggaaagatctaattgagagaataaataagagaactgagaatatgattaaatcaggtgcaattttagaagttaaaaagtttattaaattgagagttccaaaaaataaaagtcttagtaaagcaattgggataagtgagattaagcaatatcttcaaaaaaaaatgcaaacagaacaattaatcgagaaaatatcaataaagactagacaatatgccaaaagacagagcacctgggctcgaggacatatgaaagattggaataaagttgatccagctagtttggaaaagctcttaaaaaaaatttaga

SEQ ID NO: 244638 - DNA, 412 bp, Unknown
  Bacterial polypeptide expressing nucleotide sequence isolated from the Sargasso Sea
tatgagggttaaatcttttactaaaaaatctttatatgaatggattaaaaatacttactcgagttttgaaaatgaggatttctttaaaatttatattgattttccaagaatcgaattaatcaaacaaattaatattagagttaaagatatgattgccaatggggcgattttagaggtaaaaaaatttgttaatcttagagtttctaaaaataagcctgcttcaaaggcgattggaattaaggaaattaaagaatatctcaataaaaaaatccaaatagcagatgttattgaaaaaatatcaataaagacaaggcaatatgccaaaagacagactacttggggaagaggtaacatggaagattggaataaaataaagtcagaaagtttggataaatttttaaaaaaaatttag

SEQ ID NO: 244639 - DNA, 569 bp, Unknown
  Bacterial polypeptide expressing nucleotide sequence isolated from the Sargasso Sea
ggtaaaaattccaaatataccaattcctattcgtaataaaataagacgaatgcaaaatagtttaggtcaaaaaaatttttattcaaaacttttaaaaaatgactcatcagtaaaaaacaggattgatcctactgatgttcaaagatctattagagcttatgaagttatttcatttacaaagaaatcaatttttgaatggtacaagaaaacaaagccatcttttcaaaatgatcaatttattaaaatttatattgattatccgagagatgaactaatcagtaaaatttctaaaagagtagatcaaatgatgaaaaatggagctattcaagaagttaaggattttttaaagcttaacttgaagagtgataataacatcttcaaagttataggaataagagagattaaagaatttattgataaaaaaacttctatgaatgatttaaaacaaaatattgttataaaaactagacaatacgccaaaagacagagaacttggtctagaggtcagatgaatgattggctaaaatttgatgcccaagctctattaaaatttataaataaattataat

SEQ ID NO: 244640 - DNA, 635 bp, Unknown
  Bacterial polypeptide expressing nucleotide sequence isolated from the Sargasso Sea
gatcattgttgggggaacaggaatgtatattgataaattaataaatggtttaatagatataccatcaataccggaagacgttaaaaaagaatcagaaaaatatattttagaaaatggaattaataaatttataaaagaagtaaaaaaaattgaccctgaatcatttaaaaatatttctattaatgatatcaatcgtttaagaagaatatgggaagtctataattatactaatattaaattttctaattggctaaaaaataaaaataataattatttgccaaaacaagattataaacttttattattcactccagatagaaatgaaatttattcaagggtaaatagaagatttgaagaaatgatggaaaaaggtgctattaatgaagtgaagaaattaatttcattaaatcttgataattctttaccaattatgagagctcatggagttccagaaatatctagttatttattaaaatctattacttttgatgaatgtattttaaaagggcagcaagttactagaaattatgtaaaacgccaattaacttggtggagatccacttctctaagaatttatggttccttcgataaatttccatcaaatattgatctaaattcattgaaattaacttaaa

SEQ ID NO: 244641 - DNA, 298 bp, Unknown
  Bacterial polypeptide expressing nucleotide sequence isolated from the Sargasso Sea
ttgattgagagaattaatctcagatctaaggaaatgattaaaaatggagcaattaaagaagtaaaaaattttatcaaattaaaggtgaaaaaagacaaaagtgttaataaggccattggtatcaatgaaattagacaatacttaaataatgaaaaaaaattggaagatattattgaaaatatatcaataaaaactaggcaatacgctaaaagacaaagtacatgggcaaggggcaatatgaaaagttggcttaaattaaaaccaaacgagttaaataattttttaaaaaaaatttaaa

SEQ ID NO: 244642 - DNA, 482 bp, Unknown
  Bacterial polypeptide expressing nucleotide sequence isolated from the Sargasso Sea
attaattaaaattgatccacttattaaaaataaaataaatcctaaagaccctcaaaggtctattagagcttttgaagtaaaaaaatattcaaaagtttctttaattgaatggtttaaaaaaacagataaaaaatttgaagatgaagattttttaaaaatttatatagaggtttcaagacctgatttaattgaaagaataaataggagagtacatgaaatgtttagaaatggagcaatccatgaagttaaaggatttttaaaaattaaggtaacgaacgataaaagccctaataaaataattggcattaaagagatagctaagtttttgatgggagactatgatttaagcactgtaaaagaccttatatctataaaaactagacaatatgcaaaaagacaaagtacttgggctagaggtcaaatgtctagttgggaaaaaattgattacagagatctatctacatttctaaaaaaattttaat

SEQ ID NO: 244643 - DNA, 175 bp, Unknown
  Bacterial polypeptide expressing nucleotide sequence isolated from the Sargasso Sea
tttgtctaaaaaattagtactcttagcaggtcctacagcttcaggaaaatctaatttagcaatcaaattagcaaaaaaacttaacggtgaaattataaatgcagatagtatgcaaatttttaaagaatttactattttatcatctcgaccaactttaaaccaaactaggaaagta

SEQ ID NO: 244644 - DNA, 514 bp, Unknown
  Bacterial polypeptide expressing nucleotide sequence isolated from the Sargasso Sea
aaaaagaatattaaaaaaattagaaacaaaaacaaagtaccagttttagttggtggtactggtctttatttcaaagctttgagtgatggattggttaaaattccaaaaatccctatccctgttcgtgataaaattagaagaatgcaaaataaattaggtcaaaaaaaattttatttaaaactcttaaataatgatccattagtcaaaaataagattgaccccaccgatgttcaaagatcaattagagcttatgaagttatcaagtttacaaagaaatcagtttttagttggtataagaaaacaaaaccatcattcaaaaaagatcaatttataaaaatttatatcgattatcctaaagagatactaattaataaaatttccaaaagagttgaccagatgatgaaaaatggagctattcaagaagttaaggattttttaaaacttgatttgaagagtgatagcaacatcttcaaggttataggaataagagagattaaagaatttattgataaaa

SEQ ID NO: 244645 - DNA, 400 bp, Unknown
  Bacterial polypeptide expressing nucleotide sequence isolated from the Sargasso Sea
aaaaaatatagttattggataaataaaaagaataaaatttttcttaaaaatttttctaataaaatttttttatttattcctccacgggatgaaatttataaaaaaattgattttcgttttaatacgatgataaatgaaggtgctatagaagaagttaaaaaattaatttcacttaatctagatttttctttacctataatgaaagctcatggtgtacctgagattacaaattatttatgtggaaaaatagatcttgaagaatgtattaaaaaaagtcagcaagtaacacgcaattatgctaaacgtcagctaacttggtggcgatcttcaagactatctataaataaggtttttgatcaatttccaaatgaaattgatgaaaaattgatcaaaatatagc

SEQ ID NO: 244646 - DNA, 502 bp, Unknown
  Bacterial polypeptide expressing nucleotide sequence isolated from the Sargasso Sea
caaaaaaaatttttctttaaactgttaaaaatagatcctttaattaaagaccagattaattcctttgatgtgcaaagatctataagagcgtatgaaattaaatcatttacaaaaaaatctatgattagttggtttaaaaatacaaagtcagattatgcacatagtgatttttttaaaatttatatcgattttcctagaaaagatttaatagaaagaataaataaaagatcaaaagacatgattaaatcaggcgcaattttagaggttaaaaaatttatcaaattgagagttccaaaaaataaaagccttagtaaagcaattggaattagcgagattaagcaatatcttcaagaaaaaatccaaagagaacaattaattgagaaaatatcaataaagactaggcaatatgccaaaagacagagcacctgggctcgaggaaacatgaaggattggaacaaagttaatccagatggtttggacaagctattaaaaaaaatttaga

SEQ ID NO: 244647 - DNA, 175 bp, Unknown
  Bacterial polypeptide expressing nucleotide sequence isolated from the Sargasso Sea
atggacttaaagtccaaaataattcttatttcaggacccacagcatctggaaaatcaaaatttgctatacagcttgcaaaaaaaataaatggagagttaataaatgccgatagtatgcaaatatttaaagaattaaaaattcttacagcaagacctcagcgaaatgatttaaaaa

SEQ ID NO: 244648 - DNA, 289 bp, Unknown
  Bacterial polypeptide expressing nucleotide sequence isolated from the Sargasso Sea
atggacttaaagtccaaaataattcttatttcaggaccaaccgcatcaggtaaatcaaaatttgctattcagcttgcaaaaaaaatcaatggtgaagtaataaacgcagatagtatgcaaatatttaaagaattaaaaattcttacagcaagaccacagcgaaatgatttaaaaaatataaaacatcatttatatggatttaaaagtgtaaaggacaattattccacaggaaactggcttaatgatgccaagacaaaaattaacaatattaagaaaaagaataaaagtc

SEQ ID NO: 244649 - DNA, 667 bp, Unknown
  Bacterial polypeptide expressing nucleotide sequence isolated from the Sargasso Sea
aagatcatcaaaaatatgaaaaaaatattttccttcataaatgttggaggatcagggatgtatattgattcacttttaaatgggcttattcctatacctcaaattcaagaaaaatataaaaatgattctttgtctttactgaatgaaattggtactaaaaaatttattgaaattattaataattttgattctgaatctttatctaaaatttctttaaaagattcttctagaatgagaagaatatgggaagtctatcaatctactggaaaaaaatatagttattggataaataaaaagaataaaatttttcttaaaaatttttctaataaaatttttttatttattcctccaagagaagatatttataaaaaaattaattctcgttttaatacgatgataaatgagggagctatagaagaagttaaaaaattaatttcactaaatctagatgtatctttacctataatgaaagcacacggagtacctgagattacaaattatttgcgtggaaaaatagatcttgaagaatgtattcaaacaagtcagcaagtaacgcgcaattatgccaagcgtcagcttacttggtggcgaacttcaagattatctataaataaggtttttgatcaatttccaaatgaaattgatgaaaaattgatcaaaatatagg

SEQ ID NO: 244650 - DNA, 285 bp, Unknown
  Bacterial polypeptide expressing nucleotide sequence isolated from the Sargasso Sea
ttcaagcgatgattgatcaaggcttgattgaggaagtagagggtttattgaagaagaagcaaatggattcttctaaatcttctatgaagagtgttggttataaacaagtctcagattatttagaaggaaatttatctttagatgaaatggtgtttagggcagtgacagctacaagacaacttgctaaaagacaaatgacctggcttaggagttggaatggagtaatatggcttgaagaagaatcagataataatttagacatagttttggaaaccatcaattaat

SEQ ID NO: 244651 - DNA, 730 bp, Unknown
  Bacterial polypeptide expressing nucleotide sequence isolated from the Sargasso Sea
ggatatgtagatggtagtaataggtataatgttgaaaaatggtgccaagatgcaagtcaggtaatcaaatcattaaataaaaaaaatatcaatccaatatttgttggaggcacaggattatatattgatacattaataaatggaatcgcttcaattccatcagttccagaaagcataagaaatgactcaaaaaatttattacagaaagtaggaaaagaagaattctataaaattgtaaaaaaaattgatgaagattctataaaattaatttttccaaatgatatacaaagactcagaaggatctgggaagtatttaattattcaaataaaaaatttagtgaatggaaaaaaaataaaaataaaaaatttattacttctttagattataaaattcttttatttttaccagatagaaaaaagaattatgaaagagttaataaaagagttttaactatgataaaaagtggagctattgaggagattgaaaatttattgaagcttaattataataaagatttaccaatcatgcgcgcacatggtgttccagaaatttcagcctatttaaaaaataaaataactttagaggattgcattaaaaaaattcaacttgtaacaaggcactacgttaagaggcaaaatacctggtggaattcttcaaatttacaaatttttaaaaaaattacagaatttcctgataatttagataaaaacttgattaatttagggtaat

SEQ ID NO: 244652 - DNA, 643 bp, Unknown
  Bacterial polypeptide expressing nucleotide sequence isolated from the Sargasso Sea
tcctttgcttgttggaggaacaatgatgtacttcaatgcattatttaaaggaataaatgatataccagaaggaaatgaagctatcagggaagagcttcaacgagagcttgataacagaggcgtggaaaaactatttaatgatttgaaagaaatagatccagaatcagctaaaactataaaagaaaatgataaacagagaataataagagctctagaggtcttcaaaatatcaggtaagaggatttctgatttcaagaaagaagccgtagaaaatatctttgaagaatttgagtttataaatataggtatttttccaaatgatagagagattcttcaagcaaggataagagaaagaatagtagaaatgatcaatacgggcctaattaaagaagctcaagaaataattaaattagaaaatatcgcaaaaaaccatccagctctcaattcaattaattataaagaggcaattcaagtaattaatggagaattagatgccagtgagcttgaagagaagtgcgtcatttccacaagacaattgataaaaagacaacttacttggatgaggagttttaatttctcaaaaacttttgacactaactcagctattgaaattgaaaaatacttggaagagcaaattttttaa

SEQ ID NO: 244653 - DNA, 788 bp, Unknown
  Bacterial polypeptide expressing nucleotide sequence isolated from the Sargasso Sea
aaatatattaactgcaagaccatcaaaaaaagatctcttagaagcaaaacatgaattatatggttacgtagatgctgcagttagatacaatgtatcaaattggtgtaatgatgttttaaagattataaaaaataatgaagaaaataatcttccttcaattatagttggtggttctggcatgtatattgactcacttttaaatggacttattcctatacctccaattccagaaaaatataaaaatgattctttgtctttgttgaatgaaattggtattaaaaaatttaaagaagttattaataattttgattctgaatctttatctaaaatctctttacaagattcttcaagaatgagaagagtatgggaggtctatcaatctactggaaaaaaatatagttattggataaataaaaaaaataaaatttttcttaaaaatttttctaataaaatttttttatttattcctccaagagatgatatttataaaaaaataaatttacgttttaatacaatgataaatgaaggagctatagaagaagttaaaaaattaatttcacttaatctagatgtctcattacctataatgaaagctcacggagtacctgagattacaaattatttatgtggaaaaattgatcttgaagaatgtattaaaaaaagtcagcaagtaacacgcaattacgccaaacgtcagttaacttggtggaggtcttcaagactatctataaataaggtttttgatcaatttccaaatgaaattgatgaaaaattgatcaaaatatagt

SEQ ID NO: 244654 - DNA, 575 bp, Unknown
  Bacterial polypeptide expressing nucleotide sequence isolated from the Sargasso Sea
attgagtaattcaattttttttataactggaccaacaggtattggaaagtctaatcttgcaataaaactatccaagaaaattaacggcgaaattttaaatgcagatagtatgcaaatctacaaagagttaaagattataaccgctagaccaacagacactgacaataaattagttaatcatcacctttatggttacgtaagtggtgccgaaagatacaatgtagaaaaatggtgtaatgatgcttcaaatataattaataaattgcttaaagacaataaaacgccaattttagttggaggatcagggctatatattgaaactttaattaatggaattgcttcaataccaactatcccagagtctattaaaaaagaaacgaatgatttatttaacaaatctggaatagaagagttttataatttaatcaaaaaaatagattatgaatctttaaaaaaaatttcaaaaaatgatgctcaaagattaaaacgaatatgggaagtttataagcatactggaaaaaaactgagtctttggaaaaaaaataataataaaaaatttttgaatattgaaaatt

SEQ ID NO: 244655 - DNA, 752 bp, Unknown
  Bacterial polypeptide expressing nucleotide sequence isolated from the Sargasso Sea
aatgtcaaaaataaaagtcttggtgatagcggggccgactacaagtggaaagtcagaattagccgtggcgatagccgagcagttcggtggagtggtaataaatggagattctatgcagctgtacgatggtcttaatatcatatcggctgcaccggataaattattacgtaaaaaagtaccacacaaattgtttggggtcagagatcccgcttcaccatgttctgctgggcaatgggtggaattagtacaaaaagaaattttgaatgcacaatcctcgaatttgctcccgatcatagttggtggcactggaatgtatcttaaggcattgatttctggtctagtaaaattaccgccaatttcagagaaaatccgcagaacactgagaaatcgactcaaagttgaaggtcctgctgcgcttcacgctgagctatcacaaattgatcctgtttcggcaaataagctagctgtttctgatgggcaaagagttttacgcggacttgaagtttatttgatgaccggaaaaacgttaggtcaatggcaaatggacaaaacgggtcagaatacgacagaagggtttacttttaagtcgctattgataagtcctcctagaaaattattatatcaaaattgtaactctcgttttgaaaaaatgattaaatgcggggtaatagaagaggtaagggctttaagtaaaaagaatttatctccaaacctgcctgctatggaagcgctaggggtacccgaaataattc

SEQ ID NO: 244656 - DNA, 257 bp, Unknown
  Bacterial polypeptide expressing nucleotide sequence isolated from the Sargasso Sea
aatgaaaaaaatccttactataattggtccgacagctagtgggaaaacgtctttagcagttcacctttcaaaaaaattaaatgctgagattgtaggtttagactccaggcagctatatcgaggaatgtctataggaacagcacaacctacaattaaagaaatgggaggggtcaaacatcatttaattggttttcaagacccatcagaccctatctcagctggtcagtatgcaaaacttatcactgataaagtaaaaa

SEQ ID NO: 244657 - DNA, 306 bp, Unknown
  Bacterial polypeptide expressing nucleotide sequence isolated from the Sargasso Sea
gagctgagttaattaagagaattgaggatcgaacacaagatatgattaaaaatggagcagtttcagaggttaaaaaatttataaaattaaaggttccaaaagttaaaactgcctctaaggctatcggaattgcagaaattagagaatatctcaagaaaaaaattgagatatcagaggtaattcaaaaaatatcaataaagactaggcaatatgcaaagagacaatctacttggggcagaggtaatatgatggattggaacaaaataaagtcagaggacctaaataaatttttaaaaaaaatttaga

SEQ ID NO: 244658 - DNA, 746 bp, Unknown
  Bacterial polypeptide expressing nucleotide sequence isolated from the Sargasso Sea
aatgagtcaacaattaataaaaaaaatttgtaaagatatagtttctataaataatgataccggacctgttataattggtattgacgggccaacggcagtaggtaaaacttttttagcaaaaaatttaaaatctaaattaaaaagtaagtttaaatccatttggatatgtcaattggattggactttaaaaagtagaaattacagatcaagttctttgaaagaatttagaagaaaaagaaataacttttattatgaggctcaagaccatatgagcttaaatataataagtgaaaatttaaaaaaaattaaaaatcataattttgataaaaaaaattttttaaaactaaagataagctctttgtacgatagacaaggttcttcaaaaaatgatcttacagttaaaacaacgatttataaaaatactctaattattgttgagggccattatacttctatcccaaccttaaatatcttaattgattacaatattttactattgggagataaaaaagaactgctaaatagaaaaataagcagagttaagcactatcgaagttcatctgacacgactgaatattttaatttaattgatataccgtcttttacaaaccacttaacgttatttcaaaataattataatttaataatagataataccctctatcgaaaacctattataaaaacaaatgactatgtaaaattttggatatcaagggtatttgacaaaaaatcattaaacaaaagta

SEQ ID NO: 244659 - DNA, 892 bp, Unknown
  Bacterial polypeptide expressing nucleotide sequence isolated from the Sargasso Sea
cagcaggaaaaacaaatctgcaataaaaacattcgactatcttccagtcgaaataattagcgtcgattctgtgatgatttataaaaaatgtgatattggttctgcaaaaccatcaaaagaaatattaaaacaataccctcatcatctggttgatgttgagagtctagataatatcttttctgtcgcagattttttaaatctagctaaagcattgattgaagagacacacgacaaaaataagatacctttttttgtaggtggatctatgatgtattttagatctttgttttatggcattcatgaattgccagggagagacctagaatatagaaaagaacttaatgaaataaaacaaaataagtcaaactcttatttattcaagatgcttaagggaattgaccctaattatgctgctgatattgatcataatgatgaaattagaataattagagctcttgagatatacaaaaactcaggaaaaaaattaagtgaaatttttagtaataatccaactaatggcataagagaaaaatatgaagttatacaatttggtattaaaacagacagagagatattacatgaaagaataaaagctagactccgtgaaatgattgatagtggtttaatagaagaagcagaaaatattttaaaagatttcaatattgcagatgatcatcccataagaaaagctgttaactataaacaatctattgaatatataaatggcaaatatccaaaagatattttgtttgataaagctttatatgcgacaagacaacttgcaaaaagacaagttacttggatgaaaagttgggacaactatataaatgtagatattgaagatatcaaaacgttgacaaataaggttaaaaattcattatcttcactttaa

SEQ ID NO: 244660 - DNA, 700 bp, Unknown
  Bacterial polypeptide expressing nucleotide sequence isolated from the Sargasso Sea
ttgactggacctactgcagctggtaaaactgaattagctttatcattagcttctaattttccaatagatatagtcaatgctgattcagcacaaatttatcgaggaatgaatattgggacagctaaatcatcaaaaagcattttaaatcgttatccccactatctcattgacataatagatcctgaggagtcttattcagcagggagttttgttcgagatgcatcatatcaaatagatgcctcaattaagaataatcgaatacctcttattgttggagggacaatgctttatttgaattctctttgtaatgggattgctcaactgccagaaaaaaatacggaaataagagaagagatagaaaaaaaagctcagaaacagggttggggagtgatctatgctgagttaaaaaaaattgacttatgtgcagcaaacaacattaataaaaatgataaacaaagaattcaacgagccctcgaggtttattatataacaggaaaaaagatctcagaattacaaaaaaaaacaacaccacaaaatgattatcaatttgaaattttttctctggaaaatattaatcgcgacgaactttattcaaaaattaataatagatttcttgatatgcttgaggctggttttgttgatgaggttcgtattttaagagaaagagaaggattatcatcccagcacatgtctatgcatt

SEQ ID NO: 244661 - DNA, 946 bp, Unknown
  Bacterial polypeptide expressing nucleotide sequence isolated from the Sargasso Sea
tttgacatctattaagacctctttagctataatcggccctacagcaagcggtaagtctagattagcgatagaaattgctaaaaaaataaaaggagagataattggacttgattcgagacaaatatataaagatatgtctattggaactgctcagttaaataaagaagaggaagaaggtattccacaccatttaattgggattaaatctcctgcagaaaggataagtgcaggtgcatacgcaaaattagtattagatgagataaaaaatattcaatctagaaatcatgtcccaataatatgtggtggttctggattatattttagatcattaatccaaggtatatttaaaggcagtaagtctgactatgatgttagaaaaaagcttgaaaatgaatatgataaattaggctcacatgtcctgatagatagattaaatcgtatcgatcctgattatgcgataagtgtccatccaaataataaaaaaaggttaattagggcattagagatttatgaaattacaggaaaatcgccaacagaaaattttaagcaacaatcaaaaaaaaataaaagcaaactgaaaattttatctatttatttagaatgggaaagaaaaatattaaatgatagaataaagaatagaacgagaatgatgttaaaagcgggttggattgatgaagtcgaaaaattgataagaaaatatcctaataagaatctgcagccattggattctatcggttatcgtgaaattgttttatggttaaatagtaatcgcactttagatgacttagaaaagatgatttatataaaaacacgacagttttctgttcgacaaatcaaatggtttaaaaaagaatcaatagattttactattaaaatgaataataattcatcaatagataaagtatctaataatattatagaaaaaataatgctttctttgtcttga

SEQ ID NO: 244662 - DNA, 919 bp, Unknown
  Bacterial polypeptide expressing nucleotide sequence isolated from the Sargasso Sea
tatgaataatatttttatccttataggacctactgcttctgggaaatctaatttagctatgttgttgatgagcaaattcccttttgaaataattaatgcagatttatattctacatataaaggtttaaatataggaacagcaaaacccttaaaagaagaattaaataaatataagcatcatttaattaatatccttgaacctgcaacggattataatgtttctcaatattgtaaagatgctaatgaatgtattaatgaaatattatcactaaataaaattccgctaattgttggcggcaccatgatgtatatatatcaattattaaacggactttctcatgagtatgatctgtctgatactgactcaaaacttatccaatatatacaaaaccaatatactaatgaacaaatagttaaggctatttctagttttaatcctgatttgactaacaaaattaatattaacgattcgtatcgtatagagaaactcttagagcgcttaatatcaaataagaataaaaaaaataattttaaaggtttatataaagaaaaaaatctaaaaattcatattatttttattactatcgatgatagagaacttttgagggaaaacataaagaaaagaacttctaatatgttgcatgatggactgattgatgaagttaaaaatctattatgtaaatttaatttaaataataagacccaatgtatgaaagcaattggatacaaggaaactttacagtttcttaataaagacattagtcttgaggagcttcattcatcaataacaattgccactcagcaacttgctaaacgtcaagtaacttggatgaataaattcaagattgattatcgattttcatatcctgagaataattaccatagtctttttaattatattaaaaaaatattaaattaa

SEQ ID NO: 244663 - DNA, 946 bp, Unknown
  Bacterial polypeptide expressing nucleotide sequence isolated from the Sargasso Sea
tatgttaaacaaagatagaaacatttacactattataggtccaactgcaatcggtaagtcgaaaattgccatagaccttgttgacaagtacccatttgaaataataagtcttgactcatcaatgatatttcgtgaaatgaatattggtactgataaaccagattcaaaaattttatcgaaatacaaacaccatcttattgatattattaatcctaatgagagttataatgttttccaatactgtaaagatattgatatcgcaatcaaagaaatttttaataataaaaaaattcctctattagtaggtggtacaatgatgtactttaatgcaattataaatggacttgataatattccaaataaagaatcatatgataaagaatttgtttctgatcttatgaacaaatattcatctaaaactatgcatgattgtctcaaagagattgatcatgattcttttttaagaatcaactgtaacgaccaacaaagaatagaacgagcaatagtagtatacgtatctacaggaaaatcattatcatcatattataaatctagtaataatatttttgaaaaatataattttattaacataaaattattcacggatgatcgaaattatattcataataaaataaaaatgagaacaatacgcatgtttgaaagaggattgattgatgaagtaaaagatattataaaaaaatatccaaatataagtaaatgtcagtcaatgaaatctattggttataagcatattatagaatatctaaataatgctttaaaaaaagatgatcttatcgatagatgtgtgtttgcaacaagacaattagcaaaaagacaatttacatggatgaagaattttagctatgagactgagatagaaatctcctccacaaaaaatatcctcaaaaaaattgagaaaaatttacatttagaaaaattaatgtag

SEQ ID NO: 244664 - DNA, 934 bp, Unknown
  Bacterial polypeptide expressing nucleotide sequence isolated from the Sargasso Sea
aatgaaaaaaatccttacaataattggcccaacagctagtgggaaaacgtccttagcagtttacctttcaaaaaaattaaacgctgagattataggtttggattccagacagctatatcgaggaatgcctataggaacagcacagcctacaaataaagaaatgggaggggtcaaacatcatttaattggttttcaagacccatcagaccctatctcagctggtcagtatgcaaaacttatcactgataaagtaaaaaatattcaagctaatggtaagaatccaattatctgtggtggtgcaggactttattatagggcaatatctagaggaatatttaaaggcagtgtttcagacccaataaatagagatcgattagaaaagctatatgataataacccatctgaattactagaccacctaaatgctattgacccggaatatgcggagcttgtacatattaataataaaaaacgtctagttagggcacttgagatatttgaagcgactggtaaagctccaagtgaacatttccatgaccaaaaatctaatccaacaacagaattagatttatttacagttaagattaaatggaaacgaaatatcttaaatgaacgaattcaaaatagagcagatgaaatgctcgaccaaggttggatagaagaggtggaaacattattgaagcaacaagacagagaaaaaaagctttacaccgcactaaattcaattgggtatagtcaaatccaatcatatcttaggaataagatgtcttatgaagatatgagggaagatatcataattaaaactagacaatttgccagaagacaggttaaatggtttgctaaagagccaatcgatttagcattagaaatggataacttggtcacaaaagaaattctacaaatacttcattgtttatttcaggtaattatataa

SEQ ID NO: 244665 - DNA, 1246 bp, Unknown
  Bacterial polypeptide expressing nucleotide sequence isolated from the Sargasso Sea
ttgatcagttctgggttggcaattcttttttcttgtctagtattagtgtttccggaggcttccaataattttctttcaagaagtaggcaatttgttgtcagtcggtttgatactttatttacagtttcgatgttatcttttactttcataattttctttttaatagtttccccttttggaaagattaaacttggtggaaaggattcatctccggaatttagtttcttatcatggatttgcatgctattcgcggcaggtgtgggtataggaatgactttttatggagccgctgaacctctctcttactatacaggggtctttggaacaccattaaatatcaccccagagactgaagaggcgaggagattagcttttagcgccacaatttttcattggggtataaatggttggtctgtatatgcaattataggactgtcacttgctttctttagttacaactggaaattgcctttaaccattcgttcaatattctttccccttcttggtaataaaatttggggatggcagggagacttaatagacataatagctgttttggctactttatttggtttagctacttccctaggattaggtgcgcaacaggcatcttctggtttattttatttatttaatttacccaataatttagctagtcaatctttggtcataatctttattacatctgtagcaattttttcagtttatagaggtcttgataaaggtgtacgtatattgagtaatttaaatatcgccttagctttattgttattactttttgtagttcttgctggaccaacatatcaaataatttcttcttatggggcgaacttaacagcatattttcaggatatagttccattaagtaactggaatagacctgaggatcgtgattggtatcaagattggacaatattttattgggcttggtggatttcttggtctccttttgttggaatgtttattgctcgtatctcaaaaggaagaacaataagagagtttttatctgtggttatgtttgtacctcttatattcaatttaatatggttctcttcatttggcggagcagcaatttttcaatttgaagaaggaataggtaggttaagtgagcccgtaagcaatatttccctcgtacttttttacatgttagataatttattcttacccacgttcacaagcttatttgctctctttatgttggttctcttttttgtgacctcatctgattcaggctctttagttattg

SEQ ID NO: 244666 - DNA, 740 bp, Unknown
  Bacterial polypeptide expressing nucleotide sequence isolated from the Sargasso Sea
gatgtctcaaaacaagaagattttctctattattggtcccacagctagtggtaaaactgaattagctctgaaacttgtgcgtgaattaccttttgagattataggtgttgactctgttcaaatttataaattctttgatgttggatcagcaaaaccaagtcaagaaattcttgattctattaagcatcatctagttgatgaaattgaccctcgaaacatttttactgtttggaatttctatgaggaagcactcacaagagttaattatatatttgaacaagacaaggttcctttgtttgtcgggggaagcatgatgtattttaagtgcctatttgatgggatcaatgatattcctgcttcaaatatagaaatacgcaatgatcttgagcatgaacttgaaaataatggtattgaaagtttatataaaagacttaaagatattgatccagactatgctcgaaacattaaacaaaaagatacgcaaagaatcataagagctttagatgtttttgaatcttcgcaaaaaaaaatgagtgaattacaagatttgcctaaattaaatctttttaaagatttttcttttgtaaacattgcattattgccgcaagataaaatgcatgcggaagaatcaattaggaaaagagtttatcaaatgtttaaagatggattagaagatgaagtaaaaaatcttataaaaagagatattcccagagatcatcccgcaatgaatgcaataaaat

SEQ ID NO: 244667 - DNA, 193 bp, Unknown
  Bacterial polypeptide expressing nucleotide sequence isolated from the Sargasso Sea
tatcgtcaggtatgtgaatatttagcaggagattacagtcttgatgatatgattgatagaggtattaattcaacaagacaactggctaaaagacaaatgacatggatgagaagctgggacaatataatttttctagagaataattcttctctctttacttcggtaaaggatttaattttaaaaaattcatgaa

SEQ ID NO: 244668 - DNA, 573 bp, Unknown
  Bacterial polypeptide expressing nucleotide sequence isolated from the Sargasso Sea
gactagtaaaaattccaagtacacccataaagattagaaatgaaataagactaatgcattcaaaagtaggtcaagataagttttataataaacttttaaaacttgacccaacttctagaaataaaataaatccaactgatccgcatagatctataagagcctatgaagtaaaattacataccaagaaatcaattcatgaatggtacaaaaatactaaatctaattttcaaaaaagtgatttttataaaatttatattgactttccccgtttggaattgattgagagaattaatctcagatctaaggaaatgattaaaaatggagcaattaaagaagtaaaaaattttatcaaattaaaggtcaaaaaagacaaaagtgttaataaggccattggtatcaatgaaatcagacaatatttaaatgatgaaaaagaattgcaagatattattgaaaatatatcaataaaaactaggcaatacgctaaaagacaaagtacatgggcaaggggcaatatgaaaagttggctcaaattaaaaccaaacgagttaaataattttttaaaaaaaatttaaa

SEQ ID NO: 244669 - DNA, 940 bp, Unknown
  Bacterial polypeptide expressing nucleotide sequence isolated from the Sargasso Sea
attgcagaatagcaagattaaaaagaaaataattactctgattggaccaactgcatgcaataaaacttctaatgcagttcatttaataaaaaaatttccaatttcaatcataggcgtagactcagttcaaatttataaaagatttaatattggatctgctaagcctcccaaagaaatccttgaaaaatacaagcatcacttagttgatagtgctgatccagaaaatattttttcagtaaaagatttttatgatcaggcctacagaattgtcatgcaagcgcattcaaataataggattcctttgcttgttgggggaacaatgatgtacttcaatgcactatttaagggaataaatgatatacctgaaggaaatgaagctatcagggaggagcttcagcgagagcttgataatcgaggagtggataaactatttaatgaattgaaagaaatagatccagagtcagctaaaactataaaggaaaatgataaacagagaataatgagggctctagaggtcttcaaaatatcaggtaagaagatttctgatttcaaaaaagaagatactgaaaatatctttgaagaatttgagtttataaatttaggaatttttccaagcgatagagagattcttcaagcaaggatacgagaaagaatagtagaaatgatcaacatgggcttaattaaagaagctcaagaaataattaaattagacaatatcgcaaaaaatcatccagctcttaattcaattaattacaaagaagcaattcaagtaattaatggagaattagatgccaatgagcttgaggagaagtgcgtcatttccactagacaattggtaaaaagacagcttacttggatgaggggttttaatttctcaaaaacttttgatatcaactcagctattgaaattgagaaatatttagaagagcaaattttttaa

SEQ ID NO: 244670 - DNA, 265 bp, Unknown
  Bacterial polypeptide expressing nucleotide sequence isolated from the Sargasso Sea
atgattaaatctggtgcaatcgaagaagtcaaaaaatttttaaaattaaaagtaagacatgataagacttctaataaagtaattggtattaaggagataaaggattttattgaaaaaaaatcaaattctgcagatttgattgaaaaaatttcaataaaaactagacaatacgccaaaagacaagcaacatggtccagaggtcaaatgaatgattggcaaaaaattaatccaaaagacctacgtaaatttttaaaaaaaatttaat

SEQ ID NO: 244671 - DNA, 265 bp, Unknown
  Bacterial polypeptide expressing nucleotide sequence isolated from the Sargasso Sea
gtttgctaaaggagccgttgaggaagttagacgatttaataaacttaaggtcaaaaaagaaaatagttctaataaagttattggaattaaagaaatatcaaattttttaaacaaaaagtgttctcttgatcagactaaggagttaattgctattaaaacaaggcaatatgccaagcgacaggcaacatgggccagaggtcaaatgggatcctgggaaaaaatcaatcctaaaaatttagctcttgctttaaaaaaattaaaataa

SEQ ID NO: 244672 - DNA, 359 bp, Unknown
  Bacterial polypeptide expressing nucleotide sequence isolated from the Sargasso Sea
tgttaaattgtgtcttttaccgcccaaagattttttagaaaaaaacataaaaaaaagatttaatgaaatgttaaaaaaaggagctttggaagaagtacgtaattatagagacaatgtttatacaccagcattttatttctcggtacatacgacaattggtatttcagaaatcttgtcatatctattaaaaaaaattagtttaaatgaatgtaaagacagggtgctaataagaactcgtcaatatgccaagaggcagtatacctggcaaagaggccagatgaaggattggaagcaatttagagatactaattatcttgatttaagaaaaaaaattctaagttatttatctaaaacttgac

SEQ ID NO: 244673 - DNA, 548 bp, Unknown
  Bacterial polypeptide expressing nucleotide sequence isolated from the Sargasso Sea
ccttaaaattagaaataagacaagaaacttacaaaaaaaaattggacaaaaaaaattttattcaaaacttttaaaactagatcccaatattaaaagcaaaataattgaaaccgattcccaaagatcaattagagcctatgaagtaaaatattatacaaaaaaatctttatatgattggtttaaaaatacaaaatcaaagtttcaaaatgagatattttttaaaatttacatcgattatcctagaaatgaattacttgagagaatagcttctagatcagcacaaatgttaaaagatggagcaattaatgaggttaaaagattttcgaaacttaaaattaagaaagataatagctcaaataaggtaattggtattgctgagattaaagaacatttagaaaaaaaattagatctcaaagatgttaacgagaaaattatgataaaaactagacaatacgctaaaaggcaaagcacttgggcacgaggtcagatgttgacttggaataaaattaaccccaaggacttaaaaaaatttttgaaaaaaatctaat

SEQ ID NO: 244674 - DNA, 904 bp, Unknown
  Bacterial polypeptide expressing nucleotide sequence isolated from the Sargasso Sea
gttgaattctactttaatatcaatttcaggtcccacagctgttgggaagaccttatttgccatagaattagcaaataagtttgataccgaaattatatcttttgattccagacaattttataaagaaatgtcaattggtactgctgttccaagtaaagatgagttagctcaagtaaaacatcattttattcaacataaatccattcatgatcaatataaagtaagtgattatatacatgatgttgatgaattgattaaaacattgttatcaaagaaaaaacacattatacttgtaggtggttctaacctatatttaaagtcaataatttatggtttggatgatattcctgaagtcccacttgaaattagaaataaattaaattttgaatttcaaactcatggaattaaatacattcaaaacttgctaaaaaaacttgatcctgagtattataacaaggttgataaactgaatcatagaagaattattagagcattagaggtttcgattttttcaaataaaccattctcctattttttaaaaggaactgtaaagaaaagatataatcaccactctattgttttaaatctagacagaaacatattatatgaaagaattaataatagagtagatcaaatgattgatcatggactaattgatgaagtaaaaaaactaaacttacataaaaatttaaacccattaaataccataggatataaagagatttttaaatacttaaatggtgaacttgatttagaaaaatcaattgaattaataaaaatgaatacgagaagatttgcaaaaaaacaattgacgtggcttaagaatgacggtgatcacttgtggttggatagctctagtaataaattgagtaatattgatttattatttcagaaactcttttaa

SEQ ID NO: 244675 - DNA, 508 bp, Unknown
  Bacterial polypeptide expressing nucleotide sequence isolated from the Sargasso Sea
ttgggtcaaaataaattttataagcaattattaaaactagatcctctatcaaaaaataaaattaatcctactgatacccagagatcaataagagcttttgaagttaaaaagtttacaaaaaaatctcttcatgattggtttaaaaacactaaatcaaattatttaaaagaggactttttcaaaatttatatcgattatccacgtgatgagttggttgaaagaatttatcaaagaactggaaagatgattaaaatgggtgctgtgaatgaggttaaaagatttttaaaactcaaaattaaaaaacaaatgactgcttacaaagcaatcggagtaaatgaaattcaggaatatttagataatgaaaaaaaaattgatgaaatcaaagaaaaaatatcaataaaaactaggcaatacgccaaaaggcaaagcacatgggctcgaggacacatgagtgattgggttaaacttaagccatctgagataaacaaatttttaaaaaaaatttaaa

SEQ ID NO: 244676 - DNA, 829 bp, Unknown
  Bacterial polypeptide expressing nucleotide sequence isolated from the Sargasso Sea
ttgctttattttcttacagggattactgcatcaggaaaatcaagacttgctcacgaaattgctattgaaagaaactttgatattatttccctcgattcaatggcagtttacaaggggctggatattctaactgctaaaccaaatgatgtaatgaggtcacaggttctatattacggtcttgatatagctgaacctgatcaaaatttttctgtagtagattatctcaattacttaatcgagatggaaattcctgaaaaatcctttgaaaaagattatcttgtcgttggtggtaccggtttgtattttcgttcacttattaatagttttgaatttagacctactgatccagctataagatctgaattagaacaattgaatgttgatcaattactaaagttccatgaaatgtatgaaattaaaacacctgatgttgaaattaataaaaggagacttatacgcaatattgaagattcaattttagaagatgtaaaatatgtttttccgccaataaacattccagaaaatattgttggtatattttggaatcatcctgattataaagacagaattagtaaacgaactgatgaaatgatgaaacaaggcgtcatagatgaaatgaattctattactaatccttcaaaaactgtattacaagctataggaatgaacttaagtaatgaccttgcagaaaatattaatttaaaaacgaacaggttagctaaaaaacaacttacatggtttaaacaagaagatagaataaaaattgttgacaccgatgatgaaaaagttgttcgtaaagaaatggaaatgattatagatggtaaatgaa

SEQ ID NO: 244677 - DNA, 166 bp, Unknown
  Bacterial polypeptide expressing nucleotide sequence isolated from the Sargasso Sea
gatgaataaaagagatgtattggtaatctttggtcccacagcaagtggaaagtctaagcttgcagttcaaattgcttcaaaacaaaaatcagcaattattaattcagatagtcttcaggtatataaagaacttaagatactaaccgatagaccccatgaagagata

SEQ ID NO: 244678 - DNA, 571 bp, Unknown
  Bacterial polypeptide expressing nucleotide sequence isolated from the Sargasso Sea
tgtaagaattccaaaaatatctgcaaaaaaaagaaaaatagtatcaggtcttcaaaagaagttaggacaaattaacttctataaaaagttaattaagcttgatccaaaaataaaaaaaatagtgaaccaaaatgactatcaaagatcaataagagcttacgaggtcaaaaaatttacaagaaaatcaatagttgattggcacaaagatacaaagccactttttatgaaagatacttttgtaaagctttatattgactgctcaaaggatttacttttagagagaattaaactgagagcagaaaaaatgctcccatatggaatgcatgaagttaaaaaaattagagggatcaaaataccaaaaggttacagttctacaaaaataattgggttcaccgaaattaaacgcctattagataaaaagcaggacaaggaacaaacagtagagcagatagtcataaaaacaaggcaatatgccaaaagacaggccacatgggccagagggaagatgaagaattggaaaactatcaacactctggataaaaaaatctcattaaaaaaattatttaattaa

SEQ ID NO: 244679 - DNA, 574 bp, Unknown
  Bacterial polypeptide expressing nucleotide sequence isolated from the Sargasso Sea
tttgtctatttattttattgttggtcctacggcaattggaaaatcagatttagcattaagaatagcccaacatattaatggagaaatcattaatgcagacagcatgcaagtatataaaaatttaaatatacttacagctaggcctcagaaacaagatttaaaaaaaattaaacatcatttgtatggccacattgaaggctttaataggtacaatgttgctcattggtgtaatgaatctttaaagataattaaaaaaaataataataaaaaaccattaatttttgttggcggaaccggtatgtatattgataaacttataaatggattatttaatattccaacaatccctgaaaaattaaaaaaacaatctgaaaaagaattaaataaattaggaattaataaattttacgaagaagtaataaaagtagataaagaagctacaataaaaataaattccaatgactcaatcagattaagaagaatttgggaaatatttatgcatactaagattccaatgagtacttggacaaaaaaaaatgaaaaaaaatttatacaaaatgatgactactatctt

SEQ ID NO: 244680 - DNA, 474 bp, Unknown
  Bacterial polypeptide expressing nucleotide sequence isolated from the Sargasso Sea
aacttgacccaacttctagaaataaaataaatccaactgatccgcatagatccataagagcctatgaagtaaaattacataccaagaaatcaattcatgaatggtacaaaaatactaaatctaattttcaaaaaagtgatttttataaaatttatattgattttccccgtttggaattgattgagagaattaatctcagatctaaggaaatgattaaaaatggagcaattaaagaagtaaaaaattttatcaaattaaaggtgaaaaaagacaaaagtgttaacaaggccattggtatcaatgaaatcagacaatatttaaataatgaaaaagaattgcaagatattattgaaaatatatcaataaaaactaggcaatacgctaaaagacaaagcacatgggcaagaggcaatatggatagttggctcaaattaaaaccgaacgagttaaataattttttaaaaaaaatttaaa

SEQ ID NO: 244681 - DNA, 829 bp, Unknown
  Bacterial polypeptide expressing nucleotide sequence isolated from the Sargasso Sea
tttgttatactttctaactggtatgactgcttcaggtaagtcagcccttgcacacaaaatagctattgaaagaaatatagatataatttcacttgactcaatggcagtatataaaggtcttgatattttgactgataaacctactgatgtaatgcggtcacaggttttatattacggtattgatattgccgattctgatcaaaatttttcagttgttgattatcttaattatttaatagaaatggaaatacctgagaaatcttttgttaaagattttttggttgttggtggaactggtctttattttagatcattaattaatagcttcgaatttagaccaactgatccggcaataaggtctgaattagaattacttaacgttgatcaattattaaaatttcataaactttatgatattgatccacctgaaacagaaattaataaaagacgtttgattagaaatattgaaaattctattcttgaggatgttaaatatatctttccacctataaatattcctgaaaagatagttggggtattttggcatcatcctgattatttgaagagaataaaagataggacctccaatatgttagatagaggattagttgatgaaatgaacaatattcaaaatccatctaaaacagttcttcaagctataggaatgaatttaagtagcgacttagaagaaaacattaatttaaaaactaatcggttagcaaaaaaacaactcacatggtttaaacaagaagatagaataaaaattattgaaactaatgaagaacttgttgttagggatgaattggaaagaatcatagatgaaaaatga

SEQ ID NO: 244682 - DNA, 334 bp, Unknown
  Bacterial polypeptide expressing nucleotide sequence isolated from the Sargasso Sea
ttttttaaaatttatattgattttccaagagctgagttaattaagagaattgaggatcgaacacgagatatgattaaaaatggagcagtttcagaggttaaaaaatttataaaattaaaggttccaaaagttaaaactgcctctaaggctatcggaattgcagaaattagagaatatcttaaaaaaaaaattgagatatcagaggtaattcaaaaaatatcaataaagactaggcaatatgcaaagagacaatctacttggggcagaggtaatatgatggattggaacaaaataaagtcagaggacctaaataaatttttaaaaaaaatttaga

SEQ ID NO: 244683 - DNA, 535 bp, Unknown
  Bacterial polypeptide expressing nucleotide sequence isolated from the Sargasso Sea
tttgcataaattaataggccagaaaaaattttatgaaagattaatcaaattagatcctatttcaaaaaacaaaatttcttcaaccgacactcaacgaacacttagagcatatgaggtaaaaaaatatacaaaaaaatcgatattcgactgggccaaaaaaacaaaacctttatttgaaaagcatgtttttaaaaaattttttataaatacccctaaaaatcaactattaaaaaatattgagttaaggactcaagaaatgattgataaaaagtgtataaatgaggttataaggtttaaaaaaagaaggttaaaaaaatcactttcaccaaacaaaataattggagttcaagaaattctgagatttttgaaaggtgaactagatctaaaaagtctcttggaactaataaatattaaaacaagacaatacgcaaaaagacaaaaaacatggtctagagctcatatgagtgattggcacatggtatattcaagcaattcttctactcttttaaaaaaaattttaaatctcgttagctaa

SEQ ID NO: 244684 - DNA, 345 bp, Unknown
  Bacterial polypeptide expressing nucleotide sequence isolated from the Sargasso Sea
gtttacacgaacgcatcgccgagcgtttccgtattattgtggccgatgggtttctcgacgaggtaaaagcgctgcgtgcccgtggtgatcttgataagaatatgccgtccatccgttgcgttggatatcgtcaggcgtgggactatctggatggtgaatacgactacgacgagatgatagaacggggcattattgcgacgcgccaactggccaaacgtcagatcacctggctgcgtagctggcccgatcttcattggctggataccgatgatccggatattgtcagaaataccttgaaaatactcagcaccagcgccatatttagccgtgagaacggctgctgac

SEQ ID NO: 244685 - DNA, 514 bp, Unknown
  Bacterial polypeptide expressing nucleotide sequence isolated from the Sargasso Sea
aatggaagcagttcctgcaattattggtccaacagctagcggaaaaactactctcgcaattcaattagcaaaaaaaattaatggtgaaataataggtttggactcgcgtcaaatctataaagatatctctattggcacagcccaacctaatccttctgaaaaaaagactattaaacaccacctgattggagtgaagcctataaatgaaacaataaatgctggagagtacgcaaagctagtaatgagatgtattgaaaaaataaaattaaaaaataaaattccaattatttgtggtggatctggtctttattttagagcaatctccagaggtatttttgaaagtagtcgctcagaattagatgttagaaaaaagctcgaattaaaatatgaaaatgaaggcggagtaagaatgctagatcgtttaaaagaattagattacgaatactcaaaacatatacatgctaataataagaaaagacttgttcgagccttggaaatatttgaaatgacagga

SEQ ID NO: 244686 - DNA, 528 bp, Unknown
  Bacterial polypeptide expressing nucleotide sequence isolated from the Sargasso Sea
ttataagggatcacaaaaatattggtcaaaaaaacttttacaaaaaattagtaaaattagatcctttggtaaaaaataaaattaaattagcagatgttcaaagaacaattagagcctatgaagtaaaattatttacaaaaaaatctatctatgagtggtttaaaaatacaaggtcgaaatataaaaaagaagaattttttaaaatatacattgattatccaaggaaagaattattagaaaaaatttatactagagtaataaaaatgataaaaactggagctgaaaaagaagtcaaaaattttttaaaattaaaaattggtcaaaacaagacatcaaataaagtaataggtataaatgagataagagattttattgagaaaaaatcaaacttgagtgaattaacagaaaaaatttcaataaaaactagacaatatgccaaaagacaagcaacttgggcaagaggacagatgtatgattggcaaaaagttaacccaaaagacttaggtaaatttctaaaaaaaatataat

SEQ ID NO: 244687 - DNA, 308 bp, Unknown
  Bacterial polypeptide expressing nucleotide sequence isolated from the Sargasso Sea
aaatatattgattgatcgaattaataagagagttgatagaatgtttgctagtgatgtcgaaaaagaggtaaaaaaatttaatgcattaaaagttaaaaaggattacagcgcaaataaagttataggaattagggaaattagcgaatatttaaaaaaaaaagcaacattattagaaacaaaagaaaaaattagtataaaaactagacaatatgcaaaaaggcaatccacatggtcccgcaagcatatgagctcttggcagtttatagatccacttaatgtagctttgacaagaaaattttttaaataaa

SEQ ID NO: 244688 - DNA, 934 bp, Unknown
  Bacterial polypeptide expressing nucleotide sequence isolated from the Sargasso Sea
atggataaaatcattacaattattggccctactgcaagtggaaaaacatctctagcaattcaattatcaaaagagttggagggtgaagtaattagtctggactcaaggcagatatataagggaatgggaatagggactgcgcaaccaacaattgaagaaatgatgggagtcaagcaccatttgattggatgcattcatccaaaggagccagtatctgcaggtagatatgcagagctagttatcgataaagtagcgcttgttcaaaaaaatggtaaaataccaataatctgtggaggagcaggtctatattatagagcaataaagacaggaatatttagtgacagtattacagatgtgaatctcaggaatgaattagaaagttcctatgatgatgatccaaatgtattactaaaaaagttagaagaaatcgaccctgaatatgcaagtatagtacatattaataataaaaaaaggcttgttcgtgcattagagatatttggtacaactggcaaagcacctagtattaattatcaaaaccaaaaatcaaatcccactaaggttcttgatttattcaccattaggcttgactgggatagaaaaaatttaaataaaaggataaaccaaagattagactttatgttatcatcagggtggattgatgaagtaaatgatcttgtaaagtgtgaaagaaaagagaattcactttttcctgctctaaatacaattgggtatggacaaatcaaatcctttttaaaaaatgatattagttttgaaaaaatgaaggaaaatatttttataaaaactcgtcaatttgccaagcgacaaaaccaatggtttaacaatgagaatactgaactaaccattaatatggataatcttaaaattgatgagattatccaaatattatgtggcttagttaaagtaatgatataat

SEQ ID NO: 244689 - DNA, 85 bp, Unknown
  Bacterial polypeptide expressing nucleotide sequence isolated from the Sargasso Sea
gttgaattctactttaatatcaatttcaggtcccacagctgttgggaagaccttatttgcgatagaattagcaaaaaaagcttga

SEQ ID NO: 244690 - DNA, 409 bp, Unknown
  Bacterial polypeptide expressing nucleotide sequence isolated from the Sargasso Sea
actaaaaaatcattatttgattggattgaaaataccaaatctgattttgtaaactttgaaattaagaaaatatttatagaagtaccaagagacatgctgttaaaaaatatctttaaaaggacagaacttatgttcaaaaacgggtgtattcaagaggttcaaaaatttaatctattaaaattaaacaaatctttatctgctaataaattgatcggtgttcaagaaattaataggtatttaaatgggttgatttcattagatgaatgcaaagagcatgttaatatcaaaactaggcaatatgcaaaaagacaaaatacttgggccagaggccatatgaagaactggagtaagctgtattctaaagatttttctatacttttaaaaaaaactttaaaagttatcagctaaa

SEQ ID NO: 244691 - DNA, 168 bp, Unknown
  Bacterial polypeptide expressing nucleotide sequence isolated from the Sargasso Sea
ctataacacttaaaaatctaaaagatagagttctaatcagaactcggcaatatgccaaaaggcaatatacatggcaaagaggccagatgcaggattggaagcagttcactgacaccaattatcttgatttaagaaaaaaaattctaagttatttatctaaaacttgac

SEQ ID NO: 244692 - DNA, 175 bp, Unknown
  Bacterial polypeptide expressing nucleotide sequence isolated from the Sargasso Sea
aatgaaattaaagatttttttgaataaaaaaactaatttgaatgaagttaatgaaaaaataacaataaaaacaagacaatatgctaaaagacaaagtacttgggcgagaggccaaatgacgaattggcaaaaagtaaatccaaaagatataaaaaaaattttaaaaaaaatataa

SEQ ID NO: 244693 - DNA, 199 bp, Unknown
  Bacterial polypeptide expressing nucleotide sequence isolated from the Sargasso Sea
agcgctaacaaggccattggagttaatgaaattagagaatatttgaaaaaacaaaaaaatttgcatgatactaaagaaaaaatagccataaaaactagacaatacgctaaaagacaaagtacttgggctagaggcaacatgatgaactggatgaagctaaagccacaagacataaataattttttgaaaaaaatttaaa

SEQ ID NO: 244694 - DNA, 198 bp, Unknown
  Bacterial polypeptide expressing nucleotide sequence isolated from the Sargasso Sea
gtgccaacaaggccatcggagttaatgaaattagagaatatttaaaaaaacaaaaagatttgaacgatactaaagaaaaaatagccataaaaactagacaatacgccaaaagacaaagtacttgggctagaggtaacatgattagttggactaaattaaagccacaagacataaataattttttgaaaaaaatttaaa

SEQ ID NO: 244695 - DNA, 203 bp, Unknown
  Bacterial polypeptide expressing nucleotide sequence isolated from the Sargasso Sea
taaaagcgcaaacaaggccataggagttaatgaaattaaagaatatttaaaaaaccaaaaagatttgaactacattaaagaaaaaatagccataaaaactagacaatacgccaaaagacaaagtacttgggctagaggtaatatgatgagttggatgaaaataaagccacaagacttaaataaatttttgaaaaaaatttaaa

SEQ ID NO: 244696 - DNA, 236 bp, Unknown
  Bacterial polypeptide expressing nucleotide sequence isolated from the Sargasso Sea
taaaaacttacttaaattaagaattaaaaaagataagagtgttttaaaggccattggaattaatgagataaaagagtatctatatcaagacacacaattagacgagattaaagaaaaaatatcaataaaaactagacaatacgcaaaaagacagagtacttgggctcgaggcaatatgatgagctggaataagttaaagccacaagacttgaataaatttttaaaaaaattttaaa

SEQ ID NO: 244697 - DNA, 474 bp, Unknown
  Bacterial polypeptide expressing nucleotide sequence isolated from the Sargasso Sea
cttgggtaatcaatccaagccctcagctatatttctacttggacctactgcgtcaggcaaaactagatgggcaattgaaatcatagacaagtttccaaaaacatttgaattaatatctgttgactcagttcaagtctataagggttgcaatgttgggtctggtaaacctgatcaagatacgctgaaaaagtatccacattatttgatagatcactgttctgtaagcgaaatctataatgtagctgagttcatcaatgatgcctcaaaccttgcaaaaaaaattgttgatgacggaaaggttccattatttgttgggggcacaatgatgtatttcaaaagtctttttgagggcattcactcattgcctaatgccgattccgcattaagaaaaaagttagatgctgaactgaaagaaaatgggccaaacaaactgtttgatcaattggttaaattaaatccaacaaaagctagaga

SEQ ID NO: 244698 - DNA, 313 bp, Unknown
  Bacterial polypeptide expressing nucleotide sequence isolated from the Sargasso Sea
agacgttttgattccatgattgaggagggtttattggatgaagtttcaaaattaatcgaaaaaaaacttgtttcttatgaaagccattcgatgcagtcgatagggtaccgagaaatgattgatcacatccttggcaaaatgactctagatgatgcaatagaatctgcaaaaatatcgagcagaagatacgcaaaaagacaactgacatggttgagatcgttggacgatgaatataagcttgacccattggataagcaaaaattcaaaactatagaaggcatcataaataatcattttgaagataaagattgat

SEQ ID NO: 244699 - DNA, 882 bp, Unknown
  Bacterial polypeptide expressing nucleotide sequence isolated from the Sargasso Sea
tatggataaaatcattacaattgttggccccactgcaagtggaaaaacatccctagcaattcaactatcaaaagagctgggcagtgaggtaattagtctggactcaaggcagatatataagggaatgggaatagggactgcacaaccaacaattgaagaaatggggggaataaagcaccatttaattggatgtattcatccaaaggagccaatatctgcaggtagatatgcagagctagttatcaataaagtagcgcttgttcaacaaaatggtaaaataccaataatctgtggaggagcaggtctttactatagagcaataaagacaggaatatttagcgacagtactacagatgtggttctcagaaataaattagaaagttcctatgatgatgatccgaaattattactaaaaaagttagaagatatcgatcctgaatatgcaagtttagtgcatattaataataaaaaaaggcttgttcgtgcattagagatatttggcacaaccggtaaggcacccagtattaattatcaaaaccaaaagtctaatcctactaaggttcttgatttattcactattaggcttgactgggacagaaaaaatttaaatgatagaataaaccacagattggactttatgttatcatcagggtggattgaagaggtaaatgatcttatagagtatgaaaaaaaagaaaattcactatttcctgcactcaatacaattgggtatggacaaatccaatcatttttaaaaaatgagattagttttgaaaaaatgaaggaaaatatttttataaaaactcgtcagtttgctaagcgacaaaaccaatggtttaatagagaaaatactgaactaaccattaagatggatgatcttaa

SEQ ID NO: 244700 - DNA, 469 bp, Unknown
  Bacterial polypeptide expressing nucleotide sequence isolated from the Sargasso Sea
attgacaaattctattttttttattgtagggccaacaggaataggtaaatctgaatttggtattaatctctctaaatttattaatggtcaaatagtaaatgctgatagtatgcaaatttataaagaattaaatattttatcagctagaccaaatctagaagatcaaaacactataaagcatcatttgtatggatatattaacggcaaccatagatataatgtagaaaaatggtgtaatgacgcaaaaaaaattattaatttatcagtagaaaattttttttcaccaatttttattggcggtaccggtttatatattgatacttttctaaacggaattatttctattccaaatattcctgaatacataaaaaaagaagcaaatcaattatttaataatataggtttggatagtttttataatatagttaaaaaattagattatgagtctataaaaaatatatcaaaaaat

SEQ ID NO: 244701 - DNA, 172 bp, Unknown
  Bacterial polypeptide expressing nucleotide sequence isolated from the Sargasso Sea
atggaccttaagtccaaaatcattttaatttcaggaccaacagcaagtggcaaaacaaattttgcaataaaattagctaaaaaaattaatggagaaataatcaatgctgatagcatgcaaatttataaacaacttaaaattttaacagcaagacctaagtcaaatgaataaa

SEQ ID NO: 244702 - DNA, 556 bp, Unknown
  Bacterial polypeptide expressing nucleotide sequence isolated from the Sargasso Sea
gtaagtaaaagaaataggaataaagtaagaaatttacaaaaaaaaattggccaaaaaagtttttacaaaaaattaatcaaattagacccttcctgtaaaaataatattaacatcaacgatcaaaatagatctattagagcttatgaagtttatattcaaaccaataaatctttgtatacttggtttaaagatacaacaattcattttcataataaggacttcgagaaaatatttattgatatttcaagagatgaagttgtaaaaaatttatcaagcaggatagaaaaaatgatcaaagcaggagccatccaagaggtaaaaagatttaataaattaaaagtaaaaaagacgaatagctcatttaagataatagggataagagaaattaatgaactgaaacctgataagaccaatttaagtcttatcaaagaaaaaattactataaaaaccagacaatacgccaaaagacagatgacctgggcaagaggccatatgaaagactggtacagaattgctccgaacaatctaaattcttatctaaataagattagttaaa

SEQ ID NO: 244703 - DNA, 370 bp, Unknown
  Bacterial polypeptide expressing nucleotide sequence isolated from the Sargasso Sea
tatgtcttcatatccacctcatgtaataattttaattgggccaactgcaagtggcaaaacagaattagctattgaaattgcagaacattttaaaactaatattcacaatatcgattcaaggcaaatttataagtcaatggatattggaacagcaaagccatctaaaatccaacaaaaaaaaataaaacattttttaattgatattgaagaaccaatcaatccaataaatgtaaagcaatttcaagaaattgctcaacaatctattaaaggagaaattaaaaaaaataaattaccttttcttgttggaggaagtgggttatatatgaattcaataacaaaagggttttttgtaccagatgtccctcctcaa

SEQ ID NO: 244704 - DNA, 187 bp, Unknown
  Bacterial polypeptide expressing nucleotide sequence isolated from the Sargasso Sea
ttgtcaaaaaaaatacaaaacaagataatacttttatttggacctactgcatctggaaaatctaaactagctgtagatatagcaaccaagtttaacggagaaattttaaatgcagatagcatgcaggtttacaaagaaattaaaattttatctgcaagacctgaaaaaagtaaaattaaacatcatt

SEQ ID NO: 244705 - DNA, 835 bp, Unknown
  Bacterial polypeptide expressing nucleotide sequence isolated from the Sargasso Sea
aatgggtgtaattataaatgcagatagtatgcaagtatattcgaatctaaatatactaactgcaagaccatcaaaaaaagacctcttagaaacaaaacatgaattatatggttacgtagatgctgcagttagatacaatgtatcaaattggtgcaatgatgttttaaggattataaaaaataatgaaaaaaataatttcccttcaattatagttggaggatcaggaatgtatattgattcacttttaaatggacttattcctatacctccaattccagaaaaatataaaaataattctttgtctttgttgaatgaaattggtactaaaaaatttatagaaattattaataagtttgattctgaatctttatctaaaatctcttttcaagactcttcaagaatgagaagaatatgggaagtctatcaatctactggaagaaaatatagttattggataaataaaaagaataaaatttttcttaaaaatttttctaataaaatttttttatttattcctcctagagatgaaatttataaaaaaattaattctcgttttaatatgatgataaatgaaggggctatagaagaggttaaaaaattaatttcactgaatctagatgtgtctttacctataatgaaagctcacggagtacctgagattacaaattatttatgcggaaaaatagatcttgaagaatgtattaaaaaaagtcagcaagtaacacgtaactatgccaaacgtcagctaacttggtggcgatcttcaagactatctataaataaggtttttgatcaatttccaaatgaaattgatgaaaaattgatcaaaatatag

SEQ ID NO: 244706 - DNA, 244 bp, Unknown
  Bacterial polypeptide expressing nucleotide sequence isolated from the Sargasso Sea
tatggatttaaaatccaaaattattttaatttatggacctacagcatcaggaaaatctaattttgcaattaaactagcaaaaaaaatttcaggtcagatcataaatgctgatagcatgcaagtttataaagaattaaaagttttaacagcaagaccttttaaaaaagatcatcaaaacatcaaacatcatttatacggatttcaaaatgctaaaaaaaaatttttctacagggagattggcttt

SEQ ID NO: 244707 - DNA, 287 bp, Unknown
  Bacterial polypeptide expressing nucleotide sequence isolated from the Sargasso Sea
aatggatttgaaatccaagataattttaatttcaggacctacagcatctggaaaatcaagttttgcaattaaacttgcaaaaaaaattaaaggggaaattattaatgctgacagcatgcaagtatataagcaacttaaaattttatctgcaagacctggtcaaaaaaactatcaatcaataaaacatcatctttatggttttcaagatgcaaagaaaagtttttcaactggtgattggcttaaaattgcaaataaaaaaataagtgaagttaaaaaaagaaaaaaaa

SEQ ID NO: 244708 - DNA, 97 bp, Unknown
  Bacterial polypeptide expressing nucleotide sequence isolated from the Sargasso Sea
ttgcctccggccatttttctgatggggcccaccgcctctggtaaaaccgacctggccatggccctgtgtgaccggctgccctgcgagattatcagtg

SEQ ID NO: 244709 - DNA, 466 bp, Unknown
  Bacterial polypeptide expressing nucleotide sequence isolated from the Sargasso Sea
ttgactttatcattttatattattgcaggtcccacagctattggcaagtctgagtttgcaataaatttagctaaaaaaataaatggaaatattattaatgctgatagtatgcaagtttacaaagacttagaaattttaacagcaagacctagtaatcaagatacaaaaattattgatcatcatctttatggttatgtaagagcaaatgaaagatataatgtagagaagtggtgtaatgatgcaaggaataagattattgaatcaaaaaaaaataatgtagttccaatattagttggtggaacaggtctatacattgataaattaataaatgggatcagtgatattcctaaagtaccagagtatttaaaattagaatcagaaaatttaattaaaaaaaaaggtttaaattatttatgtagtttaattaaagaatttgattcaatttctttaagcaagataaatccaa

SEQ ID NO: 244710 - DNA, 316 bp, Unknown
  Bacterial polypeptide expressing nucleotide sequence isolated from the Sargasso Sea
agaaagcagaattaaaaaaaggttcgatcagatgttgcgagaaggggccatccaggaagctgaaaattttaaaaaaattcgagtgaactctataaattcttctaattttataattggtcttaaagaaatatcagaatttttgagtaaaaaaatttcactaaatgaacttaaagaaaaggtggttattagatcaagacaatacgccaagagacaacttacctggcaaagaggtcaaatgaaggattggaagggatttactgatacgaattatcttgatttaagaaaaaaaattctaagttatttatctaaaacttga

SEQ ID NO: 244711 - DNA, 757 bp, Unknown
  Bacterial polypeptide expressing nucleotide sequence isolated from the Sargasso Sea
attgagaaaaacaatatacttaatagctggtccaactgcttctggcaaatctcaatttgcagttgatttagcaaaaaaaataaatggtgttgcaataaattctgacagtatgcaggtgtataaaaatttagagatactgacagcacgaccaactacaaaagaaatgcaaaacatcgatcaccatttatatggttatgttgatggcaaggagagatacaatgttgaaaagtggtgtaatgatgctgctaaaattattcacgaaaatttagagagaaatttaaatccaatattagttggaggtacaggtttttatacttatacattaattaatggtttaattgatattccagcaatccctgaaagtattaagaatgaatcagaaaaaataattaatgaatttggtaaagattttttaataactcaaatacaaaaatttgatcctacatcccttaaagaagtaaattctaatgatactgtaagattaagaaggatctgggaagtttatgaatcaacaggcaaaaaatttagtgaatggaaattaaataaaaatagaaaatttatagaaaatcatgattttaaaataattttatttttaccaaatagagaaaaaaattatcaaattgttaattctcgatttatcaaaatgattaataacggagctattcaagaagttaaaaatttattagatcttaatctaaatgaatcattacctgtaatgcgagctcatggtgttccagaagtaataaaatttttaaga

SEQ ID NO: 244712 - DNA, 718 bp, Unknown
  Bacterial polypeptide expressing nucleotide sequence isolated from the Sargasso Sea
tattccgctgctgattttgtgagtgatgccgacgaattacttgataaagctaccaaagacgatcggcttcctattctggttggaggctcgatgctttacatcaaatgtctccgggacggtatatctagattgcccaagactgatccagaggtgcgtgcttatttagagcaaagagtggaacaaaatggttcgggcgaattatataaagaattgaaagctgctgatcctgaagcggctattaacattcatcctaataaccgacagcgggtaatgagagcaatggaagtgtttttggtcacaggaaagaatatttcgactttttggcttgaaaatcctgccaaaaatctccatgaacgacttggctacgaaataaagagtttagcgattgctccaactcaaagaagagacctggatcagaggattgaaaggcgttttcgttcaatgttggaagaagggtttcttgatgaggtgaggtctttaaggcaaatggacgggctgcatgagggtagctcctctatgcgatccgtaggctaccgccaggcatggaagcaccttgatggagtaacgaataaagatgagtttgctcaggaagcactttcggcaaccagattgcttgctaaaaaacagatgacgtggttgaggtcgtgggaaaatgtagagtttttcccgttatctgagggtgcggagctaacgaagcgtgctttggaggcagagtagc

SEQ ID NO: 244713 - DNA, 313 bp, Unknown
  Bacterial polypeptide expressing nucleotide sequence isolated from the Sargasso Sea
aatggacataaagtccaaaataattcttatcgctggaccaactgcatctggaaagacaaaatttgctgttcaattagcaaaaaaaattaatggagaaattattaatgctgatagtatgcaaatttataaagagtttaaaatcttaaccgctagaccaagtataaaagataaaaaaaatgttagacatcacttgtatggatttttgagtgttaaaaaaaatttttcaactggccaatggttaaaattagtaaagaaaaaaattacagaaattagagaaagaaaaaaaacccctatattagttggtggcactgga

SEQ ID NO: 244714 - DNA, 834 bp, Unknown
  Bacterial polypeptide expressing nucleotide sequence isolated from the Sargasso Sea
caaaaaatacgagggagagattattaacgcggatagccgccagatttatattggcatggacataggtacagctaagccaagacctcaagagatttctttggtcaaacatcatttatttagcataatcaaacctgatgaggattttagcgtatatgatttttccaaaatggctgaacccttaatatctagtataaatttgaaggggagtgtaccaattttagtgggaggtactggccagtatgtctggtctttgttagaaaactgggaactccttaatggaacaacagacttttccgtaagagaatctttagagaaaagattagaagaagaaggggttcaatctctcctagatgaattgcttgccaaagatccatcggttttattgaatatagacattaataatcctagaagggtgatacgagctttagaaaaaattaatttaggatataaaggatatactcctagggtaaaagatgcttctttacgagatgaatgtttgttaataggattaacctctaatagggaagacttgtatacaagggtcgatgaaagagttaataaaatgtttaaagaaggttggatcgaagaagtccaaactttgcaaaacaatggataccacaaagatctatcttctatgtctggaataggatatcaggagatatccttactgttggaaccatcatcaaatatgtctgttgaagaatgtaaacttgcaatatgctctaggactcgtaaattgattagatctcaatataattggtttaagttgaaagactctagaataaagtggtttgatattggggtattgtcagaagaatatgttgttgatgaaat

SEQ ID NO: 244715 - DNA, 536 bp, Unknown
  Bacterial polypeptide expressing nucleotide sequence isolated from the Sargasso Sea
attgaataaaacaatttactttataactggaccaactgctattggtaaatctaagtttgctattaatttatctaagcatattaatggagaaatcataaatgctgatagtatgcaaatatacaaagagctaaatatattatcagcaagaccatccaaatctgatcttaaagaagtgcgtcatcatctatatggttatgttatgggcaatgaaagatttaatgttgaaaaatggtgtaacaatgctgcagcaaaaattaattctcttaataaaaaaaatgttacaccagtatttgttggaggcacgggattatatattgataaattaattaatggaatctctagtattccaagtattcctgaaaaattaaaagatgaatctaataatttatttgataaaattggttcaaaaaatttttttaaattagttaatgaattagataaagaagcaacaaataatatttctccaaatgactcccaaagattaaaaagaatttgggaagtttttcatcatacaaacaaaaaatttagttattgga

SEQ ID NO: 244716 - DNA, 267 bp, Unknown
  Bacterial polypeptide expressing nucleotide sequence isolated from the Sargasso Sea
tatggattttaaatccaaaattattttaatttatggacctactgcttcaggaaaatctaaatttgcaacaaaattagctaaaaaaattaagggacagattataaatgccgatagtatgcaagtttataaagaattaaagattttaaacggcagaccatttaaaaaagaccagcaagaaataaaacatcatttatatggatttcaaagtggaaaaaaaaatttctctacaggagattggcttaaactagttaatgacaaaattttaaa

SEQ ID NO: 244717 - DNA, 164 bp, Unknown
  Bacterial polypeptide expressing nucleotide sequence isolated from the Sargasso Sea
aatggacataaagtccaaaatttttttaatagctggaccaactgcatctggtaaatcttcttttgcaataaaattggcaaaaaaaataaatggagaaataattaatgcagatagcatgcaagtttacaaagaacttagtgttttaactgctaggctaaaaaaaa

SEQ ID NO: 244718 - DNA, 434 bp, Unknown
  Bacterial polypeptide expressing nucleotide sequence isolated from the Sargasso Sea
aatggaaattgatcaaaaaattgtcgtagttgctggtccaactggaagcggaaaaagtgaagtggcaattagtttagcaaaggaatttaacggggaactgatttgttctgattcaatgcaggtttatcgacaaatggatgtgggaactgcgaaaccttctttgcaggaacagaatttaattccacatcatcagctggatcttattaatccagatgaaaattactcagcaggacagtatgcaagagatacttcaagaattatcaagaaaattctagaacgtgggcgcctgccaatacttgtaggtggaacaggtttgtattacagggcactcatgtatggaatcagtaaaatacctcctgttccggaaagtctgcgtaaagaaataacagtctggcagcaagagcatggtactcaatattgccacaagttgctgc

SEQ ID NO: 244719 - DNA, 187 bp, Unknown
  Bacterial polypeptide expressing nucleotide sequence isolated from the Sargasso Sea
catggatttaaaatccaagattatattaatttttggaccaactgcatctggtaaatcaagttttgctattaaacttgctaaaaaagttaatggtgaaatcataaatgcagacagtatgcaagtttataagcaattaaagatactttctgcaagaccagattacaacgaatacaaaaaaataaaacat

SEQ ID NO: 244720 - DNA, 220 bp, Unknown
  Bacterial polypeptide expressing nucleotide sequence isolated from the Sargasso Sea
aatggaccttaagtccaaaataattttaatatctgggccaactgcatctggaaaatcaaatttctctattcaacttgctaaaaaaattaaaggtgaaattattaatgctgatagtatgcaagtttataaagaatttaaaattttaactgcaagaccaataaaaagacaatatttaaaaattaatcatcatttgtatggttttcaaagtgtgagaagaaaa

SEQ ID NO: 244721 - DNA, 478 bp, Unknown
  Bacterial polypeptide expressing nucleotide sequence isolated from the Sargasso Sea
ggaattagcctatctggtggaccaagcaggccttgagattccccagtttaatcgtcgtcgtgcaatgcgtgccttggaaattgcccattttggtcaggatttggaaaatcaagagagtctatatgaaccgctgattatctgcttggatgatgagcgcagtcaattatatgaacgtatcaatcaccgagtggacctgatgtttgaagctggacttctagacgaagccaagtggttgtttgaccattatccagatgtgcaggctgctaaagggattggttacaaggaactctttccttattttcgtggagagcagaccttggaagaagccagtgagagtctcaaacaggcgactcgtcgttttgccaagcgtcagttgacctggttccgtaatcgcatgcaggtgaccttttatcagattggagaatctggtgtgcaagaccgcattttaagccagatagaggagtttttagatgattga

SEQ ID NO: 244722 - DNA, 784 bp, Unknown
  Bacterial polypeptide expressing nucleotide sequence isolated from the Sargasso Sea
ggaataggaaaatcaaaatttgctttggatttagcaaaattattaaacggtgtgattattaattctgactctattcaagtatacaaagatttgaggatactctcatcaagaccaagtcagaaagaagaaaaaataattgaacattatttatacggttttttaaatattaatgaaaaattttctgttggcaagtggctagaattactaaataaaactttagaaaatattaaaaaaaataataaaatacctattcttgtaggaggaacaggcttatatattcaagctgcaattagaggaatatctccaattcctgaaattagagatgaaattaaaaaagaaggaaagttattaatgaaaaaaataggagttgataagtttaaaacctatttagaaaaaattgatcctgactatgttaagtcaaaaaatgatgttcaaagattgttaagaacttataatgtttttttttctacaggtaagactttaactgaatggcataaattgccaaatcatggtggagtaaatagaaaaattttttcaattttattatcctcagatagaagtaatatttataggagatgtgatgaaagatttgatttgatgatgcacaatggtgctatgcaagaagcaaaaaaaatttggaatctaaatttagatcgaacactttcacctttaaaatctcttggactaagaaggcttcttgaatattttgatggacaattatgcttagaagaagcaattagattaagtaaaagagatactagacattatgtaaaaagacaaatca

SEQ ID NO: 244723 - DNA, 673 bp, Unknown
  Bacterial polypeptide expressing nucleotide sequence isolated from the Sargasso Sea
ttgggtaatcaatccaagccctcagctgtatttctacttggacccactgcgtcaggcaaaactagatgggcaattgaaatcatagataaatttccaaaaacatttgaattaatatctgttgactcggtgcaagtttataagggttgcaatgttggatctggtaaacccgatcaagatactttaaaaaagtatccgcattatttgatagatcactgttcagtatgcaaaatctataatgtagctgagtttatcaatgatgcctcaattcttacaaaaaaaattgttgatgatggaaaaattccattattagttgggggtacaatgatgtatttcaaaagtctttttgaaggtattcactctttgcctaatgctgattcggtattaagaaaaaagttacattctgaactgaatgaaaatgggccaaaaaaactgttcgatcaattagttaaattaaatccaacaaaagctagagaaatatcacccaatgataaccaaagactaataagggcaatagagatagagcttagtcaatacaatcaagacaaagactcggctatatcaggtatcagaaatgaatttaatattattcagattggaatattcccaaatcaaagggctgaattacatgaaagaattgagaaaaggcaaccaagtcttgcgaatgataaatgat

SEQ ID NO: 244724 - DNA, 742 bp, Unknown
  Bacterial polypeptide expressing nucleotide sequence isolated from the Sargasso Sea
aatgaatgatacatccaatagaataattgtaattcagggtccaacagctagtggtaaaacaagtgttgctgttcagttggcaaaacattttaatacggttgttttatcagctgattcaagacagttttataaagaaatgaccattggtacagcaaaaccaacacctgatgagatgcagggcataaagcattattttataaactctcattcaattcatgatgaggtatctgcttttagatatgcagaggaggccaaaaagcttttaataagtctttttaaaaaacattcaattgttatattggcaggaggatcaggtctatttatagaggctttatgtaaaggcttggatccaatcccacatgatcgaaagcttcatgataaaattgttgatgaattcaatgaaaatggaatagattcattattaatggaactaaaaaataaagaccctgaattttataataaaattgataaaaacaattcctacagagttattagatcaatagaagcaattaggttgtctggtaaaaccatgactgcattaagaaatgaaaaaaataacaaagaagaactgtttgatactatctatttcaccttacatccagaacgaaaatatttatacagaagaattaataagagggttgatttaatgttagaaaatgggcttttatatgaggtaaataatctatataagtataggcacttaaaatctttaaatacagttggttataaagaaatttttaat

SEQ ID NO: 244725 - DNA, 748 bp, Unknown
  Bacterial polypeptide expressing nucleotide sequence isolated from the Sargasso Sea
attgaaaaagactatctatgtaattgcaggtcctactgcgacagggaaatcagatttctcggttaagttagcaaaaaaattaaatggtgttgttatcaattctgatagtatgcaagtatacaaaaacttgaaaattctaacagctcgtccttcatcttcagaaactaaaaacattcctcattatctatatggatacgttgatggcaaagaacgttacaatgttgaaaagtggtgtaaagatgcagtagatattattcatcatacacatagaaataatttaacgccaatactagttggtggaactggtttatatattgatacattaattaatggtctaatagatattccaactatttctgaaaatattaaaaacgaatcagaaaaaataatccaagaatttggaaaagattatctaattagtcaaattaaaaattttgaccctaactcacttaaggaagtaaataataatgatacagtaagattaagaagaatatgggaggtttatgaggctactggcaaaaaacttagtgagtggagattaagtgacaataaaaaatttttagaaaattttaattacaaaatttttttatttttaccagatagaaaaaaaaattatgatatcgtaaattctcgatttattagtatgataaataaaggagctgttgaagaggtaaaacaattattagccttaaatttaaatagctcacttccaataatgagagcacacggcgttcctgagatagcaaaa

SEQ ID NO: 244726 - DNA, 322 bp, Unknown
  Bacterial polypeptide expressing nucleotide sequence isolated from the Sargasso Sea
aatggacttaaagtccaaaataattcttatttcaggaccaacagcatctggaaaatcaaaatttgctattcagcttgcaaaaaaaattaatggcgaagtaattaatgctgatagtatgcagatttataaagagcttaaaattcttacagcaagaccaaagctaaaagatataaaaattgtaaaacatcacttatatggatttaagagtgttaaagataattattcaactggcaattggttaagagatgctaaatcaaaaattaaaaatataaaaaaaaagaataaaattccaattcttgttggtggcactgggtttgtattt

SEQ ID NO: 244727 - DNA, 511 bp, Unknown
  Bacterial polypeptide expressing nucleotide sequence isolated from the Sargasso Sea
atgccttctttagcacctcatgtaatagttttaattggacccacagcaagtggcaaaacagaactggctattcaaattgcagaatattttcaaagtcatatccataatatcgactcaagacaaatttataaatatatggatattggaacagctaaaccatcaaaggatcagcaaaaaaaaataaagcattttttaattgatattgaagagcctagtaacccaatcaacgtaaaacaatttaaagaaattgctcaaaaatcaatccaaaatgaaattaaacaagaaaatattccatttcttgttggagggagtggtttgtatatgaactcaataacaagaggtttttttatgccagatgtccccccgcaaaataaattaagagtacagttagaagaacttggtcagagagaatgttgggcgcttctaaaaaaatgtgatccgcaatcaacaaaaacaatacattttgctgatcaaactagaacaataagagctttagaagttttttacgtga

SEQ ID NO: 244728 - DNA, 663 bp, Unknown
  Bacterial polypeptide expressing nucleotide sequence isolated from the Sargasso Sea
aaaaaacaattgctaataatttaactccaatattagtaggaggaactggtttatatattaatacattgatcaatggattagttgacattccctctatacctgagggaattaaaattcaatcggaaaaaataattgaaaaatttggtaaagattttttaattgatcaaattaaaaaagttgaccctgagtcatttcaggaaataaaccctaatgatacggtaaggttaagaagaatttgggaagtttttgaattaacaggaaaaaaatttagtgaatggaaattaaataataataaacaatttataaaaaactttagttttaaaatttttttatttttgcctgatagagaaaaaaattatcaaattgtgaactctagatttataaaaatgatgaaagaaggagcgatagaagaggtagaaaaattgttagagctaaatctgaatgattctttaccagtaatgagagctcatggagttccagaaattaaaaaatatttaagtaatgaaataagttatgaggagtgtattagtaaaggccagcaagttactcgaaactacgttaaacggcaacatacttggtggaattcatcaaatttacaaatttttcaaaaatttcataaatttccgactgaaattgatcttaattctattaaaatcgtctgat

SEQ ID NO: 244729 - DNA, 748 bp, Unknown
  Bacterial polypeptide expressing nucleotide sequence isolated from the Sargasso Sea
tcatcatctttatggatttgtaaaaggtgatgttagatttaatgttcaaaaatggtgtgaagaagcatcaaaaaaaattaattatttagttagtaaaaatataacacctattttagtagggggtacaggtctttacatagaatctttaattaatggaatagtttcaattccatctattccagaaaaagtaaaaatagaatcagaaaaaatgattttaaaaattggtaatgaaaatttttataatttagttaaagagcttgacagtgatgcaatgattaatattgcgcctaacgatattcaaagaataagaagaatatgggaagtaaatatttttaccaagaaaaaatttagtgactggaaaaaaaataaaaataaaaattttattaatttaaaaaattacaaaatattattatttcttccagatagaaaagaaaactatagaagagtagataatagaacacacttaatgatgcaagatggtgcgatagaggaagtcaaaaatttgcttaaattaaattataataatagtttaccaataatgaaagcgcatggagttcccgaaattcaatcttacctaaataatgacgtatcaattgaagaatgtatttctaaaatacagcaagtaacaagaaactatgtaaaaagacaacatacttggtggagatcttcaaatcttaatatttttaaaaaatttaatcaatttcctgatgaaattgacttaaaatccattaattttgagcaaaattga

SEQ ID NO: 244730 - DNA, 797 bp, Unknown
  Bacterial polypeptide expressing nucleotide sequence isolated from the Sargasso Sea
tgaaatcgttaatgcggatagcatgcaagtttacaaagaaataaaaattttatctgctagacctgatgaccacactatatcacaccacttgtatggttttatttctataaaaaaaaccttttccacaggtgaatggattaaaaaagctataaaaacaattaaaaaaattaataaaaaaggaaaaatagctttagtagttggtggtaccggcttgtattttaaggctttataccaaggtttttcagaaattcccaaagtcccaaaaccaaaaaaagattttaaattaaaaaaaaattatattttgaaatacccgaatatttttaaatatgtttctctaaatgataaacaaagattgcagagagcttttttagtttttaaacatacgggaaaacctctctggatgtggcaacaaaaaaacaaaagattctttaaatctagccagtttcacaaattttatctttgcccaccaaaaccagtgttagaaagtaggattaaaaaaagatttctatcaatgctaaaaaagggcgctattagagaagctgaaaattttaaaaaaattaatcctaattcactcaattcatcaaattttataattggtctcaaagaaatatcccaatttctaaataacgaaatttctttagaggagctaaaacagctagttcttattagatcaagacaatattcgaaaagacaatttacatggcagaggggccagatgaaggattggaaaggatttagtgataccaattatctagatttaaggaaaaaagttataagatatttatctaaaacttgac

SEQ ID NO: 244731 - DNA, 826 bp, Unknown
  Bacterial polypeptide expressing nucleotide sequence isolated from the Sargasso Sea
gctgatagtatgcagatttattcgtgagttaagtatattaactgcaagacctactttagaagattataaaaaagtaaatcaccatctttatggatttgtaaaaggcgatgtaagatttaatgttaaaaaatggtgtgaggaagtatcaaaaaaaattaattatctggttaataaaaatatcacccctattttagttggaggtacaggtctttacatagaatctttaattaatggaatagtttcaattccatctattccagaaaaagtaaaaatagaatcagataaaatgattttaaaaattggtaaggaaaatttttttaatttagttaaagagcttgatagtgatgcaatgattaatattgcatctaatgatattcaaagaataagaagaatatgggaagtaaatttttttactaagaaaaaatttagtgaatggaagaaaaataaaaataaaaattttattaatttaaaaaattacaaaatattattatttcttccagatagaaaagtaaactatagaagagtagataatagaacacatttgatgatggaagatggtgcgatagaggaagtcaaaaacttgcttaaattaaattatgataatagtttaccaataatgaaagctcacggagttcctgaaattcaatcttatcttaataatgaattatcaattcatgaatgtatttcaaaaattcagcaggtcacaagaaactatgtaaaaagacaacacacttggtggagatcttcaaatcttaatttttttaaaaaatttgatcaatttcctgatgaaattgacataaaatccattaatttagaccaaaattga

SEQ ID NO: 244732 - DNA, 283 bp, Unknown
  Bacterial polypeptide expressing nucleotide sequence isolated from the Sargasso Sea
aatggatttaaaatccaagataatattaatatctggacccacagcatcaggaaaatcaagttttgcaattaaagttgcaaaaaaagttgatggagagattattaatgcagatagcatgcaagtatacaaagagctcaaaattttatcagctagaccagatccaaaaaaatatcataaaataaaacatcacttatatggttttcataatgtaacaaaaaacttctctacaggtgattggcttaagctagtaattaaaaaaattaaggaagttcaaaaaagaaaa

SEQ ID NO: 244733 - DNA, 328 bp, Unknown
  Bacterial polypeptide expressing nucleotide sequence isolated from the Sargasso Sea
aatggatattgctcaaaaaattgtcgtagttgctggtccaacaggaagcggcaaaagtgaagtggcgattagtttagcagaggaatttaatggtgagctgatttgttctgattcaatgcaggtttatcgacaaatggatgtgggcactgccaaaccttctttaaaggaacagaaattaattccgcatcatcagttggacctaattaatccaaatgaaaattactcagcaggtcagtacgcaagggacacttcaggaattattaaaaaaattagagaacgcggacgtctgccgatattggtaggaggtactggtttgtattttagggca

SEQ ID NO: 244734 - DNA, 316 bp, Unknown
  Bacterial polypeptide expressing nucleotide sequence isolated from the Sargasso Sea
tatggacctaaagtccaaaataattttaatttcaggaccaacagcatcaggcaaatcaaaatttgcacttagcgtcgctaaaaaaatcaatggagaaatcattaatgccgacagtatgcaaatttttaaagaaataaagattttaaatgcaagaccaagtgcaaaagataaatcaaatatcaaacaccatttatatggatttttaagtgttaaaaaaaatttttcagtaggtgagtggttaaaaaaatgtcttataaaaatttcagaaataaaaaaaagaaaaaaggtaccaataatcgttggtggaactggcctt

SEQ ID NO: 244735 - DNA, 859 bp, Unknown
  Bacterial polypeptide expressing nucleotide sequence isolated from the Sargasso Sea
ttgttaaataatttaaaacaaactctctattttattgcaggcccaacttgtataggtaaatcatctttagcaattcgtattgcaaaaaaaattaacggtgtaatcataaatgcagatagcatgcaagtatatacaaatttaaatatactaactgcaagaccttcaaaaaaagatctcttagaaacaaaacatgaattatatggttatgtggatgctgcagttagatacaatgtatcaaattggtgtaatgatgttttaaagataataaaaaataatgaaaaaaatagctttccttcaattatagttggtggttcagggatgtatattgaatcacttttaaatggacttattcctataccttcaataccagaaaaatataaaaatgattctttgtctttgataaatgaagttggtgttaaaaaatttgtagaaattattaataagtttgattctgaatctttatctaaaatctctttacaagattcttcaagaatgagaagaatatgggaagtctatcaatctactgggaaaaaatatagttattggataaataaacataacaaaatttttcttaaaaatttttctagtaaaatttttttatttattcctccaagagaagatatttataaaaaaattaatttccgttttaatacaatgataaatgaaggagctatagaagaagttaaaaaattaatttcacttaatctagatgtttctttacctataatgaaagctcatggagtaccggagattatgaattatttatgtggaaaaatagatcttgatgaatgtattcaaaaaagtcagcaagtaacacgaaattatgccaaacgtcagctaacttggtggaggtcttcaa

SEQ ID NO: 244736 - DNA, 734 bp, Unknown
  Bacterial polypeptide expressing nucleotide sequence isolated from the Sargasso Sea
aatgggagaaattattaattctgatagcatgcagatatataatgaaataaaaattcttaatgctcgtcccaaaattaaagaaataaaaaatatcactcaccatctttatggtttccacagtgttaaaaaaaatttttcaactggcgattggctaaaaaaagtaattaaaataattaatcaaattcaaaaaaaaaataaaactccaatattagtcggaggaacaggattatattttaaaactattttgaatggtttagcaaaaattcctatgataccagttaaatatagaaataaaattagaaaacagcatttaaaaataggtcaaaaaaaattctataaaaatttaatcaaattagatcctttagctaaatcacaaataaacgctaacgactcgcaaagatcaattagagctttcgaggtcaaaaaatatacaaaaatttctttatttaagtggttcgaaaaaacaaagaaatattttaatgagaaagaatttttaaaaatctatatcgattgtcctaaggaagatttaatcagaagaatagacagaagagtaaatagtatgatttcagctggtgcagtgaatgaagtaaaaaaatttagaaggctaaaggttaataaggacaagtcatccaataagataatagggatttcagaaatttctaaatttttaaatggagagcaaaatattgatgttacaaaagtccaaatttccatgaaaacaagacaatatgcaa

SEQ ID NO: 244737 - DNA, 316 bp, Unknown
  Bacterial polypeptide expressing nucleotide sequence isolated from the Sargasso Sea
atggatcttaagtccaaaattatattaatttctggacctactgcttcaggaaaatcgagttttgcaattaagcttgccaaaaaagtaaatggtgaaattataaatgcagatagcatgcaagtttataagcaattaaagattatttcagcaagaccagatcaaaaaaaatatcaaaaaataagacatcacttatatggctttcatgatgtaaagaaaaatttttcaactggaaagtggttgaaattagtttttaaaaaaattaaagaaataaaaaaaagaaataaaacaccaatccttgtaggaggtacaggtttat

SEQ ID NO: 244738 - DNA, 362 bp, Unknown
  Bacterial polypeptide expressing nucleotide sequence isolated from the Sargasso Sea
tttgtcaaaaaaaattattctcttagccggccctacagcatcaggaaaatcaaaactagcaattcgtttagcaaaaaaattgaatggagaaatagtcaatgcagacagtatgcaggtatttaaagaatttaaaattttgtcctcacgtccagatttaagtgatactaaaaaaattaaacatcatctttatggagttatttcagctaaaagatatttttcagcaggagaatggctaaaagaagcaaaaaaaaaaattgataattgttcaaaaagaaaaaaagttccaatagttgtaggaggaacgggcctctattttaatacaatcactaaaggtattagtaaaattccaattatagatttaa

SEQ ID NO: 244739 - DNA, 304 bp, Unknown
  Bacterial polypeptide expressing nucleotide sequence isolated from the Sargasso Sea
atggacctaaagtccaaaataatattaatctcaggtccaactgcatcaggcaagtctaaagttgcattaaaaattgccaaaaagttaaatggagaaattattaatgcagatagtatgcaggtatataaagaattaaatatactgactgctagaccctcaaaaaccgatttgaataaaatcgatcactatttatatggttttaaaagtgttaaaaaagaattttcgtcgggtgagtggttaaaattagcaaaaaagaatattaaaaaaattagagacaaaaataaaataccaattttagttggtg

SEQ ID NO: 244740 - DNA, 774 bp, Unknown
  Bacterial polypeptide expressing nucleotide sequence isolated from the Sargasso Sea
ttcaaaaatatcctcataaattaattgatatcttagaacccaatgaaacttattccacttcaaaattccaagttgatgttattaattctataagcaatacatttcaagcagagaaggttcctgttcttgtcggcggaacaatgatgtactttcaccatttagttaatggtatttcaagattaccttcggtagatagccaaataagaaagaaggtcaaagaagagtttgaagagatgggtgtaaataaaatgtataaatatttggagaaaatagataaaagttcttctttaaaaattcatccaaatgatacgcaaaggattaaaagagctattgaagtttttttggcgacgggtaaagaattttctaaatggcaagctgaaaataaaaaagaaatcaataaggtaataacggaatctcgtttaattcaaattgccattaggcctaaagacaaagatatccatcgagaaattattgcacaaagatttaaaggaatgattaatgatggactaattcaagaggttgaaaatattctcgagcttcaaggtatgaatactaattctcaatctatgaaaagtgtaggttatcgtcaggtatgtgaatatttatcaggagatagcagccttgatgatatgattgatagaggtattaattcaacgagacaacttgctaaaagacaaatgacatggatgagaagctgggataacttaattattctagaaaataattcttctctctctaattctttaaaggatttaattttaaataatttatgaa

SEQ ID NO: 244741 - DNA, 651 bp, Unknown
  Bacterial polypeptide expressing nucleotide sequence isolated from the Sargasso Sea
taaataatataactcctattttagttggaggtacaggtctttacatagaatctttaattaatggaatattccaatttccatctattccagaaaaactaaaaatagaatcagaaaaaatgattttaaaaattggtaaggaaaatttttataatttagttaaagaacttgacagtgatgcaatgattaatattgcgcctaacgatattcaaagaataagaagaatatgggaagtaaatttttttactaacaaaaaatttagtgactggaaaaaaagtaaaaataaaaattttattaatttaaaaaattacaaaatattattatttcttccagatagaaaagaaaactatagaagagtagatcatagaacacacttaatgatggaagatggtgcgatagaggaagtcaaaaatttacttaaattaaattataataacagcttaccaataatgaaagctcacggagttcctgaaattcaatcttatattaataacgaagtatcaattgaggaatgtatttctaaaatacagcaagtaacaagaaactatgtaaaaagacaacatacttggtggagatcttcaaatcttaatatttttaaaaaatttaatcaatttccggatgaaattgacttaaaatccattaatttagattaaa

SEQ ID NO: 244742 - DNA, 280 bp, Unknown
  Bacterial polypeptide expressing nucleotide sequence isolated from the Sargasso Sea
tatgtcttcatatccaccccatgtaataattttaattgggcctactgcaagtggcaaaacagaattagctattgaaattgcagaatatttcaaaactcgtatacacaatatcgattcaaggcaaatttataagtctatggatattggaacagccaagccatctaaaaaccaacaaaaaaaaataaagcattttttaatagacattgaggagccaattcatccaatcaatgtaaaacaatttcaagatattgctcaaaaatcaataaaaagagaaattaaa

SEQ ID NO: 244743 - DNA, 606 bp, Unknown
  Bacterial polypeptide expressing nucleotide sequence isolated from the Sargasso Sea
aaaaaggaaaaactcctatatttgttggaggcactggtctttattttcaatcacttcttaatggattagctgaagtgcctaaaatacctaaaaaaactaaaaataaggttagaaaacttcacgaaaaattaggacaaaaaaatttttataaagctttgaaaaaaatagataagaaaataaaaaaaaattttgacccccaagatagtcaaagaagtattagagcttatgaagtaaaaatacatactaaaaaatcattatatgattggtttaaagagacaaaacctacatttaaaaaaaataattttataaagtattatttaattcatgaaaaaaaaagtttgctaaaaagaatagaaaaaagagtaaatctaatgtttaaaaaaggcgcagtagatgaggttgaaaaagtcaaaaaacaaaatatttctaaagatagcagctgcaataaaattattggttatatggagattaaaaattatttaaacggaaaattaaaccttaaagacactaaagaaaaaatgattattaaaacaaggcaatatgcaaaaagacaaaatacttggtataatagtagaatgagagactgggagattttaaaattctaac

SEQ ID NO: 244744 - DNA, 232 bp, Unknown
  Bacterial polypeptide expressing nucleotide sequence isolated from the Sargasso Sea
tatggactacaagtccaaaatcattcttatttctggtcccacagcttctggaaaatcaaaaatagcactcaacttagcaaaaaaaattaacggagagattgttaatgctgacagtatgcaggtttataagcagcttaaaatacttacagcaaggccttcagaaaaagaccaaaaaaaaattaaacatcatttatttggcaccattgatgtgcgaaaaagattttcaacaggt

SEQ ID NO: 244745 - DNA, 760 bp, Unknown
  Bacterial polypeptide expressing nucleotide sequence isolated from the Sargasso Sea
acacccacaccacatgatcaatgttgttaacttaaatactatttttacagtagcagatttctattcaatttcgcataaattaatcgaaaaagcacatctaaataataaattacctgtttttgttgggggctcaatgatgtattttaattctttatataaagggatacacaatttacccaaaagagatgaagagtatagagatgaacttgaggttttaaaatctgagaatgaatcaaattatttatataaattattaaaagatattgatccaatatatgcaaaaagtataaaccagaatgatgatattagaattattagagctcttgaagtttataaggcaacaggaaagcctttaagtaaaattctatcagatgaaccaaaaaataatttatcagaccaatatcaagtgcatcaatttggaattttagatgaacgagataaattgcatcaaagaatagagattagattaagagagatttttgatatgggtttggttagagaggcagagaatatattaaataaatataatatcagtcaagatcaccccatccgaagatctgtaaattacaaacaagctattggtcatataaacagtgagtatggaatagaagttgcttttgaaaaggcgttatttgctacaagacaacttgctaaaaggcagactacttggttaagaggttgggaagaatttaaaaaggttaaaattaaagaaataaaagtaatggaaaatgaatttaaaaagataatatctttactttaa

SEQ ID NO: 244746 - DNA, 499 bp, Unknown
  Bacterial polypeptide expressing nucleotide sequence isolated from the Sargasso Sea
atgtcttcgcatcttcctcatgtaattattttaattgggccaactgcgagtggcaaaacagaattagctattgaaattgcagaatattttcaaactcatatacacaatattgattcaaggcaaatttataagtccatggatattggaacagccaagccatctaaaatccaacaaaaaaaaataaagcattttttaatagatattgaagaaccaatcaatccaattaatgtaaaacaatttcaagaaattgctcaaaaatctattgagggagaaattaaacaagataatttaccttttcttgttggaggaagtgggttgtatatgaactcaataacaaaaggattttttgtaccggatgtccctcctcaaaataatttcagaagacaattagaagaacttggtcaggaaaaatgttgggacctgttaaaaaattgtgatccattatcaacaaaaaaaatcaattttactgaccagattagaacaataagagctttggaag

SEQ ID NO: 244747 - DNA, 670 bp, Unknown
  Bacterial polypeptide expressing nucleotide sequence isolated from the Sargasso Sea
aaaattagcaaaaaaaaatataaaaaaaattagagataaaaataaaataccagttttagttggtgggactggtctttatttcaaagcactgactgatggcttggttaaaattccaaatataccaatttcttttcgtaataaaataagacgaatgcaaattagtttaggtcaaaaaaaattttattcaaaacttttaaaaaatgattcattagtaaaaaacaggattgatcctactgatcttcaaagatctatcagagcttatgaagttatttcatttacaaagaaatcaatttttgaatggtataagaaaacaaaaccatcttttcgaaatgatcaatttattaaaatttatattgattatcctagagatgaattaatcaggaacatttctaaaagagtagatcaaatgatgaaaaatggagctattcaagaagttaaggattttttaaagcttaatttgaagagtgatagtaacatcttcaaagttataggaataagagagattaaagaatttattgataaaaaaacttctatgcatgatttaaaactaaatattgttataaaaaccagacaatacgctaaaagacagagaacttggtctagaggtcaaatgagagattggcaaaaatttgatagtgaagctcttttaaaatttataaaaaaattataa

SEQ ID NO: 244748 - DNA, 261 bp, Unknown
  Bacterial polypeptide expressing nucleotide sequence isolated from the Sargasso Sea
tttgaaactcccattaatatttattgtcggaccaacggcagtaggaaaatcaaattttgctttgagaattgctaaaattttaggtggtgaaattattaatgctgatagcatgcaggtatattcagaattaagaacactaacagccagaccatcactgaatgatgagaaattattccctcatcatttgtatggatatataaaaggatcagaaagatataacgttttcaaatggtgtaatgatttatctgaaattgttaataa

SEQ ID NO: 244749 - DNA, 742 bp, Unknown
  Bacterial polypeptide expressing nucleotide sequence isolated from the Sargasso Sea
acaccacctatatggcactatatcagtaaaaaaatatttttcagcaggtgactggcttaaaaaagcaaaaaaaaaaattgatagttgtgttaaaagaaaaaaaattccaatagttgttggaggaactggcctttattttaatacaataattaaaggcatgagtaaaattcctgatatcgatttgaagacaagaaatacggtaagaaacctttacataaaaattggttgtaaagaattttatagtcagctacttgaacttgatcctaaagcaaaaggaagaatacacccgactgatgcacaaagattacaaagagcttatgaagtaaagcttaaaacaaataaatcattatttgactggattgcaaacacaaaatctgaatttaaggattttgaaataaggaaaatttttataaacaccccaagagaggcgttgcttaaaaaaatttctttaagaactcagcaaatgtttaataataaatgtattaatgaggtaaaaaaattcaataatctgaagataaagaaaagtttatcagcaaataaattaatcggcgtccaagaaattaatgattttctacagaaatcaatctcacttgagcagtgcaaagaacttatcaatataaagactagacaatacgcaaaaagacaaaatacatgggctagaggccatatgaagaattggaacaagatttactcgaaaaatttctcaaatcttttaaaaaaatcattaaaagtcgtaagctaa

SEQ ID NO: 244750 - DNA, 265 bp, Unknown
  Bacterial polypeptide expressing nucleotide sequence isolated from the Sargasso Sea
atggaccttaagtccaaaatcattctaatttcaggacccactgcatcaggtaaatcgaattttgcaataagtctcgctaagaaaattaaaggagaaattatcaatgcagatagtatgcaggtttataaagaactccggattttaactgcaagacctaaacaaaaagattatcaaaaaattagacatcacttatatggatttttaaatgttacaaaaaatttttcaacaggtcagtggctaaagctgtgtcaaaaaaaaataaaag

SEQ ID NO: 244751 - DNA, 284 bp, Unknown
  Bacterial polypeptide expressing nucleotide sequence isolated from the Sargasso Sea
catggattttaaatccaagattatattaatttcaggaccaactgcttctggaaaatcaagttttgctattaaacttgcaaaaaaaattaatggagaaattgtaaatgctgacagcatgcaagtttacaagcaattaaaaattctgtctgcaagaccagatcccaaaaaatacttaaaaataagacatcatttatatggctttcaagatgcaagaaaaaatttttcaactggaaattggttgaaattagtatttaaaaaaattgaagaaataaaaaaaagaaaaa

SEQ ID NO: 244752 - DNA, 778 bp, Unknown
  Bacterial polypeptide expressing nucleotide sequence isolated from the Sargasso Sea
ccaactataaatgatcaaaaaaaaatcaatcatcatctttatggttttgttaaaggtgatgttagatttaatgttcaaaaatggtgtgaggaagcatcaaaaaaaattaattatttaattaataaaaatataacacctattttagttggaggtacaggtctttacattgaaactttaattaatggaatagtttcaattccatctattccagaaaaagtaaaaatagaatcagataaaatgattttaaaaattggtaaggaaaatttttttaatttagttaaagatcttgatagtgaagcaatgattaatattgcgcctaatgatattcaaagaataagaagaatatgggaggtaaatttttttactaagaaaaaatttagtgactggaaaaaaagaaaaaatcaaaattttattaatttaaaaaattacaaaatattattatttcttccagatagaaaagaaaactatagaagagtagatcatagaacacatttaatgatggaagatggtgcgatagaggaagtcaaaaatttgcttaaattaaattataataatagtttaccaataatgaaagctcacggagttcctgaaattcaatcttatcttaataacgaattatcaattgaggaatgtatttctaaaatacagcaagtaacaagaaactatgtaaaaagacaacatacttggtggagatcttcaaatcttaatatttttaaaaaatttaatgaatttccggacgaaattgacttaaaatccattaatttagatcaaaattgaa

SEQ ID NO: 244753 - DNA, 172 bp, Unknown
  Bacterial polypeptide expressing nucleotide sequence isolated from the Sargasso Sea
aatgaagcatggaaaaaaaataatattattagccggccccacagcttctggtaagtctaggctagcagttaaattagcaaaacattttaatggagaaataataaatgctgatagcatgcaaatttataaggaaatttcaattttgacttctagaccaaacctagaagataca

SEQ ID NO: 244754 - DNA, 707 bp, Unknown
  Bacterial polypeptide expressing nucleotide sequence isolated from the Sargasso Sea
agatttctattcaatttcgcataaattaattgaaaaagcgcatttaaaaaataaattacctgtttttgttgggggctcaatgatgtattttaattctttatataaaggtatacataatctacccaaaagagatgaagattacagaaatgaactagagactttaaaagttgagaatgaatcaaattatttatataaattattagaaaatattgatcctatatatgcaaaagatgtaaatcagaatgatgatattagaattattagggctcttgaagtttataaggcaacaggaaagcctttaagtaaaattctatcagataaaccaaaaaataatttatcagatcaatatcaagtgcatcaatttggaattttagatgaacgagataaattgcatcaaagaataaagattagattaagagagatttttgatatggggttggttaaagaggcagagaatatattaaataaatataatatcagccaagatcatcccatccgaagatctgtaaattataaacaagccattggccatataaacagtgagtatggaatagaagttgcttttgaaaaggcattatttgctacaaggcagcttgctaaaaggcagattacttggttaagaggttgggaagaatttaaaagggttaaaattaaagaaataaaagtaatagaaaatgaatttaaaaagataatatctttactttaaa

SEQ ID NO: 244755 - DNA, 811 bp, Unknown
  Bacterial polypeptide expressing nucleotide sequence isolated from the Sargasso Sea
atgggcagaaagtccaaaataattctcatttctggaccaacaacatcaggaaaatctaactttgctatacaagttgcaaaaaaaattagaggagaaattataaatgcagatagcatgcaagtttataaggaatttagaatattaactgctagacctagcattaaagagcaaaaaaaaattaaacatcacttatatggattttatagtgtaaaaaaaaacttttccacaggtcattggcttaagattgtttataaaaaaatcgaagaaatacaaaaaagaaaaaaaattccaattttagtaggaggaacaggtttatattttaaagctttaacagaaggacttgtaaaaattccaaatattcctataaaatacagaaaaaaaattacatctttgcaaaaaaaaattggtcaaataaaattttttagtaaattagttagcctcgatcctttgataaaagataaaatcaaaccttctgatactcagaggtctataagagcttatgaggtaaaattatatacaaaaaaatctctaattgaatggtttaataagacaaaatcaaaatatgataaaaatgattttattaggatttatatcgactttccacgagtagatttaatacaaagaatttcaaatagaactgatgaaatgattaaaaaaggtgctatcgatgaagttaaaaaatttttaaaaatgaaagtcaaaaaatctaatagttctaataaaatcatagggattaatgaaatttctgaatatttgaaaaaaaattcagaattaagcaaagttaaggaaaaaatttcaataaaaacaagac

SEQ ID NO: 244756 - DNA, 142 bp, Unknown
  Bacterial polypeptide expressing nucleotide sequence isolated from the Sargasso Sea
ttgacccgtaaacctgtcattgttgttggcggaccgactgccagcggtaaatcgtcggtagcacttgccattgctgaggcgttcaacggttctatcgtcaacgcagattcgatgcagatatataacggattgggaatagtca

SEQ ID NO: 244757 - DNA, 610 bp, Unknown
  Bacterial polypeptide expressing nucleotide sequence isolated from the Sargasso Sea
atgaataaagttatatcgcttttaggaccaactgcttcaggaaaaactgacttagcaattcatttatctaagaactttgattttgatattataagtgtagattctgtgatgttatacaaagaattcaacataggctctgcaaaacctaatcaagaaactttattaaaatttcctcacaaaatggtagatattcttaatccatccgataaatattctgtagctagattttataatgatttaataaaaaatattaaaaattcacactctcttggtaagattccacttttagttgggggctccatgatgtattttaaaacttttttttcaggaggtctttcagatgttaaggaggtctcaagcgatgttaaggatcatgtaagaaatatgatgcaggaatatagtttagattaccttcataattatttaaaagatatcgatattagctctgcgaaaaatattcattttaatgacagatatagaattagccgaatgctagaaatatttttttcaaataacgaaaaaccaagtattatcctaaataaatgtgcagagaatgttcagtattttcaaaatcttaatttgtctataattccaattgatagagttattc

SEQ ID NO: 244758 - DNA, 538 bp, Unknown
  Bacterial polypeptide expressing nucleotide sequence isolated from the Sargasso Sea
tatgccaagaattcagaactttgatgagattaaccaaaacacaccagttttaattgctggacaaaccgcttctggaaaatcacagcttgctcttgaaattgctgagaaatacggtggaatcattgttaatgccgacgccattcaagtatataaaaattggcaaattttaaccgctcgcccctctagcgcggacgaggcaaaaattaaacacaaactttatggccatatagatggaattacagattattccgttggcacctggatcaaggaaatacgagacatactttccagcgcttcaagaccgataatagttggtgggacaggcctttatttttcagccttaactgccggtcttgttgatattcctgaaatctctgagtcaatccgcctagaagcaaacaataagatcactaaaaatgggttcggaagtttaattggagaaatcgatgaagaaacagtcaaaaaaatagacataaataatccaatgcgggtgcagcgtgcctggggaagttctcaagtcaactggggcgagggttaa

SEQ ID NO: 244759 - DNA, 199 bp, Unknown
  Bacterial polypeptide expressing nucleotide sequence isolated from the Sargasso Sea
atggatttaaaatccaaaattattttaatttatggacctactgcatctggtaaatctaaatttgcaattgaactagcaaaaaaaataaacgcagaaattgttaatgcagatagtatgcaaatttataaagatttgagaactttatcagcaagaccttctaaaaaagattatcaaaaaataagacatcatttatatggta

SEQ ID NO: 244760 - DNA, 199 bp, Unknown
  Bacterial polypeptide expressing nucleotide sequence isolated from the Sargasso Sea
aaaaaaaataatattaattgcaggcccaacggcctcaggcaaatcacaacttgctataaagttagcaggacatgcaggggtaaagggagagattataaatgcggatagcatgcaaatctataaagaaatttctattttaacttctaaacctaatttcattgatagaaaaattgtcaagcaccatttgtatggtatttaa

SEQ ID NO: 244761 - DNA, 817 bp, Unknown
  Bacterial polypeptide expressing nucleotide sequence isolated from the Sargasso Sea
gagatttgctttagaattagcaaagtcattaaatggtgtaattataaattctgattcaatgcaagtatataaagatttgaggattctttcatctagaccaggacacttagaagaaaaaataatcgaacattatttatatggttttttgaatattaacgaagagttttcagtgggtaggtggttagagctactaaaaaaaactttagaaaagataaaaaataataataaaataggtattcttgttggaggaacaggcttatacattcaagcagcaataagaggcatttcacctatacctaaaatcaaaaatgagattaaaaaagaaggacaattattaattaataaaatcggaattaaaaagtttaaaaaatttttagaaaatattgaccctgaatatattaatttaaataatgatgtgcaaaggttattgagaagttacaacgtttatttttcaactggaaaaactcttacagaatggcataaaatgcctaatctaggttcggttaacaggaaaattttttcaattttactatcatctgatagaactaatatttatagaaattgtgacaaaaggtttgatttgatgatgtcaaatggtggtttgatggaagcaaaaaaaatttggcaacataattttgatagaaacctctctccattaaaatcacttggacttagaagacttcttgagtattttgatggaaagttaacattacaagaagcaattagaatgagtaaaagagatactagacattatgtaaaaagacaaatcacttggtttaaacataattttaattcaaatattattataaatttatga

SEQ ID NO: 244762 - DNA, 376 bp, Unknown
  Bacterial polypeptide expressing nucleotide sequence isolated from the Sargasso Sea
atgtcttcatatccacctcatgtaataattttaatagggcctactgcaagtggcaaaacagatttggccattgaaattgcagaatatcttaaaactcgtatacacaatattgattcaaggcaaatttataagtccatggatattggaacagccaagccatctaaaaatcaacaaaaaaaaataaagcattttttaatagatattgaggagccaattcatcaaattaatgtaaaacaatttcaagaaattgctcaaaaatcaataaaaaaagaaattaaacaaaattatttaccttttcttgttggagggagtggattgtatatgaactcaataacgaaaggattttttgtacctgatcgtccctcctcaaaataat

SEQ ID NO: 244763 - DNA, 355 bp, Unknown
  Bacterial polypeptide expressing nucleotide sequence isolated from the Sargasso Sea
cctgagcgcgtctcacgatctccgagctctaccactcgttatcgtcggtccgacggcctgcggtaaatcctcgttcgctatgaaggtggcgcgcagttttccaagagtggagctcctgtcgatcgactcaatgcaggtttatcggggtatgaacgtaggcacggcaaagccctcaaccgaagagcagtcggaagttgcacatcatttgattgacctagtggcgccgactgaatcatttacgcttgttgattttcaaaacgcgtatgcgacagccctatcggaaattacaaagcgagatggaattccggtcttggtaggtggcactggtctttatttgcgagctgtgcttgacggt

SEQ ID NO: 244764 - DNA, 280 bp, Unknown
  Bacterial polypeptide expressing nucleotide sequence isolated from the Sargasso Sea
aatggaccttaagtccaaaatcattttaattgcaggacctacagcaagtggaaaatcaaatttctcattaaaattagcaaaaaaaattaatggtgaagtcataaacgctgatagtatgcaggtctataaacaacttcaaattttaacagcaagacccaacaaaaaagatataaaaaaaattaagcatcatctttatggtttttgtgatgtaaaaaaaaatttttcaactggagagtggctaaagctttctataaaaaaaataaaaggaattcaaaaaaaa

SEQ ID NO: 244765 - DNA, 741 bp, Unknown
  Bacterial polypeptide expressing nucleotide sequence isolated from the Sargasso Sea
aaaaaattaaacaccatttatttggaattattgatgtgcgaaaaagattttcaacaggtcaatggcttaaagaatgcatcaaaataataaatttaataagaaaaaagaaaaagatcccaattgtagtaggtggaactggtctttattttaaagctttagtggatgggctagcaagaattccaaagttcaaactttcagaaaaaaacaaaatacttaagcttcacaacaaattaggccaaaaacaattttataaaaaattaataaaattagatcctctctctaaaaaatttataaattcaaatgatgttaatagatcaataagagcatatgaagttaaaaagcttacaaaaaaatcattattcaaatggtttaaaaaaacaaagacctttttcgacaagaatgaatttgtgatgatttatgtggattatccaagagacaaattaataaagaatattaaaaaaagaattgataggatgtttggtttaggagtcataaaagaagttaagaaatataatctcattaaaattaacaaaatgaatagcgttaatcatgtgattggtattaaagagattaactcttatttaagtaaaaaagctgaattgaacgatattaaagatcagatattaataaaaacaagacaatacgccaaaagacagagcacttggtctcgaggtcatatgattaattggcacaaaattgatccaaaatcaaaaaatccattcaaaaaaattttaaaataat

SEQ ID NO: 244766 - DNA, 169 bp, Unknown
  Bacterial polypeptide expressing nucleotide sequence isolated from the Sargasso Sea
tttgaatataaatggaataataatagcaggaccaactgcttcaggaaaaacaaaaatagctaagcaaatatcttcaaaatttccgtctacaataattaatgcggatagtatgcaagtctatgaagatctgcaaatcataactaatagaccatctaataaagaaattaat

SEQ ID NO: 244767 - DNA, 269 bp, Unknown
  Bacterial polypeptide expressing nucleotide sequence isolated from the Sargasso Sea
catggatttaaaatccaagattatattaatttcaggaccaacagcatcaggaaaatcagattttgcaattaaagttgcaaaaaaaattggtggagagattattaatgcagatagtatgcaggtatataaacagcttaagattttatcagctagaccagatccaaaaaaaaatcgtaaagttaaacatcatttatatggtttccaggatgttacaaaaaacttttcaacaggtaattggcttaatcttgttattaaaaaaattagagaag

SEQ ID NO: 244768 - DNA, 261 bp, Unknown
  Bacterial polypeptide expressing nucleotide sequence isolated from the Sargasso Sea
aatggaccttaagtccaaaataatattaatttcaggtcctacagcttcaggtaaatctaaacttgcattaaaaattgctaaaaaaataaatggagaaattattaatgcagatagcatgcaggtttataaagaattgaagatattgactgctcgaccttctaaaattgatttaaaaaaaatagaacatcatttatatggttttagaactgttaaaaaagatttttcatctggtgaatggttaaaattagcaaaaaaaaatat

SEQ ID NO: 244769 - DNA, 573 bp, Unknown
  Bacterial polypeptide expressing nucleotide sequence isolated from the Sargasso Sea
caaggagtataatggtgaaattgttaatgcagacagcatgcaaatatacaaagaggttaaaattttatctgctagacctagtgataaaaatataaatcatcatttatacggttttctctcggtgaagaataatttttcaactggatcttggtataagttagcggcaaaaaaaattaaacaaattaataaaaaaggtaaaacagcattagtagttggtggaacaggtttatattttaaatccttaaccgacggtttgtcggaaataccagaagttcctaaaacaaacatgaattcaaaagtagacaaaaattatattttaaaaaatccaaaaatttttaaaggaatttcaataaatgacaagcaaagaatacaaagagcaatttcagtttataaacacacaggaaaacctttgtggttatggcagaagaaaaataaaaaaatatttaatactaaaaagcttgtaaagattttccttaatccaccaaagttagaaatagaaaatagaattaaaaaaagatttgatgaaatgttaagaaagggagcaatcaaagaggtagaacattttaaaaaaat

SEQ ID NO: 244770 - DNA, 616 bp, Unknown
  Bacterial polypeptide expressing nucleotide sequence isolated from the Sargasso Sea
tttgttggaggtacaggcttatattttaaagcattaactgaaggtttagttgaaattactaagattcctttaaaatttcgaaataagatcagatttttacaaaaatccattggacaagaaaaattttattcaaaacttttaaaattggatccaacaacaataaatcacataaatcctacagatgctcagagatctatacgagcttacgaggtaaaatcgtttacaaaaaaatctatttcagagtggtacaaagacactaaatccaaatttaaaaaaaatgaatttcttaaattatatatcgattatccaagacttgagttaattgatagaattaatctacgaacaaggcaaatgttagatagtggtgcagttttagaggtaaaaaattttgcaaaacttaaaatttcaaaaaataaaagtgtttcaaaggcaataggacttattgaaatcaaagattttattaaaaacaagatagataaagaggaagttattgaaaaaatatcaataaagacaaggcaatatgctaaaagacaagtgacgtgggctagaggaaatatgaaaagttggaaaaaaattaagcctaaaagattaaatatctttcttaaaaaaatttaaa

SEQ ID NO: 244771 - DNA, 570 bp, Unknown
  Bacterial polypeptide expressing nucleotide sequence isolated from the Sargasso Sea
aatggaccttaagtccaaaattattttgatagcaggacctactggttctggaaaatctcgattagcagtcatgatggctaaaaaatttagcggcgaaattattaatgcagatagtatgcaggtttataaaatattcaaaatcttaactgctagacctaatattaaaagtgaaaaaaaaattaagcatcatctttatggttttgtgaattttaataaaaaatattctacaggccaatggttaaaagatacaattaagaagattaatcaaataaaaaaaagaaataaaataccaatattagttggaggaacaggtctttattttcactctttaataaatggtttggtaaaaattccaaatattcctataaaaataagaaaaaaaattagattgttacataaaaaatttggtcaaaaaatattttataagaaacttttaaaactagatccaaaaatcaaaaataaatttgataaaaatgatgttcagagatccttaagagcatttgagattaaaaaacatactaaaatctcaatgtatgattggctaaaaaaaactaaggcaatacttaatga

SEQ ID NO: 244772 - DNA, 352 bp, Unknown
  Bacterial polypeptide expressing nucleotide sequence isolated from the Sargasso Sea
tatgtcttcatatctacctcatgtaataattttaattgggcctactgcaagtggcaaaacagagttagctattgaaattgcagaatattttaaaactcatatacacaatattgattcaaggcaaatttataagtccatggatattggaacagccaagccatctaaaatccaacaaaaaaaaataaagcattttttaatagatattgaagacccaatcaatccaattaatgtaaaacaatttcaagaaattgctcaaaaatctattaagagagaaattaaacaagataatttaccttttcttgttggaggaagtgggttgtatatgaactcaataacaaaaggattttttgta

SEQ ID NO: 244773 - DNA, 622 bp, Unknown
  Bacterial polypeptide expressing nucleotide sequence isolated from the Sargasso Sea
atgtcttcacatccacctcatgtaatcattttaattgggccaactgcaagtggcaaaacagaattagctattgaaattgcagaaaattttaaaactaatatacacaatattgattcaaggcaaatatataagtcgatggatattggaacagccaagccatctaaaatccagcaagaaaaagtaacacattttttaatagatattgaagaaccaatcaatccaattaatgtaaaacaatttcaagaaattgctcaaaaatcaattaagggagaaattaaacaagataatttaccttttctagttggaggaagtggattgtatatgaactcaataactaaaggtttttttgtaccagatgtccctccccaaaataatttaagaaaacaattagaagaacttggccaggaaaaatgttgggaccttttaagaaattgtgatccattatcaacaacaaaaatcaattttgctgaccacattcgaacaataagagctttagaagtcttctacgtaactggtaagcctttatcaactctgaaagttcagaaaccacctaactggaaaatcttagagcttggattagacagagataatttaaaagaaagaatctttcaaagaacaaaaa

SEQ ID NO: 244774 - DNA, 195 bp, Unknown
  Bacterial polypeptide expressing nucleotide sequence isolated from the Sargasso Sea
aatggatttaaaatccaagattatattgatatctggacccacagcttcaggaaaatcaagcttcgctattaaagttgcaaaaaaagttaatggagaaataattaatgcagatagtatgcaagtatacaaacagcttaaaattttatcagctagaccggatccaaaaaaataccagaaaataaaacatcatttgta

SEQ ID NO: 244775 - DNA, 535 bp, Unknown
  Bacterial polypeptide expressing nucleotide sequence isolated from the Sargasso Sea
tatggatttaaaatccaagattattttaatttctggtccaacagcatctggaaaatctatatttgcaataaaacttgctaaaaaaattaatggtgaaatagttaatgcagatagtatgcaagtatataaagaattaaaagttttatctgctagaccaaatccaaaagattatcaaaaaataaaacatcatctttatggttttcataatgtaaaaaaaaatttttcaacaggggattggttaaaacttgcgattaaaaaagttaaagaaataaaaaaaagaaagcatattccaatctttgttggtggaacagggttatattataaagctttaacagagggtttggttaaaattccaaatattcctattcgattaagaaataagattagatctttacacaaaactttaggtcaaaaaaaattttataaaaaactattaaagctagatccgatttctaaaaataaaattaattcaacagactcacaaagatcaatcagagcttacgaagtaaaaaaatttactaaaaaatctcttcac

SEQ ID NO: 244776 - DNA, 315 bp, Unknown
  Bacterial polypeptide expressing nucleotide sequence isolated from the Sargasso Sea
aatggattttaaatccaagattatattaatttcaggacccacagcttctggcaaatctagttttgccattaaagttgctaaaaaaattaatggggaaataatcaatgcagactccatgcaaatttataaacagttaaaaattctttctgctagacctgatccaaaaaaatatcaaaaaatagaacatcatttatatggctttcatgatgcaaaaaagagtttttcacctggagattggcttaaacttgtaaataaaaaaataaaagaggtaaaaaataaaaataagacgcccatccttgttggaggtacaggact

SEQ ID NO: 244777 - DNA, 670 bp, Unknown
  Bacterial polypeptide expressing nucleotide sequence isolated from the Sargasso Sea
ttgattaataccgtatatgtaatagctggcccaacaggctctggtaaatcagacttctcaatagatcttgctaagaaagtcaatggagtagttattaactctgacagtatgcaggtttatcaaaacttgagggtattgactgcacgaccatcatcaatagacatgaaaagtatcgatcattatttatatggttatatagatggtaaagaaagatttaatgtcgacagatggtgtaatgacgcctctgaagttattaataaaagtagtgcaaaaaacttaacacctatattggttggaggaacaggcctttatataaatacattgattaatggattaattgatattcctactataccagagtcaattaaaattgaatcagaaaaaattattaaaaaatttggtaaagattattttattaatcaaattaaaaactttgactacaaatcactaaaagaaataaatatcaatgatacagtacgtttaagaagaatttgggaagtttttgagtcaacaggaaaaaaacttagtgaatggaaattagataataataaacaatttttaaaaaactataatattaaaattattttgttccttccagatagaaaaaaaaattatgaaatagtaaactctagatttttaaatatgattaatatgggcgccaatagatgag

SEQ ID NO: 244778 - DNA, 239 bp, Unknown
  Bacterial polypeptide expressing nucleotide sequence isolated from the Sargasso Sea
aatggaccttaagtccaaaataattttaatctctggaccaacagcatcaggaaaatctaaatttgcagtaaaacttgcaaaaaaagttaaaggtgaagtcattaatgctgatagtatgcaagtttataaagaattaagaattttaacagcaagaccattaaaaaaagattataataaaattaaacattatctttatggttttgaaagtgtaaaaaaaaaattttctacaggtaaatggt

SEQ ID NO: 244779 - DNA, 802 bp, Unknown
  Bacterial polypeptide expressing nucleotide sequence isolated from the Sargasso Sea
ttgaataaaacagtttattttattacaggcccaaccggtataggcaaatctaaatttgctataaatttatcaaagcaaataaatggtgaaatcataaatgcagatagtatgcaaatttataaagagttaaagattatttcagcaagaccaatattatctgatattaaaaaagttcaacatcatctttacggttatgttagtggtaacgaaagatacaatgtagaaaaatggtgttctgatgctctattaaaaataaattcattatacaaaaaaaatacaacacctatctttgtaggtggaacaggtttatatattgatactctaattaatggcataacttccattcctagtgttccagaatatataaaagataagtcaaaagaattattagataaaataggatttgaaaatttttttaaacttgtaaaagaattagataatgaagctgtaaaaaaaatttcacaaaatgacacacaaagattaacaagaatttgggaggtttataattatacaaataaaaaatttagctcttggaaaaaaactaataataaaaaatttttgaatcctttaaattgtaaagtaattttatttcttccagaaagaaataaaaattataagcgtgtaaatgaacgtgttttaaaaatgataaatcagggcgcaatagaagaaatttctgaattattaaaattaaattataaaaaaaatttaccaataatgcgagctcatggagtaccagaaattatttcatatttagaaaattctatctcactagaagaatgtatcaaaaaaattcaattagtta

SEQ ID NO: 244780 - DNA, 221 bp, Unknown
  Bacterial polypeptide expressing nucleotide sequence isolated from the Sargasso Sea
aatggatctaaaatccaaaattattttaatttatggtccaacagcatctggtaaatctcaatttgcaataaaattagctaaaaagataaacggtgagattattaatgctgatagcatgcaagtttataagcaattaaaaattttatcagcaagaccatctcaaaaagaatatcaaaatatcaagcatcattttatatgggttttcaaagtgttaaagggaa

SEQ ID NO: 244781 - DNA, 393 bp, Unknown
  Bacterial polypeptide expressing nucleotide sequence isolated from the Sargasso Sea
aatgaataaaaaaaaagcgcttgtaatttttggccctacagcaagcggaaaatcttcaaaagcaattcaagttgctaaaaaatataattctacaataattaacgcagatagtattcaagtataccaagaattaagattaattacttcacgcccttcaattgaggatgaaaaaaactttgatcataagctatatggatttcttcaaggtaatcaaaactgtactgtttctatgtggctagaattaataaaaaaagaaatcaaagcatcttttgataatgataagttgccaataatagtaggtgggacaggaatgtatttgaaaagccttattgatggaatatcaatgattccaaatatacctataagtgttaaagaagagactaaaaaaaaagt

SEQ ID NO: 244782 - DNA, 427 bp, Unknown
  Bacterial polypeptide expressing nucleotide sequence isolated from the Sargasso Sea
aatggaaaaaagggacatacttgttatctttggtcccacagcaagtggaaagtcaaagcttgcaactcaaattgcttctaaacaaaagtcagctataattaactttgatagtctacaagtatacaaggatcttaaaatactaactgatagaccaaacgatgagatgtgtaaaaaatttgaccatcgtctttatggtatgcttaaaggaagcgaaagttgctcagcagctatttggctagaaagagctgagtatgaaattaataattgtttcgataataagttacttccaattgttgtaggtggaacaggtttgtatttaaaagccttgatggatggactctcagaaattccttctataaaaaaaaatataggagagcaagcaatgctggatttagaaaccaatggtcttgatcatttatacaaataa

SEQ ID NO: 244783 - DNA, 568 bp, Unknown
  Bacterial polypeptide expressing nucleotide sequence isolated from the Sargasso Sea
atggacaaaaagtccaaaataattttaattgctggctcaactgcatcaggaaaatcaaattttgctattcaacttgcaaaaaaagtaaatggtgaaattattaattctgatagtatgcaaatttacaaagaaataaaaattttaaatgctcgacctatctctaaaaatattaaaaaaattactcatcatttatatggttttcatagtgtaaaaaaaaatttttcaaccggccaatggttaaaaaaaacaataagattaattaaggaaataaagaaaaaaaataaaataccaattttagttggtggtactggactatactttaaagctatcactagtggtttaacaaagatcccattaatacctatgaaatatagaaataaattaagggtagaacataaaaaaattgggcaaaaaaaattttttaataaactagttaaattagatccattagcaaaatcacggataaatgataacgatgctcaaaggactctaagagcatatgaagttaaaaaatatacaaaaacttcaatgtttaagtggcatgaaagtacaccaaaaaaatttgaag

SEQ ID NO: 244784 - DNA, 284 bp, Unknown
  Bacterial polypeptide expressing nucleotide sequence isolated from the Sargasso Sea
gcaggaggaagtagaggcgttgcgacagcagccccaattgaatgcagatttacccggtattagggccgtgggatatcgccagatgtgggaatatctggatggtatgtacggctacgatagcatggtggagcggggcattattgccacccggcaattggctaaacggcagtttacctggttgaggaaatggccggaactacagtggttcgacagtaatgatcggtcacaacgagacgctctgtttggattgcttgcgaagaactgtaaatctgtgtttagttagc

SEQ ID NO: 244785 - DNA, 717 bp, Unknown
  Bacterial polypeptide expressing nucleotide sequence isolated from the Sargasso Sea
attgaaaaatacaatctattttataattggtccaactgctataggtaaatcttccttagccttaaatatatcaaaacaaattaatggcgaaataataaatgcagatagtatgcaaatttataaagaattagaaattatttcagctagaccaacttctgccgatacaaaacaaataaaacatcatttatatggatatgttagtggtaaacaaagatttaacgtagagaaatggtgtactgatgcaacaaaaataataaatatactaaataataaaaatgtaacaccaatttttgtaggaggtactggattatatatagatattttactaaatggaataataccaattcccaatattcctgaaataataaaaaaagaatcaaataatttatttgataaaattggatcaaaaaaattttttcaattagttaaagatttagataatgaatccgttattaatatttctcaaaatgatactcaaagattaaaaagaatatgggaagtatttcaatatacagaaaaaaaatttagctactggaaaaaaaatgaaaaaaaaacttttttaaaaaataaaaactttaaaattttattatttcttcctgatagaaaaaaaaattatcaaagagttgacaaaagagtttttaaaatgattgataatggtgcaattaatgagataaaagaattattaaaattaaattataataaagatcttccaataat

SEQ ID NO: 244786 - DNA, 769 bp, Unknown
  Bacterial polypeptide expressing nucleotide sequence isolated from the Sargasso Sea
aacagctaggccaaaaaaagaagatcaaaaaaaaatcaatcatcatttatatggatttcaaaaatcctcaaaaaaattttcaactggagactggctacaattagcttctaaaaaaattcagcaaatcaaaaaaaaaaataaaattccaattttcgttggtgggactgggctttatttcaaatcacttacagatggattggttaaaattccaaaaatatcgattaaaaaaagaaattatgtccgacacttacagaaaaaacttggtcaaaaaaaattttataaaaaactaattgaaattgatcctttgtcaaaaaatatagttaatgaacatgatattcaaagatctattagagcatttgaaatcaaaaaatatacaaaaaaatctatggctcaatggtttaaagatacaaaagctctatttgctcatgatgtttttataaaattatatttagattttcccagaatagaattgctaaatagaattgagaaaaggacaaaacaaatgtttaaagaaggagccattcaagaagtcataaaatttaatagattaaaaataaaaaaagaaaatagcgcaaacaaggttattggaattaatgaaattaacagatatttgaatggcgagcttagtttgaaggaaactaaggaaataattttcataaaaacaagacaatacgccaaaagacaaactacttgggcaaggggacaaatgaagtcttggctaaaggttaaccctaaagatctaaatttattaataaaaaaatttaaataa

SEQ ID NO: 244787 - DNA, 412 bp, Unknown
  Bacterial polypeptide expressing nucleotide sequence isolated from the Sargasso Sea
aataatccaatgcgcgtacagcgtgcatgggaagttctgagatcaaccggacgaggcttgaactcttggcaccaagcaactccaaaaccaactttagatttgaatgcgtgcaaggctcttttgctagatggggaggtttcacttatgaataatcgaattaacaatcgttttgaccagatgatagaaaaagggcttattcaagaagccaaaaataatttagtaacttggaacccaatacacccaagctcgaaagcaattggggcttgtgaattaattgcctatctaaataatgaaatttcaatagatcaaatgcgagagcaaatagtcacggcaacgagacagtatgcaaaaagacagcggacttggtttcgaagtaagatgcaaagctgggaaaggtacagtattcaataaa

SEQ ID NO: 244788 - DNA, 741 bp, Unknown
  Bacterial polypeptide expressing nucleotide sequence isolated from the Sargasso Sea
gatgcaaaacgtgaatgagggaaatgtcgccattccctgccaaccacctgttctggtgattgccgggccgacggcaagtggcaaatcgcatcttgccatggccatggcggaagcctttgacggtgagatcgttaacgcggacagtatgcaagtctatcgggagctggcactcctgacggctaggccgtcgcctactgacgagtcccgcgttccccatcacctctacggtatccaatcggtttcagagatcagttcggccggcgcttggctgaaggcggcggtgccagtgatcgatgatattcgtcggcgcggccgttggcctattgtttgcggcgggactgggctctatttgaaagtcttgcgcgagggtatcgctccaattcccgatattcctggcgacttattcgacttggcccggcgtctctatgaagatgagggcgccatggcattccatgagcgcctggtcgctgttgaccccgtggcggccgaccgattgccccctggggaccggcaacgccttatccgggcctatgccgtaaaacaggcaacaggccggactctaggcgaatggcaggccatgcaatccgacgaagcgcccctggagggcccgttttttacggtcgtgctcacgccgcctcgcgacgccttgtacgctcgcatcgatcaacgctttgatgccatgatagatgctggcgctcttgaagaggtaattgcgttggaccccacgcttgatgtctcgtt

SEQ ID NO: 244789 - DNA, 153 bp, Unknown
  Bacterial polypeptide expressing nucleotide sequence isolated from the Sargasso Sea
attgaaacctcaaatctattttgtattaggacccactgcatctggaaaatcaaaatttgctttaagtctagctaacaaactaaatggcgagattataaatgctgatagtatgcagatttatagagagttaagtatcttaactgctagaccaac

SEQ ID NO: 244790 - DNA, 467 bp, Unknown
  Bacterial polypeptide expressing nucleotide sequence isolated from the Sargasso Sea
aatgccacgactaaaaaactttgccgagattgacccaaacatgccgattttaattgctggtcaaactgcatctggaaaatcgtaccttgctctcgaaattgctaaaaaatacggcggaataattattaacgccgatgcaattcagatatataaaaattggaaaattttaaccgcccgaccctctagcctagatgaagtaaagattaagcacaaactgtatggccatatagatggagcttcagaatactctgttggcacgtggattaaagaaataaaagagatcctttcgagtaattcaagaccaataatagttggcggaacaggcctttatttttcagccctgacaaacggtcttgtagatattcctgaaatctctgattcaattcgccaagaagcaaacaatcggatcaaagaaaatggttttaaaagtttagttgaagaaattgatcaagaaacagttcaaaaaa

SEQ ID NO: 244791 - DNA, 667 bp, Unknown
  Bacterial polypeptide expressing nucleotide sequence isolated from the Sargasso Sea
gttgaatataaataaaaaaaaattaattgttattattggtccaacagccagtggtaaaactactttaagcataaaattagcaaagcagtttaagtgcagtattatatctgctgactctagacaattttataaagaaatgaatattgggactgctaaacctactaaatctgaactagatgaagtacctcatttttttataaataatttatcgattcatgattcatattctgttggaaaattcattgatgaagcaaatgatttttttaattattattatttgaaaaatgacctacttataatggttggaggatcaggtttatttattgatggattattaaaaggattagatccttttccaagtattaatgaggaaattaggagtagattaaatagtgatttagaagatataggtctaaaaaagctaagtgaaaaacttaagagggtagatccgaattactatgatatagtagacttaaataatcctagaagagtaattagagcattagaagtatattattcatcaaataaaccatactcttcttttatacaaggaaataactcatatagaaatgatttgaatataaattttattggattaaacccaaaaagggacaagcttaataaaagaatagaattgagagtagatgatatgattttaaatgggtta

SEQ ID NO: 244792 - DNA, 286 bp, Unknown
  Bacterial polypeptide expressing nucleotide sequence isolated from the Sargasso Sea
tatgtttacaccaaaaccattagtaatagttttaataggacctacagcaagtggcaaaactgagctaggaatcgacattgctaaatatttcaatatcaatatacataatgttgactcgaggcaactgtatcgatttatggatattggtacagcaaagccaactaaagaacaacaaaaatcaatcaagcactttttaatagatcttgaagagccatctaagcaagtaaatgcaaaacaatttcaagaaattgctacgaaatcaatcaatcgagaactaatcaaaaaa

SEQ ID NO: 244793 - DNA, 861 bp, Unknown
  Bacterial polypeptide expressing nucleotide sequence isolated from the Sargasso Sea
ctaataaactaaatggtgaaattataaatgcagatagtatgcagatttataatgagttaagtatcttaactgctagaccaactataaatgatcaaaaaaaaatcaatcaccacctttacggttttgtaaaaggtgacgttagatttaatgttcaaaaatggtgtgaggaagcatctaaaaaaattaataatttggttgataaaaatatcacccccattttagttgggggtacaggtctttatatagaatctttaattaatggaatagtccccattccatctattccagaaaaagtaaaaatagaatcagataaaatgattttaaaaattggtaaggaaaatttttttaatttagtaaaagaacttgatagtgatgcaatgattaatatagaatctaatgatattcaaagaataagaagaatatgggaagtaaatttttttactaagaaaaaatttagtgaatggaagaaaaataaaaatataaattttattaatttaaaaaattacaaaatattattatttctcccagatagaaatgaaaattataaaagagtagatcaaagaacacatttaatgatcaaagatggtgcgatagaggaagtcaaatatttgcttaaattaaattataataatagtttaccaataatgaaagctcacggagttcctgaaattcaatcttaccttaataacgaagtatcaattgcagaatgtatttctaaaattcagcaggtcacaagaaactatgtaaaaagacaacacacttggtggaaatcatcaaatcttgatatttttaaaaaatttgatcaatttccagatgaaattgacttaaaatccattaatttagaccaaaaattgaactaat

SEQ ID NO: 244794 - DNA, 433 bp, Unknown
  Bacterial polypeptide expressing nucleotide sequence isolated from the Sargasso Sea
ttttcggtatataaatttacaaaaaaacccctttggttatggcaaaaagaaaataaaaaagaattcaagaaatctcaatttacaaaaatttttttgtgtcctcccaagattgaaattgaaaaaaggattagaaaaagattttcagacatgttgaaaggtggagcaataaaggaaacagaaaattttaaaaaaaaacgtgtgaactccctcaaatcttcaaattttataattggtattaatgaaatatcagaatttttaaaaaacaaaatttcattagaagaagttaaagaaagagtcgctataaggaccaggcaatatgcgaaaaggcaattgacatggcaaagaggtcagatgaaggattggaagggcttttacgataccaattatctagatttaagaaaaaaaattctaacttatttatctaaaacttgac

SEQ ID NO: 244795 - DNA, 286 bp, Unknown
  Bacterial polypeptide expressing nucleotide sequence isolated from the Sargasso Sea
aatggaccttcagtccaaaataattttaatatctggaccaacagcatcgggtaagtcaggttttgcagttaacttagctaaaaaaataaatggagaaattattaatgcagatagtatgcaagtttacaaagaggttaaaatattaacagcacgtcctactacaaaagaccaaagaaaaattaaacatcatttatatgggttcattagtgttaaaagaaaattttcaacaggacaatggttaaagcatgcttcgaaaaaaattaatgaaataagaaaaaaaaataaa

SEQ ID NO: 244796 - DNA, 847 bp, Unknown
  Bacterial polypeptide expressing nucleotide sequence isolated from the Sargasso Sea
gcctcaggaaaatcgaaattagctatagatattgcaaaaaaattcaatgcagagatcattaatgcagacagcatgcaagtttataaagaaattaaaattttatctgctagacctacttatcaaagtattaaacatcatatgtatggctttgtttccgttaaacatagtttttctactggtgagtggcttaaaagggcatccaaaataattaaacgcataaacaaaaaaggaaaaatagcacttgttgtcggagggacaggtttatattttaaagcattaacacatggtttttctgaaataccaaatattcctaaaccaaaagctaattttaaattaaataaaaattatattgttaaatttccaaaaatttttaaagatatatcttttaacgacaaacaaaggttgcaacgagcatttttggtatacaaacatactggaattcctttatggaagtggcagaaaaaaaataaaaaattttttaattctaaagactttaataaaatttatctttatccaccaaaaatagaagttgaaaatagaattaaaaaaagatttttagaaatgattaaaaaaggagcaatcaatgaaacaaaaaaatttataaaaattaatacaaacccaatgagtccatcaaactttataattggattaaaagaaatatcagagtttttaggcaatgaaatttcacttgaaacacttaaagaaaaagtagtcattagatcaagacaatatgcaaaaagacagtatacctggcagagaggccagatgaagggttggagaggatttagtgatactaattatctagatttaaggaaaaaagttataagatatttatctaaaactgacc

SEQ ID NO: 244797 - DNA, 347 bp, Unknown
  Bacterial polypeptide expressing nucleotide sequence isolated from the Sargasso Sea
catttcatgcggtgcacttaataggtaccgaaatgacctttatcaacgtattaataaacgcacactgagtatgctgggttcaggatggcttgctgaagttgagatgcttttgaacaggtattccccggaacttaaacctatgcaatctataggatacagggaagttgtacaatacctccaaaacaaactgaaatgggatactatggttgaagaaattcgaaaacgcacacgtcaattagctaagcgtcagttgacatggttccgcagggaagcaaagattgaatggtatcagcctgttgaacaggaccaaatattggctgacatcaaagtttaccttgaaaattagg

SEQ ID NO: 244798 - DNA, 646 bp, Unknown
  Bacterial polypeptide expressing nucleotide sequence isolated from the Sargasso Sea
catgatttgcggaccgacagcggccggcaagtcggcggcggctctggctcttgccgagcgatctggcggcacggtgatcaatgcggactcgatgcaggtctatagcgaccttcgagtggtgacggcgcggcccggctcagatgacgaggcacgggtgccgcatcgtctctacggcattgtcgatggcggcgagcgtgcctcggttgcaagctggctgggccttgccgccgaggcggttgacaaggcgcgcaacgccggcagcctgccgatcatcgtcggtggcaccggcatgtatctgcaggcggcgcgcaacggcatcgcgccgatccccgaggttccggcggagattcaccagacctgtctcgaagagctggcgtcgcgtggcggcgcggcctttcgcgaagaattgtcaaagctcgacgaggaggccgcctcgaggttgttcgacggggacagccagcggcttgtccgtgcgatgggagtcgtgcgggccacggggcggccgatcagcgcatggcagtcagacccgcatcagggcgctctggcaggagaggcggttgccatttccgtcatgccgccgcgtgccgatacctatgcacggatcgactggcgctttgcgcagatgatggaagagggcgccgtcgag

SEQ ID NO: 244799 - DNA, 898 bp, Unknown
  Bacterial polypeptide expressing nucleotide sequence isolated from the Sargasso Sea
ctgggaaaaactaaattagctatccatctagaaaaaaaatttcctcttgaaatcattagcgtagactctgcaatggtttatagggaaatggatataggtaccgataaaccaccaaaaaatattttagatacaattaaacatcatctaataaacattcgtaatcccaatgaagattttaatgttgcagatttttttcatgatactaatcaactaattagagatattcatagtcgtaataaagtcccgctattggtgggtggatcactaatgtattttaatagcttatatgaaggattatcaactttaccaaaaaaaaatacttcagatcgaaatttaattgatagtttattagaagtatatacaccacatgacctacataattgtctaaaaaagatcgatctaaaaacctataataagattcaatcaaacgataaacaaaggattcaaagagctcttgaggtttatatgtcttcaggaaacccaatttcatctttattgaaaaataaaaagtctttctcagagtcttatgatatcttaacgatcaaaatgttctctagtgatagatcagtcatacatgaaaaaattttgtcgaggatgatggatatgtttgatcaaggccttattaatgaaacaaaatatctcttagaaaaatataaattaacttcagactcacaatcaatgaaaatcataggttatcgacatgttttagatcacttaagagataattcaagcatagatgatcttaaaaacaagtgtttgttcgctaccagacaattggctaagagacagattacctggctcaagcaatttccatgtaatcatggtattgatattttagataatgaccccacaattacatataaggtagttgacagtcattgcaatttagttcaatagt

SEQ ID NO: 244800 - DNA, 407 bp, Unknown
  Bacterial polypeptide expressing nucleotide sequence isolated from the Sargasso Sea
tatgttccaaccaaaaccattagtcatagttttaatcgggcctacagcgagtggtaaaactgagctcggaatagatattgctaaacattttaatatcaatatacataatatagattcgaggcaactttatcgatgtatggacataggtacagcaaagccaactaaagaacaacaaaacacaataaagcattttttaattgatcttgtagaaccctctagcaaagtaaatgcaaaacaatttcaagagattgctacaaaatcaataaatcgagaactaagtcaaaaaagaataccctttctagtagggggaagcggattatatatgaattcaataataaagggattctttgcacccggatttacctcctcaaaaagctttaaggtcacaatagaaaaattaggtcaag

SEQ ID NO: 244801 - DNA, 901 bp, Unknown
  Bacterial polypeptide expressing nucleotide sequence isolated from the Sargasso Sea
tatgtctttagatccacctcatgtaataattttaattgggccaactgcaagtggcaaaacagaattagctattgaaattgcagaaaattttaaaactaatatacacaatatcgattcaaggcaaatatataagtctatggatattggaacagccaagccatctaaaatccaacaaaaaaaaataaagcattttttaatagatattgaagaaccaatcaatccaattaatgtaaaacaatttcaagaaattgctcagaaatctattaaaggagaaattaaacaagataaattaccttttcttgttggaggaagtgggttgtatatgaactcaataacaaaaggttttttcgtaccagatgtccctcctcaaaataatttaagaaaacaattagaagaacttggtcaggaaaaatgttgggacctgttaaaaacttgtgatccattgtcaacaaaaaaaatcaatattgctgaccatattcgaacaataagagctttagaagtcttctacgtaacaggtaagcctttatcaactctgaaagttcagaaaccacctaactggaaaatcttagagcttggtttagatagatataacttaaaagaaagaatttttcaaagaacaaaaaatatgtttttatctggaattattgaggagacgaaccaccttatctctaaatacggatttgatttgccaattttagaaacaattggttatcgagaagctcgggatattttaaataaccgttcaacaattgacaaagcaattgaattaactgcgacaaaaacaatccaatttgccaaaagacaaaaaacttggtttcgtaataaaaataatcctctttggcttaataacaaaaacctgctaaaagatgcaataattaagatagagtcttttttaagctaa

SEQ ID NO: 244802 - DNA, 901 bp, Unknown
  Bacterial polypeptide expressing nucleotide sequence isolated from the Sargasso Sea
tatgtcttcatatctacctcatgtaataattttaattgggcctactgcaagtggcaaaacagaattagctattgaaattgcagaatattttaaaactcatatacacaatattgattcaaggcaaatttataagtccatggatattggaacagccaagccatctaaaatccaacaaaaaaaaataaagcattttttaatagatattgaggacccaataaatccaattaatgtaaaacaatttcaagaaattgctcaaaaatctattaagggagaaattaaacaaaataatttaccttttcttgttggaggaagtgggttgtatatgaactcaataacaaaaggattttttgtaccagatgtccctcctcaaaataatttgagaagacaattagaagaacttggtcaggaaaaatgttgggacctgttaaaaaattgtgatccattatcaacaaaaaaaatcaattttgctgaccacattagaacaataagagctttagaagtcttttacgtaacaggtaaacctttgtcaactctgaaagttcaaaaaccgcctaactggaaaatcctagagcttggattagatagagataatttaaaagaaagaatttttcaaagaacaaaaaatatgtttttatctggaattattgaggagacgaaacaccttatctctaaatacggatttgatttgccaatattagaaaccattggttatcgagaagctagggatgttttaaataaccgttcaacaattgacaaagcaattgagttgactgcgacaaaaacaatccaatttgccaaaagacaaaaaacttggtttcgtaataaaaataatcctctttggcttaataacaaaaacctgctaaaagatgcaataattaaaatagagtcttttttaagctaa

SEQ ID NO: 244803 - DNA, 898 bp, Unknown
  Bacterial polypeptide expressing nucleotide sequence isolated from the Sargasso Sea
atgaataataaaaacctcatttacattggtggtccaacaggtgttggtaaaacagctatagcaatacatatagcaaaaaatctttcagccgagattgtttcatgcgattcgagacagttttataaagaaatgagtattggaactgctgtgccatcgaatgaagaaataaatttagttaaacatcattttatacaagacagaagtattaaaaaccctttaaatgttggaacgtatcaaaaagaatcaatttcaaaaattaataaaattttggaaaataataaatatgttatcttagttggtgggtctggattatatgcaaattctgttttatttggcatagacaagtttcctaaagttaataactctactattagaaaattgaataatatttatattaacggaggaataaaaatactgcaaaaagaattaaaaataagagattatgaatcgtataaatcaattgatattaataaccatagaagactaataagggttctatcagtttgtgttgaaactaatcttaaatattcaagttttttgggaaaaacaaaagaagtaagaaaattcaatcatcaaatctatattataagtgatgatcgaaatataatctataataaaataaataaaagagtagatagaatgatcaaaaatggactagaaaatgaggcagaatcactctataaagataataattctatagtttttgaaacagttggttacaaagagtgggtttcatattggaatggtcttaaatcaaaaacaaaaactatagatgaaataaaaaaaaatacaaggagatatgcaaaaaggcaattaacttggttcaaaaaatatgatgaagcattatggttgaaacctaatggtgctgcaaataaaattctaaataattataaataat

SEQ ID NO: 244804 - DNA, 952 bp, Unknown
  Bacterial polypeptide expressing nucleotide sequence isolated from the Sargasso Sea
atgaattataaatttgaatttccagcaatctttctaattgggccaacagcaagcggtaaaacagaactttcactttcaatagcaaaagaattcccagttgagattataagtgttgatagcgcgatggtttataaaggtttagatatcggcacatccaaaccatcaaaaaatataagagagtcttttaaacatcatctaatagatatactttcaccagaacaagattttgatttaggtttctttttagaagagacagctaaagctcttaaaaatattagagcaaaaaataaattgccattatttgtgggtggatcaatgttatttcataagactcttttagaaggtattcataattttccaagtgatatcaacgttcgcaaggaaattgcagctctgaataaatcatatggcctagagggtatgtctaaagaactaaagaatatagacccagagacttatcaaataatagatattaaaaatgcgcgcagagtagaaagagccttagaaatcataagaataacaggtaaaaaattatcacaactaaaaactgaaccaaaagaaatgttttttgatcaaaataagtgcttgctattaggaatatctgataaaaaaaataaattagaagatttagcaaacataaggctactaaagatggtagatgagggttttataaacgagcttgaaaatttaaaaaaagaatataaattaacttctgagtcacaaagtatgaattcaataaattacaaacagtttttgccacatataaatgggattatttcgttagatgcagcattcaatgatgcttttgatgctacaaaacaattaattaaaacacagttaaattggatgaaaaaatttgaactaaattactatgcgaatacagaagatataaatgattcaaaggtattttctgatacaataactacttatctaaggagctttgataaatgaa

SEQ ID NO: 244805 - DNA, 509 bp, Unknown
  Bacterial polypeptide expressing nucleotide sequence isolated from the Sargasso Sea
tatgtcttcacatacacctcatgtaataattttaattgggcctactgcaagtggcaaaacagaattggctattgaaattgcagaatattttaaaacgaatatacacaatatcgattcaaggcaaatatataagtccatggatattggaacagccaagccatctaaaatccaacaaaaaaaaataaagcattttttaatagatatcgaagaaccaattaatccaataaatgtcaaacaatttcaagaaattgctcaaatatctattaaagaagaaattaaacaagataatttaccttttcttgttggaggaagtgggttgtatatgaactcaataacaaaagggttttttgtaccacatgtccctcctcaaaataatttaagaaaacaattagaagaacttggtcaggaaaaatgttgggaactgttaaaaaattgtgatccattatcaacaaaaacaatcaattttgctgaccacattcgaaacataagagctttagaagttttctatg

SEQ ID NO: 244806 - DNA, 505 bp, Unknown
  Bacterial polypeptide expressing nucleotide sequence isolated from the Sargasso Sea
atggtgctggtgctggggccgaccgctagcggcaagacgggccttggaatcgccttggcgcaaaggctcgattgccgtgttctctcgattgattcgcgtcagctttatgcgggcatggacatcggcaccgccaagccaacaccagaagagcaacaacaagccccccatgagctgctgaacctgagcacccctgatgtgcccatcaacctgcagcagttctgtcgccatgcccagccgttgatacagcaagagcaacggaggggaaagcccgctctgctggtgggtggcagcggcctttacatgcaagccctcagccagggcctgcaaccgccagcactacccccacaaccagtgctgcgtcagcagctgcagcagctggggcaaacgtgctgccatcaacttctgagccaggcggaccctgaggctgcagccaagatccaacccaacgatccagtccgtacccaacgagctcttgaggtgctctacggaacgggtgcacccatct

SEQ ID NO: 244807 - DNA, 217 bp, Unknown
  Bacterial polypeptide expressing nucleotide sequence isolated from the Sargasso Sea
atggatttaaaatccaagataatattgatatctggtcccacagcatcaggaaaatcgagttttgcaattaaagtagcaaaaaaagtcgatggagagattattaatgcagatagcatgcaagtatacaaagagcttaaaatcttgtcggctagaccagatccaaaaaaatatcagaaaataaaacatcatttatatggttttcataatgtaacaaaaa

SEQ ID NO: 244808 - DNA, 910 bp, Unknown
  Bacterial polypeptide expressing nucleotide sequence isolated from the Sargasso Sea
attgaaaaaaataatttcaatttttgggccaactggaattggtaagtcaagtattgcgatagaattagcaaaaaaaaataatggagaaattattggtgttgattcaagacaaatttacaaaggagtttctattggcactgcccaacctaatcaaaatcaattaaatgaagtacctcaccaccttattggctttaaagatttaaatgaaaaaatctcagctggtgaatatttacaattaattgataaaaaaatagatcaaattttatcagaaaataaatctcccattttatgcggcgggacaggactttactttaagtcattagttgaaggaatattttcaggaagtcataccaatgaagtcattagaaaaagattagaacaagaatatgaaaatgataaagaaaaattgtttaagagactcattgaaattgatccaacttattctgaaaaagttcatattaataataaaaaaagacttgttagagctctagaagtttttgaaacaaccggaaagccaatgtctgaaaattttgacttaatttcaaaagctagtaagtatacagatgattattgttttgtttatttacaaatgaagaatcatttattacatcctagaatccaaaaaagaattgagtttatgattaatagtggaatgattgaggaagttgaagaaattattaataaaaaaattgatatttctcatatagactatatcggttttaaagaattatcgttgtttattaacaataaaatttctatcgaacaagccatcgaaaatatatttattagaacaagacaatatgccaaaagacaaaataagtggtttagtgctaatagatatgacataaactttgatttagaaaatttttcctcaaatgatattgttgataaattgattcaaataaactaa

SEQ ID NO: 244809 - DNA, 139 bp, Unknown
  Bacterial polypeptide expressing nucleotide sequence isolated from the Sargasso Sea
atggaccttaagtccaaaatcattttaattgcaggaccaacagcaagcggtaaatcaaattttgcaataaacttagcaaaaaaaattaatggggagataattaatgctgatagcatgcagatttacaaacaacttaaaa

SEQ ID NO: 244810 - DNA, 880 bp, Unknown
  Bacterial polypeptide expressing nucleotide sequence isolated from the Sargasso Sea
atggaaaaaagggacatactggttatctttggtcccacagcaagtggaaagtcaaagcttgcaactcaaattgcttctaaacataaatcagcaataattaattttgatagtctacaggtatacaaagatctaaagatactaactgatagaccagacgatgagatatgtaaaaaatttgaccatcgtctttatggtatgcttaaaggcaatgaaagttgctcagcagctatttggctagaaaaagctgaacatgaaattaataattgtttcgataataagttgcttccaattgttgtaggtggaacaggtttgtatttaaaggccttgatggatggactttcagaaattccttctataaaaaaaaatatagaagaacaagcaaagctggatttagaaacctatggtcttgatcatttatacaaaaaaatcttaattaaataccaaggcacaaaaattaatcctaatgataaacaaagaataatgcgtagttattcattactgcttcagactggaaaagttttagaagaatggcaatttaatccaaacaaaaaaattgataatgtaaattatagagtgatcctaactggcaatttacgtgagaagctatatgagtcagctgagcaaagagttgataatatgtttcatgatggtgctgtcgatgaggttcaatctttaattgataaaaattatagcgctgaattatctattatgaaggcaattggagttcgtgaaataaccaactttattgatggaaaagtcagtttagatgaagccaaaagcataatgaagaaaaacacgagaaactatatccaaagacaagatacttggataaaaggtaataatattactcaaaatgttgatataaagaaatatttataaa

SEQ ID NO: 244811 - DNA, 622 bp, Unknown
  Bacterial polypeptide expressing nucleotide sequence isolated from the Sargasso Sea
tattgttggtggtacaggattatattttaagtcattaacagacgggttagctaagattcctaatattccttcaaaattaagaaaagaaataattaaatttcataaaaaattaggacaaaagaaattttttagggaattaattaaattagatccaaaatgtaagacaagattagatccgagtgactcacaaagatcaataagagcatttgaggtaaaaaagttttcgggcatttcattattcgattggtttagtaaaaccaaaagcaattatgataaaaatcaatttattaaaatctacttagattttccgagagagataattttaaaaagaatagaagctagaagcaaaaaaattattggcaagcgatctattaatgaggtcaaaaaattcaataggctaaaggttaaaaagagtttgagctcaaataaaataataggaatttcagagattacagattttcttgacaaaaaatatgatttaaaagaactccaagaaaaaatatcaataaaaacaagacaatatgcaaagagacaagcgacttgggctaggggtcatatgtcagattggactcgtctttcactgattgagacaaaaaaatatattaaaaatttcaaatactag

SEQ ID NO: 244812 - DNA, 757 bp, Unknown
  Bacterial polypeptide expressing nucleotide sequence isolated from the Sargasso Sea
attcaagatttaaaaaaagttaaacatcatttatatggtataattgatgtaaacaaaaatttttcgactggagactggcttaaattatctataaaaacaataaaagaaattcgtaaaagaaaaaaaataccaattattgttggtggaacagggctatattttaaagctttaacagaaggatttgtgaaaatcccaactgttcctataagagtaagaaatcaaataagaaaattacaaaaaaaaattggtcaagaaaaattttttaataaacttaacgaaatagaccctaaagtaaaaaataaaattgaaaaaaacgatacccagagatctataagagcatatgaaataaagtattatacaaaaaaatcattatttgaatggtttaaaaatacaaaaaaatattttttagataacgaatttataaaaatttatatcaactacccaaaaaatgaagttattaaaaaagcaaattcaagagtaaatataatgttgaaaagtggagctatagcagaggttaaaaaattcaatacccttaagatcaggaaacaaaatagtgtcaataaagtaataggaatagtagaaataagtaattatttaaatgataattgcaatttagatgaagcaaaagacttaatatctattaaaaccaggcaatatataaagagacaatttacttgggctagaggacaaatggcaaattggaagcatattgatccaaaattaagcagttcagatttaaaaaaaattcttaggtagt

SEQ ID NO: 244813 - DNA, 271 bp, Unknown
  Bacterial polypeptide expressing nucleotide sequence isolated from the Sargasso Sea
aatggaccttaagtccaaaataatattaatctcaggtcccacagcgtcaggcaaatcgaaatttgcattaaaaattgctaaaaaattaaatggggaaataattaatgctgatagtatgcaagtatataaagaattaaacgtactgactgctagaccttcaaaaatcgatttaaaaaaaatagaacatcatttatatggttttagaagtgttaaaaaagaattttcgacgggtgagtggttacaattagcaaacaagaatataaaaaaataa

SEQ ID NO: 244814 - DNA, 148 bp, Unknown
  Bacterial polypeptide expressing nucleotide sequence isolated from the Sargasso Sea
ttgcaaaaaaaaaaacaaaaaaaaataatacttttatttggcccaactgcttcaggtaaatccagattagctatagatcttgctaaagaattaaacggagaaattattaatgcagatagtatgcaggtatataaagaagttaggattt

SEQ ID NO: 244815 - DNA, 396 bp, Unknown
  Bacterial polypeptide expressing nucleotide sequence isolated from the Sargasso Sea
actgcagaagagccccttagttgtcgtagggccaactgcctgcggtaaatccgcgttcgcgttagaaatcgctcgacgggttcgcggagttgagttgatatcgattgactcaatgcaggtgtaccgcaagatgaatatcggtactgctaagccgaccattgaagagcagcttgaaactcctcatcatctaattgacttggttgaacccagcgaaagttttaccctcgtcgactttcagcaagctcacgactctgttcggcgagatattgaggaacgagctggggtcccggtgcttgtcggaggtacgggactctatgtgcgagcgatcgttgatcggctgactcctcctccacggttcgctcaaatagcgtcgcaactagacgaggagcaggacac

SEQ ID NO: 244816 - DNA, 429 bp, Unknown
  Bacterial polypeptide expressing nucleotide sequence isolated from the Sargasso Sea
aatggactataagtccaaaataatattaatttctggctcaacagcatccggaaaatcaaatttttcattaaaactatcaaaaaaaattaatggagaaattattaatgctgatagcatgcaggtttacaaagaattaagaattttaactgcaagacctaaaaaaaaccaatatcaaaatatcaagcaccatctttatggttttcaaagtgtaaaaaaaagtttttcagcaggaaattggttaaaacttgctataaaaaaaattcacacaattaaaaaaagaaaaaaaattcctattttggtgggaggaacaggattatattttaaagttttaattgatggtatagtcaaaattccaaacattccgatcaaattaagaaataaagtaaggaccctccaccaaaaattaggacaaaaaaaattttataatga

SEQ ID NO: 244817 - DNA, 211 bp, Unknown
  Bacterial polypeptide expressing nucleotide sequence isolated from the Sargasso Sea
agaggccaaaaataatttaccaacttggaacaaatcacacccaagttcaaaagcaattggcgcccatgaattaatcgcatttctaaataatgagatttctaaggatcaacttcgtaagcaaatagtcatcgcgactaggcagtacgccaaaagacagaggacttggtttcggagtaaaatgaaaaactgggatagatacattattgaataa

SEQ ID NO: 244818 - DNA, 745 bp, Unknown
  Bacterial polypeptide expressing nucleotide sequence isolated from the Sargasso Sea
tctgcaagacctgaaaatacttctatcaagcatcacttgtatggctgtgtttctgtaaagaatagattttcgacgggcttgtggattaaaaaagcagtaaaaaaaattaatcaaatacaaaaaaaaggaaaaatagcgctagtagttggaggaactggtttgtattttaaagctttgacagaaggtttttctgaaatacccggtataccaaaaccaaacaaaaattttgaatttaataaaagttatgcggttaaatatccaaaaatatttaaaggtgtttcactaaatgataagcaaagagtgcaaagagcttttttagtatacaaacacacaggcaaacctttgtggctttggcaaaaaaaaaataaaaaattttttaaatctagtgattttattaaaatatatcttcaaccttctaaattagaaattgatgaaagaataaaagaaaggtttacagatatgttgagaaaaggagctattcgtgaagcaaaaaaatttattaaaattaatccaagttcaatgaactcatcaaattttataattgggcttaaagaaatatccctttttttaaatggagaactatcaatagaaaaactaaaggagaaagtatctataagatcaagacaatacgccaagaggcaatttacctggcagagaggtcagatgaagcactggaaaggatttggcgataccaattatcttgatttacggaaaaaagttataagttatttatctaaaacttgac

SEQ ID NO: 244819 - DNA, 187 bp, Unknown
  Bacterial polypeptide expressing nucleotide sequence isolated from the Sargasso Sea
atgagagaaaaaaaaataatttctattgtaggacctactgcatctggtaaatctgatttagctataagtattgctgaaaaatacaaactctcaataattaattctgattcaaagcttctatataaaggactaaatattggaacagcaaaaccttcgattgaagaacttaataaaactaagcattata

SEQ ID NO: 244820 - DNA, 322 bp, Unknown
  Bacterial polypeptide expressing nucleotide sequence isolated from the Sargasso Sea
ttgaaaaaaactatttatgtaatagctggtcctactgcgactggaaaatcagatttctctataaaattagcaaaaaaaattaatggagtcgtaataaattctgatagtatgcaagtttataaaaacttacaaatactcacagctcgacctacttcatcagagactaaaaatattcctcactatatgtatggttacattgatggtaaggaacgctataacgttgacaagtggtgcaatgatgtagttggtattattcatcagacctgtagaaataatttttcaccaatattagtaggtggaactggtttgtatattgatacat

SEQ ID NO: 244821 - DNA, 134 bp, Unknown
  Bacterial polypeptide expressing nucleotide sequence isolated from the Sargasso Sea
aatggatttaaaatccaagataatattaatatctggacctacagcatcaggaaaatcaagttttgcaattaaagttgcaaaaaaagtcgatggagagattattaatgcagatagcatgcaagtatacaaagagc

SEQ ID NO: 244822 - DNA, 717 bp, Unknown
  Bacterial polypeptide expressing nucleotide sequence isolated from the Sargasso Sea
ttccagatgggaactattctgcaggacagtatgcaagggacacttcaaaaattatcaagaatattcaagagagagggcgtttgccaatactggtaggaggcactggtttatattacaggtcacttatgtatggaatcagcaaaatacctccaattcctgaaagtcttcgtatagagataaaaggctggcatcaaaatcatggcacttcatattgttacaagctgctgcagaaaaatgatccagaatttgcggaatttctgcacccaaatgatacctctaggatcttacgaagtcttgaagtcgtactttcgactgggaaatcaatacattcatatcggttggagcagccatttggtgaagcactttatcaatttcaagcagttgcgttgaattgggatcgaactgatctttatcaaagaattaataaacgtaccctgagtatgctgggttcaggatggcttgcagaagttgaaatgcttttgaacaactattcaactgaacttaaaccaatgcaatctataggatatagggaagttgttcaataccttcaaaataaactaaaatgggaagtaatggttgaagaaatacaaaaacgcacccgtcaattcgctaagcgtcagttgacgtggtttcgcagggaagctaagatcgagtggtatcaacccgttgaaaaggatagaatcttggctgacataaaagtttaccttgaaaattagc

SEQ ID NO: 244823 - DNA, 289 bp, Unknown
  Bacterial polypeptide expressing nucleotide sequence isolated from the Sargasso Sea
atggattttaaatccaagataatattaatttctggaccaactgcttcgggaaaatctagttttgcaattaaacttgcaaaaaaattaaatggagaaattatcaatgcagacagtatgcaggtttataagcaattaaagattctttctgcaagacctgatcaaaaaaaatatcaaaaaattaaacatcatttatacggttttcatgatgtcaaaaaaaatttttcaattggaaattggctgaagttagttttaaaaaagattgaggaaataaaaagaagaaaaaaaaccc

SEQ ID NO: 244824 - DNA, 538 bp, Unknown
  Bacterial polypeptide expressing nucleotide sequence isolated from the Sargasso Sea
tagagataaaataagaagacttcaaaatagaataggtcaaagaaagttttttaaaaaattaattaaattagatcctttgattaatgataaaatcaatcctacagatatgcaaagatccattagagcctacgaggttaaattttatacaaaaaaatcaatagttgattggtttaaaaaaactaaatcaaaatatgctgatgaagattttgtaaaaatttatattgattttccaaaacaagatttattagacaatatttcaacgagagttgatcaaatgtttgaacaaggagctattatggaggtcaaaaaatttatgaagctaaaattaagaagtgatagttctgtaaataaagtgattgggattaacgaaattaaagattttattaataaaaattctgatttaaatgagactagggaaaaaataacaataaaaacaagacaatatgccaaaagacaaagtacatgggcgagaggtcagatgaaggattggcaaaaagtaaatccaaatgatctaaaaaaatttttaaaaaaaatataa

SEQ ID NO: 244825 - DNA, 367 bp, Unknown
  Bacterial polypeptide expressing nucleotide sequence isolated from the Sargasso Sea
attcataaaactatatttagattattcaagagaggagctacttaagcgaattaatgtaagaacaaaaaaaatgattaaatctggagcagtatctgaggtcaaaaaactattaaaagaaagaaatgtaaaaaaagagaattattataaaatcattggatttaaagaaattgaaatgtttcttgaggggaaaatagataaaaacaatttatgtgatcaaatcaatatacgaactaggcagtatgctaaaaggcaaattacatggtttaggggtaaaatgaaatcatggacaccaattgatccaaataaattgactcctttcataaaaaaattaaataaatcatcacttaaacttgaccaattaatataa

SEQ ID NO: 244826 - DNA, 943 bp, Unknown
  Bacterial polypeptide expressing nucleotide sequence isolated from the Sargasso Sea
atgctctctagtaaaaaaaagccagtagtctttctttttggtcctacagcatctggtaaaacagagctagcaataaatctagttgataaatttccaattcaattgattagtgtagactctgtaatggtttacaaagattgcaacattggttcagcaaaaccaacaaaagaaattttaaaaaaatatcctcatcatataatagatgttgtaagccctaatgaaatttttactgttgcagatttttgcgctatatcaaagaagataataaaaaatgcacactataaaaaaaaattacctgtgcttataggtggttccatgatgtacttcaaatcactattagatggaatacatgatttaccagcaagggatgaaaattacagacaagaattaagcaagttaaaattaaataataatgataatttcttatacaacctattaaatgacatagattctgattatgcaaaaaagataaataaaaatgatgaagttagaattatcagggctttagaagtttttaaggtaactggaaaattaatgagtgagattatctctaataattcaaataagaaattatcttttgattatgaaatcgctcaatttggaattattcatgatagagagttgcttcataaaagaattgaatcaagattgaataaaattattgaagaaggtttattagaagaggcaaaatctcttttaaaaaaatataatatcgatcttgaacaccctctaagacgggctgtaaattataaacaagctttcagttatctaaataatgaatatgaatacgatactttttacaaaaaagcgctatatgcaactcgtcaattagcaaaaaggcaaacaacatggttaagaagttggaaagaatttgaagaaattgatattaatcaacaaaacaatatagaaaatagtattaaaaatcttatatctttactttaaa

SEQ ID NO: 244827 - DNA, 270 bp, Unknown
  Bacterial polypeptide expressing nucleotide sequence isolated from the Sargasso Sea
aatgacatatagattccagtctcctgcagtttttttaattggacctactgcttcaggtaaaaccgatactgcaatcaaactagctgaaaaatatccttttgaaatcataagcgtcgacagcgctatggtgtttaaggatatgaatattggaacttgcaaaccatctaaccaagatcttgagagaatccctcatcacttaatagatataatcaaacctgataccaaattcgatgtagggctttttgtaaattacgttgagtcagcagtaaa

SEQ ID NO: 244828 - DNA, 145 bp, Unknown
  Bacterial polypeptide expressing nucleotide sequence isolated from the Sargasso Sea
aatgaacttaaggactaaaataattttagttgctggtcctactgcatcaggaaaatctacttttgcattaaaaattgctaagaaaatcaaagaagaaattataaacgcagatagcatgcaagtttatagcgacttaaaaatataa

SEQ ID NO: 244829 - DNA, 952 bp, Unknown
  Bacterial polypeptide expressing nucleotide sequence isolated from the Sargasso Sea
gatgaattataaatataactttccagcgatttttcttattggacctaccgcaagtggcaaaacagctgcttccattgctttagcagaaaatcttccaattgagatagtcagtgttgatagtgcaatggtatataaaggaatggatattggaacatcaaaaccaccagagattgagagaaaaggaattccacatcatctaatcgatattatctcacctgatagaaatttcgacttaggattatttttacaagaaactcatagagctatagaagaaattttaaaaaataaaaattttcctttatttgtgggaggatcgatgctttttcaaaaggtattgcttaatggcatacacgactttcctagtgatgaaaatattagaaaacaaattcaaaaagatataaaagagaatggaatcgatttccttattgatgaattgagacttaaagatgaggaaaccttcacatctatagatttaaaaaatttaagaagagtagagagagcagttgagattataagaatcaccgaaactaaattatctattttaaaaaaacaggaaatcgaaaaattttttgactacaacaagtgtctggttttaggaatatttaacaaaaaatcaaccttggaatcattagctaaaaaaagattagaaattatggttaatcagggaatattaaatgaacttgaaaatctgaaaaaggaatataaattaaatgctggtcatcaaagtatgaatgctatcaactataagcagttcttagctcatcttgatggtaaggtttctttagaatcagcttttgaacaagcctttgatgctactaaaaaccttattaaaactcagcttacttggatgaaaaaatttaatttcaataattcaatgaatgcagaatatgccgatgattcagatactttttctgatacaataaacacttatttaaggagctttaataaatga

SEQ ID NO: 244830 - DNA, 319 bp, Unknown
  Bacterial polypeptide expressing nucleotide sequence isolated from the Sargasso Sea
ttagatttgagtatgtgcaaggcttttttggtggacggagaagtttcactaataaataaccggattctccaacgtttggaccagatgatagaaaaaggacttattcaagaagctgaaaataatctagcaacttggaacacattacacccaagctcaaaagcaattggggcccatgaattaattgcctatctaaataatgaaatttctatggagcaactccgagagcaaatagttatagcaaccagacagtatgctaaaagacagcggacctggtttagaagtaagatgaaaagctgggaaagatattattttaaatgaa

SEQ ID NO: 244831 - DNA, 157 bp, Unknown
  Bacterial polypeptide expressing nucleotide sequence isolated from the Sargasso Sea
aatggatttaaaatccaagataatattaatatctggacctacagcatcaggcaaatcaagttttgcaattaaagttgcaaaaaaagtcgatggagagattattaattcagatagcatgcaggtatacaaagaacttaaaatcttgtcagccagacca

SEQ ID NO: 244832 - DNA, 209 bp, Unknown
  Bacterial polypeptide expressing nucleotide sequence isolated from the Sargasso Sea
ttgggagattatccagtttctgagaggggaactgaaatcatccgatctggtaccactgatccaacaacggactcggcagtatgccaaaaggcaattaacatggttccgcaaggaaaaccacctggtatggagccaccccgacaagaaagagcagattctcaaagaatgcatggtttgccttgaaaagatagttcaaaaccaagcatagt

SEQ ID NO: 244833 - DNA, 771 bp, Unknown
  Bacterial polypeptide expressing nucleotide sequence isolated from the Sargasso Sea
cagccagaccaacaataaaagacacaaaagaagtcaagcatcatttgtatggttttattaatgtaactaaaaacttttcaactggcgaatggcttaagttatcaaaaaaaaaaattaaagaaattcgcaaaagaaaaaaaatacctataattgttggaggtacaggtttatactttaaagctttaacagatggatttgttcaaatccccaatgtaccttttaaaataagaagtaaaataagaaaactacaaaataaactaggtcaagataagtttttttcagaactaaaaaaaatagaccctctagtaaaaaataaaattgaaaaaaatgattcacagaggtctattagagcatatgaaataaaatattataccaaaaaatcattatttaaatggtttcaaaatacgaaaaaaaattttttagacacagaatttattaaaatatatatcgattaccctagagatgagcttgttaaaaaggcaaatcttagagtaaataaaatgtttgaaattggagctgtagcggaagtaagaaaatttaatagacttaaggtaaaaaaacaaaatagtgccaataaagtaataggaattgaggaaataactaattatttaaataatagatgtgatttaagagaagccaaagacttaatatcaattaaaacaaggcaatatattaagcgacagatcacctgggctagaggtcaaatggcaaattggacctatattgataaaaatatcactagctcaaatttaaaaaaaattcttagatagt

SEQ ID NO: 244834 - DNA, 250 bp, Unknown
  Bacterial polypeptide expressing nucleotide sequence isolated from the Sargasso Sea
tatgttccaaccaaaaccattagtaatagttttaatcgggcctacagcgagtggcaaaactgagctaggaatcgaaattgctaaatattttaatctcaatatacataatgtcgattcaagacaactttatcgatttatggacataggtacagcaaagccaactaaagaacaacaaaaaacaataaagcattttttaatagatcttgaagaaccctctagccaagtaaatgcaaaacaatttcaagaaatt

SEQ ID NO: 244835 - DNA, 401 bp, Unknown
  Bacterial polypeptide expressing nucleotide sequence isolated from the Sargasso Sea
tatggatttaaaatccaaaattgttttaatttatggaccaacggcctctggaaaatcactattcgcaattaagttagcaaaaaaaattggtggggaaataatcaatgcagatagcatgcaggtttataaagaattgaaagttttaacagcaaggcccttaaagaaagattataataatattaagcatcatttatatggttttcaaagtgttaaaaaaaaattttctactggtgattggcttaaattagtaaaagaaaaaattgaaaatataaaaaaaagaaaaaaagtacccattcttgttggtggtacaggcttatatttcaaagcattgacagatggtttagtagatattccaaacattccaatgaagtttagaaaaaatattagatatttacacaaaa

SEQ ID NO: 244836 - DNA, 604 bp, Unknown
  Bacterial polypeptide expressing nucleotide sequence isolated from the Sargasso Sea
atgctttatttgaattctcttagtaatgggattgctcaactgccagaaaaaaatatgcaaatacgagaagaaatagaaaagaaagctcagaaaaagggttggggagaaatgcatgctgaattaaaaaaaatcgactcatgcgcagcaagtaatattaacaaaaatgataaacagagaattcaacgagcccttgaggtttattatgtaactggaaaaaagatctcagaattacaaaaaaaagcaacacctcaaaataattatcaatttgaagttttttctttgaaaaatataaatcgcgatgaactttattcaaaaattaataatagatttcttggtatgcttgaggctggttttgttgatgaggtccgtattttaagagaaagagaaggattgtcatccgagaacatgtctatgcgttctgttggctataggcaaatctggaaatatcttgataatgaaatagatttaaatgaagccacagaactagctcaaaccgcgaccagacaacttgccaagagacaactcacatggatgaggagtatgaaaaatcttaagcaagaaagtcataaaaatatttataaaaaaattgagtcattaacataaa

SEQ ID NO: 244837 - DNA, 529 bp, Unknown
  Bacterial polypeptide expressing nucleotide sequence isolated from the Sargasso Sea
atggatttaaagtccaaaattgttttaatttacggtccaactgcatcaggcaaatctgattttgcaataaaactagcaaagaaaataaaaggagaaatcgtaaacgcagatagtatgcaggtatataaagaattaaaaatattaactgcaagaccaataagaaaaaattttcaaaaaattaaacatcacttatatggttgtcaaaaatcttataaagatttttctactggtgattggcttaactttgctgaaaaaaaaatcaaagaaatcagactaagaaaaaaaactccaattttagttggaggcacagggctatattttaaagcgttgactgatggactagttgaaataccctcaattcctctaaaatttcgtaataaaattagatcaatgcataaatctgtaggacaagacaaattttataagaaacttttaaagctagatccattgatagtgaatcaaattaattctactgacacccaaagatctttgcgagcttatgaagtaaaattatttacaaaaaaatcgg

SEQ ID NO: 244838 - DNA, 619 bp, Unknown
  Bacterial polypeptide expressing nucleotide sequence isolated from the Sargasso Sea
ttgataaaaaaattaattttaatctcaggacctacagcttcaggtaaatcaaaattagctgtcaaattagcaaaaaaaataaagggcgaaataataaacgctgatagcatgcaaatttacaaagaattatctatattaacttcaagacctagcaaaaaaaatcaaagagaaataaatcaccatctttatggttttttatcagcgaaaaaatatttttcagttggtcaatggttagaattagtaaaaaaaaaaatacaacaaataaataatagaaaaaaaataccaatagttgttggaggtactggcctatattttaatgcgattactaaagggataagtaaaatccctaaaattaatgaaaaaagcagaaaaagaataagaaaatatcacaaaaaaataggtcaagaaaaattttatcaagaacttttaaacattgatccgaaaagtaaaaataaaattttatctaccgatacacaaagaaccttaagagcatatgaggtaaaattttgtactaataaatctatttttgaatgggctgaaaatacaaaatcagattttcttaattacgatattaaaaaaattttaatcgaagttcccagaaataaatcttttaattaat

SEQ ID NO: 244839 - DNA, 520 bp, Unknown
  Bacterial polypeptide expressing nucleotide sequence isolated from the Sargasso Sea
ttgaaaactcaaatctattttgtactaggacccactgcttcaggaaaatcaaaatttgctttaagcttagctaaaaaactaaatggtgagattataaatgcagatagtatgcagatttataaagagttaagtatcttaacagctagacctactatacatgatcaaaaaaaaataaatcatcatctttatgggtttgtaaaaggcgaaattagatttaatgtacaaaaatggtgtgaggaagcatcaacaaaaattaattatttggttgataaaaacataactcctattttggttggaggtacaggtctttacatagagtctttaattaatggaatagtttcaattccatttattccagaaaaagtaaaaaaagaatcagaaaaaatgattttaaaaattggtaaggaaaatttttttaatttagttaaagaacatgatgttgatgcaatgaaaaatatttcacccaatgatattcaaagaataagaagaatttgggaagtaaatttttttactaagaaaa

SEQ ID NO: 244840 - DNA, 551 bp, Unknown
  Bacterial polypeptide expressing nucleotide sequence isolated from the Sargasso Sea
tatggaaaataaaattattcttatagctggaccgacagcatcgggaaaatcatcacttgcaaatgcactagctaaaaaaatagatggtgaaataattaatgctgattcaatacaaatttataaagatttagaaatacttactgctcgacctaaaccgaaacaaaatgaccctaatcaccatctttatggttttgtaaatggtgatgaattatggtcagtaggaaaatggattaatgaagcaaagaaaataacccaaaagattttaaaaaaaaattcaacacctattctagttggtggaacaggtttgtattttaaagctattactgatggattgtctccaattcctgatattaattacgaaataagaggcagtttaaaaaaagaattaaatataagaggtttagaaaaactatatgaagagcttaaagttacagatattcaagcatatgaatcaatagatagaaatgatcaacaaagaattttaagagctttagaagtatttagaggtactggcaaaagatatctgattattggaaattggatagataaaa

SEQ ID NO: 244841 - DNA, 481 bp, Unknown
  Bacterial polypeptide expressing nucleotide sequence isolated from the Sargasso Sea
atggaccttaagtccaaaataattttaatatcaggaccaaccgcatcaggtaaatcaaaatttgcagtaaaacttgcaaaaaaaattaaaggtgaaatcatcaatgcagatagcatgcaagtttataaagaattaagaatcttaacagcaagaccagcaaaaagtgattacaataaaattaaacatcatctatatggttttgaaagtgttaaaaaaaatttttctacaggaaaatggcttaagcttgcaaataaaaaaatagacataataaaaaaaagaaaaaaaattccaattttagtcgggggtacaggtttgtattttaaagctttaacagatggtttagtaaaaattccaaatattccaattcaatctagaaataaaataagaaaccttcaaaaaaaactaggtcaaaaaaaattttttatgagattaattaaattggatccatcagtaaaagaaaaaattaaatctactgatgtgc

SEQ ID NO: 244842 - DNA, 714 bp, Unknown
  Bacterial polypeptide expressing nucleotide sequence isolated from the Sargasso Sea
tatggatttaaaatccaaaattattttaatttatggacctacggcatctggcaaatctaattttgcagttaaactagcaaaaaaaattgatggtgaaataataaatgcagatagcatgcaggtatacaaagaacttaaagttttgtctgcaagaccctttaaaaaagattatcaaaaaattaaacatcatttgtatggtttccaaagtgtaacaaaaaatttttccacaggggattggttaaaattaattgatcaaaaaatttcaaatttaaaaaaaaggaaaaaagtcccagttatagttggaggcacaggtttgtattttaaggcattgactgatggcttagttaatattccaagcattccaataaaatttagagaaaagattagatcgttacataaaaagattggacctaaaagatttttttcaaggttaataaagttagatcctttagccaagcataatctcaattactcagatactcaaagatgtataagagcttatgaggttaagttatttactaaaagttccatttatgattggtttaaaaaaactaaatctaactatgaacagaaagatttttataagatttatatagattttcctagaaatcagcttttagatagaattaatttaagagctaaagaaatgatcaaaaaaggagccgtattggaagttaaaagatttattaaaataaaagttcgtaaagacaagac

SEQ ID NO: 244843 - DNA, 484 bp, Unknown
  Bacterial polypeptide expressing nucleotide sequence isolated from the Sargasso Sea
aatggacctcaagtccaaaataattttaatatcaggacctacagcatcaggaaaatctaaattagcaattgaatttgcaaaaaaaataaatggagaaattataaatgcagatagcatgcagatttataaagaattaaaaatattaacagccagaccaattaaggagaatatcaataaaattaaacaccatctatatggttttcaaagctgtaaaaatgaattctcgactggcgaatggttaaaattagttaaaaaaaaaataaatgaaattagaaataaaaacaaaatacctattttggttggaggcaccggactttattttaaagcactgacagatggattggttaagataccaaatattcctagtaaaatcagaaataaaataagaaacattcaaaaacaaataggtcagaaaaaattttatataaaacttttaaaattagataaatctgtaaaaaataaaatagacccaacagatgtccaa

SEQ ID NO: 244844 - DNA, 528 bp, Unknown
  Bacterial polypeptide expressing nucleotide sequence isolated from the Sargasso Sea
tttgtctaaaaaaataattctcttagcaggaccaaccgcatcgggtaaatcaagattagcaatacaactagctaaaaagttaaatggcgagattataaatgctgatagcatgcaaatatataaagagttttcaattttatcttctagaccaaatagcaaagaattaaaaaaaattaagcatcacttatacggaatcatttctgcaaaaaaatacttttcagcaggggaatggcttaaatttgcaaaaaatagaataaattattgtcataaatttaaaaaaattccaattatagtaggtggaacaggtttgtattttaatactattaccaagggtattagtaaaatacctcatatagatatacaaataagaaataaggtaagaaacctttttaagaaattaggatataaggttttttacgaaaaacttttagatcttgatccaaaagttaaaaacaaaattttacctagtgatactcaaagatcacaaagagcttatgaagttattttaaaaacaaaaaaatcattatt

SEQ ID NO: 244845 - DNA, 367 bp, Unknown
  Bacterial polypeptide expressing nucleotide sequence isolated from the Sargasso Sea
aatggaccttaagtccaaaataattttaattgcaggacctaccgcatcaggcaaatcaaaatttgctattcagcttgcaaaaaaaataaatggagaaattataaatgcagatagtatgcaaatttataaagaactcaaaattcttactgtaagacctaagaaaattgaccaaaaaaaaatcaaacaccatctttatggaattcagagtgttaaaaaagacttttcgtcaggtaaatggctcaagcatgcttataaaaaaattatagaaataagaaaaagaaataaaactcctatttttgtaggaggtactggcctttactttaaatctttaacagatggtttaacaaaataccaaatattcctataa

SEQ ID NO: 244846 - DNA, 430 bp, Unknown
  Bacterial polypeptide expressing nucleotide sequence isolated from the Sargasso Sea
atggaccttaagtccaaaatcattttaattgcaggcccaacagcaagtggcaaatcaaacttctcattaaaattagcgaaaaaaattaatggtgaagtcataaatgctgatagtatgcaggtctataaacaacttcaagttttaacagcaagacccatcaaaaaagacataaaaaaaattaaacatcatctttatggtttttgtgatgtaaaaaaaaatttttcaacaggagaatggctaaagctttctataaaaaaaataaagggaattcgaaaaaaaaagaaagtcccaataatcgtaggtggaaccggattgtattttaaggctctaactgaaggtttagtaaaaatacctaatattccaattagattaaggaacaaaattagactaatgcaaaaacaattaggtcaaaaaaaattttataaaaaac

SEQ ID NO: 244847 - DNA, 562 bp, Unknown
  Bacterial polypeptide expressing nucleotide sequence isolated from the Sargasso Sea
aatggaccatcagtccaagattattctaattgcaggtccaacagcatctggcaaatcaaattttgcggtaaatcttgctaaaaaaattgatggagagatcatcaatgcagatagtatgcagatttataaacaattaaaaattttaactgcaagacctaataaaaacgaacaaaaaaatatcagacatcacctttacggaattattaatattaataaaaatttttcttctggtacttggttaaaattagctattaggaaaataaaagagattagaaaaagaaaaaaaattccaattgttgttggtggcacaggtttatattttcaatctttaatcaatggtctagttaaaattcctaatatttcaatgaaattaagaaacaaaataagatcaatgcaaaaaaaatatggacaaaaaaatttttataaaaagcttttaaaattagatccaaaagtcaaaaataaatttgaccctaatgatacacaaagatcaattagagcatttgaaattaagacccatacaaaaatttctatgtatgattggttccacaaaaccaaacctatc

SEQ ID NO: 244848 - DNA, 388 bp, Unknown
  Bacterial polypeptide expressing nucleotide sequence isolated from the Sargasso Sea
tttgtacaaaaaactaattcttattgcaggtccaacagcatcaggaaaatctaaattagctattcatttatcgaaaaaattaaatggtgagattatcaatgcagatagcatgcagatatataaagaattttcaattttatcctctagaccgacaaaaaatgaggaaaaaaaaatcaaacaccatttgtatggtttcatttccgtaagaaaacgtttttctgctggtgattggctcaagttagccaaagtcaaaataaacaattgttataaaaataaaaaaatcccaataatagttggtggaaccggtttatattttaatactattactaaaggaatttcaaaaatacccaatatagaccttaaaacaagatataaggttagaagtcta

SEQ ID NO: 244849 - DNA, 417 bp, Unknown
  Bacterial polypeptide expressing nucleotide sequence isolated from the Sargasso Sea
aatggacctaaagtccaaaataatattaattgcaggacctaccgcttcaggcaaatcaaaatttgctgttcagcttgccaaaaaaataaatggagaaattataaatgcagatagtatgcaaatttataaagaactcaaaattcttactgcaagacctaagaaaattgaccaaaaaaaaatcaaacaccatctttatggaattcagagtgttaaaaaagacttttcgtcaggtaaatggctcaagcatgctaaaaaaaagattaaagaaataagaaaaagaaataaaactcctatttttgtaggaggtactggcctttactttaaatctttaacagatggtttaacaaaaataccaaatattcctataaaatttagaaataaaattagaaacttacaaaataaaatcgggcaagaaaa

SEQ ID NO: 244850 - DNA, 706 bp, Unknown
  Bacterial polypeptide expressing nucleotide sequence isolated from the Sargasso Sea
ttgcaaaaaaaaataatattactagcaggtcccacagcatcaggaaaatctaatctggcaattttattagcaaaaaagatcaaaggtgaaatcataaacacagacagtatgcaagtatacaaagagtttttaattttatcttcaagaccatcaaaaaacgatcttaaaaaggtcagccatcatttatatggatttttatctgtcaaaaaaaatttttcaacaggagagtggttaaaattagtgaaaaaaaaaatttatcaaattacaaaaaaaaaaagaattcccattttagttgggggtacaggtctttattttaatgcaataactaaaggtattagtaaaattcctgtaataagtgataaatatagagagactattagagccaaccataaacttataggtcaaaaaaaattctatgaaaaattaattgaactagatcccctttcacagaaaaatatctctccaaatgatactcagcgaagtataagagcatatgaagttaaattttttactggtaaatccttgtatgagtggatttcaaaaactaaatccgattttattgattatgatataagaaaaatttaccttgatacaccgagagatgttttattgaaaaaaattgaacaccgcactaacaaaatgtttaaggaaaattgtgcgaaagaggtaaaaaattttttaagtttaaatataaaaaatcacttca

SEQ ID NO: 244851 - DNA, 770 bp, Unknown
  Bacterial polypeptide expressing nucleotide sequence isolated from the Sargasso Sea
attgaaaactcaagtctattttgtattagggcctactgcatctggaaaatcaaaatttgctttaaaattagctgagaaactaaatggcgaaattataaatgcagacagcatgcagatttatagcgagttaagtatcttaactgctaggccaacaataaatgatcttaaaaaaataaatcaccatctatatggttttgtaacaggtgatgtcagattcaatgttcaaaaatggtgcgaggaagcatcaaaaaaaatcaatcacctagttaataaaaatattacccccattttagttggaggtacaggtctttacatagaatctctaattaatggaattgtttcaattccattaataccagaaaaaataaaaatagaatcagataaaatgatttcaaaaattggtaaggaaaatttttttaatttagttaaagaacttgatagtgatgcaatgaaaaaaatttcacccaatgatattcaaagaatacgaagaatttgggaagtaaatttttttactaagaaaaaatttagttactggaaacaaaataaaaataaaaaacaaattaatttgaaagactataaaatattattatttcttcccaataaaaatgaaaattacaaaagagttgatgatagaactcatattatgatgaacgaaggtgcaatattggaggtagaaaaattactaaaactaaaatacaataatagtttacctattatgagggctcacggagttcctgaaattaaatcttacctaaataatcaaatatcaa

SEQ ID NO: 244852 - DNA, 668 bp, Unknown
  Bacterial polypeptide expressing nucleotide sequence isolated from the Sargasso Sea
gatgggacaaaaaaaaacaatacttttatttggtccaactgcttcaggcaaatctaagctagcagtagatattgcaaaaaagttaaatggtgaaattgtaaatgcagatagtatgcaaatttataaagaaattaaaattttatctgcaaggcccaatgagcaaactgtaaaacaccatttatacggtttcatttctgcaaagaataatttttcagtaggtgcatggtacaaattagctgctacaaaaattaaagaaattaagaaaagaaataaaacagcaattgttacgggaggtacaggtttatattttaaagctttagttgatggattggctcaaataccaaatgttccaaaaatagattatagctatttaaatcccatcggaagatttatgatgaaaaatcattaccaaaaaaaatatccaaaaatttttaagggtattaacacaaacgatattcaaagagtttcccgagcaatttctgtttataatgcaacaggagtaactctaaacgaatggcaaaataaaaaaaataaaaaatattttaattctaaagaatttattaaaatttgtctcattcctcccaaaccagttttagaagaaaagataaaaaagagattttcagagatgttgaaaaaaggtgccattcaagaagctaggaaatatagaa

SEQ ID NO: 244853 - DNA, 475 bp, Unknown
  Bacterial polypeptide expressing nucleotide sequence isolated from the Sargasso Sea
ggtgcccgcatccatcccaatgacccgcagcggctcagccgggcgctggaggtctaccgcatcagcggcaagacgctcaccgagctgacccaggtgcagggggaggggctgccctatcgggtgttgcagtttgccatcgcgccgagcgatcgcgccgtgctgcaccagcgcatcgagctgcgctttgacaagatgctgcagggcggctttgaacaggaagtcagggcgctctatcaacggggcgatctcaccccggatcttccctccatccgctgcgtgggataccgccaaatgtgggactacctggcgggggaagtggagtatgatgagatgcgctatcgcggaattgttgccacccgccagttggccaagcgtcaaatgacctggttgcgcggttggtctgatgtgacctggttggaatctggtgagtctggcaatctggcaagggtcgtcgcccgtgccggagtggcttgac

SEQ ID NO: 244854 - DNA, 892 bp, Unknown
  Bacterial polypeptide expressing nucleotide sequence isolated from the Sargasso Sea
tatggatttaaaatccaaaattattttaatttatggacctacagcctcaggtaaatctcaatttgcagttaaacttgctaagaaaataaatggtgaaataattaatgctgatagcatgcaagtttataaggagcttaaaattctatcagcaagaccttttaaaaaagatcagcaaaaaataagtcatcatttatatggatttcaaaatgtaaaaaataatttttcaaccggggattggttaaaactagttaataagaaaatttttattataaaaaaaagaaaaaaaattccaattctggtcggaggcactggcttatactttaaggctttaacagatggtttagttgatattccaaatataccaaataaattaagagaaagaattaggtctttacataaaaaacttggtgcaaagaaattttttttagaattaaaaaaaatagatcctttaatcaaaaatcaaattaatttctcagatacccaaagatctataagagcttatgaagtaaagttatacacaaaaagatctatttatgattggtttgaaaacacaaaatcaaattatcagcaaaaagatttttataaaatttgcattgattttccaaagaatgaattattgctcaggatcaatttaagaaccctagatatgatcaaaaaaggggctattttagaagttcgaaaatttaataaaattaaagtccgtaaagataaaacagctactaaagccattgggatcaatgaagttaatgaatatctccaaaaaaaaattgaaattaaagaacttattgagaaaatatcaataaagaccaggcaatatgccaaaagacaaaggacgtgggcgagtgggaacatgcaaaattggatcaaattgactccgaaagattttaactaa

SEQ ID NO: 244855 - DNA, 685 bp, Unknown
  Bacterial polypeptide expressing nucleotide sequence isolated from the Sargasso Sea
tatggatttaaaatccaaaattattttaatctacggaccaacagcatcaggaaaatcagaattcgcagtaaaacttgcaaaaaaaatgaggggtgaaattataaatgctgatagtatgcaggtatataaagagcttaaaattttatctgctagaccatctaaaaaagattacaaaaaaattaagcatcatttatacggatttcattctgtaaaaaaaaattactcatcaggagaatggcttaaagctgcgaaaaaaaaaatttctgaaattagaaagagaaagaatgttccaataatagttggaggtactggtttatatttcaaaacgttaactgatgggatagttaatattccgaaaattccaattcaaataagagaaaaagttaggaaattgaacagttctatgggtaataaaatttttctaaaaaaattaaaaaaacttgatccaaaaattcaagattatgtcaatccatctgatactcaaagattaataagagcttatgaagttaaattatttaccaaaaaaacattacttgagtggtttaagacaaccaaatcaatttttgaagataaagacttttataaaatttacatcgactacccaagggatattttagtaaaaaagattcacaatcgtgctcaagacatgatcaataaaggagccattttagaggctaaaagattt

SEQ ID NO: 244856 - DNA, 834 bp, Unknown
  Bacterial polypeptide expressing nucleotide sequence isolated from the Sargasso Sea
aatggaccttaagtccaaaataattttaatctcaggtccgactgcttcaggaaaatcaaattttgcagttaatctagcaaaaaaaattaaaggagaaattattaatgcagacagcatgcaagtttaccgagagccaaagatattaacagcaaggccagacataaaagaacaaaaaaaagttaaacatcatttatatggtttcttgagtataaaaagaaaattttcaacaggccgttggttaaatcttgttttaaaaaaaatcaaaaaaatacaaaaaagaaaaaaaattccaatattagttggaggaactggactttattttaaaactttaatagatggtttagttaaaattccaaaaatatctttagaaaaaagaaaagatatagtaaatcttcaaaaaaaattgggccaaaaaattttttatcaaaaattaattcaattagatcctaaaattaaaaatattattaatttaaacgatatccaaagatctataagagcctatgaggtaaaaaaatatacaaaaatatcattagtagattggcataaaaatactaagtcattttacaaaaaaaatgattttattaaaatatacttggattgtcctagaaatgttcttttagaaagaataaaaacacgaacccaccaaatgttgaaaaaaggtgcaattaaagaggtaaaaaaaattaaaaaaataaaagtacctaccgctaatagctcaattaaaattatcggggtaaatgagattaaaaattttttgagcaaaaaccaaaatattgaacaaacaattgaacaaataattataaaaacaaggcaatatgccaaaagacaagctac

SEQ ID NO: 244857 - DNA, 403 bp, Unknown
  Bacterial polypeptide expressing nucleotide sequence isolated from the Sargasso Sea
aatggacctaaagtccaaaataatattaatttcaggtcccacagcatcaggtaaatctaaacttgcattaaaaatagctaaaaaattaaatggagaaattatcaatgcagatagtatgcaggtttataaagaattaaatatattaactgcaagaccttctaaaattgatttaaaaaaaatagaacatcatttatatggttttagaactgttaaaaaagaattttcatctggtgaatggttaaaattagcaaaaaaaaatataaaaaaaattagagataaaaataaaataccagttttagttggtggtaccggtctttatttcaaagcattgaccaatggattagttaaaattccaaaaataccaactcctattcgtaatcaagtaagactaatgcaaaataga

SEQ ID NO: 244858 - DNA, 811 bp, Unknown
  Bacterial polypeptide expressing nucleotide sequence isolated from the Sargasso Sea
gtctataaagaacttaaaatattaaccgctagaccttcaaaaaatgagcaaaaaaatattaagcatcatttatacggttttcaatctgtaaaaaaaattttttcaaccggatcatggttaaagcttacaattaaaaaaatcaaagaaattcaaagaaaaaacaaaataccaatattagtaggaggcactggtttatatttcaaagctttaaccgatggacttgtaactattccaaatatacccaaaaaaattagattacaaataagaaaattacaaaaaaaaattggtcaaagaaagttttataaaatgttagttaaatttgatccactttcaaaaaataaaattaactcaaatgattctcagagaactatacgagcatatgaaattaaaaaatatacaaaaaaatctttatttgaatggtttgataaaactaagccaaattttcaaagaagccaatttatcaaattttatattgattttccaaggtctgaattaataaatagaattaataaaagagttgataaaatgttcgatatgggggcaataagagaagttaaaatttttttcaaattaaaagtaagaaaagaaaatagctcgtataaagttattggaataagagaaatctcagaattcatagaagactataaagatctagaagaaaccaaagacagaatagcaataaaaacaagacaatatgcaaaaagacagtcaacttgggccagaagatatatgaatgattggaataaaatagatttaaacagagtaaatttttctgatctaaagaaaattttaaataataatttattctaaa

SEQ ID NO: 244859 - DNA, 814 bp, Unknown
  Bacterial polypeptide expressing nucleotide sequence isolated from the Sargasso Sea
aatggacgatctaaagtccaaaataatattaattgcaggacctacagcttccggaaaatcaaaatttgcaattcaacttgctaaaaaaataaatggagaaattataaatgcagatagcatgcaagtttacaaagagcttaaaatacttactgcaagacctaaaaaaactgatcaaaataaagtcaaacatcatctttatggaatccaaagcgttagaaaagatttttcagcaggagcatggcttaagtacgtaaataaaaagacaaaagaaataagaaaaagaaataaaactcctattttggtaggcggaactggactttattttaagtctttaactgatggcttggtaaaaattccaaatattcctaaaaaatttagaaaaaaaattagaatactacaaagtcgattagggcaaaaagaattttataatagattggttgagattgatccaaaagcaaaggcctatattaagccaaatgatgctcaaaggtcaattagagcatatgagataaaaaaatatactaaattatcgattttagattggttcagaaaaacaaaaaaaatatttgatgaagatgaatttgttaaaatttatattgatattccaagagaaaaattacttgaaaggataagtgaaagaattaaccaaatgttcaaagaaaaagtggttaatgaagttatcaaatttaataagctaaaattaaagaaagacaaaagtgcaaataaggttattggcatagaagaaattacctcctatatgaaaggctttcatacgatagaagaaataaaggagaaaattctgataaaaacaaga

SEQ ID NO: 244860 - DNA, 718 bp, Unknown
  Bacterial polypeptide expressing nucleotide sequence isolated from the Sargasso Sea
ttccgtgggacggtttgttcgtgaatcggaagaagtcattaataagctaaaactaaggaaaaagatccccattttggttggcggaaccggaatgtatttacgttcactgctcttcggtttaagcgaaatccccgaggtctcttccaacatcaaacttcaggtaaaaaaatggcagaaagaggagggaacacttgcgtgctggcagaagctgaaagaagttgatccggaaggagcagaaaaatcacatcccaacgatacgtcgagaatcatgcgtgcacttgaagtggtgatttcaagcggccagcctatttccagttttcaggataatgataattcaaatgcccaaagatattcttttttcggaatgatatgcgaccgtccgagacaagaactctatgatagaatcaaccggaaaactcaagaaatgatggatcagggctggatcgatgaagtccgaaatttattggcccaattccccgaaaacctgaaaccttttcagtccattggatatcgggagattatccagtttctgagaggggaactggaatcatcagatctggtgccgctgatccaacaacggactcggcagtatgccaaaaggcaattaacatggttccgtaaggaaaaccaactggtatggagccaccccgacaagaaagagcagattctcaaagaatgcatggtttgccttgaaaagataggtcaaaaccaagcatag

SEQ ID NO: 244861 - DNA, 655 bp, Unknown
  Bacterial polypeptide expressing nucleotide sequence isolated from the Sargasso Sea
tgttaagaggaataagataccaattttagttggagggactggtttatattttaatgcaataacaagaggtataagcaaaattcctaaaatagaaaataagcttaggatgaacattagaggcttacataacaaaataggacaaaaaaaattttatcaaaaactcatatcgatagaccctatgtctaagaacagagtttcatctcaagatactcataggacaatgagagcttatgaagtaaaaatatccacaaaacgatccctttatgattgggcttctaatacgaaatcagattttttagattttgatataagaaaaatatttatagatattccaagagaagcgctcctaaagaatatatctttaagaacagatttaatgtttaaaaaaagatgtgttcaagaagtaaaaaattttttaagactaaaacttaacaaagcactttctgctaataaaattattggagttagagaaatagaagagtatttggatggttcaaggaataccagggaagttattgatcttataaatattagaacaagacaatacgctaaacgacaaaatacttggtcaagaggtcatatgaagacttggaaaaagctttattctaaagatttttcagttcttacaaggaaagttttaaaagaaataagctaa

SEQ ID NO: 244862 - DNA, 895 bp, Unknown
  Bacterial polypeptide expressing nucleotide sequence isolated from the Sargasso Sea
actttatttggtccaaccgcatcaggaaaatcaagactagctgtagatattgcaaaagaatataatggtgaaattgttaatgcagacagtatgcaggtatataatgaaataaagattttatcagcaagaccaaacaacaaagatgttaaacatcatttgtatggttttatttcagtggttgaaaatttttctgttggttcttggtaccaattggcttcagaaaaaatcaaacaaataaacagaaaaggcaaaactgcaatagtagtaggtggtacaggtttatattttaaagttttaacagacggattagttgaaattccaaaggttccaaagattgactatagctatcttaatcctataggtgcattttttatgttaaaacattattcaggccgatatcctaaaattttcgagggcataaatattaaagatatgcaaagagtttctcgggcaatttcagtttatgatgctacgggaataacactaagtgattggcaaaaaaagaaaaacaagaaatattttgaaaaaaatgaatttatcaagatttgtcttcttccaccaaagaaagaattagagaaaagaattgaaaaaagatttttagaaatgttaaaaaacggcgcaatagaagaagcaaagaaatatagagaattaggactatcaatgtacagcctatatacctctaataagataataggattagagcaaattgcatcatttatagacaaaaagatttccatgaaggaactaaaggaagcagttttcataaaaacccgacaatatgcaaaaagacaatacacttggcaaagaggtcaaatgaaggattggaagggatttactgataccaattatcttgatttaagaaaaaaaattctaagttatttatctaaaacttgac

SEQ ID NO: 244863 - DNA, 526 bp, Unknown
  Bacterial polypeptide expressing nucleotide sequence isolated from the Sargasso Sea
aatgtccaaaataattttaatatctggaccaaccgcatctggaaaatccgaatttgcagtaaaaatcgcaaaaaaagttaatggagaaataattaatgcagatagtatgcagatttataaagaaataaaaattttaaatactagaccagataaaaatcttacaaaaaaagttaaacatcatttatatggatttgtatcagtaaaaaaaaatttttctgttggtaaatggattatacttacaaataagttaattaaaaaaattatttataaaaaaaaagtcccaataatagtaggtggtactggattatattttaaatcactgacagatggtttggtaaaaattcccaatatacctgtatcatttagaaaaaaaattattgattaccaaaaaaaagttggtcaaaaaaagttttataaacacttaattaaaattgaccctaaatcaaaatcgaaaataaattcaaaagatgtacaaaggtcaattagagcttttgaagtaaaaaaaatttctaaaatctccttattg

SEQ ID NO: 244864 - DNA, 796 bp, Unknown
  Bacterial polypeptide expressing nucleotide sequence isolated from the Sargasso Sea
atgcaagtttataaagatcttaagatcttatctgcaagaccattaaaaaagaattaccaaaaaataaaacatcacttgtatggatttataagtgcaaaaaaaaatttttcttcaggagattggctaaaattaacaaagaaaaaaattttcgatataagaaaaagaaaaaaaacaccaattcttgtgggtggaacaggtctatattttaaagccttaactgatggtctagttaatattccaaatattccaataaaacatagaaaacagataagactcttatataaaaaactaggatctaaaaagttttattcaaaattaataaaattagaccctttagtaagaggtaaaattaatccatcagatccgcaaagggctatacgcgcttatgaaataaaattatttactaaaagatccatgtatgaatggtttaaaaatactaagtcagactatgaaaaagatgacttttataaaatttatatagactttccgagagataggctcattaagagaattcatgctcgaaccacagatatgataaatggaggagcaataatggaagtaaaaaaatttttaaaattaaaaattcagtcatcaaaaactgctcataaagcaattgggatccaagaaattagggaatttcttaataaaaagatcgagatttcagaggttattgagagaatatcaattaagaccagacaatatgctaaaagacaggttacctgggcaagggggaacatgtttgattggaacaaaattaactcaaacgctctcaataaatttttaaaaaaaatttaga

SEQ ID NO: 244865 - DNA, 439 bp, Unknown
  Bacterial polypeptide expressing nucleotide sequence isolated from the Sargasso Sea
atggatttaaaatccaaaataattttaatttatggacctacagcttctggaaaatctcaatttgcagtaaaacttgctaaaaaaataaatggtgaaataattaatgcagatagcatgcaagtttataaagaattaaagatcttatcagccagacccttttcaaaagattaccaaaaaattaaacaccatttgtatggttttcaaaattcaaaaaaaattttttcaacaggaatctggttaaaattggctagccagaaaatattagaaataaaaaaaagaaaaaaaacacctattttagtgggtggtacaggactatattttaaagcattaacggaggggatagtaaatattcccaacataccagttaaatttagagaaaaaataagatctttacataaaaagcttggtcaaaaaaaattttttttgaaattaataaaga

SEQ ID NO: 244866 - DNA, 667 bp, Unknown
  Bacterial polypeptide expressing nucleotide sequence isolated from the Sargasso Sea
ttagctaagattaagatcttagaattaaaaaaaagaaaaaaaactccaattcttgtgggaggcactggtttatatttcaaggcgttaattgaaggtttagttagtattccaaatattccaattagtaccagaaataaagtaagatctttacataaaaaacttggtcaaaaaaaatttttttcacaattaataaaaatagatcctttagttaaaaaccatattaatccattagatactcaaaggtctattagagcttatgaagtaaaattatttactaaaaaatcattgtttatgtggtttaaagatactagatcgaattattttaaaaaagatttttttaaaatttatattgattttccaagaaatgacttattgaaacaaattaattttagggcacaagaaatgatcaaaaatggagcagttttagaggtaaaaagattcatgaaatctaaagttcctaaggataaaagcgcaaacaaagcgattggtattagtgagataaatcaatatctagcaaaaaaaattgaaatctctgatgttattgaaaaaatatcaataaagaccagacaatacgccaaaaggcaatgtacctgggcgagaggtaacatggaaaattggaatagaatgagtcctaatagattaaataaatttttaaaaaaaatttaga

SEQ ID NO: 244867 - DNA, 895 bp, Unknown
  Bacterial polypeptide expressing nucleotide sequence isolated from the Sargasso Sea
ctggcgcgcctgctgccgtgcgacctgatcagcgtcgactccgcgctgatctaccggggcatggacatcggcaccgccaagccggagcgcgccattctcgacgcctttccgcatgccctgatcgatattcgcgatcccgccgagagctattccgccgcggaatttcgcgccgatgcgctggccgccatggccgccagcgcggcacgcggacgcatcccgctgctggtgggcggcaccatgctttattacaaggcattgctggaggggctggccgacatgcccagtgccgacccggccgtgcgcgccgaactggaggcacgggccgcggccgagggctgggaggccctgcaccgcgagctggctgcggtcgatccggagtcggcggcgcgcattcaccccaatgaccctcaacgtctgacccgggccctggaggtctatcgcgtgagcggcctgagcatgagcgagcaccgccgtcgtcaggccgccggaaactccgatacgggcacatcggccggcgggcaattgccctatactgttgcgcagcttgctatcgctccggcgcagcgccaggttctgcatgagcgcatcgcacaacgatttcaagcgatgttggaacagggtttcgtggacgaggtcgaagccctgcgcagacgaagtgacttgcacgcagggctgccgtctatacgggcggtaggttatcgccaggtatgggaatacctcgacggtgggttgtcccgtgaacaaatggtcgagcgcggcatcatcgccactcggcaactggccaagcgtcagttcacctggctgcgaggctgggacgggctgcactggctggacagcctggcctgcaacaatctgtctcgcgccttgaaatacctggaaagcgtctccatatgaa

SEQ ID NO: 244868 - DNA, 794 bp, Unknown
  Bacterial polypeptide expressing nucleotide sequence isolated from the Sargasso Sea
gtttataaagaatttaaatattttaactgcaagaccaaatttaaagcaaaataataaaattaaacatcacttatacggttttttaagtataaaaaaaaagttttccactggccaatggttaaaacttgcatccaaaaaaataaaggaaatacgaaatagaaataaaattccaatattggttggtggaacaggtctatattttaaggctttaattgaaggacttgcaaaaattccaaaaatatctgctacaaaaagaaaacaagttacaaatcttcaaaataaactaggacaaatttatttttataaaaagttaacaaaaatcgatccaaagattaaaaattttgttaattcaaatgatgttcatagatcaatacgtgcttatgaggttaaatactacacaaaaaaatctttattagaatggtataacgatactagaccacctttctcaaatgaggaatttattaaaatttatctagactgccctaaggattatcttttagataggattaaagtccgtacccaaaaaatgttccccaaagcaataaaagaagtaaaaaaaataaatagtatcaaaattcctaaaagtaatagttcaactaaaataattggtattaccgagatcaaaaattttttagataaaaagcttaataaagctcaaacgatagagcatatagtcataaaaactagacaatacgccaaaagacaagctacgtgggcaaggggacaaatgaaagattggaaaattatatgcgccacgaataccaaaatgtcatcaaaaaaattatttaattaat

SEQ ID NO: 244869 - DNA, 881 bp, Unknown
  Bacterial polypeptide expressing nucleotide sequence isolated from the Sargasso Sea
tatggattttaaatccaaaattattttaatttatggacctacagcatcgggaaaatccaaatttgcagttaatcttgctaagaaaatatctggtgaaattattaatgcagatagtatgcaagtttataaagaattaaagattttatctgcaagaccttatcaaaaaaattataaaaaaatacgacaccatttatatggatttcaaaatgtaaaaaaaaaattttcaactggtcaatggttagaattagcaaataaaaagatttcagatattagaaaaagaaaaaaagtacctattctggtaggaggtacaggattatactttaaagctttgacagagggtttagttaaaattccaaatattccaattaaatttagaaatgaaataagaactttgcataagaaaattggatcaaaaagatttttttcaaggctaaccaagttagaccctttggtaaaaaaaaaattaaatcccctagacacacaaagagtaattcgagcttatgaaattaaatcatttacaaaaaaatctatgtttgaatggttcaaaaataccaaatcaaaatatgaacaaagagatttttataaaatctacattgattttccaagagatgagctaattaagcgaattaactcgagagctagcgaaatgattgatagaggggcaattttagaggtgaagaaatttattaagcttaaagtttcaaaaaacaaaactgcatcaaaagctattggaataagtgagataaaggaatttcttaacaaaaaaattcaaatttcagaattgatcgataaaatatcaataaagacaaggcaatatgctaaaagacaggtgacatggagtaggggccacatgtcagactgggacaagataaagtcaaata

SEQ ID NO: 244870 - DNA, 547 bp, Unknown
  Bacterial polypeptide expressing nucleotide sequence isolated from the Sargasso Sea
tttgttaaaaaaaaataaaaaaataatacttttatttggcccaacagcatctggtaaatcaaaattggcaattgatattgcaaaaaaaataaatggagagatagtgaatgctgacagtatgcaggtttataaagaaataaatattttatctgcaagaccagataaaaataaaattaaacatcatttatacggttttctatctattaaaaaaagtttttcaacaggtgcatggttgaaaaaagctactgttaagataaaagaaattaacaaaagaggcaaggttgctttagtagtaggtggcacaggtctctattttaaagctctaatagacggtttttcttatatcccaaaaactccaaaaccaaaaaaaaactttcaattgaaaaaaagctatttaaaaaaacattataatattttcaaagatataccaataaatgacaaccaaagattacaaagagcatttttggtacacaaatatactggaaaacctataagcttttggcaaaaaaaaaataagaaaccttttaattcttatgaatttgttaaa

SEQ ID NO: 244871 - DNA, 559 bp, Unknown
  Bacterial polypeptide expressing nucleotide sequence isolated from the Sargasso Sea
ttgcctaaaaatattaaaaaaaagataatacttttatttggaccaacagcatctggaaaatctaaactagctatagatatagcaaccaagtttaatggagaaattttaaatgcagatagcatgcaggtttacaaagaaattaaaattttatctgcaagacctgaaaaaagtaaaattaaacatcatttttatggatttatatctgctaaaaaatctttttcggttggcgaatggtacaaattagtatcaaaaaaaattaaagaaatacaaaaaagaaaaagagttccagtagttgcaggtggaactggattatattttagagcacttacagagggtctcgttgaaataccaaaagtagaaaaaaaggatttttcacatttaattccattggaaagaagaatgattgaaaatgagtatgaaaaaaaaaatccaacaatatttcaaggaattgatagaaatgatacacaaagagtttcaagagctatttcagtttatgagggaactggtttgacattaaaagaatggcagaataaagaaaataaaaaatattttaaatcag

SEQ ID NO: 244872 - DNA, 366 bp, Unknown
  Bacterial polypeptide expressing nucleotide sequence isolated from the Sargasso Sea
aatgaaaaaaataattctgttatttggcccaactgcatcgggaaaatctaaattagctatcgatctagcccaaaattataatggtgaaattgtgaatgcagatagtatgcaagtctattcagaaattaaaattctttctgcaagaccatatgaaaaacatgtcaaacaccatttatatggatgcgcttctgttaatgataatttttctgtaggaaaatggtacaccctagcaactaataaaattaaagagataaataaaaaaaataaagtagctatcgttgttggtgggaccggactttatttcaaagtattgattgacggattgatagatattccagaaattccaaaaatagaaatgaatttaaa

SEQ ID NO: 244873 - DNA, 355 bp, Unknown
  Bacterial polypeptide expressing nucleotide sequence isolated from the Sargasso Sea
ttgaaaagaaaaattattttattagctggtccaactgcatcaggtaaaacaaaaatagcaatcaaattagcaaaaagaattaacggcgaaattattaatgcagacagtatgcaagtatataaagattttcaaattttatcgtctagaccaagtaaaaatgaattaagattagcaaaacatcatttatacggatttcaatcttctggagctgttttttctacaggaaaatggcttaaacttgcttcagataaaattaatcaaatagtcaaaaaaaataaagttccaatactggtagggggaactggtctatattttaaggcaataactgatggtataagcaaaataccaaatataa

SEQ ID NO: 244874 - DNA, 654 bp, Unknown
  Bacterial polypeptide expressing nucleotide sequence isolated from the Sargasso Sea
gcctccctatcatatgtggtggaacaggtctttatataaagtttttgctaaacgaattatcaaccattcccgaaatacctccatctataaaactagaggcaagagaaaagttggaggatttgggtaacgagaatttcagagagctactgtcaaaaaatgatcctgtttccgctcgtcggattaaatcaggtgatacaaatcgtttgttacgagcatgggaagtattcacggcaacaaacaaacctctttcctattggcatgaacagtcaagggaaacaggatctcagcataagtttttcaaggtttgtttaatgccagaaagaaaggccctatattccaaatgcgataaaaggtttctggactttattgaacaaggagccgcagacgaagcacgagcacttgactgtataaatgttagccctgagctacctgcatcgaaaacacttggcttacttgagttaattaaatataccaaaggcgaactcgagttaagtgatgctatagcgcaagcccagcggataactcgtcgatatgcaaaaaggcagttaacttggtttcgtcatcaattagatgaagattttttaattcaaaatctgcgctgtagaaaaacagtgtcggattgttttaaaaaaatagtgaattttcttgggtaat

SEQ ID NO: 244875 - DNA, 730 bp, Unknown
  Bacterial polypeptide expressing nucleotide sequence isolated from the Sargasso Sea
attgaaaactcaaatctattttgtattaggcccaactgcatcaggaaaatcaaaatttgctttaagtctagcgaacaaactaaatggtgaaattataaatgctgatagtatgcagatttataatgagctaagtatcttaactgctagaccaactataaacgatcaaaaaaaaatcaatcatcatctttatggatttgtaaaaggtgatgttagatttaatgttcaaaaatggtgcgaggaagcatcaaaaaaaattaattatttagttaataaaaatataacacctattttagttggaggtacaggtctttacatagaatctttaattaatggaatagtttcaattccatctattccagaaaaagtaaaaatagaatcagaaaaaatgattttaaaaattggtaaggaaaatttttataatttagttaaagagctggacagtgatgcaatgattaatattgcgtctaacgatattcaaagaataagaagaatatgggaagtaaatatttttactaagaaaaaatttagtgactggaaaaaaagtaaaaataaaaattttattaatttaataaattacaaaatattattatttcttccagatagaaaagaaaactatagaagagtaaatcatagaacacacttaatgatggaagatggtgcgatagaggaagtcaaaaatttgcttaaattaaattataataatagtttaccaataatgaaagctcacgga

SEQ ID NO: 244876 - DNA, 838 bp, Unknown
  Bacterial polypeptide expressing nucleotide sequence isolated from the Sargasso Sea
aatgaaaaaaacaattctgttatttggcccaactgcatcgggaaaatctaaattagcgatcgatctagcccaaaattataatggtgaaatcgtgaatgcagatagcatgcaagtctattcagaaattaaaattctttctgcaagaccagatgaaaaacatgtcaaacaccatttatatggatgcgcatctgttaatgataaattttctgtaggaaaatggtacacattagcaactaataaaattaaagagataaataaaaaaaataaagttgctatcgttgttggtggcaccggactttatttcaaagtattgattgacggattggtagatatcccagaaattccaaaaatagaaatgaatttaaatccattaggtaggcatatgatgatcaacagttactcgagcaaatatccaggaatatttgatcacttggatgatcttaatgatacgcaaaggctttaccgagcgattgctgtatatgaacatacgggcatgactgtttctgaatggcacacaaaagaaaataaaaaaaattttcaaacaaacgattttattaaagtttgtttaatacctgaaaaaaaagaaattgaaaaaagaatacaaaagagatttgataatatgctgaatagtggagcagtagaggaagcaaagaacttttataaattagaaatttggaaaaaatcacttcacaccgccaattcaataataggccttagagaaatacacctttatctgagtaaaaaaatttcactggatgagctaaaaaatgatgttttagtcagaacaagacaatatgcaaaacgtcaatatacctggcaaagaggtcaaatgaaggat

SEQ ID NO: 244877 - DNA, 801 bp, Unknown
  Bacterial polypeptide expressing nucleotide sequence isolated from the Sargasso Sea
tcttgtcagctagaccagatccaaaaaaatatcagaatataaaacatcatttatatggttttcataatgtaacaaaaaacttctccacaggtgactggcttaagctagtaattaaaaaaatcaaggaagttcaaaagagaaaaaaaactccaattattgttggaggaacaggtttatactttaaagctctaactgatggtttagttaatataccaaatatttcattaaaattaagaaatcaaattagagaattacaaaaaaaacatggacaaaagaagttttatgaaaaactaataaaattagatccatccacaagaggaaaaataaaacctacagatactcaacgatcgatcagagcttatgaagttaaaaagtttacaaaaaaatctctaactgaatggttcaaaaacacaaaatcaaacttcgtaacagatgatttttttaaagtttatattgattttcctagaaaagaattaattgagcgcatcaatataagaacaagggagatgattgaaaatggagcgataaaagaagtaaaagatttcataaagcttagagttagaaaagataaaagtgcttacaaggccatcggagttaatgaaattacagaatatttaaaaaaacaaaaaaatttgaatgatactagagaaaaaatagccataaaaactagacaatacgccaaaagacaaagtacttgggctagagggaacatgaacaaatggatgaaactgaagccacaagacataaataaatttttaaaagaaaatttaaaattttcactcttaaacttgaccacatgag

SEQ ID NO: 244878 - DNA, 631 bp, Unknown
  Bacterial polypeptide expressing nucleotide sequence isolated from the Sargasso Sea
aatggacctaaagtccaaaataattcttatttcaggaccaacagcatctggaaaatcaaaatttgctattcagcttgcaaaaaaaattaatggtgaagtaataaatgcagatagtatgcaaatatttaaagaattaaaaattcttacggcaagacctcagcaagatgatttaaaaaatataaaacatcatttatatggatttaaaagcgtaaaaaataattattccacaggaaattggcttaaggatgctaagaaaaaaattaaaaatgttaagaaaaagaaaaaaattccaattcttgttggtggtacagggttatattttaaagcacttatcgatggtattgtaaaaattcctgatattccgctcactattcgaaatagaataagaaaaagacagttaaaaatagggcaaattaaattttattctgaacttattaagctagacccactttgcaaaaaaaaaattaacaaaaatgattctcaaagatcaataagagcttatgaagtaaaaaagtttacaaataaatctttgtttgattggtatagtgaaacatactctgattttaatcaggacagctttataaagttacatatcgattaccctagagagaagttagtagaaagaatttct

SEQ ID NO: 244879 - DNA, 841 bp, Unknown
  Bacterial polypeptide expressing nucleotide sequence isolated from the Sargasso Sea
aaatccagactagcattggatattgctaaaaaatataatggagaaatagtaaatggcgacagcatgcagatttataaagaagcaaaaattttgtctgcaaggcccactgggaaaaatataaaacatcatttgtatggatttatttcggcaaaaaaacatttctcagttggattgtggtataaacaagccattaaaataattaaagaaattaaaaaaaaagagaaagttccgattattacaggtgggacgggattatattttaaagtacttgtagaaggtcttgtgcaaattcccgaagttccaaaaatcaactatagtagttatgtggttgatcaatataaaaaaaaatatccaaaaattttagaaggtattaatttaagagatacacaacgaattttccgagctatttcagtatataaacacacagggatatcattgagggagtggtataaaaaagaaaataagaaatattttgattctgaggtttttacaaaaattttactaattccacccaaatcagaattagaaaaaaaaattaaaaaaagatttattaaaatgttaaaaaatggtgcgataaaagaagccaaaaattttaaaaaattagaaatatcacgaaactcattgctttctgcaaattcaataataggacttaatgaaattgctttatttttggacaaaagaatttcaatggaagaattaaaagaaaaagttcttattagaacaagacaatatgccaaaagacaatttacttgggcaagaggccagatgaaggattggaaaggctttactgatataaattatcttgatttacgaaaaaaagttctaagttatttatctaaaa

SEQ ID NO: 244880 - DNA, 853 bp, Unknown
  Bacterial polypeptide expressing nucleotide sequence isolated from the Sargasso Sea
atggactacaagtccaaaatcattcttattgctggtcccacagcttctggaaaatcaaaaatagcaatcaatttagcaaaaaaaattaatggagaaattgttaatgctgacagcatgcaagtatacaaacaacttaaaattttaacagcaagaccttcagaaaaagatcaaaaaactattaaacaccatttatttggcatcattgatgttcggaaaagattttcgactggccaatggcttaaaaagtgtatcaaaatgattaatctaattagaaaaaagaataaaactccaattattgttggtggaactggtctttattttaaagctttagtggatgggctagtaagcattccaaagttcaaaccttcagaaaaaaacaagatacttaagcttcataaaagattggggcaaaagcaattttataaaaaattagtcaaattagatcctgtctctaaaaaatttattaattcaaatgatgttaatagatcaattagagcatacgaagttaaaaagcttacaaaaaaatcattatacaaatggtttaaagaaacaaagaccttttttgataagaatgagtttgtgatgacttatgtggattatccaagagacgcactaataaagaatataaaaaaaagaatagataggatgttcgatttaggagccataaaagaagttaagaaatttaatctcattaaaattaacaaactaaatagcgttaatcatgtgattggtattaaagagataaactcttttttaagtaaaaaagctgaattgagtgacattaaagaacagatacttataaaaaatggacaatacgccaaaagacagagcacttggtctcgaggtcatatga

SEQ ID NO: 244881 - DNA, 781 bp, Unknown
  Bacterial polypeptide expressing nucleotide sequence isolated from the Sargasso Sea
tcagctagaccagatccaaaaaaatatcagaaaataaaacatcacttgtatggttttcataatgcaacaaaaaacttctccacgggtgattggcttaagctagcaattaaaaaaatcaaggaagttcaaaagagaaaaaaaactccaattcttgttggaggaacaggcttgtactttaaagctttaactgatggtttagtaaaaataccaaatatttcattaaaattaagaaatcaaattagagattttcaaaaaaaacttggacaaaaagagttttatgaaaaattattacaactagatccatcttcaaaaggaaaaataaaacctacagacactcaaagatccatcagagcttatgaagttaaaaagtttacaaaaatatctctaactgaatggtttaaaaatacaaaatcaaactttgtagaagatgatttttttaaagtttatattgattaccctagacaagaattaattgagcgtatcaatgtaagaacaggagatatgatagaaaatggagcaattaaagaagtaaaagatttcataaagctaagggttagaaaagacaaaagtgccaacaaggccattggagttactgaaattacagaatatttaaaaaaacaaaaagatttgaattgtactagagataaaatagccataaaaactagacaatacgccaaaagacaaagtacttgggctagaggtaacatgattagttggataaaactaaagccacaagatataaataattttttgaaaaaaattaaaaattttcattcttaaa

SEQ ID NO: 244882 - DNA, 379 bp, Unknown
  Bacterial polypeptide expressing nucleotide sequence isolated from the Sargasso Sea
catgtcagagcgcattttggccttgatgggcccgacggcctcgggaaaatcctccctggcggagagattggccgagcgctttgatggtgaattgatcagtgtcgactcggcactggtctatcgtggtctgtccatcggtgccgcaaagcctgactatccgcatcatcttgttcacttgcgcgacccggtggacccttataccgcggctgactttgcccgtgatgcgaagcgctgtatggaggagatcatcgcgcgggggcgacgtcccatcctggtgggcggcagcatgctgtacttcagagcgctgattcatggcttggatgacataccctccattgacccggccattcgcacagcgattgaacatgaggcgcgagaa

SEQ ID NO: 244883 - DNA, 529 bp, Unknown
  Bacterial polypeptide expressing nucleotide sequence isolated from the Sargasso Sea
aatggacctcaagtccaaaatatttttaattgcaggacctactgcatctggaaaatcaagttttgcaatacaactagcaaaaaaaattaatggagaaattattaatgctgatagtatgcaagtatataagcagtttaaaattttaactgcaagacctaaatttaataaaattaataatgtaattcatcatctttatggttttttagatgttaaaaaaaaattttctactggaaaatggttaaatcttacaattataaaggtaaataaaataaaaaaaaaaaataaaattcctattttagttggtggtactggattatattttaaggcattaacagaaggtctagttaaaattccaaacattcctattaaaacaaggaatgaaacaagaaaattacaaaaaaaaataggacaaaaaaaattttatcaaaaattacttaaaattgataaattttcaaaaaatataattaataaaaatgatgtacagagaagcataaaagcatatgaagtaaaaaaattcacaaaaatttct

SEQ ID NO: 244884 - DNA, 618 bp, Unknown
  Bacterial polypeptide expressing nucleotide sequence isolated from the Sargasso Sea
catggatttaaaatccaaaattattttaatttatggaccaacggcctcaggtaaatctaagtttgcaattaaacttgcaaaaaaaatttcaggtgaaattattaatgcagacagtatgcaagtttataaagaattaaaaattttaactgctagacctattaataaagatgatcaaaaaataaaacatcatttatatggatttcacagtgtaaaaaaaaaattttcgaccggcgattggctaaagttggcaaatcaaaaaatttttgactgcaaaaacagagaaaaagttcctattctagttggtgggactggtctatattttaaagctttaactgatgggttagtaaaaattcccaatatcccaatgaatttgagaaaaaaaataagattgttacataaaaaaattggaccaaaaaattttttttcaaaattgttaaagctagatcctttgaccaaaggccgaattaacccttctgacactcaaagagtaatcagagcatatgaagtcaaattatatactaaaaaatctatgtatgattggttcaaaaatacaaaatccatttattgtcaaaatgatttttttaaaatttatattgattttccaagaactgatctgct

SEQ ID NO: 244885 - DNA, 865 bp, Unknown
  Bacterial polypeptide expressing nucleotide sequence isolated from the Sargasso Sea
aatggaccttaagtccaaaataatattaatttcaggtcccacagcatcaggcaaatcaaaatttgcattaaaaattgctaaaaaattaaatggggaaataattaatgcggatagtatgcaagtatataaagaattaaacatactgactgctagaccttcaaaagttgatttaaaaaaaatagaacatcatttatatggttttagaagtgttaaaaaagaattttcatcaggtgagtggttacaattagcaaataagaatattaaaaaaataagagacaaaaataaaataccaattttagttggtggcactggtctttatttcaaagccctgactgatggattagttaaaatcccaaaaataccaatccccattcgtaataaaataagacaaatgcaaaataatttaggtcaaaaaaaattttatttaaaactcttaaaaatcgatccatcagtaaaaaataggattgacccaactgatgcacaaagatcaatcagagcttatgaagttattttgatttcaaagaaatcaatttttgaatggtataagaaaacaaaaccaatttttaaaaaggatcaatttataaaaatttatattgattatcctaaagatgaattaattaataaaatctacaagagagtagaccaaatgatgaaagatggagctattcaagaagttaaggattttttaaggctcaatttgaagagcgatagcaacatcttcaaagtcataggaataagagagattaaagattttattgataaaaaaacttctatgcatgatttaaaacaaaatattgttataaaaaccagacaatacgctaaaagacagcgtacttggtctagaggtcatatgagtgattggcaa

SEQ ID NO: 244886 - DNA, 817 bp, Unknown
  Bacterial polypeptide expressing nucleotide sequence isolated from the Sargasso Sea
ttgtcaaaaaaaattattcttttagcagggcctacggcctcaggaaaatcaaaacttgcaatacaattagcaatcaaaattaacggagaaattattaatgctgacagtatgcaagtttataaagaatttaaaattctttcatccagacctagtaattcagatataaaaaaaataagacatcatatgtatggttttttgagtgcaaaaaattatttttctgtcggagattggctaatgttagttaaagaaaaaattaaaacttgccataagaatcataagattccaattatagttggtggaactggtttatattttaaagcaattacaaaaggtataagtaaaatacctgatatcgataacaaaactcgtaataaagtaaggctattatttaaaaaactaggtaaagaaaaattttataataaacttttgaaaattgatcctaaaattaaaagtaaaatatttaaatccgacactcaaagacttcagagagcttatgaagtgaaattaaaaacaaaaaaatccttatttgactggaatacgaataccaaatctgaattcgtcgattatgaattgagaaaaatatttatcaatacaccacgcaacaaacttcttaagaatataaaaactagaataaatttgatgtttgaagatgattgtgttttagaagttaaaaaatttaataaatgtaatattaagaaaacactttcagccaataaattaattggagttagtgaaattaatctatttttgaagggacaaatatctttaaatgattgcaaggaactcataaacattaaaacgcgacaatacgctaaac

SEQ ID NO: 244887 - DNA, 343 bp, Unknown
  Bacterial polypeptide expressing nucleotide sequence isolated from the Sargasso Sea
atggacttaaagtccaaaataattcttatttcaggaccaacagcatctggaaaatcaaagtttgctatacagcttgcaaaaaaaataaatggagaagttataaatgcagatagtatgcaaatttttaaagaattaaaaattctcacagcaagacctcatcgaaatgatttaaaaaaaataaaacatcatttgtatggatttaaaagtgtaaaggaaaattattctacaggaaattggcttaaggatgccaagttaaaaatcaacaatatcaagaaaaaaaataaaattccaattcttgtaggcggcactggtttgtattttaaagcaattattgatggtatag

SEQ ID NO: 244888 - DNA, 682 bp, Unknown
  Bacterial polypeptide expressing nucleotide sequence isolated from the Sargasso Sea
ttagctaaaatcaaaattaatcaatgtcaaaaagctaaaaagatacccataatcgttggaggcactggtctgtactttaatactattgtcaaaggtataagtaaaatacctaatatagatatagaaactagaaataaggttagaaatctttttaaaaaattaggttataagaatttttatcaaaagcttttaaatattgatccaaagattaagaataaaattttacctactgattcccaaagaattcaaagagcttacgaggtaatattaaaaacaaaaaaatctctatttgattggactaaaaatactaaatcagatttcattgactttgaaattaagaaaatttttattgatattccaagagaagaattgctaaaaaaaatcaatcaaagaacggaattaatgtttaaaaacaaatgtatggaagaagtaaaaagatttaactcttttaaattaagtaaatcattctccgctaacaaattaattggagtgcaagagatcaacaatcatttgaaaggattaatttctttggatcaatgtaaagaacttataaatatcaaaactaggcaatatgctaaaagacaaaatacttgggctcgaggtcatatgaagaactggaacaagctttattctaaagatttttctacactttttaaaaaaactttaaaagtcgtcagctaaa

SEQ ID NO: 244889 - DNA, 633 bp, Unknown
  Bacterial polypeptide expressing nucleotide sequence isolated from the Sargasso Sea
gaaaaaaagttccaattctcgtaggaggaacagggttatattttaaagctttgactgatggattggtaaacattccaaatattccaattaaatttagaaataaagttagaaatttacataaaaaaattggagcaaaaaaattttttatagaattaataaagctagatccattagcaaagaaaaaaataaatccattagattcgcaaagagctattcgtgcctatgaagttaaatcatttacaaaaaaatctatgtatgatttctttaaaaatacaaaatcattgtaccaaaaagaagatttttacaaaatcttcatcaattttcccagagatgagctaatcaaaaaaatagattaccgatcaaaagaaatgatcaaaaagggactaatttctgaagtaaaaagatttaaaaaacttaaagtttcaaaaaaaatgactgcttcaaaggctataggcatcaatgaggtaagtagctatcttgataaaaaaattctaatcacagaacttattgacaaaatatcaataaagacaaggcaatatgctaaaagacagatgacttggggaagaggtcatatgagagagtggattaaaatagagtcaaatagcttaaataagtttttaaaaaaaatttaga

SEQ ID NO: 244890 - DNA, 703 bp, Unknown
  Bacterial polypeptide expressing nucleotide sequence isolated from the Sargasso Sea
ttgataaaaaccatatttttcatagctggtccaaccgcttcaggtaaatccaacttttcaattgatttagcaaaaaaaataaatggggtagtaataaattctgacagtatgcaggtttataaaaacttagagattcttacagcacgaccaaataaaaatgaaatgcaaaatatagaccactatttatatggttatgttgatgggatggaaaggtacaatgtagaaaagtggtgtaatgatgctactgacattattcataaaacttttgataaaaatttaaatccaatattagtagggggtacaggactatatattcatacgttaattaatggattaattgatattccaaaaattccagaaagaattaaaaatgaatcagaaaaaataattaaagaatttggtagagattttttaataaatcaaatacgtaaacttgatcctaaatcacttgtagaagtaaattctaatgatactgtaagattaagaaggatctgggaagtttatgaatcaacaggcaaaaaatttagtgaatggaaattaaataaaaataaaaaatttatagaaaattatgattttaaaatatttttatttttgccaaatcgagaaacaaattatgaaattgttaattctcgatttattaaaatgattaatggtggagcaattgaagaagttataaaattattagatcttaatcctcaatgat

SEQ ID NO: 244891 - DNA, 722 bp, Unknown
  Bacterial polypeptide expressing nucleotide sequence isolated from the Sargasso Sea
aattgacataatagatcctgaggaatcatattcagcagggagttttgttcgagatgcatcatttcaaatagatgcctcaattaagaataatcgaatacctctcattgtcggagggacaatgctttatttgagttctctttgtaatgggattgctcaattgccagaaaaaaatatggaaataagggaagaaatagaaaagaaagctcagaaacagggttggggagagatctatgctgagttaaaaaaaattgacttatgtgcagcaaataacattaataaaaatgacaaacaaagaattcaaagagccctcgaggtttattatataactggaaaaaagatctcagaattacaaaaaaaaacaaaaccacaaaatgattatcaatttgaagttttttctttgaaaaatataaatcgcgacgtgctgtattctaaaattaataatagatttcttgatatgcttgaggctggttttgttgaagaggttcgtattttaagagaaagagaaggattgtcgtcagggcacatgtctatgcgtgccgttggctataagcaaatctggaaatatcttgataatgaaatagatttaaatgaagctactaaattagctcaaacctcaaccagacaacttgccaagagacaactcacatggatgaggagcatgaaaaatcttaagcaagaaagtcataaaaatatttacaagaaaattgagtcattaatataaa

SEQ ID NO: 244892 - DNA, 804 bp, Unknown
  Bacterial polypeptide expressing nucleotide sequence isolated from the Sargasso Sea
aaaaaaaattaaaggagaaattgttaatgctgatagtatgcaagtttataagcaacttcaaattttaactgcaagacctcaaaaaaaagatctaaaaaaaataaaacatcacctatatggtttttgtgatgtaagaaaaaattattcaactggagaatggttaaagcttttactaaaaaagattaaagatattcaaaaaagaaagaaggttcccattatagttggaggtacaggtttatattttaaagctcttactgatggtttggtaaaaataccaaatattccaattaaagtaagaaataaaattagattgctgcaaagaaaattaggtcagaaaaaattctataatagattattaaaacttgatcctttgataaaaaatacaattgaaaaaaatgatgttcaaagatctatgagagcttatgaaattaaaagccatacaaaaaaatccattataaattggtttaaaaagacaaaaaagtatatttcttcagatgtatttattaaaatttatattgatcacccaagagaaagcctgataaaaaaaatcaatttgagagtggacgatatgtttacatccggggctgtcgaggaggttcgacaatttaataaacttaaagtcaaaaaagaaaatagctcaaataaggtcattggaattaaagaaatcacaaattttttaaacagacagtgctctcttaatcaggccaaagagttaattgctattaaaacaaggcaatatgctaagaggcaagctacatgggcaagaggccaaatgggatcttggcaaaaattaatcctaaaaat

SEQ ID NO: 244893 - DNA, 415 bp, Unknown
  Bacterial polypeptide expressing nucleotide sequence isolated from the Sargasso Sea
aatggaccttaagtccaaaatcattttaatttcaggacccactgcatcaggtaaatcaaattttgcaataagccttgctaagaaaataaatggagaaattatcaatgcagatagtatgcaggtctataaagaacttcggatcttaactgctagacctaaacaaaaagattatcaaaatattagacatcacttatatggatttttaaatgttacaaaaaacttttcaacaggtcagtggctaaagctttgtcaaaaaaaaataaaagaaattcaatcaagaaataaaataccaatacttgttggtggaacaggtctttattttaaagcgcttactgatgggttggttaagattccaaccattcctcttaaaattagaaataatattagaaacttacaaaaaaaactggacaaaaaa

SEQ ID NO: 244894 - DNA, 829 bp, Unknown
  Bacterial polypeptide expressing nucleotide sequence isolated from the Sargasso Sea
atggacctaaagtccaaaataattcttatttcaggaccaacagcatctggaaaatcaaaatttgctatccagcttgcaaaaaaaattaatggtgaagtaataaatgcagatagtatgcaaatatttaaagaactaaaaattcttacggcaagacctcagcaaaatgatctaaaaaatataaaacatcatttatatggatttaaaagtgtaaaaaaaaattattccacaggaaattggctaaaggacgccaagttaaaaattgataatattaagaaaaaaaataaaactccaattcttgttggtggtacaggtttatattttaaagcacttatcgatggtattgttaaaattcccgatattccactcactattcgaaatagaataagaaaaaaacaatcaaaaataggacaaattaaattttattctgaacttattaagctagacccactttgcaaaaaaaaaattaataaaaatgattctcaaagatcaataagagcctatgaagtaaaaaagtttacaaataaatctttgtttgattggtacagtgaaacatactctgattttaatcaggacagctttataaagctacatattgattatcctagagagaagctaatagaaagaatttctataagaacaaatgaaatgttaagagatggagcaataaaagaggctaagaggttttataagttaagagtaaagaaagatttatcgtctaataaagttattggtctaagtgagattaaagaatatatcgacaaaagaatagatcttactgaattgaaagaaaaaatatcaataaaaacaaggcaatatgctaagagacagt

SEQ ID NO: 244895 - DNA, 841 bp, Unknown
  Bacterial polypeptide expressing nucleotide sequence isolated from the Sargasso Sea
attaatttgtcaaaaaaaattattcttttagccggacccacagcatcaggaaaatcaaaactagcaattagtttagcaaaaaaattaaacggagagattatcaatgccgacagcatgcaaatatttcgagaatttaaaattttatcttctcgtccaaatttaattgataccaaaaagataaaacatcatctctatggaattatttcagttaaaagatatttttctgctggagattggctaaagaaggtaagaaaaaaaattgatatttgcttgaaaagaaaaaaagtcccaataatagttggtggtactggtctttattttaagactattacaaaaggaattagtaaaattccgaatattgataataaaacgagaaacaaagtcaggcatttgtacaaaaaacttggtcacaaaaaattttacaatcttcttgttaaacttgatcctaaaattaaaggtagaatttttgcaactgactctcagagagtgcaaagggcatatgaagtaaagttaaaaacaaataaatcattatttgattggtttgctaacacaaaatcggattttttggattttgaaataaaaaaattattcattgaaattccaagggataagttgctcaaaaaaatttctatgaggacagagctaatgttcaaggaaaaatgcgtaaatgaagtaagaaaatttaacaaacttaaaattaaaaaagatttatcagcaaataaattaataggagttcaagaaatcaatgattttttaagcggatcaatatcactagaacaatgtaaagaacttataaatattaaaactagacaatatgcaaaaagacaaaatactgggcaag

SEQ ID NO: 244896 - DNA, 620 bp, Unknown
  Bacterial polypeptide expressing nucleotide sequence isolated from the Sargasso Sea
aatggacataaagtccaaaattattttaatagctggccctacagcgtctggcaaatcctcttttgcaataaaattggcaaaaaaaataaatggagaaataattaatgcagatagtatgcaagtttataaagagcttaaaattttaactgcaagacctaaaaaaaaagagcaaaaaaatataaaacatcatttatatggttttcaaagtgtaaaaaagaatttttctacaggggagtggttagcatttgcaaagaaaaaaattaaggaaattaaaaaaaaaaataagatcccaatattagtaggtggaactggattatattttaaggctattacggaaggtttggttaaaattccaaaagtacctttaaaattaagaaatcgaataagagatctacaaaaaaaattagggcaggatgagttttataaaagattaattaaaattgatccactcattaaaaacaaaataaatcccaaagacccccaaagatctattagagcttatgaagtaaaaaaatattcaaaagtttctttgatagattggtttaaaaaaacaaataaaaaatttgaagatgaagattttttaaaaatttatatagaattttccagacctgatttaattg

SEQ ID NO: 244897 - DNA, 310 bp, Unknown
  Bacterial polypeptide expressing nucleotide sequence isolated from the Sargasso Sea
gatgaaaaaaataattctgttatttggcccaaccgcatcgggaaaatctaaattagcgatcgatctagcccaaaattataatggtgaaatcgtgaatgcagatagtatgcaagtctattcagaaatcaaagttctttctgcaagaccagatgaaaaacatatcaaacaccatttatatggatgcgcatctgttaatgataatttttccgtaggaaaatggtacaccttagcaactaataaaattaaagagataaataaaaaaaataaagtagctatcgttgttggtggtactggactttatttcaaagta

SEQ ID NO: 244898 - DNA, 508 bp, Unknown
  Bacterial polypeptide expressing nucleotide sequence isolated from the Sargasso Sea
tttgtcaaaaaaaattattctattagcaggacccacagcttctggaaaatcaaatctagctattcatcttgcaaaaaaacttgatggtgaaatcataaatgcagatagcatgcaaatttataaagaattttctattttatcttcaagacctactaaatctgaaacaaaaaaagtaaaacatcatatttacggcattatatcggttaagaaacacttttctgcaggagattggtttaaggaggctaaaaaaaaaataaacaattgttttcaaaagaaaaaagtaccaattgtcgttggtggtacagggttatactttaatacaattacgaaaggcattagtaaaattcctgacatagattttaagacaagatctaaagttagaaacttgtatgtgaaactcggttttaaaaaattttatgaaaagcttattgaattagatcctcaagtaaaaaataaaattttaccaacagattctcaacgagctcaaagagcttttgaagtaaaactt

SEQ ID NO: 244899 - DNA, 712 bp, Unknown
  Bacterial polypeptide expressing nucleotide sequence isolated from the Sargasso Sea
tcaaagtgttaaaaaggatttttcgacaggatcatggttaaaacttgtaaataaaaagataaaagaaattagaaaaagaaatagagttccaattttggtaggtggaactggtctttattttaagtctttaactgatggattggtgaaaataccaaatatttctaaaaaatttagaaataaaatcagaactctacaaagtcgaataggacaaaaagaattttataatagattaatcaagatagactcaaaagcaaaggcttatgctaaaccaaatgatgtacaaagatcagttagagcatatgaaataaaaaaatatactaaattatcgattttagattggttcaaaaaaacaaagaaaacatttaatgaagatgaatttataaaaatttatcttgatgttaaaagagaaaaactaattaatataataataaaaagaattgaacaaatgtttatagataaagtgattaatgaagtaattagatttaacaaaattaaaataaaaaaaaataaaagtgccaacaagataataggcataactgaaattacatcttatctaaaaggtttatataatttagaagaaacaaaagagaaaattcttataaaaactagacaatatgcaaaaagacaaacaacttggtctaggggccaaatgattaattggataaagctagatttttttaaaaaaaaaaaatttcttttaaaatttaatagt

SEQ ID NO: 244900 - DNA, 638 bp, Unknown
  Bacterial polypeptide expressing nucleotide sequence isolated from the Sargasso Sea
tttgactaataaattaaattttcaaaaaaaaataatacttattgcaggacccacagcgtcgggtaaatcgaaattagctatttctttggctaaaaaaattaatggagaaataattaatgctgatagtatgcaagtttataaagaattttctgttttatcatctagaccttcagaaaatgatctcaaaaaagtaaagcattatctttatggaattttgtcagtaaaaaaatatttttctactggagaatggcttattctagcaaaaaaaaaaatcaacaaatgtattaataaaaaaaaaatacctattatagtagggggaactggactttattttaatgcaataacaaaaggtattagtaaaattccccagatagatagtgatataagagaaaatataaggaatttgcacaggaaaattggtcaaaaaagattttacaacagacttatattaattgatccattatccaaaaataaaatcgttgcttctgatacccaaagaactttaagagcatatgaggttaaaatttttactaaaaaatctctttatgaatggatcagtaatacaaaatcagagtttttaaattatgatataagaaaaatttttattaacaccccaagagaagatttgttaaaaaata

SEQ ID NO: 244901 - DNA, 911 bp, Unknown
  Bacterial polypeptide expressing nucleotide sequence isolated from the Sargasso Sea
aatgagttttagaaaaataattcttttatttggtccaaccgcttcggggaaatcaagactggctgtggatattgctaaagaactaaaaggagaagttgttaatgcggatagtatgcaggtttataaagaaattaaaattttgtctgcgagaccaaataacaaaagtataaagcatcacttatacggatttgtttcagctaaagagaatttttcagttggttcttggtataaattagctgctacaaaaattaagaaaatcaataaaaaaggtaaaattgccatcgttgtggggggaacaggtttatactttaaagtattagttgatggactagcagaaatgcccgaagttcaaaaaatagattatagttaccttaatcccataggcaggtggatgatgcaaaactattatagtaaaagatatccaaaaatttttgagggtataaatagaaacgatatacagagaatttcccgagcaatttctgtttataatgctacaggaataaccttaagtgattggcaaaaaaagaaaaataaaaaatattttaattcaaaggaatttataaaaatttgtcttattccacctaaatctgaattagaagaaaggattaaaaaaagatttttacatatgctgaaaaaaggtgcaataaaggaagccaaaaaatataaagaattagatctatcattacactcgctacatacatcaaattcaataataggacttagtgaaattgaatcatttctggctaaaaaaatttcaatgaacgagttaaaagagcaagttcttataaaaacaaggcaatatgccaaaagacaatatacttggcaaagaggtcagatgaaagattggaaaggatttgaagatacaaattatctcgatttacgaaaaaaagttctaagttatttatctaaaa

SEQ ID NO: 244902 - DNA, 183 bp, Unknown
  Bacterial polypeptide expressing nucleotide sequence isolated from the Sargasso Sea
tatgcggccaagaccgtcgagcttcctgatgtccgctctccctcctgccatcttcctcatgggccccactgcgtcgggcaagaccgatcttgcgttggaactggcgcgcttgctgccctgcgagctgatcagtgtcgattcggcgctggtctatcgcggcatggatatcggcacggcgaagcc

SEQ ID NO: 244903 - DNA, 589 bp, Unknown
  Bacterial polypeptide expressing nucleotide sequence isolated from the Sargasso Sea
tatgggacccacagcatcgggtaaaaccggtctggcgctagatatagcggctaaggttgacagtgaagtaattagtgttgattcggcccttgtatataaaggcatggatattggcacagcaaaaccttcgcaggacgagcaagcaggtgtagtgcatcacctaattgatattatcgaccctgctgaaagttattcggtgtcgcaatttgtaaacgataccaatgcgctgattggcgatattttatctcgcggcaaagtgccaattttggctggcggtacaatgatgtactttaatgccttgataaatggaatttcgccactacctaagtcagatgaaaaggtacgggatgaaataacacagcaggcacaacgcttgggttggtctaaattacacgatgaattacgtggtgtagacccaattagtggtgagagaattcaccctaatgatcctcagcgaataacccgtgcactagaggtgtatagaagtactggcaagacgttgacacattggcaacagcaagagggggaaaggtgcccttataatattgcacaatttgccatagcgcccgctgacagggcagtgtgcacg

SEQ ID NO: 244904 - DNA, 889 bp, Unknown
  Bacterial polypeptide expressing nucleotide sequence isolated from the Sargasso Sea
ttgcctaaaaaaataaatagaaagataatacttttatttggtcctaccgcatcaggaaaatcaaaactagcagaagatatagctaaaatatatgacgctgaaatagttaatgcagatagtatgcaaatctataaggaagttaaaattttatcagcaagacctaaaaaaaaaaatattaaacatcatctatatggctttgtttcaattaaaaaaagattttcaacaggggcctggtataaacttgcaacaaaaaaaattaaacaaataaataaaaagggaaaaattgcaattgttgttggaggtactgggctttactttaaggcattgactgatggattttcacaaatacctactattccagaaaaatataaaaaacttaagattgataaaaattttgtattaaataatccaaaaatctttaagggtatttctctaaatgacaaacaaagggttcaaagagcttttttagtatataaatttacaaaaaaacccctctcatcatggcaaaaaagaaataaaaaagaatttaagaaatcagaatttgttaagatttttctatgtcctcccaagactgagatcgaaagaaggatcagaaaaagatttttagacatgttgcagaatggagcaataaaagaaacagaaaattttaaaaaaaaacgtgtcaattctcttaaatcatcaaactttataattggtattaatgaaatatcagaatttttaaaaaataaaatttcaattgatgaagttaaagagaaggtggtcataaggaccagacaatatgcgaaaagacaaatgacctggcaaagaggtcagatgaaggattggaagggttttaatgataccaattatctagatttaagaaaaaaaattattaacttacttatctaaa

SEQ ID NO: 244905 - DNA, 769 bp, Unknown
  Bacterial polypeptide expressing nucleotide sequence isolated from the Sargasso Sea
aatggacctaaagtccaaaataatattaatttcaggtcctacagcatctggcaaatcaaaatttgcaattaaattagctaaaaaaattaatggtgaaattatcaatgctgatagcatgcaggtttataaagaatttagaatattaactgcaagattaaatattaaagaatattcaaatattaagcatcatctatatggttttcagaatgttaaaaaaaacttttctactggagaatggttaaaattagtaaaaaaaaaaattttagaaataagaaaaagaaaaaaaatacctattttagttggaggaactggtctttattttaaatcattaattgacggtttggtaaaaattccaaacattccgattagatataggaacaagatcagattatatcaaaaaaaaatagggcagaaaaatttttttaaaaaattactaaaaattgatccatcaattaaaaataaaataaaatccactgatacacaaaggtctataagagcttatgaagttaaaacatttacgaaaaaatctattaatgaatggtataaaaaaactaaatcacaattttctaaaaatgaattttttaagatttatattgattttcaaagaccagaaataataagtagaatttctgatagaaccgagaagatgattaaaagaggagctatcaatgaagtaaaaagatttttaaaactaaaaattaaaaaggacaaaacatcaagcaaaattataggtgtccaagaaataatggaatttatggaaaaaaaaata

SEQ ID NO: 244906 - DNA, 600 bp, Unknown
  Bacterial polypeptide expressing nucleotide sequence isolated from the Sargasso Sea
aatggaccttaagtccaaaataattttagtttctggaccaacagcatctggtaagtcaaacttttcaatacaactagctaagaaaataaatggtgagattataaatgctgacagtatgcaagtttacaaagaattaaatattttaacagctagaccaaataagaatgaacacaaaaatattaaacatcatttatatggatttttgagcgttaaaaaagatttttctacaggcgcttggttaaagcttattttccaaaaaataaaagaaataaaaaaaagaaaaaaaattcctatacttgtgggaggaacaggtttgtattttaaatctttgacagatggtttggttaaaattccaaacattccaaaaaattatagaaataaaattcgaaaacaccacaaaattattggacaaaaaactttttataaaaaattagtaaaattagatcctttatcaaaaaataaaattgaattaactgacgtccaaagatcaataagagcctatgaagtaaaacaatttacaaaaaaatctatttttgaatggtttaaaaaaacaaaatcaccatatccaaaaagaagtatatttttaaaatatatattgga

SEQ ID NO: 244907 - DNA, 392 bp, Unknown
  Bacterial polypeptide expressing nucleotide sequence isolated from the Sargasso Sea
tttgtctaaaaaaataattctcttagctggtcctacagcatcaggtaaatcaaaattagcagttcaattggctaaaaaattaaatggtgaaattattaatgcagatagtatgcaagtatacagagagttttcaattttatcttctagaccagacaacaaagatttaaaaaaggttaaacatcatttatatggaatcattcctgctaaaaaacatttttcagcaggggattggcttaaattagcaaaaaatagaataaattactgtcataaatttaaaaagattccaattatagtcggcggtacaggtttatattttaatactataactaaaggcatcagtaaaatacctgacatagatttacaaacaagaaataaggtaagaaatcttttta

SEQ ID NO: 244908 - DNA, 823 bp, Unknown
  Bacterial polypeptide expressing nucleotide sequence isolated from the Sargasso Sea
aatggatttgagatccaaaattattttaatttatggtccaactgcatcaggtaaatctgaatttgctgttaaactagccaaaaaagttaaaggagaaattattaatgcagatagcatgcaagtttataaagaattgcagatattaactgcaagacctttaaaaaaaaatatgagatctataaaacatcatctttacggttttcgtgacgcaaaaaaagatttttctacaggtgattggattaatctagtaataaaaaaaatgagaataataagaaatcaaaataaaataccaattttagtaggaggcaccggtttatattttaaggcattgacggaaggattagttgaaattcctaatgtaccaaataaaattagaaaccaaattagggctttacaaaaaaaaattggccaaaaaaattttttcaaaaaacttattaatatcgatccgttagttaataataaaattaaacctacggatacccaaagatctattagagcatatgaagtaaaattatttacaaaaatatctatatttgaatggtataaaaaaactaaatcaaaatttaaaaacaaagattttttaaaattatatatcgattttcctagatcagaactagttgaaagaattaatttgagaacaaaaaagatgttagaatccggatcaattcctgaagttaagaaatttataaatcatagaatttccagtaataaaagtattaccaaagctataggtattgttgaaatcaagaatttaattcaaaataagctttcaaaagggcaagtaattgaaaaaatatcaataaagacaaggcaatatgctaaa

SEQ ID NO: 244909 - DNA, 772 bp, Unknown
  Bacterial polypeptide expressing nucleotide sequence isolated from the Sargasso Sea
tttgtctaaaaaattagtactcttggcaggtcctacagcttcaggaaaatctaatttagcaattaaattagcaaaaaaactaaatggtgaaattataaatgcagacagtatgcaaatttttaaagaatttaatgttctttcatctcgacctgctttaaatcaaactaaaaaagttaaacatcatctttacggaatagttacggtaaaaaaacatttttctgcaggtgattggcttaaacaagttaaaattaaaataaacacttgtgtaaaaaagaaaaaaattccaattattgtaggtggaactggtctctattttaatacgattactaaaggtataagtaaaattcctgatgttgatctaaaaacgagaaaaaaagttagaaacctatataaaaaacttgggattaaaaaattttacaatgcattaataaagcttgaccctaaagttaaagacagaatacttcccactgactcgcaaagggttcaaagagcttatgaagtaaaacttaaaacaaagaaatctctttatgattggtttgaaaagacaaaatctgattttttagaatttgatataagaaagatttttatcgatattccaagagatatattacttaataaaatttcaatgagaacagaacaaatgtttaagaaaaaatgtattaatgaagtaaaaaatttcaataatcttaaagtcaataaaagtttttcagcaaataaattgataggagttcgagaaataaacgattatttagagggtttaacaactatagaa

SEQ ID NO: 244910 - DNA, 557 bp, Unknown
  Bacterial polypeptide expressing nucleotide sequence isolated from the Sargasso Sea
aatggatttaaaatccaagattatattaatatcaggaccgacagcatcaggaaaatcaagttttgcaattaaagttgcaaaaaaagttgatggagagattattaatgcagatagcatacaggtatacaaagagcttaaaattttgtctgctagaccagatccaaaaaaatatcagaaaataaaacatcacttatatggttttcataatgtaacaaaaaacttttctacaggtgattggcttaagctagtaattaaaaaaattaaggaagttaaaaaaagaaaaaaaactccaattcttgttggaggtacaggtttatattttaaggcactaactgacgggcttgtaaaaattccaaacatttcagtaaaattaagaaaccagattagaaatatgcaaaaaaaacttggacaaaaaaaattttatgaaaaacttttaaaactagacccatcattaaaaggaaaaataaatcctactgactctcaaagatctattagagcttacgaagtaaaaaaatttacaaaaaaatcactttatgaatggtttaagaatacaaaat

SEQ ID NO: 244911 - DNA, 788 bp, Unknown
  Bacterial polypeptide expressing nucleotide sequence isolated from the Sargasso Sea
tggaaaagaagatttgaaaaaagtgaaacataatctctatgggttcattgatataaataaaagtttttctacagctgactggcttaaatttgtaattaaaaaaattaaagagattaatcgtaaaaagaaaattcctataatagttggtggaacagggttatacttttattcattagtagaaggatttgcgaagcttccaactattccaattaaatttagaaataaaattaggaatttaaataaaaaaattggtcaaaaaaatttttataaaagacttgttaaaattgatccattatcaaaaaataaaattaattcaaatgatgttcaaagatctattagagcatatgaagtaaaaaaatattcaaataagtctatttatgaatggcaaaaaaaaactaaaaccatttttaataataaaagatttataaaattatatttaaattattcaagagaagaattacttaagagaattaatttaagaacaagaaaaatgattaaatatggagcagtatctgaggttaaaaaactattaaataaaagtaatgtcaaaaaagaacattattataaaatcataggatttcgagaaattgaaaagtttcttgaggggaaaatagataaaaatactttatgtgatcaaatcaatatacgaactaggcagtatgctaaaaggcaaactacatggtttaggggtaaaatggaatcatggacaccaattgatccaaataaattgactcctttcataaaaaaattaaataaatcatcacttaaacttgaccaattaatataaa

SEQ ID NO: 244912 - DNA, 496 bp, Unknown
  Bacterial polypeptide expressing nucleotide sequence isolated from the Sargasso Sea
atgagcgcagcaccgcacgccaaccccagcccgacgacgatcgcctgcctgctcggccccaccgcctcgggaaagacggccgcggcgctggcgctcgccgcgcgccgcccgatcgagatcgtcagtgtcgattcggcgctcgtctaccgcgacatggatatcggcaccgcgaaaccgtcgctcgacgagcgcgcgagcgtgccgcatcacctgatcgacatcatcgatccggccgacgcgtattcggccgcgagcttccgcgcggacacgctgcgcctgatcggcgagatcaccgcgcgcggccgcacgccgctgctcgcgggcggcacgatgctgtactacaaggcgctgacgcaggggctcaacgacctgccgggcgccgatccggacgtgcgcgcgacgctcgatgccgaagccgagcgcgatggctggcccgcgctgcacgcgcggctcgcacaggtcgatcccgacacggccgcgcggctcgcgccgaacg

SEQ ID NO: 244913 - DNA, 890 bp, Unknown
  Bacterial polypeptide expressing nucleotide sequence isolated from the Sargasso Sea
caagataattttaatttcgggacccacagcatctggaaaatcaagttttgcaattaagcttgcaaaaaaaattaaaggggaaattattaatgctgacagtatgcaagtttataaacagcttaaagttttatctgcaagaccaaaccctaaaaattttcaatcaataaaacatcatttatatggttttcaagatgcaaagaaaaggttttctgctggagattggcttaaaattgcaaataagaaaataattgaagtcagaaaaagaaaaaaaataccaattcttgtcggaggaactggcctttatttcaaagcattaaccaatggtttagttcaaattccaatcattccaataaagtttagaaaccaaattagaaatttaaataaaaaaattggtcaaaataaattttataagcaattattaaaactagatcctctatcaaaaaacaaaattaatccaactgatactcaaagatcaataagagcttttgaagttaaaaagtttacaaaaaaatctcttcatgagtggtttaaaaatactaaatcaaattatttagaggaggatttttttaaaatttatatcgactaccctcgtgaagagttagtcgaaagaattcatcaaagaactgtaaaaatgattaaaatgggtgctgtaaatgaggttaaaaaatttttaaaactcaaaattaaaaagcaaatgactgctaacaaagcaattggaataaatgaaattaaggaatatttagctaaagaaaaaaaaattgacgaaattaaagaactaatatcaataaaaactagacaatacgccaaaagacaaagtacttgggcccgtagtcacatgagtgattggattaagctaaagccacttgagataaataaattttttaaaaaaa

SEQ ID NO: 244914 - DNA, 748 bp, Unknown
  Bacterial polypeptide expressing nucleotide sequence isolated from the Sargasso Sea
attgaaaactccagtctattttgtattagggcctactgcatcaggaaaatcaaaatttgctttaagtttagctaacatactaaatggcgaaattataaatgctgacagtatgcagatttatagtgagttaagtatcttaactgctaggccgacaataaatgaccaaaaaaaaataaatcaccatctatatggttttgtaaaaggtgatgttagattcaatgttcaaaaatggtgcgatgaagcatcaaaaataattaatcacttagtaaataaaaatatcactcctattttagttggaggtacgggtctttacattgaatctctaattaatggaattgtttcaattccatcaataccagaaaaaattaaaatagaatcagaaaaaattatttcaaaaattggtaaggaaaatttttttaatttagttaaagaacttgatagtgatgcaatgaaaaatatttcacccaatgacattcaaagaatacaaagaatttgggaagtaaatttttttactaagaaaaaatttagttactggaaacaaaataaaaataaaaaattaattaatttgaaagattataaaatcttattatttcttcctgaaagaaatgaaaattataaaagagtaaatgatagaacgcatattatgatgaatgaaggtgcaatatcagaggtagagaaattactaaaactaaaatacgataatagcttgcctattatgagggcgcacggagttcctgaaattcaatct

SEQ ID NO: 244915 - DNA, 625 bp, Unknown
  Bacterial polypeptide expressing nucleotide sequence isolated from the Sargasso Sea
atggacttaaagtccaaaataattcttatttcaggaccaactgcctcaggtaaatcaaaatttgctattcagcttgcaaaaaaaatcaatggtgaagtaataaatgcggatagtatgcaaatatttaaagaattaaaaattcttactgcaagaccacagcgaaatgatttaaaaaacataaaacatcatttgtatggatttaaaagtgtaaaggaaaattattctacaggaaattggcttaacgatgccaagaaaaaaattaacaatattaaaaaaaagaataaaattccaatccttgttggcggcactggtttatattttaaagcacttattgatggtatagttaaaattcctgatattccatttattattcgaaacagaataagaaaaaaacaatcaaaaataggacaaactaaattttattctgcacttattaaactagacccactttgcaaaaaaaaaattaataaaaatgatacacaaagatcaataagagcctatgaagtaaaaaaatttacaaataaatctttgtttgattggtatagtgaaacttactctgattttactcaagacagctttataaagctacatattgattatcctagagataagttaatgagaaaat

SEQ ID NO: 244916 - DNA, 798 bp, Unknown
  Bacterial polypeptide expressing nucleotide sequence isolated from the Sargasso Sea
agtggtaaatcaagttttgctttaaaattagcgagaaaaatcaagggagaaataattaatgctgatagcatgcaagtttataaacaacttaaagttttaacagcaagacctaaaaaaaaagaattaaaaaaaatcaaacaccacttatatggattttgtgatgtaaaaagaaagcattcaactggtgagtggattacattattattaaaaaaaattagtgatattcgcactagaaagaaaataccaattatagttggaggaactggtttatattttaaggcccttactgaaggtttggttaaaataccaaatattccaattaaagttagaagcaagtttagaaaaatgcaaaaaaaattaggtcaaaaaaaattttataaaaaattaataaattttgatcctttaataaaaaacaaaattgataaaaatgatgtacaaagatctataagagcatatgaaataaaatatcaaacaaaaaaatctatttttgattggtttaaaaaaactaaaaattttttctcatcagatgaatttattaaaatttatatcgattacccaagagaagaattgattaaaaaaattaatttaagagttgaagaaatgtttaaagatggagccatcgaagaagttaagagattcaacagacttaaagtaaaaaaggaaaacagtcctaataaagttattggaattaaagaaattacaaatttattgaataaacagtgtactcttgagcaagcgaaggagctaattgctatcaaaacaagacaatatgccaaaagacaagcaacttgggcaaga

SEQ ID NO: 244917 - DNA, 772 bp, Unknown
  Bacterial polypeptide expressing nucleotide sequence isolated from the Sargasso Sea
cagacctcagcaaaatgatttaaaaaatataaagcatcatttatatggatttaaaagtgtaaaaaataattattctacaggaaattggcttaaggatgccaagaaaaaaattaacaatattaagaaaaagaacaaaattccaattcttgttggtggtacaggtttatattttaaagcacttatcgatggtattgttaaaattcccgatattccactcactattcgaaatagagtaagaaaaaaacaatcaaaaataggacaaattaaattttattctgaacttattaagctagatccaatttgcaaaaaaaaaattaacaaaaatgattctcaaagatcaataagagcctatgaagtaaaaaagtttacaaataaatctttgtttgattggtacagtgaaacatactctgattttaatcatggcagctttataaagctacatatcgattatcctagagagaagttaatagaaagaatttctgtaagaacaaatgaaatgttaagagatggagcaataaaagaggctaagaggttttataaattaagagtaaagaaagatttatcatctaataaagttattggtctaggtgagattaaagaatttctcgacaaaagaatagatcttaatgaattgaaagaaaaaatatcaataaaaacaaggcaatatgctaagagacagtccacttgggcaagaggacaaatgtctgactggcaaaaaataaaatttaatactcttaaatcatatttaaaaaaatttcctaaatcagcatag

SEQ ID NO: 244918 - DNA, 709 bp, Unknown
  Bacterial polypeptide expressing nucleotide sequence isolated from the Sargasso Sea
attgaaaactcaaatccattttgtattaggtcccactgcatcaggtaaatcaaaatttgctttaaatctagctgagaaattaaatggcgagattataaatgctgatagtatgcagatttatcgtgacttaagtatattaactgcaagacctactttagaagatcaaaaaaaagtaaatcaccatctttatggatttgtaaaaggtgatgttagatttaatgttcaaaaatggtgtgaggaagtatcaaaaaaagttaattatttggttaataaaaatatcacccctattttagttggaggtacaggtctttatatagaatctttaattaatggaatagtttcaattccatctattccagaaaaagtaaaaatagaatcagataaaatgattttaaaaattggtaaggaaaatttttttaatttagttaaagaacttgatagtgatgcaatgattaatattgcacctaatgatattcaaagaataagaagaatatgggaagtaaatttttttactaagaaaaaatttagtgaatggaagaaaaataaaaataaaaattttattaatttaaaaaattacaaaatattattatttcttccagatagaaaagaaaactatagaagagtagatcatagaacacatttgatgatggaagatggtgcgatagaggaagtcaaaaacttacttcaattaaattatgataatagttga

SEQ ID NO: 244919 - DNA, 684 bp, Unknown
  Bacterial polypeptide expressing nucleotide sequence isolated from the Sargasso Sea
aatgaaaaaaataattcttatatctggccctactgcatctggaaaatcaaagttagctttaaatattgcaaaaaaaatcaaaggcgaaattataaatgctgacagcatgcaggtttataaggagttttcagttctatcatcgagaccatcaaaatcagatacaaaaagagttaaacattatctttatggttttttgtctgttaaaaaacatttttctacaggcgaatggcttaaactagcaaaaaaaaatataagtaattgtattaagaaaaaaaaaatacctattttagtgggtggaacaggtttatattttaatgcgattactaaaggtattagcaaaattccaaaaataaataaaaaacatagaaatgaagtaagagctttacacagcaaaataggtcaaaagaaattttacgaagaactcatatattttgatccaaaatctaaaggcaaaatttcccctacagatactcaaagagcgattcgagcttatgaggtaaaaaagtttacaaacaaatcaatttatgattgggcctcaaatacacactcagattttttagattttgatataagaaagatttttataaatactccaagagaagagttattagaaaatattaaaaaaagaactaatacaatgtttgaaaataaatgtattgaggaggtaaagaattttttaaaaat

SEQ ID NO: 244920 - DNA, 769 bp, Unknown
  Bacterial polypeptide expressing nucleotide sequence isolated from the Sargasso Sea
agctagactaatcatggattttaaatccaagattatattaatttctggaccaactgcttcaggaaaatcaagttttgctattaagctagccaaaaaaataaatggcgaaatcataaatgcagacagcatgcaagtttataagcaattaaagattctttctgcaagaccattaaaaaaaaattaccaaaaaataagacatcacttatatggttttcatgatgtacagaaaaatttttcaactggaaagtggttgagattagcatttaaaaaaattgaagaaattaaaaaaagaaaaaaaactccaatccttgttggaggtacaggtttatattttaaagcattaactgatggactagtaaaaattccaaatataccttcaaaaattagaaatcaaataagaggccttcaattaaaaataggtcaagataagttttataaaaaacttttgaaatttgacccatcttgtaaaagtaaaattaatccaactgatccacatagatccataagagcttatgaagtaaaattatataccaataaatcaattcacgaatggtacaaaaatactaaatctaattttcaaaaaagtgatttcaataaaatctatattgattatcctcgtgctgaattaattgagagaattaatcttagatctacggaaatgattaaaaatggagctattaaagaggtaaaaaattttatcaaattaaaggttagaaaagataaaagcgttaacaaggctattggtatcaatgaaatcagacaatattta

SEQ ID NO: 244921 - DNA, 828 bp, Unknown
  Bacterial polypeptide expressing nucleotide sequence isolated from the Sargasso Sea
agtttgcaaaaaaagttaatgggagaaattattaatgcagacagtatgcaagtatacaaacaacttaaaattttatcggctagaccagatccaaaaaaataccagaaaataaaacatcatttgtatggttttcataatgttacaaaaaacttctctacaggtgattggcttaagctagtaattaaaaaaattagcgaagttcaaaaaagaaaaaaaaccccaattcttgttggaggtacaggtttatactttaaagctttaactgatggtttagttaaaataccaaatattacactaaaattaagaaatcaaattagagatttgcaaaaaaaacttgggcaaaaaaagttttatgaaaaactattaaaactagatccatcctcaagaggaaaaataaatcccacagacactcaaagatccatcagagcttatgaagttaaaaagtttacaaaaaaatctctaactgaatggtttaaaaacacaaaatcaaacttcgtggaagatgatttttttaaagtttatattgattttcctagacaagaattaattgaacgcatcaatgtaaggacaagggagatgataaaaaatggagcaataaaagaggtaaaagatttcataaagttaagagttagaaaacataaaactgccaacaaggccattggagttaatgaaattagagaatatttaaaaaaacaaaaagatttgaatgatactagagataaaatagccataaaaactagacaatacgccaaaagacaaagtacttgggctagaggtaacatgattagttggatgaaactgaagccacaagacataaataattttttg

SEQ ID NO: 244922 - DNA, 615 bp, Unknown
  Bacterial polypeptide expressing nucleotide sequence isolated from the Sargasso Sea
aagcactgctggaagggttgtcccctttgccatcagcggatccagcggtacgagcagagattgaaagacaagcagcagagcgtggatgggacgcgttgcatcagcagctacagactattgatcctgtagccgcagcgcgaatccatccaaatgatccgcaaaggctttcccgggcactggaagtttttttcatttcgggtaaaactttaacagatctgacgcaaacgtctggagatactctgccgtatcaggtgcatcagttcgccatcgccccggcgagccgtgaactgctccatcagcgaattgagcagcgttttcatcagatgttagcttcgggttttgaagcagaagtgcgggcgctttttgctcgcggagatttgcatacggatatgccttccgttcgttgtgtgggttatcgccagatgtggtcgtatcttgaaggcgaaatatcctacgacgaaatggtttacagaggtgtttgcgccacgaggcagttagcaaagcggcaaataacctggttgcgtggctgggatggcgttcactggttagacagtgaaaagccgcaagagtcatacaacgaagtgttacaggttattggtgcgatcgcgaattgaa

SEQ ID NO: 244923 - DNA, 631 bp, Unknown
  Bacterial polypeptide expressing nucleotide sequence isolated from the Sargasso Sea
atggatttcaaatccaaaattattttaatttatggacctacagcctcaggcaaatctcattttgcagtccaattagcaaaaaaaataaatggtgaaattataaatgctgatagcatgcaaatttataaagagctaaaaattttgactgctagaccttataaaaaagattatcaaaaaattaaacatcatttatatggttttcaaagtgtcaaaaaaaatttttctactggagaatggttaaaattagtcaataaaaaaatcttagaaataaaaaaaagaaaaaaaattcctattttagtaggtggtacaggtctatattttaaagctttaactgaaggtctagttagtattccaaatattccaataaaattcagagaaaaaataagattgttacataaaaattttggaacaaaaaaattttttaaagaattattaaagatagaccccttggtaaaaaatcaaataaatcctttggacactcaaagatctattagagcctatgaaataaaaatatttactaaaaaatctatgtatacctggtttaaaaatacaaaatcaaattatgaaaaagataatttttataaaatttatatagattttccaagaaaaggatttattaaaaaaaattgag

SEQ ID NO: 244924 - DNA, 391 bp, Unknown
  Bacterial polypeptide expressing nucleotide sequence isolated from the Sargasso Sea
attgaaaactcaaatctattttgtattaggacccactgcatcaggtaaatcaaaatttgctttaaatctagctgagaaactaaatggcgagattataaatgctgatagtatgcagatttatcgtgagttaagtatattaactgcaagacctactataaaagatcaaaaaaaaataaatcaccatctttatggttttgtaaaaggtagtgttagatataatgtgcagaaatggtgtgaggaagcatcaaaaaaaattaattatttggtcaataaaaatataactcctattatagtcggaggcacaggtctttacatagaatctttaattaatggaatagtttcaattccattcataccagaaaaagtaaaaatagaatcagataaaatgatc

SEQ ID NO: 244925 - DNA, 460 bp, Unknown
  Bacterial polypeptide expressing nucleotide sequence isolated from the Sargasso Sea
atggacattaagtccaaaataatactgatctctggaccaactgcttcaggtaaaactgaatttgctattaaattggcaaaaaaaataaagggggaaattattaatgctgatagtatgcaagtttataatcagcttagaatattaactgcaagaccaagtaaaagggatgaaaaaaaaattaatcattatctctatggttttctaaatgttaaaaaaaatttttcaactggatcgtggttaaaagaagtactaaaaaaaataaagtatattaaaaaaaaaaataaaattccaatcttggtaggtggaacaggcttatattttaaggctttaacagatggattggtaaaaattcccaatattccattaaattttagaattaaaattagaaacttacaaaaaagaattgggcaaaagaaattttataaaaaactaattagtcttgataaatatataaaagaca

SEQ ID NO: 244926 - DNA, 559 bp, Unknown
  Bacterial polypeptide expressing nucleotide sequence isolated from the Sargasso Sea
atggaccttaagtccaaaataattttagtttcaggaccaactgcatctggtaaatcaagtttcgcaattaaactagcacaaaagattaatggagaaattattaattctgatagtatgcaaatttacaaagaatttaagatcttaactgccagaccaagaaaaaaagattgtaaaaatattaaacaccatttgtatggatttcaaagtgtaaaaaaaaatttttcaactggaaaatggttaaaacttgcaagtcagaaaataaatgaaattaaaaaaagaaaaaaagttcctataattgtgggaggaacaggattatattttaaagcattaactgaaggtttggtaaaaattccaaatattccaattaaatttcgaaataaaataagattaatgcaaaaaagaattggccaaaaaaaattttttaataaattatctgaattagatcctttaattattaataaaattattgataaagatattcaaagatcattaagagcatatgaggttaaatcttatacgggaaaatctttagttgattggtttaaatacacaaaatcaa

SEQ ID NO: 244927 - DNA, 781 bp, Unknown
  Bacterial polypeptide expressing nucleotide sequence isolated from the Sargasso Sea
tatggacattaagtccaagatagtactaatttctggtcctacagcaagtgggaagtctaaatttgcattaaagttagcaaaaaaaattgatggagaaattattaatgctgatagtatgcaagtttacaaacaattaaaaattttaacagctaggccaagcataaaagatacaaaagaagtcaaacatcatttgtatggatttataaatgtaactaaaagtttttctactggtgagtgggtcaaattatcaaaaaaaaaaatagaagaaattcgtaaaagaaaaaaaatacctataattgttggtggtacaggtttatactttaaagctttaacagaaggttttgttcaaatccccaatgtacctatgagaataagaagtaaaataagaaaattacaaaataaactaggccaagataagtttttttccaaactaaaaaaaatagacccactagtaaaaaataaaattgaaaaaaatgactcacaaaggtctattagagcatatgaaataaaatattataccaaaaaatcattatttaaatggtttcaaaacacgaaaaaaagtttccctgacacagaatttatcaaaatatatatttatcatcctagagaggatcttattaaaaaggcaaatcttagagttagtaaaatgtttaagaatggagctatagcggaagttagaaaatttaatagattgaagttaaaaaaacaaaatagtgcaaaaaaagtaataggaattgaagaaataaccaattacttaaataataaatacgatttaagagca

SEQ ID NO: 244928 - DNA, 427 bp, Unknown
  Bacterial polypeptide expressing nucleotide sequence isolated from the Sargasso Sea
atggatttaaaatccaaaattattttaatttatggtccaacagcatctggaaaatcgaattttgctattaaactttcaaaaaaaatcaatggtgaaattattaatgctgatagcatgcaagtttataaagaacttaaagtcttgtcagcaagaccctctaaaaatgaatataaaagaataaggcaccatctttttggatttcacagtgtcaaaaaaaaattttctactggtgattggttaaaattagtcaaccaaaagattttagatataaaaaaaagaaaaaaagttccaattttagtaggaggcacaggtttatattttaaatctttaacagatggtttagtgagtattccaaatattccaatcaaatttagggaaaaagtaaggtctttgcacaaaaaaataggaagcaaaaaatttttcaaaa

SEQ ID NO: 244929 - DNA, 796 bp, Unknown
  Bacterial polypeptide expressing nucleotide sequence isolated from the Sargasso Sea
atggacttgaagtccaaaatcattctaatcgccggcccaactgcttcaggaaaatctaatattgccataaatttagcaaaaaagataaaaggggaaattgttaatgctgatagcatgcaagtttataaacaacttaaaattctaacagcaagaccttcagaaaaagatcaaaaaactattaaacaccatttatttggcatcattgatgtgcggaaaagattttcgactggccaatggcttaaaaagtgtattaaaataattaaacttattagaaaaaagaataaaactccaattattgttggtggaactggcctttattttaaagctttagttgatggtctagtaagcattccaaaattcaaaccttcagaaaaaaataagatacttaagcttcataaaaaattgggccaaaagcaattttataaaagattagtcaaattagatcctgtctctaaaaaatttattaattcaaatgatgttaatagatcaattagagcatacgaagttaaaaagcttacaaaaaaatcattatacaaatggttcaaagaaacaaagaccttttttgataagaatgattttgtgatggcttatgtggattatccaagagacaaattaataaagaatatcaaaaaaagaatagataggatgtttgatttaggagccataaatgaagttaggaaatttaatctcattaaaattgacaaactgaatagcgttaatcatgtgattggtattaaagagataaactcttttttaagtaaaaaagctgaattgaacgatattaaagaacagatat

SEQ ID NO: 244930 - DNA, 745 bp, Unknown
  Bacterial polypeptide expressing nucleotide sequence isolated from the Sargasso Sea
agtatgcaagtatacaaagattttgaaattttatcgtctagaccaagtcgagatgaaataaaattagcaaaacatcatttatatggatttcaatcttctggagttattttttctacaggtaaatggcttaaacttgctgcagagaaaattaatcaaatagttaaaaagggtaaagtgccaatactagtaggtgggactggtctttattttaaggcgataactgatggtataagcaaaattccaaacataaaattttccgatagaaacaaaataagaaatttacataaaaaaataggtcagaaaaaattttttgaaaaattaataaaattagatcctatttcaaaaaataaaatttcttcatctgacactcaaagatcgcttagagcatatgaggtaaaaaaatttacaaaaaaatcaatttatgagtgggcaaaaaaaacaaaacccttgtttaaagattatgtatttaaaaaattttttattaatacaccaaaaaatcaactacttaaaaatattgagttaagaactaattctatgattaaaaaaaagtgtataaatgaagtcataaagtttaaaaaaagaaagcttaaaaaatcactttcacccaataagataattggagtcaaagaaattcaaagatttttgagtggagatttagaccaaaagaatcttgtagaattaatgaatattaaaacaagacagtatgctaagagacaaaaaacttggtccagagctcatatgagtg

SEQ ID NO: 244931 - DNA, 613 bp, Unknown
  Bacterial polypeptide expressing nucleotide sequence isolated from the Sargasso Sea
atggatcctaaagttatattcttaatggggcctactgccagtggtaaaactgcactggccatagacttgtataaaagcatcccgtctgagttgattagcgtcgacagcgccttaatttataaggggatggatattggcaccgccaaacccaccgcagccgagcttttagaagcacctcaccatttaattgatattctggatcctgcttttgcttattcagcggctgactttcgtaacgatgcattacgacttattgctgatattcacagcagaggaaaaaccgctattctggtcggcggtactatgttgtatttccgcactctgttacagggcatatcgcctttgcctgaagcggacccggagatacggcaacagattgaaactgaagcagcagaacatggctggagttatttgcaccagcaattggcagagtttgatccggtgtcggcggctcgtattcatccgaacgacccacaacgggtcaatagggctgtggaggtgtatcgattgacgggcaagagcttaactgaattgacagagcaaaaaggtgagccttttccatatcaggtgcaacaatttgctatcaatccaacagatcgctctgaacttcacc

SEQ ID NO: 244932 - DNA, 797 bp, Unknown
  Bacterial polypeptide expressing nucleotide sequence isolated from the Sargasso Sea
aatggaccttaagtccaaaataatattaatttcaggtcctacagcatctggaaaatctaaacttgcattaaaaatcgctaaaaaaataaatggggaaattataaatgcggatagtatgcaggtttacaaagaattgaagatattgactgctagaccttcggaaattgatttaaaaaaaataaaacatcatttatatggttttagaactgttaaaaaagatttttcatctggcgaatggttaaaattagcaaaaaaaaatataaaaaaaattaaggataaaaataaaataccagttttagttggtggtactggtctttatttcaaagcactgactgatggcttggttaaaattccaaatataccaatttcttttcgtaataaaataagaagaatgcaaaatagtttaggtcaaaaaaaattttattcaaaacttttaaaaaatgactcattagtaaaaaacaggattgatcctactgatcttcaaagatctattagagcttatgaagttatttcatttacaaagaaatcaatttttgaatggtataagaaaacaaaaccatcttttaaaaaggatcaatttattaaaatttatattgattatcctagagatgaactaatcagtaaaatttctaaaagagtagatcaaatgatgaaaaatggagctattaaagaagttaaggattttttaaagctaaatttggtgagtgatagtaacatattcaaagttataggaattagagagatcaaagaatttattgataaaaaaacttctatgcatgatttaaaactaaatattg

SEQ ID NO: 244933 - DNA, 572 bp, Unknown
  Bacterial polypeptide expressing nucleotide sequence isolated from the Sargasso Sea
agcagatccggagatacgacagcagattgaagctgaagcggcagaacatggctggggctacttgcatcagcaactggcagactttgatccggtatcggcggcccgtattcatccgaacgacccacagcgggtgaacagggctgtggaagtgtaccggttaacgggcaagaccttaactgaactgacagagcataaaagcgagccttttccgtaccctgtgcaacaatttgctatcaatccaacagatcggtctgaacttcaccagcgtatagctgtcagattccggcaaatgctagattgtggttttgcggatgaagtaaaaacgctgatgcaacgacctgatttacatttggatttaccttcgatgcgttgtgtgggctatcgtcagatgtggctacacttgcaaggacagctgtctgagcaggagatgatcgaccagggcattgctgccactcgccaactggcgaaacggcaactgacctggttacgcagttggcctgaattaaattggttaaaaactgaagacaaacaggcagaaaacttgcaagccattttaacttcgctaagctagt

SEQ ID NO: 244934 - DNA, 752 bp, Unknown
  Bacterial polypeptide expressing nucleotide sequence isolated from the Sargasso Sea
aagagatgaaaaaaaaattcaacaccatctttatggatttttaagtattaagaagaaattttctaccggtcaatggttacaattatcctcaaaaaaaatcaaagatattcaatataagaataaaattccaattttagtgggtggtactggactatattttaaggctttgatggagggacttgttaaaattccaaaaatatcaattaaaaaaagacaaactataattaatcttcaaaaaaaattaggacaaagaaaattttataaaaaattgatcaaaatagatccgaaagttagcaagttaattaatccaaatgatgttcaaagatcaataagagcttatgaagtcaaaatgtttacaaataaatctttaattgattggtataaaaataccaaatcactctttttacaacataactttattaaaatatattttgattgtcccagagatttactactaaaaaggataaaaatacgtatagataaaatgctacctgaggcaattaaagaggtaaaaaaaatccaaaaattaaaaatacccaagggaaatagctctaataaaattataggtattaatgaaattaaatattttatagacaaaaaactcaataaagaccaaacagcagaacttatagccataaaaacaagacaatacgccaaaagacaagctacgtgggcaagggggcaaatgaaaaattggaaaacattgagttcaaacgatacaaaattatctctaaaaaaattatttaattaat

SEQ ID NO: 244935 - DNA, 505 bp, Unknown
  Bacterial polypeptide expressing nucleotide sequence isolated from the Sargasso Sea
aatggaccttaagtccaaaataatattaatttcaggtcccacagcatcaggcaaatcaaaatttgcattaaaaattgctaaaaaattaaatggagaaataattaatgcggatagtatgcaggtatataaagaattaaacatattgactgctagaccttcaaaaaatgacttaaataaaatcgatcactatttatatggctttagaagtgttaaagaagaattttcgacgggcgagtggttaaaattagcaaacaagaatatcaaaaaaattagagacaaaaacaaaataccagttttagttggtggaactggtctttattttaaggcgttgactgatggattggttaaaattcctaaaattcctatccctattcgtaataaaataagacgaatgcaaaataatttaggtcaaaaaaaattttacttaaaacttttaaaaaatgatcctttagtaaaaaacagaattgaccaaactgatgttcaaaggtcaattagagcttatgaa

SEQ ID NO: 244936 - DNA, 759 bp, Unknown
  Bacterial polypeptide expressing nucleotide sequence isolated from the Sargasso Sea
cttcagaaaaagatcaaaaaaaaattaaacaccatttatttggcattattgatgtgcgaaaaggattttcaacaggtcaatggcttaaagaatgtatcaaaataataaacttaattagaaaaaagaaaaagatcccaattattgtaggcggaactggtctttattttaaagctttagtggatgggcttgcaagaattccaaagttcaaaccttcagaaaaaaacaagatacttaagctacataaaaaattaggccaaaagcaattttataaagaattagtcaaattagatcctatctctaaaaaatttattaattcaaatgatgtgaatagatcaataagagcatatgaagttaaaaagtttacaaaaaaatcattatacaagtggtttaaagaaacaaagtccttttttgacaagaatgagtttgtgatgacttatgtggattatccaagagacaaattaataaagaatatcaaaaaaagaattgatagaatgtttgatttaggagccataaaagaggtcaaaaaatttaatctcataaagataaaaaaattgaatagcgttaatcatgtaattggtattaaagagattaactcttatttaagtaaaaaagctgaattgaaccatgttaaagaacagatattaataaaaactagacaatacgccaaaagacagagcacttggtctcgaggtcatatgattaattggcacaaaattgatccaaaatcaaaaaatccattcaaaaaaattttaaaataat

SEQ ID NO: 244937 - DNA, 433 bp, Unknown
  Bacterial polypeptide expressing nucleotide sequence isolated from the Sargasso Sea
atggatttaaaatccaaaattattttgatttatggaccaactgcatcaggaaaatctcaatttgcaataagattatcaaaaaaggttaatggagaaattgtaaatgctgacagcatgcaagtgtataaagaatttcaaattttatctgcaagaccacttcctaaagattacaaaaaaataagacatcatttatatggtttttatagtgtaaaaaaaaatttctcctcaggagattggttaaaattagttaataaaaaaattcttgatataaaaaaaagaaataagacacctattcttgtgggtggtaccggattgtactttaaagcaataacagagggtttagtaaatattccaaatattccaattcgattaagatcaaaaataaggttattgcataaaaaaatggaacaaagaagtttttttcagaattagt

SEQ ID NO: 244938 - DNA, 506 bp, Unknown
  Bacterial polypeptide expressing nucleotide sequence isolated from the Sargasso Sea
gatggggccaacgggcagtggcaaaaccgccttggcgatggcgttgtattcacggtttcctgtggatgtgattagtgttgattccgcgttggtctatcgtggcttggatatcggcacagcaaagccgacactggcagaacgtaaagcggtgccgcatcaattgatcgattgtcttgagcccacggagtctttttctgcagggcaattttgtgaatgtgctgaggcggcaatcgcaaagagtgtcgcaggtggtcgggtgccggtattggttggtgggaccatgctttacttcaatcgtttgcaacaaggctttgcagatctaccggatgcgaacccgaaggtgagagaaaaaatcactcaagaagcgaagatggtgggatggccggcactgcatgcgcgactggccttgttagatccaaaagcgcacgcgcgaattcatccaaatgacagtcagcgtattcagcgtgctctggaaatagcacagttaaccggacgtccgatgtccg

SEQ ID NO: 244939 - DNA, 682 bp, Unknown
  Bacterial polypeptide expressing nucleotide sequence isolated from the Sargasso Sea
ctcttattaaaaaagattgaagatattagaaaaagaaagaaggtacccattatagttggaggaacaggcttgtattttaaagctcttactgatggcttagtaaaaatacctaatattccaatcaaagtaagaaataaaattagattgatacaaaaaaaaataggtcaaaaaagattttataatagattacttaaagttgatcctttgattaaaaataaaattgataaaaacgatgttcaaagatctgttagagcatatgaaataaagtatcaaacaaaaaaatctattgttgaatggtttaaaaagactaaaattttttttccaaccagtgaatttgttaaactttatattgattatccaaggcaagatttaattaaaagaataaacttaagagttgacgccatgtttcgagaaggtgctattgatgaggttaggaggtttagaaaactaggggtaaaaaaagaaaatagctcaaataaggttattgggattaaagaaattacagattttttaaacaaacagtccactctcggacaagcaaaggagttaattgccattaaaacaaggcaatatgctaagaggcagacaacatggtcaagaggtcatatgaagtcttggcaaaagattaatacaaaaaaattatcattagttttaaaaaaagttaaaataattgagtcttaaa

SEQ ID NO: 244940 - DNA, 757 bp, Unknown
  Bacterial polypeptide expressing nucleotide sequence isolated from the Sargasso Sea
atggacctaaagtccaaaataattttaatttcaggacccacagcatcaggcaaatctaaatttgcaattaggcttgcaaaaaaaattaatggggaaattatcaatgctgatagtatgcaaatatttaaagaaataaaaattctaaatgcaagaccaagtacaaaagataaatcaaatatcaaacatcatttatatggatttctaagtgttaaaaaaaatttttcagtaggtgattggttaaaaaaatgtctctcaaaaatttcagaaataaaaaaaagaaagagagtaccaataattgttggtggaactggtctttatttcaaatctttagtagatggtttagcaaaagtaccaaaaatcagtaaaagaaatagggataaagtaagaaatttacaaaaaaaaattggtcaaaaaagtttttacaaaagtttaattaaattagatcctttatgtaaagataatattaatatgaatgatcaaaatagatctattagagcttatgaagtttatattcaaaccaataaatctttgtatacttggtttaagaatacaaaaattcattttcaagataaggactttgagaaaatatttattgatatttcaagagacgaagttttaaaaagcttatcaaataggatagaaaaaatgatcaaagcaggagccattcaagaagtaaagagatttaataatttaaaagtaaaaaaagcgaatagctcatttaagataatagggataagagaaattaatgaactgaaac

SEQ ID NO: 244941 - DNA, 586 bp, Unknown
  Bacterial polypeptide expressing nucleotide sequence isolated from the Sargasso Sea
atggatttaaaatccaaaattattttaatttatggacctactgcgtctggtaaatctaaattcgcgatcaaactagcaaaaaaaatttcaggtcagatcataaatgctgatagcatgcaagtttacaaagatttaaagattttaacggcaagaccctataaaaaagatcatcaaaacatcaaacatcatttatacggatttcaaaatgctaaaaaaaatttttctacaggagattggcttaaattggcaaaagaaaaaattttgcaatgtagaaaaattaaaaaaacaccaatattagttggaggcactggtctttattttaaagctttgacagatggtttagttaatattccaaaaattcctgtcaattttagaaataaagtaagaaatttacataaaaggataggacaaaaaaaattttttttaaagttactagaaatagatcctttaattaaggatcgaattaattctttagatgtacaaagatctttaagggcatatgaaattaaatcatttacaaaaaaatctatgattagctggtttaaaagcactaagtcgaattatgatcataatgatttttcaaaat

SEQ ID NO: 244942 - DNA, 664 bp, Unknown
  Bacterial polypeptide expressing nucleotide sequence isolated from the Sargasso Sea
gctaatcaaaaaattaaagatataaaaaaaagaaaaaaaaccccaatacttgtaggtggcacaggtctatattttaaagctattacagacggtttagtcaaaattccgaacattccaataaaattcagacaagaagtaagatctttacataaaaaaattggtaataaaaattttttcttaaaattgataaaactagatcctttatcaaaaaatagaataaaaccgtctgacacgcaaagatcaataagagcatatgagatcaaatcatatacaaaaaaatctatatttgactggtttaaaaagactaaatcaacttatgaaaaagaggatttctttaaaatttacattgaatttccgagagatgaattattaaaaagaataaatgatcgctcaaaagaaatgattaagaaaggcgctgttcaagaggtaaaaagatttgtcaaattgaaaattccaaaaaataagaccgtaagtaaggccataggtatcaatgagataattgaatatttggataaaaaaattcaaatcccccaagttattgataaaatatcaataaagaccagacaatacgccaaaagacagaccacttggggaaggggcaacatgttagattggaacaaaattgagtttaaagccttaaataaatttttaaaaaaaatttaga

SEQ ID NO: 244943 - DNA, 460 bp, Unknown
  Bacterial polypeptide expressing nucleotide sequence isolated from the Sargasso Sea
ttgtacaaaaaaactaaaaaaaaaataatacttctatttggtccaaccgcatcaggaaaatcaagattagctatagatattgcaaaagaacttgacggtgaaattgttaatgctgacagcatgcaagtttacaaagaaatcaaaattctctctgcgcgaccagacaaaagcgaaattagacatcatttttatggattcatatcagcaaagaatactttttcagtaggaaaatggtgcaaattagtagcaaaaaaaataaaagaaatacaaaaaagaaaaaaagttgctatcgtggttggtggtactgggctttactttagagcactaacagaaggtttggttaaaataccaaaagtgaaaaaaatagactattcttatttaaatcctattggaagatggatgatgggaaatcattaccataaaaaaaatccaacaattttgaaggtattaatagaaatga

SEQ ID NO: 244944 - DNA, 712 bp, Unknown
  Bacterial polypeptide expressing nucleotide sequence isolated from the Sargasso Sea
tttgttttattctcctaaaataattacaattattggtcctactgcatcaggtaaaactaatctttcaataaaattagctaaaaaatttaatggagaaataattaacgcagattctagattattttatcgaggaatggatatagggacttctaaacctaataaaaaagaattacaagacgtaaaacatcatttaataaatatcatgacccctgaaaaaagtaataacctacatgattttcttatagatgcgaataatataataaaaactattattcgttctggaaaaactcctattattgtcggtggaacaggtcagtatatttgggctttacatgaaggttggaaattagatgaaaatcctatcaataaacaattgagaaataaacttgaaaaactagatctagaagaattacaaaaattatattataaagaaaactcatctaaatcttcagatattgatattcaaaataaacggaggatcatcagatttatagaaaagagcagggaagggaacactaataataaacaaagaattccaccaaattggaatagtttcataattggacttcatttacaaagaaatttacttcattcttatattttgttacgaataaatagaatgttaaagcaaggattaattaacgaaattaaatcctttttagatatgagtttacctaaagactctccattttataatattatagggtataga

SEQ ID NO: 244945 - DNA, 661 bp, Unknown
  Bacterial polypeptide expressing nucleotide sequence isolated from the Sargasso Sea
gatgagtgatgtaactgagccaagcctgcttaaggcaatatttttaatgggcccgacggcctctggtaaaaccgcattggctatcgccttacgtaaagttttgccagtagagttgattagcgttgattcagccctcatctatcgaggaatggacataggcacggccaagcccgatgccgcggagctgagcgctgcgccgcatcgtctgctggatattcttgacccggccgaagcttattccgcggcggatttccgccgcgatgcgctggcagagatggccgatatcgtcgctgccgggcgaattccgctactggttggcggaacgatgttgtatttcaaggcgttgttggaaggattgtcgcctctaccctcggctgaccctgaggtcagagccaggatcgagcaacaggccgcagagcagggatggaacgcgttacaccagcagctacaggaaattgatccggttgccgccgcgcgtattcatccaaatgatccgcaaagactttcccgagcactggaagtttttttcatttcgggtaaaactttaacggagctgacgcaaacgtcaggtgatgctctgccgtataaggtgcaccagttcgccatcgccccggcgagccgtgaactgctccatcagcgcatagaacagcgttttcatcag

SEQ ID NO: 244946 - DNA, 616 bp, Unknown
  Bacterial polypeptide expressing nucleotide sequence isolated from the Sargasso Sea
catggactacaagtccaaaatctttcttatcgctggtcccacagcttctggaaaatcaaaaatagcaatcaacttagcaaaaaaaattaacggagaaattataaacgctgatagcatgcaagtttataaacaacttaaaattcttacagcaagaccttcagaaaaagatcaaaaaactattaaacaccatttatttggcatcattgatgtgcagaaaagattttcgactggccaatggcttaaaaagtgtatcaaaataattaatctaattagaaaaaagaacaaagctccaattattgttggtggaactggcctgtattttaaagctttagtggatgggctagtaagaattcccaagttcaaaccttcagaaaaaaacaagatacttaagcttcacaacaaaataggccaaaagcaattttataaaaaattggtcaaattagatcctgtctctaaaaaatttattaattctaatgatgttaatagatcaataagagcatacgaagttaaaaagcttacaaaaaaatcattatacaaatggtttaaagaaacaaagacctttttcgacaagaatgagtttgtgatgacttatgtggattatcaagagagaaattaa

SEQ ID NO: 244947 - DNA, 649 bp, Unknown
  Bacterial polypeptide expressing nucleotide sequence isolated from the Sargasso Sea
catggattttaagtccaagattatattaatttctggaccaactgcttcaggaaaatcaagttttgctattaaccttgccaaaaaagtaaatggagaaattataaatgcagacagcatacaggtttataagcaattaaagattctttcagcaagaccagatcaaaaaaaatatcaaaaaataagacatcacttatatggctttcatgatgtaaagaaaaatttttcaactgggaattggttgaaattagttttcaaaaaaattgaagaaataaaaaaaagaaaaaaaataccaatccttgtaggaggtacaggtttatattttaaggcattaactgatggacttgtaaaaattccaaacatacctatcaagtttagaaatcaaataagagcacatcatttaaagataggccaaaaaaagttttataataaacttttaaaacttgacccagcttctaaaaataaaattaatcaaacagatccgcatagatccataagagcctatgaagtaaaattatataccaagaaatcaattcatgaatggtataaaaatactaaatctaattttaaaaaaaatgatttttataaaatttatattgactttcctcgtttggaattgattgagagaattaatctaagatccaaggaaatg

SEQ ID NO: 244948 - DNA, 622 bp, Unknown
  Bacterial polypeptide expressing nucleotide sequence isolated from the Sargasso Sea
gggacagggttgtattttcgtgcattagaaaaaggcctagataagttgccggaggcaaattatcaaataagagcaaaaattacaaaagaggcagaaaaattgggttggcaacaaatgcataataaattagctgctatagatccaaaatcagcatgtaaaataaatttaaatgatacacagagaattcaaagagctcttgaagtatacgaaataactgggtgtttattgtctgatttaatcgcaaaaccagaaaaaaagatttttccataccccattaaaaaaattatcctgtttccggaaaaccgtacactgcttcaccaacgtatcgaaaaacgctttaaagcaatgattaagaatggctttgtagaagaagttgaatccatgtaccatcgcggcgatttaacacctgatttaccttctatgagacttgttggatataggcagatatggaaatatctggataatcaatttaattacaatgagatgcaggagtattcaataaccgcaacacggcagcttgcaaaaagacaacttacttggtgtaaaactgaggataatgcgaattactataatccctatgattccgaaatatttactgaaattttagataatcttcaataat

SEQ ID NO: 244949 - DNA, 821 bp, Unknown
  Bacterial polypeptide expressing nucleotide sequence isolated from the Sargasso Sea
aaacgcagatagtatgcaaatatttaaagaattaaaaattcttacggcaagaccccagcaagatgatttaaaaaatataaaacatcatttatatggatttaaaagtgtaaaggataattattccacaggaaattggcttaaggatgctaagaaaaaaattaataatgttaaaaaaaagaaaaagattccaattcttgttggtggtacaggtttatattttaaagcacttattgatggaatagttaaaattcctgatattccaattactattcgaaatagaataagaaaaagacagtcaaaaataggacaaattaaattttattctgaacttattaagctagacccactttgcaaaaaaaaaattaacaaaaatgattctcaaagatcaataagagcttatgaagtaaaaaagtttacaaataaatctttgtttgattggtatagtgagacatactctgattttaatcaggacagctttataaagttacatatcgattatcctagagagaagttaatagaaagaattactataagaacaaatgaaatgttaagagatggggcaataaaagaggctaaaatgttttataaattaagagtaaagaaagatttatcatctaataaagttattggtctaagtgaggttaaagattatctagaaaaaagaataaaccttaatgaacttaaagaaaaaatatcaataaaaacaaggcaatatgctaagagacagtctacatgggcaagaggacaaatgtctgattggcaaaaaataaaatttgatagagttaaatcatttataaaaaaatttcccaaacctgcataga

SEQ ID NO: 244950 - DNA, 775 bp, Unknown
  Bacterial polypeptide expressing nucleotide sequence isolated from the Sargasso Sea
tatgcaaatctataaggaagttaaaattttatcagcgagacctgaaaaaaaaaatattaaacatcatttatatggctttgtttcaataaagaaaactttttcaactggagcctggtataaactcgcgaccaaaaaaattaaacaaataaataaaaaaggaaaagttgcgctagttgtcggtggaactggcctttattttaaagcactgactgatggttttactcaaatacctaacattccggaaaaatataaaaaattaaagattgaaaaaaattttgtattaaaaaatccaaatatttttaaaggtatcttcttgaacgatacgcaaagggttcaaagagctttttcggtatataaatttacaaaaaaacccctttggttatggcaaaaagaaaataaaaaagaattcaagaaatctcaatttgcaaaaatttttttgtgtccccctaagattgaaatcgaaaaaaggattaggaaaagattttcagacatgttgaaaggcggagcaataaaggaaacaaaaaattttaaaaaaaaacgtgtgaattccctcaaatcttcaaactttataattggtattaatgaaatatcagaattcttaaaaaacaaaatttcattagaagaagttaaagaaagagtcgctataagaactaggcaatatgcgaaaaggcaattgacctggcaaagaggtcagatgaaggattggaagggcttttacgataccaattatctagatttaagaaaaaaaattctaacttatttatctaaaacttga

SEQ ID NO: 244951 - DNA, 559 bp, Unknown
  Bacterial polypeptide expressing nucleotide sequence isolated from the Sargasso Sea
atggacaaaaagtccaaaatttttttaatattcggacccacagcttctggaaaatcttctcttgcaataaaattagcaaaaaaaattaatggagaaatagttaatgctgatagcatgcaagtttataaagagcttaaaattttaactgcaaggccgacgaaaaaaaatcaaaaaaatataaaacaccatttatatggttttcaaagtgtaaaaaaaaacttttcaactggacaatggttaatacttgcaaaaaaaaaaattaaagaaattcaaaaaaaaaataaaacaccaatactagtaggtgggacaggattatattttaaggcgatcacagaaggcttagttaaaattccaaaaatacctttaaagtttagaaataaggtaagaaatcttcaaaaaaaattaggacaagaagaattttataaaaaactgattaaaattgatccacttgttaaccataaaataaatcccaaagatcctcaaagatctataagggcttatgaagttaaaaagtattcaaaagtttcattaatagaatggtttaaaaaaagcagataaa

SEQ ID NO: 244952 - DNA, 472 bp, Unknown
  Bacterial polypeptide expressing nucleotide sequence isolated from the Sargasso Sea
gcccgcatccatcccaatgacccgcagcggctcagccgggcgctggaggtctaccgcatcagcggcaagacgctcaccgagctgacccaggtgcagggggaggggctgccctatcgggtgttgcagtttgccatcgcgccgagcgatcgcgccgtgctgcaccagcgcatcgagctgcgctttgacaagatgctgcagggcggctttgaacaggaagtcagggcgctctatcaacggggcgatctcaccccggatcttccctccatccgctgcgtgggataccgccaaatgtgggactacctggcgggggaagtggagtatgatgagatgcgctatcgcggaattgttgccacccgccagttggccaagcgtcaaatgacctggttgcgcggttggtctgatgtgacctggttggaatctggtgagtctggcaatctggcaagggtcgtcgcccgtgccggagtggcttgac

SEQ ID NO: 244953 - DNA, 751 bp, Unknown
  Bacterial polypeptide expressing nucleotide sequence isolated from the Sargasso Sea
tttgtcaaaaaaaatcatattattatttggccctactgcatcaggtaaatcaaaacttgcactagatattgccgaagagtttgatggtgaaattattaatgctgatagtatgcaggtatataaagaaattaaaattctttcagcaagaccggacaaaagtaaaattaaacatcatttttatggatttgtatctgctaaagaaaaattttcagttggtaaatggtatgagctaattgcaaaaaaaataaaagaaataaaaaaaagaaaaaaaattcctatagtagttggtggtactggcctttattttagggctttaaccgagggtctagtcaaaataccgcaagtagaaaaaaaagatttttcctatttaaatcctatgggaagatggatgatgggtaatcattatcacaaaaaaaacccaacaatttttgaaggtattgatagaaacgacattcaacgtgtgtcgagagctatttcagtttacgaaggcacaggtctaaccctcaaagaatggcaaagcaaagaaaataaaaaatatttcaagtccacagattttataaagctatgtcttttaccatcaaaaaatgaattagaaaaaaaaattaaaaagagatttaatcaaatgttaaaaaaaggtgctttacaagaagttagaaagtataaaaaaatttttttagaacctgcatctcacatttcagcaaattcaattatcggtatttatgaaattggtttatatcttcagaaatacatc

SEQ ID NO: 244954 - DNA, 908 bp, Unknown
  Bacterial polypeptide expressing nucleotide sequence isolated from the Sargasso Sea
acctaaagtccaaaataatattgattgcaggacctaccgcttcaggtaaatctaaatttgccgttcagcttgcaaaaaaagcaaatggtgaaattataaatgcagatagtatgcaagtttataaagaactcaaaattcttactgcaagacctaagaaaattgatcaaaaaaaaatcaagcatcatctttatggaattcaaagtgttaaaaaggatttttcgtcaggtaaatggcttaagcatgctaacaaaaagataaaagaaataagaaaaagaaataaaattcctatttttgtaggtggtacaggtctttactttaaatctttaacagatggtttatcaaaaataccaaatattcctataaattttagaaataaaattaggaatttacaaaaaaaaatagggcaagaaaagttttataataaacttataaaattagatccaaaaataaaaaattatgcaaagtctaatgatgttcaaagatcaattagagcttatgagataaaaaaatatacaaaactatctatcctagactggtttgaaaaaacaaaaaaaacattcaatcaaaatgaatttcttaagatttacattgattttccaaggtatttgcttcttaaaagaattagcaaaagaattgatcagatgtttaaagaaaaagttataaatgaagtaattagatttaatgagcttaaagtaaaaagggataaaagcgcaaataatgtaattggtataaaagaaataactttgtatacgaaaaatattggtacactagaagacacaaaagagaaaattctaataaaaacaagacaatatgccaaaaggcaaacaacatgggcaagaggccaaatgcaaacatggatcaaattagatccagaaaatctaaactcatacataaaaaatctctcttaa

SEQ ID NO: 244955 - DNA, 718 bp, Unknown
  Bacterial polypeptide expressing nucleotide sequence isolated from the Sargasso Sea
tatatggtttcataatgtaacaaaaaacttttccacaggtgattggcttaagcttgtaactaaaaaaattatagaagttaaaaaaagaaaaaaaactccaattcttgtcggagggacgggtttatactttaaagctttaactgatggtttagttaaaataccacatatttcaataaaattaagaaaccaaattagaaatttacaaaaaaaaattggacaaaagaagttttatgaaaaattattaaaattagatccatccttaagtggaaaaataaaccctacagacactcaaagatccatcagagcttacgaagtcaaaaagtttacaaaaaaatctctaactgaatggtttaaaaatacaaaatcaaacttcgtggaagatgatttttttaaagtttatattgattttcctagacaagaattaattgagcgtatcaatatgagaacaaaggagatgatagaaaaaggagcaataaaagaagtaaaagattttataaagctaagagttagaaaagataaaagtgccaacaaagccatcggggttaatgaaattacagaatatttaaaaaaacaaaaaaatttgaatgatactagagataaaatagccataaaaactagacaatacgccaaaagacaaagtacttgggctagaggtaatatgatcagttggatgaaactgaagccacaagacataaataattttttaaaaaaaatttaa

SEQ ID NO: 244956 - DNA, 651 bp, Unknown
  Bacterial polypeptide expressing nucleotide sequence isolated from the Sargasso Sea
aatggatttaaaatccaagattatattaatatctggacccacagcatcaggaaaatcaagttttgcaattaaagttgcaaaaaaagtcgatggagaaattattaatgcagatagtatgcaagtatacaaacagctcaaaattttatcagctagaccagatccaaaaaaataccagaaaataaaacatcatttatatggttttcataatgtaacaaaaaacttctctacaggtgattggcttaagctagtaattaaaaaaattacagaagttcaaaaaagaaaaaaaataccaatacttgttggagggacaggcttatactttaaagctttaattgatggtttggttaaaataccaaatatttcaataaaattaagaactcaaattagagatttgcaaaaaaaactcggacaaaagaagttttatgaaaaactattaaaattagatccatcctcaaaaagcaaaataaaccctacagacactcaaagatccatcagagcttatgaagtaaaaaagtttacgaaaaaatctatacatgaatggtttaaaaacacaaaatcaagctttatggaaaatgatttttttaaagtttatattgattaccctagacaagaattaattgagcgtatcaatgcaagaacaagcaaaatgat

SEQ ID NO: 244957 - DNA, 832 bp, Unknown
  Bacterial polypeptide expressing nucleotide sequence isolated from the Sargasso Sea
aaaataattttgttagctgggcctacagcatctggcaaatcaaaactaagtattatgatcgctaaattttttggtggagaaattattaatgctgatagcatgcaaatttataaagaaataaatattttgacatctaaaccaacagccaaggataaaaaattagtcaaacaccatctatatgggtttaattctgttgaaaaagaattttctactggtcattggctagacaaggcaacaaaaaatattaagctacaatgggctaaaggcaaaattcccatagtggttggcggtacaggcttatattttaaagccttaatagatggtttagtaaaaattccagaaatttcaaaaagtgtaaaaaaagatgttaggaaattacataaaaaaattggacaaaaaagattttataaaaaactaattaaaattgatccttttgctaaaacaatgattttgccaacagatagccaaagatcaattagagcttacgaggttaaaaaatttaataaaaaatcaatattcaattttatgaaagacacaaaatcaaattttgataaagatgtttttattaaaatatttattaatgtacctaaagaaattttacataaaaaaataaacgaaagggtagagtcgatgtttaatcaaggtgcggttaaagaggttaaaaaatttttaaaaatgaaaattaataaagatttaccacccaataaaattataggcatgagagaaataagagagtttctagaggaaaaagcgtcattatctgaaacaaaagagttaattaagattagaacaagacagtatgcaaaaaggcaatttacttggcgagaggaca

SEQ ID NO: 244958 - DNA, 707 bp, Unknown
  Bacterial polypeptide expressing nucleotide sequence isolated from the Sargasso Sea
attgaaaactcaaatctattttgtattaggtccaactgcatcaggaaaatcaaaatttgctttaaaactagcaaacaaactaaatggtgaaattataaatgctgatagtatgcagatttataatgagttaagtatcttaactgctagaccaactataaatgatcaaaaaaaaatcaatcatcatctttatggatttgtaaaaggtgatgttagatttaatgttcaaaaatggtgtgaggaagcatcaaaaaaaattaattatttagttaataaaaatataacacctattttagttggaggtacaggtctttacatagaatctttaattaatggaatagtttcaattccatctattccagaaaaagtaaaaatagaatcagaaaaaatgattttaaaaattggtaaggaaaatttttgtaatttagttaaagagcttgacagtgatgcaatgattaatattgcgcctaacgatattcaaagaataagaagaatatgggaagtaaatatttttactaagaaaaaatttagtgactggaaaaaaagtaaaaataaaaattttattgatttaaaaaattacaaaatattattatttcttccagatagaaaagaaaactatagaagagtagatcatagaacactcttaatgatggaagatggtgcgatagaggaagtcaaaaatttgcttaaattaaattataataataatt

SEQ ID NO: 244959 - DNA, 461 bp, Unknown
  Bacterial polypeptide expressing nucleotide sequence isolated from the Sargasso Sea
gatggaccttaagtccaaaataatattaatttccggaccaactgcatcaggtaagtcaaattttgcaattcaaatatctaaaaaattaaatggggaaattgtaaatgctgatagcatgcaagtatttaaagaattaaaaattttaaccgcaagaccaaaagtaaaagattataaaaatataaaacatcatttgtatggatttttaagtgtaaaaaaaaacttttcagtaggtgattggttaaaacttacattgaaaaaaataaatgaaataaaaaaaagaaaaaaagttccaattattgttggaggtacaggtttatattttaaagttttaactgaaggcttggtaaaaattccaattattccttttaagtttagaaataaaattagaaacttgcaaagatctattggacaaaaaaaattctttaaaaaattgacgaagttggatcctttagcaaaaaata

SEQ ID NO: 244960 - DNA, 661 bp, Unknown
  Bacterial polypeptide expressing nucleotide sequence isolated from the Sargasso Sea
ttaaaaaaattgggtgaagttcaaaaaagaaaaaaaaccccaattcttgttgggggcacaggcttatactttaaagctttaactgatggtttagttaaaattccaaatatttcattaaaattaagaaatcaaattagagatttacaaaaaaaacttggacaaaaaaagttttatgaaaaactattaaaattagatccatcctcaataggcaaaataaacccgacagacactcaaagatctatcagagcttatgaagtaaaaaagtttacaaaaaaatctctgcatgaatggtttaaaaacacaaaatctaacttcatggaagatgatttttttaaagtttacattgattaccctagaaaagaattaattgagcggattaatgtaagaacgagtgatatgatagaaaatggagcactaaaagaagtaaaagatttcataaagttaagggttagaaaagataaaagcgctaacaaggccattggagttaatgaaattagagaatatttgaaaaaacaaaaagatttgcatgatactaaagaaaaaatagccataaaaactagacaatacgccaaaagacaaagtacttgggctagaggcaacatgatgaactggatgaagctaaagccaaaagacataaataattttttgaaaaaaatttaaa

SEQ ID NO: 244961 - DNA, 871 bp, Unknown
  Bacterial polypeptide expressing nucleotide sequence isolated from the Sargasso Sea
atggacttaaagtccaaaataattcttatttcaggaccaacagcatctggaaaatcaaagtttgctatacagcttgcaaaaaaaataaatggagaagttataaatgcagatagtatgcaaatttttaaagaattaaaaattctcacagcaagacctcatcgaaatgatttaaaaaaaataaaacatcatttgtatggatttaaaagtgtaaaggaaaattattctacaggaaattggcttaaggatgccaagttaaaaatcaacaatatcaagaaaaaaaataaaattccaattcttgtaggcggcactggtttgtattttaaagcaattattgatggtatagttaaaatccctgaaatcccattaatttttcgtaatagaattaggaagaagcattcaaaaataggtcaaaagaaattttatttagagttacttaagctagatccactttgtaaaaaaaaaattaataaaaatgatacacaaagatcaataagagcctacgaggtaaaaaaatttacaaataaatcattgtttgattggtatattgaaacatattctgattttactaaagacagttttattaagttacttatcgattatcctagagataagcttgtagaaagaatttctttaagaacaaatgaaatgttcagagatggagcaataaaagaggctaagaggttttataaattaagagtaaagaaagatttatcatctaataaagttattggtctaagtgagatcaaagaatacttagacaaaagaataaatatcaatgagctgaaagaaaaaatatcaataaaaacaaggcaatatgctaagagacagtccacttgggctagaggacaaatgtctgattggcaaaatataa

SEQ ID NO: 244962 - DNA, 502 bp, Unknown
  Bacterial polypeptide expressing nucleotide sequence isolated from the Sargasso Sea
tatggagcatcaaaaaaaaataattttattagctggtcctacggcatcaggaaaatctaaattagcaataaaattagctaagtattttaatggtgagattgtaaacgcggacagtatgcaagtttacaaagaaatttcaatattaacctctaaaccgaagcctaaagatatcaaaaatataaaacatcatttgtacagttttaaatcagtaaaagataaattttctgcaggtcactggttaaaattaacaatagaaaatattaaagaacaatggagaaataaaaaaacacctattattgttggaggaacaggcttatattttaaagctttaacagaaggtctagtaaaaattcctgaaataccaaataagtttagaaaagaaattagaaatttacatacaaaaattggtcaaaagaaattttttgataaattaattatattggaccctatagctaaagatttttgtataccatcagatgctcatagatctatgagggcttat

SEQ ID NO: 244963 - DNA, 613 bp, Unknown
  Bacterial polypeptide expressing nucleotide sequence isolated from the Sargasso Sea
tatggatttaaaatccaaaattattttaatttatggtcccacagcttctggaaaatcaaagtttgcaattaaattagcaaaaaaaatttcaggtcaaattataaacgctgatagtatgcaagtttataaagaattaaaagttttaacagcaagaccctttaaaaaaaattatcaaaatattaaacaccatttatatggatttcagagtgctaggaaaaatttttctacaggggattggcttaaattagcaaatcaaaaaattttacaatgtaaaaaaaaaaaacaaattccaatcttagtaggaggcactggtctatattttaaagccttaactaacggactagttaatattccaaatattcctttgagttttagaaataaagtaagaaatttacataaaaaattaggtcaaaaaaaatttttttcggaattactaatattagaccctttaattaaagatcaaattaataataaagatgctcaaagatctataagagcatatgagattaaatcttatacaaaaaaatctatcacaagatggtttaaaaatacaaagtcagattatgattataatgatttttttaaaatttgtattgatttcccaagaaaagat

SEQ ID NO: 244964 - DNA, 898 bp, Unknown
  Bacterial polypeptide expressing nucleotide sequence isolated from the Sargasso Sea
atggagattgatcaaaaaattgttgtagtagctggttcaacagcaagtggtaaaagcgaagttgctttgagtttagcaaatgaattcaaaggcgaattgatttgttctgactcaatgcaggtttatcgacatatggatgtaggaacagcgaaaccttctctgcgagaacgtactttagtccctcatcatcaacttgacttgatcaacccagatgaaaattattcagcaggacagtatgcaagggatacctcaaaaattataaagaatattcaggagcgaggtcgtttaccgatactggtcggaggtactggtttatatttaagggccctcatgaacggaattagcaaaattccacgaattccagaaagtttgcgaaaagaaataacatgttggtatgatgaatatggtaataaacattgccacaatttgctgcaaaaatatgatcctgaaggtgcggctcttgttcatccgaacgatacttcaagaattttacgaagccttgaagtcgtgatttttactggggaatcaatattttcatatcggacggctcagccttttggaacttcaatttacaaatcctatgaagttgcacttaattgggacaggaatgagctttataaccgcataaataatcgaactataagtatgttgggctcaggatggctagctgaagttgaaatgcttttggaatcctattccccgaaacttaaacccatgaattctataggatacagggaagttgttcaataccttcaaaacaaacttaattgggatacaatggttgatgaaattcaaaaaaggacccgccagtttgccaagcgtcagttgacatggttccgcagtgaagaaaagattgaatggtataagcctgatgaaaaggatcgaatcttagctgaca

SEQ ID NO: 244965 - DNA, 721 bp, Unknown
  Bacterial polypeptide expressing nucleotide sequence isolated from the Sargasso Sea
atccgtgagaaaatatttttctgcgggtgattggcttaaagaggctaagaaaaaaataaaactttgtttaaaaaataaaaaactaccaattattgtaggtggaactggcctatactttaatactattactaaagggattagtaaaattcccgacattgacttaagaacaagagcaaaagttaggaacttatttaaaaagttaggatacaaaaagttctatgaaaagttattgtcactagatccaaaagttaaaaataaaattttaccatctgacagtcaaagaactcaaagagcatatgaagtaaagcttaaaacaaagaaatcactatttgaatggatagcaaacactaaatcagatttttttgattatgatataaaaaagatttttttgaacactcctagagaagagctacttacaaaaatttataacaggacagaacaaatgtttaagcaaaattgtattgctgaggtaaaaaaatttaacttacttaagttaaataaaagtttttcagcacataaattgattggtgtacaagaaataacaaaatacttagatgaaaatttaactcttgatcaatgtaaagagcttataaatataaagacaagacaatatgcaaaacgacaaaacacctgggcaagaggtcatatgaagaactggaataagctatattcaaaagatttctctattcttttaaaaaaatctttaaaagcagcaagctaa

SEQ ID NO: 244966 - DNA, 781 bp, Unknown
  Bacterial polypeptide expressing nucleotide sequence isolated from the Sargasso Sea
ttgccaaaaaaaaataaaaaaaaaataatattattatttggaccaactgcatctggaaaatcgaaactagcagttgatattgcaaaaaaattcaattgtgaaataattaatgcagatagtatgcaggtatataaagaaattaaaatactctctgcccgaccagataaaagtaaaattaaacatcatttttacggcttcatatcagcaaaaaaaactttttcagtgggaaaatggtataaattagtatcaaaaaaaataaaagaaatacaaaaaaaaaacaaaattcccatcgtagttggtggaactgggctttactttagagcattgactgagggtttagttaatataccaaaagttaaaaaattagattattctcatttaagtcctcttggaaggtggatgatgggaaattattattatagaaaaaacccaacgatttttgaaggtataaatagaaatgatattcaacgcgtttcaagagctatttcagtttacgagggaacaggtttaactctaaaggaatggcaaaataaagaaaataaaaaatactttaaatcatatgactttattaagttgtgtctgttacctacgaaagatgatttagaaaaaaaaataaatagtagatttatccaaatgttaaaaaaaggcgccttagatgaagtaagaaattataataaaaaattttttgtacctgcctctcatatttctgctaactcgataataggtatttatgaaattggtttatatctgcaaaaatctattagtcttaaaagtctaaaag

SEQ ID NO: 244967 - DNA, 427 bp, Unknown
  Bacterial polypeptide expressing nucleotide sequence isolated from the Sargasso Sea
atggacctaaagtccaaaataattttaatatcaggacccacagcatcaggaaaatctgaattagcgattaaatttgctaaaaaaattaatggagaaataattaatgcagatagtatgcaggtctacaaagaattaaaaatattaacagccagaccgattaaagaaaataaaaataaaattaaacatcatttatatggctttcaaagtgttaaaaatgatttttctactggtcaatggttaaaattagttaaaaaaaaaataaaagaaataagaaataaaaacaaaatacctattctggttggtggcactggtctttactttaaagcgttaatagatggtttggttaagataccgaaaattcctagtaaaattagaaataaaattagaaacatgcaaacaagaataggacaaaaaaaattttatctaa

SEQ ID NO: 244968 - DNA, 688 bp, Unknown
  Bacterial polypeptide expressing nucleotide sequence isolated from the Sargasso Sea
atggatttaaaatccaaaattattttaatttatgggcctactgcatctggaaaatcaaaatttgcaattcaattagctaagaaaatttcaggtcagattataaatgctgatagcatgcaagtttataaagagttaaaggttttaacagcaagacccttcaaaaaagattatcaaaatatcaaacatcatttatacggatttcaaaatgccaaaaaaaatttttctacaggagattggcttaaattggcaaaacaaaaaattttgcaatgtaaaaaaataaaaaaaacaccaatattggttggaggtactggtctatattttaaggctttaacagagggcttagtaaatattcctaaaattcctaacaatttcagaaataaagtaagaagtttacataaaagaataggacaaaaaaaattttttcaaaaactacttcaaatagatcctttaattaaaaatcaaattaattctttagatacacaaagatctataagagcatatgaaattaaatcatttacacaaaaatctatgattagctggtttaaaaacactaagtcagattacagtcataatgacttttttaaaatttgtattgattttcccaggaaagatttaatagagagaataaatcagagatctgaaaatatgattaaactaggtgcaatttcagaagttaaaaaatttatca

SEQ ID NO: 244969 - DNA, 667 bp, Unknown
  Bacterial polypeptide expressing nucleotide sequence isolated from the Sargasso Sea
ttgcaaaaaaaaattattaaaaagacaatacttttgtatggacccactgcatctggaaaatcgagattagcaattgatatagcaaaaaaatataatggagaaatattaaatgcagatagtatgcaggtatataaagaaattaaaatactatctgcgcggccagataaaagcaaaatcaaacatcatttttatggttttatatcagcaaagaatactttttcagtgggaaaatggtgtaaattagtagtaaaaaaaataaaagaaatacaaaaaaaaaataaaattcctatcatagttggtggtactgggctttattttagagcattaacagagggtttagttaaaataccgaaagttaaaaaattagattattctcatttaaattcaattggaaggtggatgatggtaaatcattattataaaaaaaacccaacaatttttgagggtatcaataaaaatgatattcagcgagtttcaagagctatttcagtttacgaaggaacaggattaactttaagggaatggcaaagtaaagaaaataaaaaatactttaattcatctgactttattaagttatgtcttttgccaccaaaagatgatttagaaaaaaagataaacaatagatttatccaaatggttaaaaaaaaggtgcgcttaatgaagtaag

SEQ ID NO: 244970 - DNA, 484 bp, Unknown
  Bacterial polypeptide expressing nucleotide sequence isolated from the Sargasso Sea
ttgaaaactcaaatctattttgtattaggacccactgcatcaggaaaatcaaaatttgctttaagcttagcaaaaaaactaaatggtgagattataaatgcagatagtatgcagatttataaagagttaagtattttaacagctagacctactatacatgatcaaaaaaaaataaatcatcatctttatgggtttgtaaaaggcgatattagatttaatgtacaaaaatggtgtgaagaagcatcaacaaaaattaattatttggttgataaaaacataactcctattttagttggaggcacaggtctttacatagagtctttaattaatggaatagtttcaattccatttattccagaaaaagtaaaaaaagaatcagaaaaaatgattttaaaaattggtaaggaaaatttttttaatttagttaaaaaacatgattttgatgcaatgaaaaatatttcacccaatgatatcaaagaataag

SEQ ID NO: 244971 - DNA, 766 bp, Unknown
  Bacterial polypeptide expressing nucleotide sequence isolated from the Sargasso Sea
atggacattcagtccaaaataattttaatttcaggacctacagcatcaggaaaatctaactttgcattaaaacttgcaaagaagttcaaaggtgaaattattaatgcagatagcatgcaaatctataaggagctgaaaatacttactgctagaccaatgaaaaaagatcaaagaaaaattaaacaccatctttatggtatccaatcagcaaaaaaaaatttttcaacagggtcttggtttaaaaatgcattaaaaataattaaaaaagttgaaaaaaaaaataaagttccaatccttgtaggaggaactgggctatattttaaatctttaactgaaggaatagttaaaattccatctattcctttaaaattaagaaatgaaacaagaaatttgcaaaaaaaaattggacaaaaaaaattttacaaaattttaattaaaattgatcctttatcaaaaaaaatacatttccaagatattcaaagaacaattagagcttatgaaataattaaatttactaagatatctatttttcagtggttcaaaaaaactagagcaccttatcaagataataaattcattaaaatttacatcgattatccaagaacagaactaattcgaaggataaacagtagagtagaaagcatgttcaaaaatggagtggttaatgaggttaaaagttttttaaaattaaaaattaagagggagaacagtgtaaataaagttattggtataagagaaatatcaaactacattaacaataatcaga

SEQ ID NO: 244972 - DNA, 760 bp, Unknown
  Bacterial polypeptide expressing nucleotide sequence isolated from the Sargasso Sea
ctattttgtattaggacctactgcttcaggaaaatcaaaatttgctttaagtctagctaacaaattaaattgtgagattataaatgctgatagtatgcagatttataatgagttaagtatcttaactgctagaccaactataaatgatcaaaaaaaaataaatcaccatctttatggatttgtaaaaggtgatgttagatttaacgttcaaaaatggtgtgaggaagcatcaaaaaaaattaattatttggttaataaaaatataacacccattttagttggaggtacaggtctttacatagaatctttaattaatggaatagtttcaattccatctattccagaagaagtaaaaatagaatcagataaaatgattttaaaaattggtaaagaaaacttttttaatttagttaaagagcttgatggtgatgcaatgattaatattgcacctaatgatattcaaagaataagaagaatatgggaagtaaattattttactaagaaaaaatttagtgactggaaaaaaagtaaaaataaaaattttattaatttaaaaaattacaaaatattattatttcttccagatagaaaagaaaactatagaagagtagatcatagaacacacttaatgatggaagatggtgcgatagaggaagtcaaaaatttgcttaaattaaattataataatagtttaccaattatgaaagctcacggagttcctgaaattcaatcttatcttaataacgaagtatcaattgaa

SEQ ID NO: 244973 - DNA, 604 bp, Unknown
  Bacterial polypeptide expressing nucleotide sequence isolated from the Sargasso Sea
aatgagcgcagcaccgcacgccaaccccagcccgacgacgatcgcctgcctgctcggccccaccgcctcgggaaagacggccgcggcgctggcgctcgccgcgcgccgcccgatcgagatcgtcagtgtcgattcggcgctcgtctaccgcgacatggatatcggcaccgcgaaaccgtcgctcgacgagcgcgcgagcgtgccgcatcacctgatcgacatcatcgatccggccgacgcgtattcggccgcgagcttccgcgcggacacgctgcgcctgatcggcgagatcaccgcgcgcggccgcacgccgctgctcgcgggcggcacgatgctgtactacaaggcgctgacgcaggggctcaacgacctgccgggcgccgatccggacgtgcgcgcgacgctcgatgccgaagccgagcgcgatggctggcccgcgctgcacgcgcggctcgcacaggtcgatcccgacacggccgcgcggctcgcgccgaacgattcgcagcggatccagcgggcgctcgaagtgttcatgctgagcgggcagccgatgtcggtgctgctcgccgcaccgcgccgcacggacgatgcggccgcagcttac

SEQ ID NO: 244974 - DNA, 722 bp, Unknown
  Bacterial polypeptide expressing nucleotide sequence isolated from the Sargasso Sea
attgcgtaaagctgttttgattactggaccaaccgcggcaggaaaaacagaaattgcgatggaggtctttgatcggattggaggcgagagcaaagctacactgattagcgttgactcggccttggtatacagaggtatgaatatagggactgcaaaaccgaacaaagatgccttgataaaataccctcatgcattaatcgatattagagatccacgggaagcttattccgccgctgattttgtgagtgacgtcgatgaactacttgataaagcggctaaagaagatcggcttcctattctggttggaggctcgatgctttacataaaatgtctccgcgacggtatatctagattacccaagactgatccagaggcgcgcgcttatttagagcaaagagtggaacaaaatggtttgggtgacttatataaagaattgaaagctgctgatcctgaagccgctactaacattcatcctaataaccgacagcgggtaatcagagcaatggaagtgtttttggtaacgggaaagaatatttcgactttttggcttgaaaatcctgccaaaaatctccatcaacgatctggctacacgttaaagagtttggcgatctttccaaaacaaaggggggacctggaccagaagatcgaaaggcgttttcgttcaatgatggaagaaggttttcttaatgaggtgaggtctttaaagcaaatggacggaatgc

SEQ ID NO: 244975 - DNA, 718 bp, Unknown
  Bacterial polypeptide expressing nucleotide sequence isolated from the Sargasso Sea
tatcagaaaataaaacatcacttatatggttttcataatgtaaaaaaaaacttttccacaggtgattggcttaagctggtaattaaaaaaattaaggaagttcaacaaagaaacaaaactccaattcttgttggagggacaggtttatactttaaagctttaacagatggtttagttaaaataccaaatatttcaataaaattaagaaatgaaattagagatttacaaaaacaacttggacaaaggaaattttatgaaaaactattagaattagatccatactcggaaggaaaaataaaccctacagacactcaaagatccatcagagcttatgaagtcaaaaagtttacaaaaaaatctctaactgaatggttcaaaaacacaaaatcaaaattcgtggaagatgatttttttaaagtttatattgattttcctagacaagaattaattgagcgtatcaatttaagaacaagagagatgatagaaaatggtgcaataaaagaggtaaaagatttcataaagttaagagttagaaaagataaaactgcaaacaaagccatcggagttaatgaaattatagaatacttaaaaaaacaaaaaaatttgaatgatactagagacaaaatagccataaaaaccagacaatacgccaaaagacaaagtacttgggctagaagtaacatgattagttggatgaaactgaagccacaagacataa

SEQ ID NO: 244976 - DNA, 667 bp, Unknown
  Bacterial polypeptide expressing nucleotide sequence isolated from the Sargasso Sea
tttgaataaaaaaatcatactattatttggtcctactgcatctggaaaatctaaacttgctattgatatagccaataaacataacggtgaaattttaaatgcagatagcatgcaggtatataaagaaattaaaattctttcctcaagaccagataaaaataaaattaaacatcatttttatggtttcatatcagccaagaaaaatttttctgtaggtgagtggtataaaatagtgtctaaagaaataaaaaaaatccaaaaaagaaaaaaagttccgatagttgttggtggtactggtctttactttagagctttaactgagggtttggctcaaataccaaaagttaaaaaattagattattctcatctaagtcctcttggaaggtggatgatgggaaatcattatcatagaaaaaactcaacaatttttgaaggtataaatttaaatgatattcaacgcgtttcaagagctatttcagtttacgagggaacaggtttaactctaaaggaatggcaaaataaagaaaataaaaaatactttaaatcatctgactttattaaattatgtctattacctccgaaagacgatttagaaaaaaaaataaatggtagatttatccaaatgttaaaaaaaggtgctctagatgaggtaagaaaatataataaa

SEQ ID NO: 244977 - DNA, 372 bp, Unknown
  Bacterial polypeptide expressing nucleotide sequence isolated from the Sargasso Sea
aatggacacaaagtccaaaattattcttatatttggcccaacagcctcgggcaaatcctatttcgctacgagattagcaaaaaaaataaatggagaaattataaatgctgatagcatgcaggtttataaggaaattaaaattttaaatgccagaccgaaaactaaagaccaaaaaaatattaaacatcatttatatggttttcagagtgtaaaaaataatttttctacaggaaaatggttgagtctagcgaaaaaaaaaattcaagaaatacaaagaaaaaaaaaagttccaattttagttggtggaactggtctttatttcaaatcaattacaaatggattagtgaaaattcctaaagtgccactcagcgt

SEQ ID NO: 244978 - DNA, 799 bp, Unknown
  Bacterial polypeptide expressing nucleotide sequence isolated from the Sargasso Sea
gaattttcaattttatcatctagaccaaacaataaggagataaaaaaagctaaacatcatttatatgggataatttctgtaaaaaagtatttttcagctggagattggcttaagttagttaaaaaaaaaataaatcaatgctataaaaataaaaaagttccaataattgttggtggcacaggcttatatttcaatactattactaaaggtatcagtaaaatacctgatatagacaataatacacgaaataaagttagaaacctttttaaaagaataggatataaaaagtttcataagaaacttttaacaattgatccaaaaataaaagatagaattctacctacagactctcaaagaactcagagggcttatgaggttattctaaaaactagaaaatctttatttgattggattaaagaaactaaatctgattttaaaaattttgaaatgattatgatttttctaaatattccaagagaaaaattattaaataagatatctttaaggactgaattaatgtttaaaaacaatgaatgtatcaaagaagtaaaaagatttaattttttaaaattagataaatcattatctgcaaacaaattaatcggtgttcaagaaataaatgcctatttaaaaggatcaatttctttgaatgaatgtaaagaacttataaatatcaaaacaaggcaatacgcaaaaagacaaaatacttgggcccgagggcatatgaagaactggaacaagctttattccaatgacttttctgtacttttaaaaaaaacattaaaagttataagctaaa

SEQ ID NO: 244979 - DNA, 521 bp, Unknown
  Bacterial polypeptide expressing nucleotide sequence isolated from the Sargasso Sea
catgaagtccaaaatagttcttgtatctggcccaactgcttctggcaaaactaatttctcaattaaattagcaaaaaaaattaatggagaaataattaatgctgatagtatgcaagtttataaagaacttaagattctaacagcaagacctttcaaaaatgatcaaaaaaaaattaaacatcatttatatggttttcaaactgtaaaaaaaaatttttcaactggatcttggttaaaattagtaataaaaaaaattttagatatccaaaaaaaaaataaaataccaatactagttggtggtaccggtttatattttaaggtattgactgatggacttgtaaaaattccagaaattccaaaaaaaacaagattagaaataagaaatatacataaaaaagtaggtcaaagaaaattttataaaatgttaattaaaatagatcctctatctaagaataaaataaattcgaatgatagtcagagaactataagagcatatgaagtaaagaaaaataccaaaaaat

SEQ ID NO: 244980 - DNA, 763 bp, Unknown
  Bacterial polypeptide expressing nucleotide sequence isolated from the Sargasso Sea
cgaaatgatttaaaaaatataaaacatcatttatatggatttaaaagtgtaaaaaataattattctacaggaaattggcttaaggatgccaagaaaaaaattaataatattaagaaaaagaataaaattccaattcttgttggtggtaccggattatattttaaagcattaattgatggaatagttaaaatccccgaagtgcctcaatatattagaaataaaataagaaaaaaacaatcaaaaataggacaaattaaattttactctgagcttattaagctagacccgctctgcaaaaaaaaaattaataaaaatgatacgcaaagatcaataagagcctatgaagtaaaaaagtttacaaataaatctttgtttgattggtacagtgaaacatactctgattttaatcaggacagctttataaagctacatatcgattatcctagagagaagttaatagaaagaatttctgtaagaacaaatgaaatgttaagagatggagcaataaaagaggctaagaggttttataaattaagagtaaagaaagatttatcatctaataaagttattggtctaagtgagattaaagaatatctcgacaaaagaatagatcttactgaattgaaagaaaaaatatcaataaaaacaaggcaatatgctaagagacagtccacttgggcaagaggacaaatgtctgattggaaaaaaataaaatttaatactcttaaatcatatttaaaaaaatttcctaaatcagcataga

SEQ ID NO: 244981 - DNA, 543 bp, Unknown
  Bacterial polypeptide expressing nucleotide sequence isolated from the Sargasso Sea
aatggatttaaaatccaagataatattaatatctggacccacagcatcaggaaaatcaagttttgcaattaaagttgcaaaaaaattagatggagagattattaatgcagatagcatgcaagtatacaaagagcttaaaattttgtcagctagaccagatccaaaaaaatatcagaaaataaaacatcacttatatggttttcataatgtatcaaaaaacttctccacaggtgattggcttaagctagtaattaaaaaaattaaggaagttcaaagaagaaaaaaaactccaattcttgttggagggacaggtttatactttaaagctttaactgatggtttagttaaaataccaaatatttcattaaaattaaggaaacagattagagatttgcagaaaaaacttggacaaaagaagttttatgaaaaactattaaaattagatccgtcctcaagtggaaaaataaaccctacagacactcaaagatctattagagcttatgaagttaaaaagtttacaaaaaaatctctaactgaatggtt

SEQ ID NO: 244982 - DNA, 782 bp, Unknown
  Bacterial polypeptide expressing nucleotide sequence isolated from the Sargasso Sea
aatgagcgcagcaccgcacgccaaccccagcccgacgacgatcgcctgcctgctcggccccaccgcctcgggaaagacggccgcggcgctggcgctcgccgcgcgccgcccgatcgagatcgtcagtgtcgattcggcgctcgtctaccgcgacatggatatcggcaccgcgaaaccgtcgctcgacgagcgcgcgagcgtgccgcatcacctgatcgacatcatcgatccggccgacgcgtattcggccgcgagcttccgcgcggacacgctgcgcctgatcggcgagatcaccgcgcgcggccgcacgccgctgctcgcgggcggcacgatgctgtactacaaggcgctgacgcaggggctcaacgacctgccgggcgccgatccggacgtgcgcgcgacgctcgatgccgaagccgagcgcgatggctggcccgcgctgcacgcgcggctcgcacaggtcgatcccgacacggccgcgcggctcgcgccgaacgattcgcagcggatccagcgggcgctcgaagtgttcatgctgagcgggcagccgatgtcggtgctgctcgccgcaccgcgccgcacggacgatgcggccgcagcttaccgcttcgtgccggtcgcgctcgaaccggtaagctgctcgccgcaccgcgccgcacggacgatgcggccgcagcttaccgcttcgtgccggtcgcgctcgaaccgtcagatcgcgcggtactgcacaaacggatcgcgcagcgcttcgacgcaatgctcgacgcgggcttcatcgacga

SEQ ID NO: 244983 - DNA, 740 bp, Unknown
  Bacterial polypeptide expressing nucleotide sequence isolated from the Sargasso Sea
aaatattaagcatcatttatatggttttttaagtataaaaaaaaatttttcaacaggtcaatggttaaagctagcaacaaaaaaaataaatgaaatccataaaaagaacaagataccaattttagtcgggggaacaggtttatattttcaagctttaatatatggactagtaaagattccaaaaatatcttttaaaaaaagattaacaattttaaatcttcaaaaaaaattaggacagtataaattttataaaaaactaattaaaattgatccaaagatagatgtatttataaatcctaatgatattcaaagatctattagagcttatgaagtcaaatggtttacaaaaaaatctttattagattggtacaaagatacaaagccaatttttataaaagatgactttattaaattatatatagattgtcccagagatttgcttttagagaagattaaaattagagcaaaaaaaacgcttcctcaaggaattaaggaagtaaaaaaaattaaaagcatcaaagttcctaaaactaatagttcaaataaaataattggtattagagaaatcaaaaatcttcttgaaaaaaagcttaataaagaccaaacaatagaacttatggtcataaaaactagacaatacgccaaaagacaagctacatgggcaagaggaaaaatgaaaaattggaaaactgtgagcgtagcagatacgaaattgtctctaaaaaaattattaaattaat

SEQ ID NO: 244984 - DNA, 767 bp, Unknown
  Bacterial polypeptide expressing nucleotide sequence isolated from the Sargasso Sea
aaagtttgagataaaaagagccagacatcatctttatggcatactttcagttaaaaaatatttttcagcaggtgattggcttaaagaggttaaaaaaaaaataagtctttgttcaaaaaagaaaaagataccaataattgttggtggcacaggtttatattttaatacaattactaaaggaattagcaaaattcctgatattgatggcaaaacgagagctaaagttaggaatttatttaaaaaacttggatttaaaaagttttatgaaaaacttttaaagttagatccaaaagtaaaaggtaaaattttacctactgacactcaaagaacccaaagagcttatgaggtcaaacttaaaaccaaaaaatctttgtttgactggatagctaacacaaaatcagactttgtagattttaatttaaaaaaaatttttttagatattccaagagcagaactactccataaaatttcaaaaagaactgatctgatgtttaaagaaaactgtgtagcggaagttaagaaatttaacctattaaaaattaataatagcttatcagctaataaattgattggtgttcaagaaattaatcgatatttgaatggcacgatctctttagaagaatgcaaaaaccttatcaatattaagacaagacagtacgctaaaagacaaaatacttgggctcgaggtcatatgaagaattggactaagctatattctaaaaatttctccattctctcaaaaaaaacattaaaagcagtaagctaaa

SEQ ID NO: 244985 - DNA, 321 bp, Unknown
  Bacterial polypeptide expressing nucleotide sequence isolated from the Sargasso Sea
catggattttaaatccaagattatattaatttctggaccaactgcttcaggaaaatcaaaattcgcaattagacttgctaaaaaaattaatggtgaaattattaatgcagatagtatgcaggtttataaagaattaagaattctttctgcaagaccagatactaaaaaattccaaaaaataagacatcatttatatggttttcataatgtaacaaaaaatttttcaactggaaattggttgaaattagtatcgaaaaaaattggagagttaaaaaaaagaaaaaaaactccgatccttgtaggtgggactggattatactt

SEQ ID NO: 244986 - DNA, 688 bp, Unknown
  Bacterial polypeptide expressing nucleotide sequence isolated from the Sargasso Sea
atggacctaaagtccaaaataatattaatctcaggtccaactgcatcaggcaagtctaaagctgcattgaaaatcgctaaaaagttaaatggagaaattattaatgcagatagcatgcaggtatataaagaattaaatatactgactgctagaccttcaaaaactgatttaaataaaatagatcaccatttatacggttttagaagtgttaaaaaagaattttcgtctggtgagtggttaaaattagcaaagaaaaatatcaaaaaaattcgtaacaaaaataaaataccagttttagttggtggtactggtctttattttaaagctctgactgatggattggttaaaattccaaaaataccaatctctgttcgtgataaaattagaaaaatgcaaaataaattaggtcagaaaaaattttatttaaaactcttaaaaattgatccattagtaaaaaataagattgaccttaccgatgttcaaagatcaattagagcttatgaggttatttcgatttcaaagagatcaatttttgaatggtataagaaaacaaaaccatcttttaaaaaggatcaatttataaaaatttatattgattatcccaaagaagaattaattaataatatttccaaaagagtagaccaaatgatgaaagatggagccataaaagaagttaaggatttttaaa

SEQ ID NO: 244987 - DNA, 831 bp, Unknown
  Bacterial polypeptide expressing nucleotide sequence isolated from the Sargasso Sea
gtggggtaataattaatgctgactcgatgcaagtttataaggacctccgaatattgactgcccggcccagcgaagaagaagaagcgctggttccgcataggctatacggtacaatgtcggtatcagaaaaaaattctgccgtaaaatggcgagaaatggcgataactgaaattaataatactagaaagctgaataaaacaccgatactcgtaggtggaactgggctgtattttaaaacgttattagagggtttggcacaaattcccccaataagttccgaggctagtcttgaggtaaaagctttgttggaggagctaggggtcaaaaatatgtataagaaattagttaaaattgacccaaaaatagctatcaaaatttctcaaaacgactctcagaggatttctcgagcaatcgaggtatttatatcaacaggcataccgctcagtgaatggcacgagagtgataaacttttacctccagtaggaggcaacgtaaaaaaaatactttttgatcctcccagggaagtattatatcgcgcatgcgatcagcgcttcgaattgatgcttgaaaaaggagccttagaggaggtagataagcttatcagattacctttagattcttcacatccaatacttaaggccttgggtgtaagagagttatcgctatttttaaaaggtgaaattggattcgatttagctaaaaagaggtcgcaacaggccacgcggcgttatgcaaaacgccaatcaacgtggtttaggaaccaattcggaaagtctaaacgcctatctgcgcaatattcagaaagtttatatagaaaaatcttttcataaa

SEQ ID NO: 244988 - DNA, 913 bp, Unknown
  Bacterial polypeptide expressing nucleotide sequence isolated from the Sargasso Sea
atggaccttaagtccaaaataattttaatttcaggacctacagcttctggtaaatcaaattttgcaattaacttagctaaaaaagtcaagggagaaattattaatgcagatagtatgcaagtttataaagaatttaaagtcttaactacacgcccaactagattagaacaaaaaaaaataaaacatcatttatacgggttcctaactattaaaagaaaattctcaactggacagtggttaaaacttgcatcaaaaaaaattaaagaaatcaaagataaaaataaaattccgatacttgttggtggtactgggttatattttaaagcattagcagacggacttgtaaagattccgaaaatatcaataaaaaaaagacaaagagttgtatatctacaaaaaaaattgggccagggtaatttttataaaaagttaattaaaatagatccaaaaattaaagaaacaataaattcaaatgatatacaaagatctataagagcatacgaagttaaaaagtatacaaaaaaatctatagttgattggtatatggatacaaagtcactatttaagaaagatcagttcattaaaatatatttagactgtccaagagatttacttttaaagagaattaaatataggacagaaaggatgtttttaggctcgataaaagaggttaaaaaaataaaaactattaaattttctaaaagtaacagttcgagcaaaataattggatttaatgaaatcaagaatcatttaaacaaaaagttgaataaggaccaaacaatagaactaatagtcataaaaacaagacaatacgccaaaaggcaagctacatgggcacgaggacaaatgaaaaattggaaaactatcagttgcttagatacaaaagcttctttaaaaaatttatttaattaat

SEQ ID NO: 244989 - DNA, 910 bp, Unknown
  Bacterial polypeptide expressing nucleotide sequence isolated from the Sargasso Sea
atggacctaaagtccaaaataatattaatctcaggtccaactgcatcaggcaagtctaaagctgcattgaaaattgctaaaaagttaaatggagaaattattaatgcagatagcatgcaggtatataaagaattaaatatactgactgctagcccttcaaaaattgatttaaataaaatagatcaccatttatatggttttagaagtgttaaaaaagaattttcgtctggtgagtggttaaaattagcaaagaaaaatataaaaaaaattcgagataaaaataaaataccagttttagttggtggtactggtctttattttaaagctctgactgatggattggttaaaattccaaaaataccaatctctgttcgtgataaaattagaagaatacaaaataaattaggtcaaaaaaaattttatttaaaactcttaaaaaatgatccattagtaaaaaataagattgaccccactgatgttcaaagatcaattagagcttatgaagttatttcgtttacaaagaaatcagtctttgattggtatacgaaaacaaaaccatcttttaaaaaagatcaatttataaaaatttatgttgattatcctaaagataaattaattaataaaatttccaaaagagttgaccagatgatgaaagatggagctattcaagaagttaaggatttattaaagctaaatttgaagagtgatagcaacatcttcaaagttataggaataagagagattaaagaatttattgataaaaaaacctctatgcatgatttaaaactaaatattgttataaaaactagacaatacgctaaaagacagagaacttgggctagaggtcaaatgagtgattggcaaaaatttgatgccgaggctctttcaaaatttataaaaaaattataaa

SEQ ID NO: 244990 - DNA, 922 bp, Unknown
  Bacterial polypeptide expressing nucleotide sequence isolated from the Sargasso Sea
atggatcctaaagttatttttttaatggggcctacagccagcggtaaaacgtctttggctattgatctgtataaaagcatcccctcagagctgattagcgttgatagcgccttaatctataaaggcatggatatcggtaccgccaagccaacagcggcagagcttctggatgcacctcatcacttaattgatattcttgatcctgcttcagcgtattcagccgcggattttcgcactgatgcgttacgacttattgctgatatccacagcagggggaaaaccgctattctggtaggcggcactatgttgtatttccgcacgctgttgcaggggatatcacctttacctgaagcagatccagaaatacgacagcagatcgaagctgaagcggcagaacatggttggggttatttacaccagcaactggcaaactttgacccggtatcggcggctcgtattcaccctaatgatccacagcgggtgaacagggcgatagaagtgtaccggttaaccggtaaaagtttaactgaactgacagaacacaaaggcgagccttttccatacccgctgcaacaatttgctatcaatccaacagatcggtctgaacttcaccagcgtatagctgtcagattccggcaaatgttagattgtggttttgccgatgaagtaaaaaatctgatgcaacgagcagatctgcatttggatttaccttcgatgcgttgtgtgggctaccgtcagatgtggctacacctgcaaggacagctgtctgagcaggaaatgattgatcagggtattgccgccactcgtcaactggcgaaacggcaactgacctggttacgcagttggcctgaattaaattggttaaaaactgaagacaaacaggccgaaaacttgcaagccattttaacttcgctaagctagt

SEQ ID NO: 244991 - DNA, 916 bp, Unknown
  Bacterial polypeptide expressing nucleotide sequence isolated from the Sargasso Sea
gatgggacaaaaaaaaacaatacttttatttggtccgaccgcttctggtaaatcgaagctagcggtagatattgcaaaaaaattaaatggtgaaattgtaaatgcagatagtatgcaaatttataaagagattaaaattttatcttcaagacctagtgatcaaagcataaaacaccatttgtacggttttatttctgcaaagaataatttttcagttggtgaatggtataaattagctgctataaaaattaaggaaattaagaaaagaaataaaacagcaattgttacaggaggaacaggcttatattttaaagctctagtagatggattggttcaaataccagatgttccaaaaatagattatagttatttaaatccccccgcaagaattatgatgaaaaatcattatcaaaaaatatatccaaaaatttttgaaggtattaaagcaaacgatatacaaagaatttctcgagcaatttctgtttataatgctacaggaataactttaagtgaatggcaaaaaaaaaaaaataaaaaatattttaattctaaagattttattaaaatttgtcttattccttcgaagtcatttttggaagagaagataaaaaagagattttcacaaatgttgaaaaaaggtgccatacaggaagctaagaaatataaagatttaaatttatctgtacatgctttacatagctcaaattcaataataggacttaaagaaattgaatcatttttagcaaaaaaaatttctatagtagatctaaaagagcaagtattaataaaaactagacaatatgcgaaaagacagtttacttggcaaagaggccagatgaaggattggaaaggatttggagatacaaattatcttgatttacgaaaaaaagttctaagttatttatctaaaacttga

SEQ ID NO: 244992 - DNA, 919 bp, Unknown
  Bacterial polypeptide expressing nucleotide sequence isolated from the Sargasso Sea
ttgtcaaaaaaaataattctcttagcaggacctacagcttcaggaaaatcgaaactagcaatacaattatccaaaaaattaaatggtgaaattataaatgcagatagcatgcaaatatataaagagttctcagttttatcttctagaccagatattaaagaaataaaaaaagctaaacatcatttgtatggaattatttctgtaaaaaaatatttttcagctggagattggcttaagctcgctagaaatacgataaatcaatgtcataaaaatacaaagattccaataatagtcggaggaacaggtttatattttaataccattaccaaaggaataagcaaaatacctaatatagatataaaaactagaaataaagtaagaagtctttttaagagattaggttataaaaatttctataaaaagctcttaaatattgatccaaaagttaaaaatagaattttacctactgactctcaaagagctcaaagagcttacgaggttattctaaaaacaaaaaagtcactatttgattggactgcaaacactaagtcagatttcattaattttgaaattaaaaaaatttttattgatattcctagagaagaattattgaaaaagatctctgaaagaactgagacaatgtttgaaaataaatgcattgaagaagtaaaaaaatttaatttacttaaactaaaaaaatctctttcagccaataaattaatcggtgttcaagaaatcaatgcctatttaaaaggtttaatttcattagatcaatgtaaagagcttataaatataaagacaaggcaatatgcaaagagacaaaatacttgggctcgaggtcatatgaagaagtggaacaagctttattctaaagacttttctatacttttaaaaaaaacattaaaagtcgtcagctaaa

SEQ ID NO: 244993 - DNA, 1063 bp, Unknown
  Bacterial polypeptide expressing nucleotide sequence isolated from the Sargasso Sea
attgcaatcatggccggcccacctgggtgcagctgggcatggcggatctagacaaactgtttctgcgcggacgctgatcgtgaccgaacccgtgttggcgttgacgggccccaccgcgtcgggcaagtcggcattggccgagcggctcgccgagacctttgattgcgaactgatcagcgtggattcggcgttggtatatcgcggcttatcgatcggcgccgccaaaccggattacccgcatcatctcgttcatattcgggaacccgatgatccctacaccgccgccgatttcgcaagcgatgccaaacagtgtatcgatgagattagggggagagggcggcgccccattcttgtcggcggcagcatgctgtatttccgggcgctgattcaggggctcgacgacatcccagccattgacccggccatacgcgctgacatcgaggctgaagcaacgcggtctggctggccggcattacatcagcagctcactcagatagaccctgagaccgccggtcgattacaccctaaccacagtcagcggatctgccgtgcattagaggtataccggggtaccggcacgctgctaagtgaatggcagcagggaaaccctacctccgcatcacaagactatgagtgcatcgccctgtgccccgaggatcgcgccgccttacatgcgcgaatcgccagccgactggacgccatgtttgctgagggattagtggcggaggtcacccgcctgtttgagcaggagggcttgcacaccggtttacccgctattcgggctgtgggttatcggcaggtgtggtcctaccttgagggcgagatcgacctcgctacgtgtcgtgaaaaggtgctcgccgcgactcggcagctcgccaagcgacagctgacctggcttcgcggctggcctgatttgacgtggatctggacgaatgagatgggtcagctggtccagggatccgattcggccgcagatgccccggactccagcgatcacgggttgtcagccccctcaggcggtatttggtttggccgtcttcagtggctgatgcggaacttttag

SEQ ID NO: 244994 - DNA, 910 bp, Unknown
  Bacterial polypeptide expressing nucleotide sequence isolated from the Sargasso Sea
aatggaccttaagtccaaaataattttagtttctggaccaacttcatcaggtaaatcaaattttgcagtaaaacttgctagaaagattaatggtgagattatcaacgctgatagtatgcaagtctataaagaattaaaaattttaactgctagaccaaaaattaaagaatataaaaatattaaacatcatctttatggatttttaagtgttaaaaaaaatttctcaacgggctcttggttgaaacttacattacaaaaaataaaagaaataaaaaaaagaaaaaaagttcctattcttgttggaggtacagggttatattttaaggctttaacagagggcttggttaaaattcctaatattccaagcaagcttagaaataaaatccgaaaaaatcataaaattattggaaaaaaaaaattttttacaaaactggtaaaattagatcctttgactaaaaataaaattaaattaacagatgttcaaagagcaattagagcttatgaagtaaaattatttacaaaaaaatctatttttgaatggtttaaaaatactaaatctaagtatccaaaagacgaatttattaaaatatatattgattatccaagagcagaattagtagaaaaaatttcagaaagaacttcaaaaatggtcaaatcaggagccataaatgaagttaaaaattttttaaagctaaacattagaaatgataagacctcaactaaagtaattggtattaatgaaattagagattttattgataaaaaatcaaacttgagtgaattgacggaaaaaatttcaataaaaactagacaatacgccaaaagacaagcaacttgggcaagaggtcaaatgtctgactggcaaaaaattaaaccaaaagacatagttaaacttttaaaaaaaatataa

SEQ ID NO: 244995 - DNA, 910 bp, Unknown
  Bacterial polypeptide expressing nucleotide sequence isolated from the Sargasso Sea
atggacctaaagtccaaaataatattaatttcaggtccaactgcatcaggcaagtctaaagctgcattgaaaattgccaaaaagttaaatggagaaattattaatgcagatagtatgcaggtttataaacaattaaagatcttgactgctcgaccttcaaaaagcgatttgaataaaatcgatcatcatttatatggttttagaagtgttaaaaaagaattttcatctggtgagtggttaaaattagcaaaaaagaatattaaaaaaattagaaacaaaaacaaagtaccagttttagttggtggtactggtctttatttcaaagctttgactgatggattggttaaaattccaaaaatacccatctctgttcgtgataaaattagaagaatgcaaaataaattaggtcaaaaaaaattttatttaaaactcttaaataatgatccattagtaaaaaataagattgatcccaccgatgttcaaagatcaattagagcttatgaagttatcaagtttacaaagaaatcagtttttagttggtataagaaaacaaaaccatctttcaaaaaagatcaatttataaaaatttatgtcgattatcctaaagagatactaattaataaaatatccaaaagagttgatcagatgatgaaaaatggagctattcaagaagttaaggattttttaaaacttgatttgaagagtgacagcaacatcttcaaggttataggaataagagagattaaagagtttatcgataaaaaaatttctatgcatgatttaaaactaaatattgttataaaaactagacaatacgctaaaagacaacgaacttggtctagaggtcaaatgagtgattggcaaaaatttgatgctgaggctctttcaaaatttataaaaaaattataaa

SEQ ID NO: 244996 - DNA, 899 bp, Unknown
  Bacterial polypeptide expressing nucleotide sequence isolated from the Sargasso Sea
gatggggccgacggcctccggcaagacggatctcgccatcgaactgtgccaggcgctgccctgcgacatcatcagcgtggattccgcgctcatttatcgcggcatggatatcggcaccgccaagccgaccgccgatgaactggcacgagccccgcaccggctgatcgacatcctggaccccgccgtgagctattcggcggccgatttttgcaaggatgcgctgcgggagatgaaagagattgccgaccgcggccggattccgctgctggtgggcggcaccatgctctatttcaaggcgctgctggaggggctctctccgctgccctccgccgaccccgtcattcgggccggcatcgaggaagaggcggctcgccttggctggcaggctctgcacgatgaactggtgcgcatcgacccggtggccggtgcccgcatccatcccaatgacccgcagcggctcagccgggcgctcgaagtctaccgcatcagcggcaagacgctcaccgagctgactctggtgcagggggaggggctgccctatcgggtgctgcagtttgccatcgcaccgagcgatcgcgccgtgctgcaccagcgcatcgagctgcgctttgacaagatgctgcagggcggctttgaacaggaagtcagggcgctctaccaacggggcgatctcaccccggatcttccctccatccgctgcgtgggataccgccaaatgtgggactacctggcgggggaagtggagtatgatgagatgcgctatcgcggaattgttgccacccgccagttggccaagcgtcaaatgacctggttgcgcggttggtctgatgtgacctggttggaatctggtgagtctggcaatctggcaagggtcgtcgcccgtgccggagtggcttgac

SEQ ID NO: 244997 - DNA, 838 bp, Unknown
  Bacterial polypeptide expressing nucleotide sequence isolated from the Sargasso Sea
gatgaaaaaaattattcttattgccgggcctacagcctcaggaaagtcgtcactagcaaatatattagctaaaaaaattaatggtgaaatagttaatgctgactcagtacaaatatataaagatttaaagattcttacagctcgacctgatatacaaaaaaatgatcctcttcatcacttatatggatttgctaagggtaatgaattatggtccgttggaaggtggattaaaaaagccaaaaaagtaactgataatattttaacaaaaaactcaatacctattcttgtcgggggaacaggtttgtattttaaagcagttactgagggactatcaccgatacctgagattgatgaaacagtaagagaagagctaaatgaagatttaaaagaaaaaggtttatcgtatctttataatgaattgaaaagtcaggatattaaggcttatgaattaattgataaaaatgaccaacaaagaattttgagagcattagaagtttatagaggctcaggtaaaaaaatatctacttattggggaatggaaagatcaaaggtttttaataataatttcattaaaatcaaattaaatgcagacagagagtatttatataataaatgtgatgacagatgtgaggatatgtttcaatcaggagtaattgaagaagtaaaaaaactgatggaaatgaaatacgaggataatgctccaatttttaatgcaataggtgttaaagaaataaataaatatcttcaaaaggaaattgataaagacgaagcaaaggatttgattaaatttagaacacatcaatatgctaaaagacaaattacatggctaaaacatcag

SEQ ID NO: 244998 - DNA, 952 bp, Unknown
  Bacterial polypeptide expressing nucleotide sequence isolated from the Sargasso Sea
gatgaactataagtttaattttccagcaatattcttgattgggccaacagctagtggcaaaacagaacaatcattttctataactaaaaattttccggttgaaattattagtgttgatagcgccatggtctttaaaggtatggatataggaacttctaagccttcaaaagatatgagagagtcatttcctcatcatttgatagatataatctctccagagcaagattttgatttaggtctatttctagaagaaacagatagagcagttaaagctattagagaaaagaataaatttccattatttgttggggggtcaatgttgtttcataaaactcttttagaaggcattcacaacttcccaagtgatttaaatattcgtaaagatattgaagctctaaaaaaatcaaaaggattagatgttctggttcaagaattaaagagctctgatccagagactcatcagtcaattgacattaaaaatgctcgaagagtggaaagagctctagagattattagaatatcgggcaaaaaattatcagagttaaaaactgaaccaaaagttatgtttttcgatcaaaataattgtttgttattagggatattagatcaaaaaagtagattagaagctttagcaaagcttagactttcagagatgattgaaaaaggtttgataaatgagcttgaaaatttaaaaaaggaatatagattatctcctgagctacaaagtatgaattcaataaactataaacagtttttaccacatataaatggtgttatttcattagatcaggcgtttaacgatgcttttgacgctactaaacaattaattaaaactcagttaaattggatgaaaaaatttgaactaaatcactgtgcgaatacagcagatataaatgattcagaaatattttctgatacaataaacacttatctagggagctttgataaatga

SEQ ID NO: 244999 - DNA, 913 bp, Unknown
  Bacterial polypeptide expressing nucleotide sequence isolated from the Sargasso Sea
atggacattaagtccaaaataatattaatttcaggaccaactgcctcaggaaaaactgaatttgcaattaaattagctaagaaaattgaaggagaaattattaatgctgatagtatgcaaatttataaagaacttaaaatattaaccgcgagaccaaataaaatagatacaaaaaaagtaaaacatcatttatatggtattaaaagtgttaatagtaaattttctacaggatcttggttaaaagaagtaaaaaaaaaaataaaatatattaaaaaaaaaaataaaattccaattttagttggtggaactggattgtattttaaatctttaacagaaggcttagttaaaatacccaatattccaattagttttagaaaaaatataagaagtcttcaaaataaaattggccaaaaaaaattttatcaaaaattaattaaaattgataattcagttaaaggcagtattgatccaaatgatgttcaaagaacaattagggcttatgaaataatgaaatatactaaaaaatcaattacagaatggttcaaaaaaacaaaaccaatttttgataatactgtattcgttaaatattatatagaatatccaagagataaactgcttgataaaattcatagcagaatagaaagaatgtttaatttgggagctatagaagaggtcaaaaaatttaattatcttaaagtcaaaaaagaaaatagcgcctcaaaggttataggtattagggagataaatgatttaattgagggaaatagcaatttaaagcaaactaaagaaaaaatagctataaaaacaagacaatatgctaaaagacaaatgacatgggccagaggacacatgaaatcttggcacacaattcagccgaacgccattaattcagttttaaaaaaatttaattaat

SEQ ID NO: 245000 - DNA, 895 bp, Unknown
  Bacterial polypeptide expressing nucleotide sequence isolated from the Sargasso Sea
atgggccccacggcatcaggcaagacaggcttggcgcttgatatagcggccaaggttgaaagcgaagtaattagtgttgattcagcccttgtttataaaggtatggacatcggcactgcgaagccaacgcaggaagagcaagcaggtgtggtacatcatctaattgatattatcgaccctgcacaaagctattcggtgtcgcaatttgtaaacgacactaatgcgctaattggcgatattttagcgcgtggcaaggtgccaattttggctggaggtacaatgatgtactttaatgccttgataaatggaatttcgccactacctaagtcagatgaaaagatacgggacgaaataacacagcaggcacaacgcttgggttggtctaaattacacgatgaattacgtggtgtagacccaattagtggtgagagaattcaccccaacgacccacagcgaattacccgtgcgctggaagtgtatagaagtaccggcaagacgttgacacattggcaacaacaagagggtgaaaagtgcccttataacattgcacaatttgccatagcgcccgcagacagggcagtgttgcacgaacgtatagcgacccgctttgatttgatgttggagcaagggtttgagaatgaagtagtaaagctctacgaacgcagtgatcttcatgaagatttgccttctattcgttcggtagggtacagacagatgtggcagtacctagacggccaattgagttacgcagaaatgcgtgaaagaggcattatcgctacaaggcagctcgccaagcgtcagctcacgtggttacggggctgggagcaggttacatggctagacacatttgctaacgataatttgactaaaattacagcgaaagtcacactttaaa

SEQ ID NO: 245001 - DNA, 940 bp, Unknown
  Bacterial polypeptide expressing nucleotide sequence isolated from the Sargasso Sea
tttgagatcaaaaaaagtcatcatactcagaggacctactgcatcaggaaaaacagacctctctttagaattagctgaaaagtttcctattgatctcatcagcgttgattcagtgatggtatacaaaggactcaatattggatccgcaaaaccatccaagcagaccttaaaaagatacccccatcatttgatagacatttgtgagccaaatgaaaaatattcagcgggtcgttttattgttgatgtccagaaaatcattggagacattcaatcaaatgatcgtattcctctattagtcggtggaacaatgatgtattacaaagttcttcaagatggtatgagtcagttgccagctgctaatgacgaggtcagaactcaaatcgatctaaaggctgaaaaaattggttggcaagagatgcatgctgaactcgggaaagttgaccctgagtcagcaaaagagataaagcccaatgataaacagagaatacagcgtgcgattgaagtttatatgattacaggtatagcgatgtctgaattaagaagagaaggtaagagcaataataaatttgattatttaagcattagcctattgccaaacgatagggaagcactgtatgaaaatatcaataatcgattcgactcaatgattaaagaaggattactcgatgaagtttcaaccctgctgaatacagaacgagtgtcaaatgaaagtcattcaatgcgatcgataggctatcgtgaaatgcttgaatacattcgtggggaaaagacgctagaagttgccatagatactgcaaaattatcgagtcgcagatatgcgaaaaggcaaattacttggttgagatcatttgatgatcaatataagcttgagccaatggaaacagacaatatcaaaaccattgaagaaatcctaaataatcattttgaagtattagattga

SEQ ID NO: 245002 - DNA, 934 bp, Unknown
  Bacterial polypeptide expressing nucleotide sequence isolated from the Sargasso Sea
ctgctcggccccaccgcctcgggaaagacggccgcggcgctggcgctcgccgcgcgccgcccgatcgagatcgtcagtgtcgattcggcgctcgtctaccgcgacatggatatcggcaccgcgaaaccgtcgctcgacgagcgcgcgagcgtgccgcatcacctgatcgacatcatcgatccggccgacgcgtattcggccgcgagcttccgcgcggacacgctgcgcctgatcggcgagatcaccgcgcgcggccgcacgccgctgctcgcgggcggcacgatgctgtactacaaggcgctgacgcaggggctcaacgacctgccgggcgccgatccggacgtgcgcgcgacgctcgatgccgaagccgagcgcgatggctggcccgcgctgcacgcgcggctcgcacaggtcgatcccgacacggccgcgcggctcgcgccgaacgattcgcagcggatccagcgggcgctcgaagtgttcatgctgagcgggcagccgatgtcggtgctgctcgccgcaccgcgccgcacggacgatgcggccgcagcttaccgcttcgtgccggtcgcgctcgaaccgtcggatcgcgcggtactgcacaaacggatcgcgcagcgcttcgacgcaatgctcgacgcgggcttcatcgacgaagtggagcggctgcgccgtcgcgaggacctccatcccgacctgccgtcgatgcgctgcgtcggctaccggcaggcgtgggaattcctcgacggcgacaccgactaccggacgatgcgcgacaaggggatcttcgcgacgcgccagctctgcaagcgccagatcacctggctgcgcgcgatgccggagcggatcgtcgtcgactgcatcgcgccggactcgacggcccgcgcactcgacgcgctcgaacgcgtgctcgacggcaagccgccaggctgac

SEQ ID NO: 245003 - DNA, 913 bp, Unknown
  Bacterial polypeptide expressing nucleotide sequence isolated from the Sargasso Sea
catggactacaagtccaaaatcattcttatagctggaccaacagcttctggaaaatcaaaaatagcaatcaacttagcgaaaaaaattaatggagaaatagttaatgctgacagtatgcaggtttataagcagcttaaaatacttacagcaaggccttcagaaaaagatcaaaaaaaaattaaacatcatttatttggcattattgatgtacgaaaaagattttcaacaggtcaatggcttaaagaatgtatcaaaataataaatataattagaaaaaagaaaaagatcccaattattgtaggtggaactggcctctattttaaagctttagtggatgggcttgtgagcattccaaagttcaaaccttcagaaaaaaacaatatacttatgcttcacaacaaattaggccaaaagcaattttataaaaaattagtcaaattagatcctgtctgtaaaaaatttattaattcaaatgatgttaacagatcaataagagcatacgaagttaaaaagcttacaaaaaaatcattatacaagtggtttaaagaaacaaaaacttttttcgacaagaatgagtttgtgatgacttatgtggattatccaagagacaaattgataaaaaatatcaaaaaaagaattgctaagatgtttgatttaggagccataaaagaagttaagaaattcaatctcattaaaattaacaaagtgaatagcgttaatcacgtgattggtattaaagagattaactcttatttaagtaaaaaagctgaattgagcgatattaaagaacagatattaataaaaaccagacaatacgccaaaaggcagagtacttggtctcgaggtcatatgtttaattggcacaaaattgatccaaaatcaaaaaatccattcaaaaaaattttaaaataa

SEQ ID NO: 245004 - DNA, 940 bp, Unknown
  Bacterial polypeptide expressing nucleotide sequence isolated from the Sargasso Sea
ttgaaagctaagaatgccataatcattagagggccgactgcttcaggaaaaacggaactctctttaaaattagctgaaaaatatcccattgatatcattagtgttgattctgtgatggtctataaagggcttgatattggttccgcaaaaccatctcaagacattttaaaaaagtatcctcatcatttgatagatatatgtgagccgaacgataaatattctgccggtaggtttattgatgatgctcataagaaaataaaagagattcaatcaaatgatcgaattcctttattggctggtggaaccatgatgtattttaaagtgctccaagacggtttaagcgagttaccgagtgccaatcagaagatcagaaaaaaaatagatataaaggcaaaagaaattggctggccagagatgcatattgagcttgagaaaattgatcccgatgcagcaaaaaaaataaaaccgaatgataaacaaaggatacaacgtgcgatggaagtattcatgatttcaggcatacccatgtcaaagttaagacgaaaaactagaattgataatgaatttgaatatctcgatatcagtctaatgccaaatgacagggaatctttgtatagaaatattgatagacgttttgattccatgattgaggagggtttattggatgaagtttcaaaattaatcgaaaaaaaacttgtttcttatgaaagccattcgatgcagtcgatagggtaccgagaaatgattgatcatatccttggcaaaatgactctagatgatgcaatagaatctgcaaaagtatcgagcagaagatacgcaaaaagacaactgacatggttgagatcgttggacgatgaatataagcttgatccattggataagcaaaaattcaaaactatagaaggcatcataaataatcattttgaagataaagattgat

SEQ ID NO: 245005 - DNA, 800 bp, Unknown
  Bacterial polypeptide expressing nucleotide sequence isolated from the Sargasso Sea
tagcatgcaagtttataaagaattaaaaattttaactgcaagaccattaaaaaatgaaagttcaaaaatcaaacatcatctttacggatttcagagtgttaaaagaaaattttctactggcaaatggctaaagcttgcaactgaaaaaatctctaaaattaaaaagaataaaaaaattcctattctagtcggtggaacaggtttatactttaaagctttaactgatggtttggtaaaaattccaaatattcctattaaatttagaaataaaataagaaatttacaaaaacaaattggtcaaaagaaattttacgaaaaattaattaaattagatccattaattaaagaaaaaataaacccaactgatatacaaaggtctattagagcttatgaagttaaagtatatacaaaaaaatctttgattgaatggtttaaaaatacaaaatcaaaatttaccaaggatgatttttttaaaatttatatagattttccaagacaagaactactatctaaaatttcatcaagaattgaccaaatgtttaaaaaaggagctgtgaaagaggttaaaaaatttttaaagctcaaggtggccccagaaatgactccaaacaaagtgattggtattagtgaaattaaagattttcttaataaaggatctgatttgaaggaagttaaggataaaataacaataaaaacaagacaatatgctaaaagacaaagtacttgggctagaggtcaaatgaaaagttgggaaaaagtaaatccaaaaacgcttaaacatattttaaaaaaaatataaa

SEQ ID NO: 245006 - DNA, 907 bp, Unknown
  Bacterial polypeptide expressing nucleotide sequence isolated from the Sargasso Sea
atgtcgaattatagctcaattcttatttcaggtccaacagcttctgggaagtctcagctggctgttcggttggcaaaaatctatgatggtgtggtaattaacgctgatgccatgcaaatatatgatgttctatcaattataactgcccgaccaaacaccaaatctcaagaaaccgttccacactttttgtatggttatgttaatcctcaaataaggtattcagtcggtgagtggcaaaaagatattgcaagattattggtattcttggagaaaataaatgtattaccaataattgtcggtggtacaggattatatttttctgggttattgggtgaaatagctgaaataccaaatatttccaaagaaataagaagcaaatggttgaaaattaaagatgaaaatgacacgcattatcttcatgaatacttaaaaaaaattgatccaaaatcatacgaaaaaattaatccaaatgatccatcaagaattttacgtgccattgaagtttatgagcagactggtgtttcaattcaggactggcaagaaaatcagggtgttcaactcatagaaaagtcaaagtcaaaatttatttatttctgccctaataaagaagatctgcatcttaatattaaaaatagaacagcccaaatgttatcgagcgaagagctgtatagagaggtcagcgatcttcgtgaactcaaagtcccaccagcctatccatcaatgaaagcaattggtgtaagagaagtcatcgatttaatagatggtaaaactaataaagatcaagtagaaattagtataaataatcaaacaaaaagatatgtaaaaagacaaataacatgggcacggaaaaaaatggttgattgggactggattgatgacgaaaaacaaatttccgaactctcgtaaa

SEQ ID NO: 245007 - DNA, 847 bp, Unknown
  Bacterial polypeptide expressing nucleotide sequence isolated from the Sargasso Sea
tggagaaattattaatactgatagtatgcagatttataaagaaattaaaattcttaacgctcgtccaaaaataaaagaaaccaaaaatattaaacattacttatatgggtttcatagtgttaaaaaaaatttttctactggagattggttaaaaaaaacaattaaattaattaaacagatacataataaaaacaaaatcccaattttagttggtggaacaggattatattttagagctattattaatgggttagtaaaaatccctacgatcccaaaaaaatatagaaatcaaattagaaataaccatagaaaaattggtcaaaagaaattttataataatttaataaaattggatccactagtaatatcaaaaataaatccaaatgatgcacacagatctttaagagcttacgaggtgaagaaatatacgaagatttctttatataaatggtttgaaaaaacaaaaaaaaactttgatgaaaatgattttttaaaaatttatattgattgtcctagagatgatttaattaaaaggataaatacaagggtgaacaaaatgatctcatcaggtgcagttaatgaagtgaaaaaatttagacaccttaaaataaggaaagacaagacatcaaataaagtaataggcatatccgaaatatgtaaatttttggatggagatcaaaatattgatataaccaaagagcaaatttccataaaaacaagacaatatgcgaaaagacaaaggacatgggcaagaaatcaaatgatcgattgggaaaaagttgattataaaaagcttagctcgttcttaaaaaaaatcaaaatatcctctcttaaacttgaccaataa

SEQ ID NO: 245008 - DNA, 510 bp, Unknown
  Bacterial polypeptide expressing nucleotide sequence isolated from the Sargasso Sea
tttgaaaagaaaaattattttattagctggtccaactgcatcaggtaaaacaaaaatagcaatcaaattagcaaaaagaattaacggtgaaattattaatgcagatagtatgcaagtatataaagattttcatattttatcctctagaccaagtgaaaatgaattaagattagcaaaacatcatttatatggatttcaatcttctggagctgttttttctacaggaaaatggcttaaacttgcttcagataaaattaatcaaatagtcaaaaaagataaagttccaatactagtagggggaactggtctatactttaaggcaataactgatggtataagcaaaataccaaatattaaattttctaatagaaatagcataaggaatcttcataaaaaaataggtcagaaagaattttataagaaattaattaaactagaccctatttcaagaaataaaatttccccatctgacacacaaaggtcacttagagcatatgaggtaaaaaaatt

SEQ ID NO: 245009 - DNA, 910 bp, Unknown
  Bacterial polypeptide expressing nucleotide sequence isolated from the Sargasso Sea
atggaccttaagtccaagataattttaattgcaggaccaaccgcttctggaaaatcaaaatttgcaataaaatttgccaaaaaaataaatggggaaattataaatgcagatagtatgcaagtttataaagaattaagtattttaaccgcaagaccaaaaaaagaggatttaaaaaaaataaaacatcatttatatgggtttcaaacagttaaaagaaatttttcaactgggaattggctcaaacttgtaaaaacaaaaatcaaacaaattaaaaaaaaaaaaatgactccaattttagttggcggaacaggactatattttaaagcattaacccatgggcttgttaagatgccaaaaattcctttaagatttagaaataatataagaaaattgcacaaaaaaaaaggtcaaagtatatttcataaagaattaattaaattagaccctttagcaaaaaacaaaattaatccaaatgatgctcaaagatctatcagggcctatgaaataaaaaaatactcaaagaaatcaatttttaaattttttaaagaaactaacaacagcttttttgacaaagatttctttaaaatttatatagaatttccaagatctgaacttataaaaagaattgataaaagagttgataaaatattcaaagatggcgtcactaatgaggtgaaaagttttttaaagcacaaagtcaataaagataaaagtgtagcaaaagtcataggacttaatgaaattgagaaatatttgaaaaaagagcttaatttaagtcaaacaaaagagttaatttccataaaaacaagacaatatgcaaaaagacaaactacttgggccagaggtcagatgtctaactggcaaaaaatagactacaaagatctgaattcattgctcaaaaaaatttaaa

SEQ ID NO: 245010 - DNA, 688 bp, Unknown
  Bacterial polypeptide expressing nucleotide sequence isolated from the Sargasso Sea
aatggatttaaaatccaagataattttaatttcaggacccacagcatcaggtaaatcaagttttgcaattaaacttgcaaaaaaaattaatggtgaaatcattaatgcagatagtatgcaagtatataagcagcttaaagttttatctgctagacccaaccctaaaaattatcaatctataaaacatcatttatatggatttcaggatgcaaagataagtttttcgaccggtgattggttgaaaattgcaaataagaaaataattgaagttagaaaaagaaaaaaaataccaattcttgttggaggaactgggctttattttaaagctttaactgatggtctagttcgaattccaaacattcctgtaaggtttagaaatcaaattcgaaatctaaataaacagattggtcaaaataatttctataagcaactattaaaactagatcctctttcgaaatataatattaatccaactgatactcaaagatcaataagagcttttgaagttaaaaaatttactaaaaaatctctgcaagagtggtttaaaaatactaaatcaaattatctagaggaggattttattaaaatttatatcgattaccctcgtgaagagttggttgaaagaattcatcaaagaactggaaaaatgattaaaatgggtgctgttaatgaggttaaaagattttaa

SEQ ID NO: 245011 - DNA, 925 bp, Unknown
  Bacterial polypeptide expressing nucleotide sequence isolated from the Sargasso Sea
attgaaaactcaaatctattttgtattaggacccactgcatcaggaaaatcaaaatttgctttaagtctagctaacaaactaaatggtgagattataaatgctgatagtatgcaaatttatcatgagctaagtatcttaactgctagaccaactataaatgatcaaaaaaaaataaatcaccatctttatggttttgtaaaaggtgatgttagatttaatgttcaaaaatggtgtgaggaagcatctaaaaaaattaattatttgcttgatcaaaatataagccctattttagttggaggtacaggtctttacatagaatctttaattaatggaatagtctctattccatctatcccagaaaaagtaaaaaaagaatcagataaaatgattttaaaaactggtaaggaaaatttttttaatttagttaaagaacttgatagtgatgcaatgattaatattgcacctaatgatattcaaagaataagaagaatatgggaggtaaatttttttactaagaaaaaatttagtgaatggaaaaaaagtaaaaataaaaattttattaatttaaaaaattacaaaatattattatttcttccagatagaaaagaaaactataaaagagtagatcatagaacacacttaatgatggaagatggtgcgatagaggaagtcaaaaatttgcttaaactaaactataataatagtttaccaataatgaaagctcacggagttcctgaaattcaatcttatcttaataacgaagtatcaattgagaaatgtatttctaaaatacagcaagtaacaagaaactatgtaaaaagacaacacacctggtggagatcttcaaatcttaatatttttaaaaaatttgatcaatttccagacgaaattgatataaaatccattaatttagagcaaaattaa

SEQ ID NO: 245012 - DNA, 901 bp, Unknown
  Bacterial polypeptide expressing nucleotide sequence isolated from the Sargasso Sea
cttgatagctggtccaaccgcttctggtaaatctcaattttcaattgatttagcaaaaaaaataaatggtgttgtaataaattctgacagtatgcaggtttataaaaatttaaagatacttacagcgcgaccaaataaaaaagaaatgcaaaatataaaacactatttgtatggttacgttaatggggtagagagatacaatgttgaaaagtggtgcaatgatgctgctaaaattattaacaaaacttttgaaagaaattcaaatccaatattagttgggggtacaggtttgtatattcatacattaattaatggtttaattgatattccagcaatccctgaaagtattaaaaataaatcagaaaaaataattaaggaatttggtaaagattttttaataactcaaataaaaaaatttgatcccagatcccttaaagaagtaaattctaatgatactgtaagattaagaaggatctgggaagtatacgagtcaacaggtaaaaaatttagtgaatggaaattaaatgaaaataaaaaatttatagaaaatttagattttaaaataattttatttttgccaaatagagaaaaaaattatcaaattgttaattctcgatttataaaaatgattaatgacggagcgattgaggaagttaaaaatttattagatcttaatctaaatgattcactacctgtaatgagagctcatggtgttccagaaataataaaatttttaagaaatgaaattagtttagaggagtgtattagcaaaggacaacaggttacgaggaactatgtaaaaaggcaacatacctggtggaattcgacaaatttagatatttttcaccaatttgataaatttcctatcgaaattgatattaattctattaaaattgactga

SEQ ID NO: 245013 - DNA, 851 bp, Unknown
  Bacterial polypeptide expressing nucleotide sequence isolated from the Sargasso Sea
aatggacatacagtccaaaataattttaatttcaggaccaactgcatctggaaaaaccaatttttcaattaaactagccaaaaaaataaaaggtgaaattattaatgctgatagtatgcaagtatacaaagaattcaaaatacttactgcaaggcctagtttaaaagaacaaaaaaaaattaaacatcatttatatggatttttaagtatcaaacaaaaattttcaactggtcaatggttaaaacttgcttttaaaaaaatcaaattaattcaaaaaaaaaataaaataccaatactagttggtggaactggtttatactttaaagctctggtagatggattagtaaaaataccgaagatatccataaaaaaaagaaaagctattattaatctccaaaatgaattaggtcagatcaacttttataaaaaattgatcaaaattgatcctaaaattaaaggtttgataaattcgaatgatgctcaaagatcaattagagcatacgaagttaaatggtttacaggtaagtcattgtttgattggtataaggatacaaagtctcttttttcaaatgatgattttattaaaatttatatagattttccaagaaatgaacttctgagtcggatcaagtttcgtactaaaaacatgcttcctaaagctatcaatgaggtaaagagattaaaaggacttagagttgccaaaagcaatagctcgaacaaaataattggaattgatgagattaaaaaacttttagagaaaaagcttgataaagaccaagcaatagaacttattgccataaaaacgagacaatacgccaaaagacaagctacatgggcaagaagccaaagaa

SEQ ID NO: 245014 - DNA, 809 bp, Unknown
  Bacterial polypeptide expressing nucleotide sequence isolated from the Sargasso Sea
aatgaaaaaaaataaaacaatcttactaacaggatgcactggatccggaaagtcaacactagcgatagaactggccaagcttagtgactcaataataataaatgcagactcaatgcaggtttacaaatgcttaaagatactaacttcacgtccaactgacagccaaattctgacatgcgaacacgctctttatggccatgtagattgtcagaataattataactacagtgctggaacttggctcagtgaaattaaaaacattttgagctattctaaaatgaacaagctacggcctataatcgttggaggaacaggtttatatttctctctcttaatcaatggtttgtcaaatattccaaagatttcaattaaagtaaagaatgcagcagccgaaataaaaaaaactgatccccacaaattttttttagacctaaagaactttgatccggagatattaacaagcattgactcaaaaaactcagttagactgcaaagagcttgggaagtttatttcgagactggaaagagtattaggttttggcaaaaagaatttttacagcagccattaatagatctctcaaatgtaaaaccaattatattatcttgtgagactgaattattaaaaacaagaattgacactaggttcaaaaaaatgaaagagcttggcgtaattgaagaagttaaaacttttatacagcaatcaaaaatgttctctggcgaacaattagcaaagcgagctatcggggttgtagagataggtaaatatttatctggagaaatgactttgaaagatactgaaaaatttataa

SEQ ID NO: 245015 - DNA, 910 bp, Unknown
  Bacterial polypeptide expressing nucleotide sequence isolated from the Sargasso Sea
atggatttaaaatccaagattattttaatctcaggtcctacagcttcaggaaaatcaagttttgcaattaattttgcaaaaaaagttaatggagaaattattaatgcagacagcatgcaagtatacaaacagcttaaaattttatcggctagaccagatccaaaaaaataccagaaaataaaacatcatttgtatggtttccataatgttacaaaaaacttctctacaggtgattggcttaaactagtaattaaaaaaattagcgaagttcaaaaaagaaaaaaaaccccaattgttgttggaggcacaggtttatactttaaagctttaactgatggtttggttaaaataccaaatatttcgttaaaattaagaactcaaattagagatttacaaaaaaaacttgggcaaaagaagttttatgaaaaactattaaaattagatccatcctcaataggaaaaataaaccctacagatacgcaaagatctatcagagcttatgaagttaaaaagtttacaaaaaaatctctacatgaatggtttaaaaacacaaaatcaaacttcacagaagatgatttttttaaagtttatattgattaccctagacaagaattgattgagcgaattaatgtaagaacaagtgagatgatagaaaatggagcaataaaagaggtaaaaggtttcataaagcttagggttagaaaagataaaagcgctaacaaagctattggagtaaatgaaattagagaatatttaaaaaaacaaaaagatttgaaggatactaaagaaaaaatagccataaaaactagacaatacgccaaaagacaaagtacttgggctagaggcaatatgatgagctggataaaactaaagccacgagacataaataattttttgaaaaaaatttaaa

SEQ ID NO: 245016 - DNA, 442 bp, Unknown
  Bacterial polypeptide expressing nucleotide sequence isolated from the Sargasso Sea
tatggatttaaaatccaaaattattttaatttacggacctactgcatctggaaaatctaaatttgtaattaaactagcaaaaaaaatttcaggtcagatcataaatgcagatagcatgcaagtttataaagagctaaaggttttaacagcaagaccctttaaaaaagattatcaaaatatcaaacatcatttatacggatttcaaaatgctaaaaaaactttttcaacaggagattggcttaaaatggcaaaacaaaaaatttcgcaatgtaaaaaaataaaaaaaacaccaatattggttggaggcactggactatattttaaagcattgacaaatggcttagtaaatattccaaaaattcccattaattttagaaacaaaataagaaatttgcataaaaggctaggtcaaaaaaaattttttcagaagctattaaaacta

SEQ ID NO: 245017 - DNA, 630 bp, Unknown
  Bacterial polypeptide expressing nucleotide sequence isolated from the Sargasso Sea
tagttctttgtggtggaactggtctttattttaaatctctaaaagaaggaatatttcaaggaagtcatacaaatgaagatataagaaataagcttgaagaagaatatgatattgataaagaaaagttatttaaaacactccaaaaaatagatcctgagtattcaaataaagttcacataaataataaaaaaagattgattagagctcttgaagtctatgagacaactggaaaaccaatgtctaaaaattttgattctttatcgaaaaatagtagatatgctaatgactactattttgtttatttaaaaatgaataatgatttgttacatcctaggattttaaatagaattaagtgcatgattgatgatggtatgataaatgaagttgaggaaataattaagcgtaaaataaatatttctcatattaattatataggctttaacgaaatttcttctttcataaacaaagaaatctcaatcaatgaagccattgaagacatatttgtcaggacgagacaatatgctaaaagacaaaaaaagtggtttaatatgaataactatgatatttcatttgatttgcatgaaatttctaaaaatgatatagttgataaattgattcaaataaactaat

SEQ ID NO: 245018 - DNA, 616 bp, Unknown
  Bacterial polypeptide expressing nucleotide sequence isolated from the Sargasso Sea
catggacatcaagtccaaaattatactaatttcgggtcctactgcatcgggcaaatctaaacaagcagataaattagcaaaaaaaattggtggtgaaataataaatgcagatagtatgcaggtttataaagagcttaaaatattaactgcccgaccatcaatcaataataaaattaaatatcatttatatggttttttaagtgtaagaaataaattttcaacaggagattggcttaaattaactttgactaagataaaacaaattaaagcaaaaggaaaaatacctattctagttggcggcacaggactttattttaaatcattagttgatggtcttgctaaaataccaaatattccattaaaatatagaaattcgatacgtatagaacatagcaaaattggacaaaaaaaattttataaaaaattattaaaaattgatccaaaaattaaaaattatattaatccacaagatacacatagaactttaagagcatacgaaataaaaaaatttaccaaggtttcaatgatagattggttcaaaaaaacaaagaagtactttggggataaagattttgttaaaatatattttgatattcctaagaaatataccgattga

SEQ ID NO: 245019 - DNA, 874 bp, Unknown
  Bacterial polypeptide expressing nucleotide sequence isolated from the Sargasso Sea
acctaccgcttcaggaaaatctgaattagcaattaaatttgctaaaaaaattaatggagaaataataaatgcagatagcatgcaggtctataaagaattaaaaatattaacagctagacccattaaagaaaataccaataaaattaaacatcatttatatggctttcaaagtgttaaaaatgaattttctactggtcaatggttaaaattagttaaaaaaaaaataaaagaaataagaaataaaaataaaatacctattctggttggtggcactggtctttattttaaagctctgacagatggtttagttaagataccaaaaattcctaacgctattagaaatgaaataagatctaagcaaaaacaaatgggtcaaaagaagttttatttaaaacttttgaaactagataaatttgtaaaaaataaaatagtctctactgatatccaaagatctttaagggcctatgaagtgatttactttacaaaaaaatcaatctttgagtggtataaaaaaacaaaatcaaaatataaaataaatgaatttctaaaaatttatattgattatcctaaagagatattggtcaataaaatttcaaaaagggtagatcaaatgataaaagatggggcagttgaagaggtacaaaactttgaaaagctgaatttaaagagtgataataatctttataaagttattggcattaaagagataaaagattttattgataaaaaaacttcattgaaagaaatgaaactaaatattgtaataaaaacaagacaatacgctaaaagacagagaacttggtctagaggtcaaatgagtgattggcaaaaatttgatcctaaagagctctcaaaatttataaaaaaattataa

SEQ ID NO: 245020 - DNA, 820 bp, Unknown
  Bacterial polypeptide expressing nucleotide sequence isolated from the Sargasso Sea
gcctgagcgcgccattcttgatgaatttccccacgcgctgatcgacatccgcgacccggtcgagagttattcggcggcggaatttcgcgccgatgccctggctgccatggccgagagcgccgcgcgtgggcgtattccgctgctggtaggcggcaccatgctctattacaaggcgctgttggagggcttggccgatatgcccagcgctgacccggccatccgcgccgagctggaagcaagggccgcagccgaaggttgggaggcgctgcatcgggagctggctgaggtcgatccgcagtccgccgcgcgcatccatcccaacgatccgcagcgtctgacccgggcacttgaggtctatcgcgtgagcggcctgagcatgaccgagcatcgcctgcgccaggctgcaggaaatcccgatgcgggcacatcaggcaccgggcaattaccctatactgttgctcagcttgctatcgcaccagcgcagcgtcaggttttgcatgaccgcatcgctcaacgatttcgggtgatgttggaacagggtttcgtggaagaggtcgaagccctgcgtagacgaagtgacttgcacgcgggattgccgtctatacgggcggtgggttatcgccaggtatgggaatacctcgatggcgagctgtcccgggacgatatggtcgagcggggcatcatcgccactcggcaattggccaagcgtcagttcacctggctacgcggttgggagaacttgcattggctcgatagcctggcctgcgacaatttgtctcgcgccttgaaatacctggaaagcgtctccatattgaaatga

SEQ ID NO: 245021 - DNA, 436 bp, Unknown
  Bacterial polypeptide expressing nucleotide sequence isolated from the Sargasso Sea
aatggatttgaaatccaagattattttaatttcaggaccaacagcatcaggtaaatcaaattttgcagttaaacttgctaaaaaaattaacggtgaaataattaatgcagatagtatgcaagtttataaggaattaaaaattttatctgcaagaccaaatttaaaagattatcaaaaaataagacatcatctttatggttttcataatgtaaagaataatttttcaactggtgattggttaaaacttaccataaaaaaaattaatgaaataaaaaaaagaaaacatataccaatcttagttggtggaactggtttatactataaagctttaacagagggtttagttagaataccaaatattccaattcgatttagaaataaaataagatctttacataaaacattaggtcaaaaaaggttttataaaaagttatta

SEQ ID NO: 245022 - DNA, 805 bp, Unknown
  Bacterial polypeptide expressing nucleotide sequence isolated from the Sargasso Sea
tttgatatgtcaaaactggacaatatgtttttccgtggaaggtgaattgcgcaaagctgttttgattacaggaccaaccgctgcaggaaaaacagaaattgcgatggagctctatgatcggattggaggcgaaagtaaagccacactgattagcgttgactcggctctggtatacagaggtatgaatataggtactgcaaaaccacacaaagatgccttgataaaataccctcatgcattaatcgacattagagacccgcaggaagcttattccgcagctgattttgtgagtgacgcggacgaattactttataaagctacgaaagaagatcggcttcctattctggttggaggctcgatgctttacatcaaatgtcttcgggacggtatatctagattacccaagactgatccagaggtgcgtgcttatttagagcaaagagtggaacaaaatggtttgggcgaagtatataaagaattgaaagctgctgatcctgaagcggctatcaacattcatccgaataaccgacagcgggtaatgagagcaatggaagtgtttttggtaacaggaaagaatatttcgactttttggcttgaaaatcctgccaaaaatctccaccaacgtgttggatacgaaataacaagtttagcgatcgccccaaagcaaaggagagaccttgatcagaggattgaaagtcgttttcgtttaatgttggaagaagggcttcttgatgaggtgaggtctttaaggcaaattgacgggctgcatgagggtagcgcttcgatgcgatccgtaggctaccgc

SEQ ID NO: 245023 - DNA, 901 bp, Unknown
  Bacterial polypeptide expressing nucleotide sequence isolated from the Sargasso Sea
atggacctcaagtccaaaattattttaatctcaggcccgactgcttcaggaaaatcaaattttgcgataaagatagcaaaatatgtaaatggagaaattataaatgctgatagtatgcaagtttataaagaattaaaaattttaacagctagaccaaatgataaacaactaaaaaaaattaaacatcatctttatggttttcaaaatgtaaaaaaaaaattttcaaccggtatatggcttaaaaaaactctaaaaaaaattaaagagatacaaaaaagaaaaaaaattccaatattagttggtggtacaggtttatatttcaaggctttaactgaaggtcttgtaaaaattccaactatatcattaagaaaaagaaatcaaataaggaaacttcaaataaaattaggtcaaaaaaaattttatcaaaaattaattaatctagatcctttatctaaaaataaaatagatggaaatgatacacaaagatcaatcagagcttatgaaataaaaaaattcacatcaaaatctatatttaaatggtttgaagaaactaatattttatttagaccaaaaactttcattaaaatttatataaattttccaagagaggatttgattaaaaaaatcaatgatagagttaatcaaatgtttaaagatggggcagtaaatgaagtaaaaaattttataaagttaaaaatcaaagatgatcaaagtcctaataaagttataggcattaaagaaataacacaattcataaaaggcgacatatctttaagggaagccaaagaacaaatatgtattaaaactaggcaatatgctaagaggcaaagtacatggtcgaagggccaaatgcagtcgtggcaaagaattgaacccaaaaatttaaaattatcatcaataa

SEQ ID NO: 245024 - DNA, 434 bp, Unknown
  Bacterial polypeptide expressing nucleotide sequence isolated from the Sargasso Sea
tttgtcaaaaaaaataattcttttagcgggaccaacagcatcaggtaaatctaaattagctattcaattagcaaaaaaaataaatggtgaaattatcaacgcagatagtatgcaaatatataaagagtttactgtattatcatctagaccaatcgatagggaaataaataatcctaaacatcatttatatggtataatatctgtgagaaagaccttttctgctggagattggttaaagttaattaaatcaaaagttaaacaatgccacagcaaaaaaaaaataccaattatagttggtggcacaggtttatattttaacatgataaccagaggcctaagtaaaatacctagtatagactttgcaacaagaaacaaagtaaggcaattattcaaaaaacttggttataaaaatttttatcaaaaattaattaatt

SEQ ID NO: 245025 - DNA, 910 bp, Unknown
  Bacterial polypeptide expressing nucleotide sequence isolated from the Sargasso Sea
atggattttaaatccaagattattttaatttctggaccaactgcttcaggaaaatcaagttttgctattaagcttgccaaaaaagtaaatggtgaaattataaatgcagatagcatgcaagtttataagcaattaaaggttctttcagcaagaccagatcaaaaaaaatctcaaaaaataagacatcatttatatggctttcatgatattaaaaaaaatttttcaactgggaattggttaaaattagttttcaaaaaaattgaagaaataaaaaaaagaaaaaaaacgccaatccttgtaggcggtacaggtttatattttaaggcattaactgatggactagtaaaaattccaagcatacctgtaaagattagaaatcaaataagactaatgcattcaaaagtaggtcaagataagttttataataaacttttaaaacttgacccaacttctagaaataaaataaatccaactgatccgcatagatccataagagcctatgaagtaaaattacataccaagaaatcaattcatgaatggtacaaaaatactaaatctaattttcaaaaaagtgatttttataaaatttatattgactttccccgtttggaattgattgagagaattaatctcagatctaaggaaatgattaaaaatggagcaattaaagaagtaaaaaattttatcaaattaaaggtgaaaaaagacaaaagtgttaataaggccattggtatcaatgaaattagacaatacttaaataatgaaaaaaaattggaagatattattgaaaatatatcaataaaaactaggcaatacgctaaaagacaaagtacatgggcaaggggcaatatgaaaagttggcttaaattaaaaccaaacgagttaaataattttttaaaaaaaatttaaa

SEQ ID NO: 245026 - DNA, 737 bp, Unknown
  Bacterial polypeptide expressing nucleotide sequence isolated from the Sargasso Sea
tcatttatatggatttaaaagtgtaaaggacaattattttacaggaaattggcttaaggatgcaaagttaaaaattaataatattagaaaaaaaaataaaattccaattcttgttggtggcactggtttatattttaaagcgattattgacggtatagttaaaattcctgatattccaattactatgcgaaacagaataagaaaaagacaattaaaaataggacagactaaattttattctgagcttattaaactagactcactttgcaaaaaaaaaattaatcaaaatgacactcaaagatcaataagagcctatgaggtaaaaaagtttacaaacaaatctttgtttgattggtatagtgacacataccctgattttactaaagatagttttattaagttacatatcgattatcctagagagaaattaacagaaagaatttctttaagaacaaatgaaatgttgagagatggagcaattaaagaagctgagagattttataaattaagagtaaagaaagatttatcatctaataaagtcattggtctaagtgagattaaagaatatctggacaaaagaatagatctaagagaactgaaagaaaaaatatcaataaaaacaaggcaatatgccaagagacaatctacttgggcaagagggcagatgtctgattggcaaaaaataaaatttaatagacttgaaatatttttaaaaaaatttcctaaatcttcataga

SEQ ID NO: 245027 - DNA, 272 bp, Unknown
  Bacterial polypeptide expressing nucleotide sequence isolated from the Sargasso Sea
cttgcggaattggataaattgtttcttcgtggccggtaaaaatcaacgaaaacctgatgtgatttgcctaatggggcctactgcatcaggtaaaacaaatttagcagtggaactggtgaagctgcatccctttgagataattaacgttgattcagctcaaatttaccgcggaatggatataggtactggcaagcctagtcaagcgacactcaaagtagcaccccatcgtttgctagatatccgagatccggctgaaatgtactctgcggcag

SEQ ID NO: 245028 - DNA, 919 bp, Unknown
  Bacterial polypeptide expressing nucleotide sequence isolated from the Sargasso Sea
tttgtctaaaaaattagtactcttagcaggtcctacagcttcaggaaaatctaacttagcaatcaaattagcaaaaaaacttaatggtgaaattataaatgcagatagtatgcaaatttttaaagaatttactgttttgtcatctcgacctactttaaaccaaactaagaaagtaaaacatcatctttatggaataattacagtaaaaaaacatttttccgcaggtgaatggcttaaaaaagtaaaaattaaaataaacacttgtgtgaaaaagaaaaaaattccaataattgttggtggaactggtctatattttaatacaatcactaaaggtataagtaaaattcctgatattgatctaaaaacaagaaataaagttagaaacttatataaaaaacttgggattaaaaaattttacaatgcactaattaagcttgaccctaaaagtaaaggcagaatacttcctactgattcacaaaggattcaaagagcatatgaggtaaaacttaaaacaaaaaaatctctttatgattggtttgaaaagacaaaatctgattttttagaatttgatataagaaagatctttattgaaatcccaagagatatattacttaataaaatttcaaggagaacagaacaaatgtttaagaaaaaatgtattaatgaagtaaaaaaattcaataatcttaaagtcaataaaagtttttcatcaaataaattaataggcgttcaagaaataaacgattatttaaagggtttaataactctggaacagtgtaaaggtttaataaatattaagactaggcagtatgcaaaaagacaaaatacttgggctagaggccatatgaagaattggaacaagctttattcgaaaaatttctcaaatcttttaaaaaaatcattaaaagttgtaacctaa

SEQ ID NO: 245029 - DNA, 602 bp, Unknown
  Bacterial polypeptide expressing nucleotide sequence isolated from the Sargasso Sea
catggattttaagtccaagattatattaatttctggaccaactgcttcaggaaaatcaagctttgctattaagctagccaaaaaaataaatggagaaattataaatgcagatagtatgcaagtttataagcagttaaagatcctttctgctagaccagatcaaaaaaaataccaaaaaataagacatcacttatatggctttcatgatgttaaaaaaaatttttcaaccggaaattggttaaaattagttttgaaaaagattgatgaaataaaaaaaagaaaaaaaacaccaatccttgtaggaggtacaggtttatattttaaagcattaactgatggattagttaaaattccaaacatacctataaagattagaaatcaaataagagtaatgcattcacaaatcggtcaagataagttttataaaaaacttttaaaacttgacccatcttctaaaaataaaatcaacccaacagatccgcatagatctataagatcctatgaagtaaaattatataccaagaaatcaattcatgaatggtacaaaaatactaaatctaattttcaaaaaagtgatttttataaaatttatattaactttc

SEQ ID NO: 245030 - DNA, 718 bp, Unknown
  Bacterial polypeptide expressing nucleotide sequence isolated from the Sargasso Sea
attggatttccaaagtggcaaaaaaaacttctctactggtgattggcttaaattagttaacgataaaattttatactgtaaaaaaatgaaaaaaaccccgatactagttggaggcactggcctatattttaaagctctgacagatggcttggtaaatattccaaaaattcctagcaatttcagaaatgaaataagaaatttacataagagaataggacaaaaaaaattttttttaaaattattaaaaatagatcctttgatcaaagatcgagttaactacttagatgtacaaagatctataagagcatatgaaattaaatcatttacaaaaaaatctatgatcaattggtttaagaatacaaagtcaaattatgatcataatgacttttttaaaatttgtattgattttccaaggaaagatctaattgagagaataaataagagaactgagaatatgattaaatcaggtgcaattttagaagttaaaaagtttatcaaattgagagttccaaaaaataaaagccttagtaaagcaattgggattagtgagattaagcaatatcttcaaaaaaaaatccaaacggaacaattaatagagaaaatatcaataaagactaggcaatatgctaaaagacagagcacctgggctcgcggaaatatgaaagattggattaaagttaatcctgatggtttgtataagctcttaaaaaaaatttag

SEQ ID NO: 245031 - DNA, 702 bp, Unknown
  Bacterial polypeptide expressing nucleotide sequence isolated from the Sargasso Sea
aaaataaatattcaacaggagaatggctaaagcttttattaaaaaagattaaagatattcgtaaaattaaaaaagtgcctattatagttggaggcacaggtttatattttaaagctctaaccgatggtcttgtagaaataccaaatattccacttaaagtgagaaataagactagatcgatgcaaaaaaaattaggacaaaaaaaattttttaataaattattgaaacttgatcctaaaattaaaggcaaaattgataaaaatgatgttcaaagatctattagagcttatgaaataaaatataaaacaaagaaatcgatagttgattggttcaaaagaactaaaatttttttttcgtctgaagagtttataaaattttatatcgactacccaagaggtgaattactaaatagaatttattcaagggtagaatatatgtttaaaaacggagcaattgatgaagttagaaggtttaataaaattggagcaaaaaaggaaaatagttcaaataaagttattggaattgcagaaatcacaaatttattgaacaatcagtgtactcttcaagaggcaaaagacttaatttccattaaaacaaggcaatatgcaaaaagacaggtgacatgggcacgaggtcaaatgcagtcctgggaaaaaatcaatcccgaaaacctgaacttaattttaaaaaaattaaaataat

SEQ ID NO: 245032 - DNA, 913 bp, Unknown
  Bacterial polypeptide expressing nucleotide sequence isolated from the Sargasso Sea
tatgggacctacaggagttggtaaaacagatcttgctatagaactatatgcaaaattacccatcagaataattagtgtagattctgttcagatatacaaatttttaaatataggaagcggaaaaccctcaaagaaagttctaaaagactttcctcacgacttaattgattggatagagccgacagaaaactactcaactgcaagatttcaagacgatgttgtacgttccattaaggagtcattcgagtcaaatttaacacctgttttggttggaggaactatgatgtactttcatcatttaataaatggtatttcaaatttacccaatgttcctaaaaaaataagacaagatattgaagaggagtttagcgaaaaaggatcaaatgcaatgcatgaacatttaaaggagatagatgagaagtcttctttgaaaattcatccaaatgattcgcagagaataaaacgtgccatagaggtttataaagctaccggaaaaaagttttctgaatggctcgctgaacagaaagttgaagttaatccaatcattacagactctaatttgattcaaatcgctattaaacccgaagataaacaacttcatagagagtcagtagcaaaaagatttaataaaatgattgatgatggattggtttctgaggttgaaaatatacttaatatggaagggatgagtagcaattctcaatcaatgaagagtgttggctacagacaagtctgcgaattcttagaaggtggatataattttgatgatatgattgataaggctattaattcaactagacaactagccaagaggcaaatgacttggattagcggatggtccgatctagttcttttagaaaaaaataggacactaccaaaatctgtagaagacttaattttaaataattcatga

SEQ ID NO: 245033 - DNA, 373 bp, Unknown
  Bacterial polypeptide expressing nucleotide sequence isolated from the Sargasso Sea
ctggaagataaaccttttctggtggtggtcactggccccacttcaagtggtaaaagcagtcttggcctatggctcgcagaacagttggatggagaattgatttgctgtgattccatgcaggtttaccgcggtatggatattggcactgcgaagccaagagaaaccgaacggaaccgagtttctcaccatctttttgatctggttaatcctgatgaaacatactccgtgggaaggtttgttcgtgaatcggaagatgtcattaaaaagctgaaactacgaaaaaagatccccattttggttggcggaaccgggatgtatttacgttcacttctcttcggtttaagtcagatccccgaggtctcttccaacatca

SEQ ID NO: 245034 - DNA, 422 bp, Unknown
  Bacterial polypeptide expressing nucleotide sequence isolated from the Sargasso Sea
attgaaaactcaaatctattttgtattaggtccaacagcatctggaaaatcaaaatttgctttaggtctagctaccaaactaaatggtgagattataaatgctgatagtatgcagatttataatgagttaagtattttaactgctagaccaactataaatgatcaaaaaaaaatcaatcaccatctttatggttttgtaaaaggtgatgttagatttaatgttcaaaaatggtgtgaagaagcatcaaaaaaaattaattatttggttgataaaaatataacccctattttagttggaggcacaggtctttacatagaatctttaattaatggaatagtctcaattccatctattccagaaaaagtaaaaatagaatcagataaaatgattttaaaaattggtaaggataatttttttaatt

SEQ ID NO: 245035 - DNA, 451 bp, Unknown
  Bacterial polypeptide expressing nucleotide sequence isolated from the Sargasso Sea
atggaccttaagtccaaaatcattttaatttcaggaccaacgtcgagcggtaagtccaattttgcaataaaattagctaaaaaaattaaaggagaaataattaatgctgatagcatgcaagtttataaacaacttcaaattttaactgcgcgacctaagaaagaagatttaaaaaaaataaagcatcatttatatggtttttgcgatgtaaaaaaaaaatattcaacaggagaatggttaaagcttttattaaagaagattaaagatattcgtaaaagaaaaaaggtacccattatagttggtggaacaggtttatattttaaagcgcttaccgatggtttagtaaaaatacctaatattccaatcaaagtaagaaataaaattagattgatgcaaaaaaaattaggtcaaaaagagttctacaataaattattaaaacttgaccctttaa

SEQ ID NO: 245036 - DNA, 406 bp, Unknown
  Bacterial polypeptide expressing nucleotide sequence isolated from the Sargasso Sea
aatggaccttaagtccaaaattattttaatatcaggacctaccgcatcaggcaaaactaattttgcagtaaaacttgcaaaaaaaattagtggagaaattataaattcagatagcatgcaggtgtataaagaattaaaaatactaaccgcaagacctaagaaattagatcaaaataaaataaaacatcacctttttggttttcaaaccgtaaaaaacagtttttcaacaggaaaatggcttaagcttacattgttaaaaattaaagaaataaaaaaaagaggtaaagtacccatactagtcggaggaacaggtttatactttaaatcgattactgatggactaacaaaaattccaaaaataccgaataaattaagaaatcaaataagaaaaaaacagaaaaattta

SEQ ID NO: 245037 - DNA, 928 bp, Unknown
  Bacterial polypeptide expressing nucleotide sequence isolated from the Sargasso Sea
ttgaataaagaattacagcctaaagtggtttttttgatggggccaacggcgtcaggaaaaacggctttagctcttgaattagccgaaaagcataattgcgaaattatctcggttgattcagcattaatctatcgcggcatggatatcggcagtgctaagccctctgccgaggaattagcgcgaggtccgcatcgtttgattgatattcgcgatccgagtgaaagttattcggctgccgattttagagccgatgcgctgcgcgagattgaacagattatcagcatgggcaagacccctttattagtgggcggaaccatgatgtattttaaggctctattagagggattatcgccgctacccagtgctgatgaggctattcgcgccgatattcaagccgaggcggatacaaacggatgggaagcgctgcacgagcaattgagggagatagatcccgtctctgcagaaagaattcatcctaatgatccacaaaggctttcaagagcgttagaagtctatagaataagcggtaagagtttgactgagttaacaatgaccaagtcgactcctttaccctatgatgtggtgcaatttgccattgcaccgcgagagcgtaaagtgttgcatgcgttaatcgggcagcgttttcgcataatgttagagcaaggctttattgatgaagtcgtccagcttaaagcgagaggtgacttgcatttagatttaccctcaatgcgttgcgtgggatatcgacaatgttggcaatatctcgatggtgaatttgactatgatactatggtcgaaaaagccgttgccgctactaggcaattagctaagcgtcaattaacatggttgcgtagttggccagagttgaattggctggaaagtggtgctgaggggaatttagttacacttatgcgtcaatgccgctagc

SEQ ID NO: 245038 - DNA, 910 bp, Unknown
  Bacterial polypeptide expressing nucleotide sequence isolated from the Sargasso Sea
aatggaccttaagtccaaaataattttaatatcaggacccaccgcatcaggaaaatctaaattagcaattgattttgctaaaaaagtgaatggagaaataattaatgcagatagtatgcaggtctacaaagaattaaaaatattaacagctagacccataaaagaaaataccaataaaatcatacatcatttatatggctttcaaagtgttaaaaatgaattttccactggtcaatggttaaaattagttaaaaaaaaaataaaagaaataagaaataaaaataaaatacctattctggttggtggcactggtctttactttaaagcattaacagatggtttagttaagataccgaaaattcctaacactattagaaataaaataagatctaagcaaaaacaaatgggtcaaaagaaattttatttaaaacttttgaaattagataaatttgtaaaaaataaaattgtctctactgatatccaaagatctcttagggcctatgaagtgatttactttacaaaaatatcaatcttcgagtggtataaaaaaacaaaatcacaatataaaatagatgaatttctaaaaatttatattgattatcctaaagagatattggtcaataaaatttcaaaaagggtagatcaaatgataaaagatggggcagtcgaagaggtacaaaactttgaaaagctgaatttaaagagtgataataatctttataaagttattggcatcagagagattaaagattttattgataaaaaaacttcatttaaagaaatgaaactaaatattgtaataaaaacgaggcaatacgctaaaagacaaagaacttggtctagaggccagatgagtgattggcaaaaatttgatcctaaggggctacttaaatttataaaaaaattataa

SEQ ID NO: 245039 - DNA, 425 bp, Unknown
  Bacterial polypeptide expressing nucleotide sequence isolated from the Sargasso Sea
catggatttaaaatccaagataatattaatatctggacccacagcatcaggaaaatcaagttttgcaattaaagttgcaaaaaaagttgatggagaaattattaatgcagatagcatgcaagtatacaaagagcttaaaattttgtcagctagaccagatccaaaaaaataccagaaaataaaacatcatttgtatggttttcataatgtaacaaaaaacttctccacaggtgattggcttaagctagtaattaaaaaaattatagaagttaaaaaaagaaaaaaaaccccaattcttgttggagggacaggtttatactttaaagctttaactgatggtttagttataataccaaatatttcattaaaattaagaaatcaaattagagatttacaaaaaaaacttggacaaaagaagttttatg

SEQ ID NO: 245040 - DNA, 649 bp, Unknown
  Bacterial polypeptide expressing nucleotide sequence isolated from the Sargasso Sea
ttgcctaaaaaaattaataaaaaaatagtacttttatttggtcctacagcatctggaaaatcgagactagcgattgatatagcaaaaaaatatgatggagagatcttaaatgcagatagcatgcaggtatataaagaaattaaaatactctctgcgcgaccagataaaagcgaaattaaacatcatttttatggtttcatatcagcaaagaatactttttcagttggcaaatggtacgagttagtagcaaaaaaaataaaagagatacaaaaaaaaaataaaactcccattgtagttggtggtaccggactttactttagagcattaattgaaggtctagttacaataccaaaagtaaaaaaattagattattctcatttaaatcctattggaagatggatgatgggaaatcattatcataaaaaaaacccaacaatttttgagggcataaatagaaatgatattcaacgcgtttcaagagctatttcagtttacgaaggaacaggtttaactctaaaagaatggcaaaataaagagaataaaaaatactttaattcatctgactttattaaactatgtctgttacctccaaaagacgatttagaaaaaaaaataaatagtagatttatccaaatgttaaaaaaaggcg

SEQ ID NO: 245041 - DNA, 925 bp, Unknown
  Bacterial polypeptide expressing nucleotide sequence isolated from the Sargasso Sea
ttgaaacctcaaatctattttgtattaggacccactgcatctggaaaatcaaaatttgctttaagtctagctaacaaactaaatggcgagatcataaatgctgatagtatgcagatttatagagagttaagtatcttaactgctagaccaactgtaaatgatcaaaaaaaaattaatcaccatctatatggttttgtaaaaggggatgttagatttaatgttcaaaaatggtgcgaggaagcatcaaaaaaaattaattacttacttgataaaaatataaaccctattttagttggaggtacaggtctttacattgaatctctagttaatggaatagtttcaattccatctattccagaaaaagtaaaactagaatcagaaaaaatgatttcaaaaattggtaaggaaaatttttttaatttagttaaagaactcgatagtaatgcaatgaaaaatatttcacctaatgatattcaaagaataagaagaatttgggaagtaaatttttttactaagaaaaaatttagtgactggaaacaaaataaaaataaaaaattaattaatatggaagattataaaattttattgtttcttcctgaaaaaagtgaaaattataaaagagtagataatagaacacatgtaatgatacaagatggtgcaatagaggaagtcaaaaatttacttaaattaaattataataatagtttaccaataatgaaagctcatggcgttcctgaaattcaatcttatcttaataacgaagtatcaattaaagaatgtatttctaaaattcagcaggtaactagaaattatgtaaaaagacaacacacttggtggagatcttcaaatcttaatatttttaaaaaatttgaccaatttccagataaaattgaattaaaatccattaatttagaacaaaattgaa

SEQ ID NO: 245042 - DNA, 443 bp, Unknown
  Bacterial polypeptide expressing nucleotide sequence isolated from the Sargasso Sea
catggactacaagtccaaaatcattcttattgccggtcccacagcttctggaaaatcaaaaatagcaatcaacttagcgaaaaaaattaatggagaaattgttaatgcagacagcatgcaagtttataaacaacttaaaattctaacagcaagaccttcagaaaaagatcaaaaaactattaaacaccatttatttggcatcattgatgtacggaaaagattttcaacaggtcaatggcttaaagaatgtatcaaaataataaatttaattagaaaaaaaaataaaactccaattatcgttggtggaactggcctttattttaaagctttagtagatgggctagtaagcattccaaagttcaaaccttcagaaaaaaacaagatacttaagcttcataaaaaattgggccaaaagcaattttataaaaaattagtcaaattag

SEQ ID NO: 245043 - DNA, 910 bp, Unknown
  Bacterial polypeptide expressing nucleotide sequence isolated from the Sargasso Sea
aatggatttaaaatccaagattatattaatctcaggacctacagcatcaggaaaatcaagttttgcaataaagtttgcaaaaagagtaaatggagaaattattaatgcagacagcatgcaagtatacaaacagcttaaaattttatcggctagaccagatccaaaaaaataccagaatataaaacatcatttgtatggttttcataatgttacaaaaaacttctccacaggtgattggcttaagttagtaattaaaaaaatcgatgaagttcaaaaaagaaaaaaaaccccaattcttgttggaggtacaggcttatactttaaagctttaactgatggtttggttaaaataccaaatatttcattaaaattaagaactcaaattagagatttacaaaaaaaacttggacaaaagaagttttatgaaaaactattaaaattagatccatcctcaataggaaaaataaaacctgcagacactcaaagatctatcagagcttatgaagtaaaaaaatttacaaaaaaatctctatatgaatggtttaaaaacacaaaaacaaacttcatggaagatgatttttttaaagtttatattgattttcctagacaagaattaattgagcggattaatgtaagaacaacagagatgattaaaaatggagcaataaaagaggtaaatgatttcataaagctaagagttagaaaagataagagcgcgaataaggccattggagttaatgaaattagtgaatatttaaaaaaacaaaaaaatttgaatgatactagagaaaaaatagccataaaaactagacaatacgccaaaagacaaagtacttgggctagaggcaatatgatgagctggataaaactaaagccacaagacataaataattttttgaaaaaaatttaa

SEQ ID NO: 245044 - DNA, 604 bp, Unknown
  Bacterial polypeptide expressing nucleotide sequence isolated from the Sargasso Sea
aatgccttgataaatggaatttcgccactacctaagtctgatgaaaagatacgggacgaaataacacagcaggcacaacgcttgggttggtctaaattacacgacgaattacgtggtgtagacccaattagtggtgagagaattcaccccaatgacccacagcgaattacccgtgcgctggaagtgtacagaagtaccggcaagacgttgacacattggcaacaacaaaagggtgaaaagtgcccctataacattgcacaatttgccatagcgcccgcagacagggcagtgttgcacgaacgtatcgcgactcgcttcgatatgatgttggagcaagggttcgagaaagaagtagtaaagctctacgaacgaagtgatcttcacgaagatttaccttctattcgttcagtagggtacagacagatgtggcagtacctagacggccaattaagttacgcagagatgcgtgaaagaggcattatcgctacgagacagctcgccaagcgtcagcttacgtggttacggggctgggagcaggttacatggctagacacatttgctaacgataatttgactaaaattacagcgaaagtcacactttaat

SEQ ID NO: 245045 - DNA, 910 bp, Unknown
  Bacterial polypeptide expressing nucleotide sequence isolated from the Sargasso Sea
atgggacctactggaattggcaagactgatcttgcttttcagctttatgattctactgatatagaaattattggggttgattcagtccaagtgtataaacatctcaatataggaagtggaaagcctaataaagaacttctacggaaatatcctcataagttaatagatattattgagccgcacgaaaattactcaactggaaaattccaaaaagactgtataaaggaaattaaaacaatcaacacatcgaataagactccacttttagttggtggaactatgctctattttaaaaatctattttatggattatctaaattacctgaatcaacaaaagatattcgagatcaagtagaaatggaatgcaaaaaaaagggtctggaagcaatgtatgaatacttaattaaaatcgatcctaaatcagcaagtaatatccacccaaatgactctcaaagaatcaaaagagctatagaagtatatagattaactaataaaccaatatctctttggcgccaagaaagttatacagaggtgcatgaagacatcaagccttttaatgttttccaatttgcaattaagcctaaagataaggaattgcatcgtgagaaaattgcaatacgttttaaggatatgattgatatgggtctgatcaaagaagttgaagagattttgaatataaaacaaatgagcacagacaaaccttccatgaactctgtaggttataaagaagtctcagactacctaaatggtgatttatcctttgatgagatgatagcaagaggaataatagccaccagacaacttgcaaagagacaaatgacctggctgaggagttggaataaaataatatggcttgaagaagattccgttaacaatttaaaaataattttggattcaattaaaaaatgat

SEQ ID NO: 245046 - DNA, 556 bp, Unknown
  Bacterial polypeptide expressing nucleotide sequence isolated from the Sargasso Sea
atggatttgaaatccaaaattattttaatttatggtcctacagcttctggaaaatctaattttgcaattaaacttgctaaaaaaataaatggagaaattgttaatgctgatagcatgcaggtatataaagaattaaaaattttatctgctagaccactaccaaaaaattacaagaatattaagcatcatctgtatggttttcaaaatgtaaacaaaaatttttcctcaggaaattggttaaaattagttaataaaaaaattcttgatataagaaaaagaaaaaagatacctattctagttggtggcactggattatactttaaagccataactgagggtttagtaaatattcctaatattcctattcgaataagatcaaaaataagatttttacataaaaagcttggagtaaaaaagtttttttcaaaattaacaaaattagaccccgtatcaaaaaactttgttaaacctacagatacgcaaagagttattcgagcctacgaagtcaaattatttaccaaaagatcaatttatgattggttcaaaactacaagat

SEQ ID NO: 245047 - DNA, 913 bp, Unknown
  Bacterial polypeptide expressing nucleotide sequence isolated from the Sargasso Sea
atggaaaacaaaattattcttatagctggacctacagcatcgggaaaatcatcacttgcaaatacattggctaaaaaaatagatggtgaaataattaatgctgattcaatacaaatttataaagatttagaaatacttactgctcgacctaagccgaaagaaaatgaccctaatcaccacctttatggttttgtaaatggtgatgaattatggtcagtaggaaaatggattaatgaagcaaagaaaataactcaaaagattttaaaaaaaaattcaacacctattctcgttggcggaacaggtttgtattttaaagctatgactgatggattatcgccaattcctgatattaattacgaaataagaggcaggttaaaaaaagaattaaatataagaggtttagaaaaactatatggagagcttaaagttatagatattcaagcatatgaatcaatagatagaaatgatcaacaaagaattttaagagctttagaagtatttagaggtactggtaaaaagatatctgattattggaaattggagagaataaaagtttttgaagataattttataaaaattaaacttaacaccgacagagagaagctttaccaaaactgtgatgatagatgcgatcatatgtttcaattaggggtaatagaagaagttcagtctttaatagataagaattatgatgataaagcgcctattttaaatgcaattggcgttagtgaaattaaagaatatttacaaaaaaaaattaatattgatgaagttaaagatttgattaaatttagaactcatcaatatgcaaaaagacaaataacatggttaaaacatcagatgatttcatggaaaagcttttctacgcaagaatcagataaaataatagattattttattaaaaaattataaa

SEQ ID NO: 245048 - DNA, 910 bp, Unknown
  Bacterial polypeptide expressing nucleotide sequence isolated from the Sargasso Sea
aatggattccaaatccaaaattattttaatttatggtcctacggcatctggaaaatctaattttgcaattaaactagctaaaaaaattaatggtgaaattgtaaatgctgatagcatgcaggtatataaagaattaaaaattttatctgcgagaccactcccaaaggattacaagaatattaaccatcatttatatggatttcaaagtgtaaaaaaaaacttttcttcaggggattggttaaaattagttaataaaaaaattctagatataaaaaaaaggaataagacacctattcttgtgggtggtaccggattgtactttaaagcaataacagagggtttggtgaatataccaaatattccaattcgattaagatcaaaaataaggttgttacataaaaaaatcggaacaaagaagtttttttcagaattagtaaagttagatcctatatcaaaaaactttgttaaacctacagacactcaaagaataattcgagcttatgaggtaaaattatttacaaagagatcaatttacgattggtttaaaagtacacgatctgattatgaaaatgatgattttttaaaaatttatattgattatccaagagttgaattaattaagagaattagtgatcgtactaaagatatgattaaaaatggagcaatatcagaggtaaaaaaatttataagattaaaagttccaagagttaaaactgcctcaaaggcaattggtattgcagaaatcagagaatatctcgagaaaaaaataggaatatcagaggtagttgagaaaatatcaataaagactaggcaatacgctaagagacaatctacttggggcagaggcaatatgatggattggaacaaaataaagtcagtggatctaaataaatttttaaaaaaaatttag

SEQ ID NO: 245049 - DNA, 526 bp, Unknown
  Bacterial polypeptide expressing nucleotide sequence isolated from the Sargasso Sea
atggaccttaagtccaaaatcattttaatcgcaggcccaacagcaagtggaaaatcaaacttttcattaaaattagcgaaaaaaattaatggtgaagtcataaacgctgatagtatgcaggtctataaacaatttcaagttttaacagcaagacccatcaaaaaagatataaaaaaaattaaacatcatctttatggtttttgtgatgtaaaaaaaaatttttcaacaggaaaatggctaaagctttcaataaaaaaaataaaggaaattcgaaaaaaaaagaaagtcccaataattgtaggtggaacaggattgtattttaaggctctaactgatggtttagtaaaaatacctaatattccaattagattaagaaacaaaattagaataatgcaaaaccaattaggtcaaaaaaaattttataaaaaactattaatgcttgatcctttgataaaaaataaaattgaaaaaaatgatattcagagatctataagagcatatgaaattaaatatcacacaaaaaaat

SEQ ID NO: 245050 - DNA, 715 bp, Unknown
  Bacterial polypeptide expressing nucleotide sequence isolated from the Sargasso Sea
tatgctttcaaagtgtaaagaaaaattttctacaggggattggttaaaattgattgatcagaaaatttctaatttaaaaaaaaggaaaaaagttccaattatagttggaggcacaggtttgtattttaaggcattgactgatggcttagttaatattccaagccttccaataaaattcagaaaaaagattagatcgttacataaaaagattgggcctaaaagatttttttcaaggttaataaaattagatcccttagttaaacataatctcaattactcagatactcaaagatgtataagagcttatgaagttaaatcatttactaaaacttctatttatcattggttcaaaaaaactaaatctaattatgaacagaaagatttttataagatttatatagattttcccagaaatgagcttttagatagaattagtttaagagctaaagaaatgattaaaaaaggagccgtattggaagtaaaaagatttattaaaataaaagttcgtaaagacaagacagcccacaaagccattgggattaatgagattgctcaatatattcaaaaaaaaattgaaattaatcaagttatcgagaaaatatcaataaagacaaggcaatatgccaaaagacaaagcacttgggctagaggcaacatgcaaaattggatcaaaatgaaaccaactgtcttaaagaaattcttaaaaaaaatttag

SEQ ID NO: 245051 - DNA, 883 bp, Unknown
  Bacterial polypeptide expressing nucleotide sequence isolated from the Sargasso Sea
catggatttaagatccaagattatacttatatctggacctacagcttcaggaaaatcaagttttgcaattaaagttgcaaaaaaagtccatggagagattattaattcagatagcatgcaagtatacaaagagcttaaaatcttatcagctagaccagatccaaaaaaatatcagaaaataaaacatcacttatatggttttcataatgtaacaaaaaacttctcaacaggtgattggcttaagcttgtaattaaaaaaattatggaagttaaaaaaagaaaaaaaactccaattcttgtcggagggacaggtttatactttaaagctttaactgatggtttagtcaaagtaccacatatttcacttaaattaagaaaccaaattagagatttacaaaaaaaacttggacaaaagaggttttatgaaaaactattaaaattagatccgtccataagaggaaaaataaaccctctggacactcaaagatccatcagagcttacgaggttaaaaagtttacaaaaaaatctctaactgaatggtttaaaaacacaaaatcaaactttgtggaagatgatttttttaaagtttatatcgattttcctagacaagaattaattgagcgtatcaatgtgagaacaaaggagatgatagaaaatggagcaataaaagaagtaaatgatttcataaagctaagagttagaaaagataaaagtgccaacaaggctatcggagttaatgaaattacagaatatttaaaaaaacaaaaagatttgaatgatactagagataaaatagccataaaaactagacaatacgccaaaagacaaagtacttgggctagaggtaacatgattagttggatgaaactgaagccacaagac

SEQ ID NO: 245052 - DNA, 848 bp, Unknown
  Bacterial polypeptide expressing nucleotide sequence isolated from the Sargasso Sea
tttgattctagaagaaaaaccttttctggtggtggtcactggccccacttcaagtggtaaaagcagtcttgcaatatggctggcagaacagttgggtggagaactgatttgctgtgattcaatgcaggtgtattgcggtatggatattggcactgcgaagcctacagaaaccgaacggaaccgggtttctcaccatctttttgatctggttaatcctgatgaaagctattccgtgggaaggtttgttcgtgaatcggaagaagtcattaataagctaaaactgcggaaaaagatccccattttggttggcggaaccggaatgtatttacgttcactgctctccggtttaagtcagatccccgaggtctcttccaacatcaaacttcaggtaaaaaaatggcagaaagagaagggaacacctgcgtgctggcagaagttgaaagaagttgatccggaaggagcagaaaaattacatcccaacgatacgtcgagaatcatgcgtgcacttgaagtggtgatttcgagcggacagcctatttccagttttcaaggcaatgacgctccaattggcccaaaataccctttttacggaatgatttgcgaccgtccgagacaagaactctatgatagaatcaaccggaaaactctagaaatgatggatcagggctggatcgatgaagtccgaaaattgatggcccgataccctgaaaaccttaaaccttttcagtccattggatatcgggagattatccagtttctgagaggggaactggaatcatccgatctggtaccgctaatccaacaacggactcggcagtatgccaaaaggcaattaacatggtccgcaa

SEQ ID NO: 245053 - DNA, 937 bp, Unknown
  Bacterial polypeptide expressing nucleotide sequence isolated from the Sargasso Sea
tttgactaatagattaaattttcaaaaaaaattagttcttattgctggacctactgcatctggaaagtctcgcctagcaatacatttagcaaaaaaaattaaaggagaaattattaacgctgatagtatgcaggtgtacaagcaattttccgttttaacttctagaccttcaagctcagatctcttaaaagttaaacatcacctttacggttttttgtctgtaaaaaaatacttttcaactggtgaatggttatctttagcaaaagataaaattaaccaatgcattaaaaaaaagagaatacctatattagtcggtggtactggcttatattttaacgccataactaaaggcatgagtaaaattccacagattgactctaatttaaggtacagcataaggttattacataaaaagataggtcaaaaaaaattttataaaaaacttatagcaattgacccttcatctaaaagaattatttctgaaacagatacacaaagaaccttaagagcatatgaagttaaaaaatcgacaaaaaaatctatatttgaatggtcctctaacacaaaatctgaatttttagactttgaaatcaaaaagatatttataaatattccaaaagaggaacttctaaaaaatattactaaaaggacagaattgatgttcagaaataaatgtaccgaagaagtaaaaaatttcttgaagttaaaaatagacaatactctctcagcaaataaaataattggggtaagggaaatttccaactatttagatggtattaaaggtaaaacagaaactattgacctcataaaaattagaactaggcagtatgctaaaagacaaaacacttggtctaggggccatatggccacttggaaaaagctttattctaaagatttttcaattctttttaaaaaagttttaaaagaaacaacctaa

SEQ ID NO: 245054 - DNA, 313 bp, Unknown
  Bacterial polypeptide expressing nucleotide sequence isolated from the Sargasso Sea
aatgaagaaaaaaaaaataattatagtagtttctgactattataatgatctatcaaatagaataacagagaatataattaaaagaataaaaacaaaatatatttttaaaattgttaaagttcctggagcttttgaaataccagtaactattagtagaaaaattaaaaattttgatgctgctatagctgttggatgtattattaaaggcaaaacacctcattttgatcatatcgcgagagcttctatagatggtatcatgagagtttcattagataataaaaaaccaataggaaattgtattttaacttgtttg

SEQ ID NO: 245055 - DNA, 484 bp, Unknown
  Bacterial polypeptide expressing nucleotide sequence isolated from the Sargasso Sea
aatgtctactaagaaagctggtaaaaatttaactagatcttttaaaattattaatcctgagaaaatcaaaatcgcatgtgttatatctgaatggcacagtgaaatcactgaaaatctttttattggtgttaagaaaaaattaatgatgcatggtttaattgagaaaaatatacatgaaattcatgttcctggtagttttgaactaatttttggaactaaaaccttaatcaataaagactatgatgcaataatatctataggttgtataataaagggtgagacaaaacattttgattttatttctgatgctgtaatcaaaggaattaaagatttaaatgttttatctgatactccaataattctttgcgtaacaactgacaataatattcaacaatcgatagataggagtgggggtaagtatggaaataaaggtgaggattcagcagaagctgctttaaaaatgattttaattaactctaaataa

SEQ ID NO: 245056 - DNA, 663 bp, Unknown
  Bacterial polypeptide expressing nucleotide sequence isolated from the Sargasso Sea
attgttagtatccacatttgcaattgcaaatgaggtaaatattttcaatgcaagacattacaaagctgacgctgaactttacgataagtttacagcagcaacgggaattaaagtaaatttaattaacggtaaatcaggtgctttagaaaaaagaatgattgaagaaggcactgattcttcagcagatctttatattacagctgacgctggaagatgtggtgcatttcaagcaaaaggtatgacgcaaagtggattaacttcagcgacaattaaatcatctgttccaaaaaattttagaacatcacactgggttggagtagctaaaagagcaagaataatttattactcaccagaaagagttactggtgctgaattgtccggaatgtcttacgaaggtttggctgatccaaaatggaaaggtagattagtaataagaaaatctagcaacatttataacaaatctcttgtagcttcattaatcgcaaataatggaaaaaaagctacagcagaatgggcaaagggagttgttgcaaatatggcaagaccttctgaaggaaacgatagagctcaaattatggctgtagctgctggagaagcagacatagctgtagctaatacatattatttagctcttatgttatctggaaacaaaggcgcagaaca

SEQ ID NO: 245057 - DNA, 448 bp, Unknown
  Bacterial polypeptide expressing nucleotide sequence isolated from the Sargasso Sea
atctacagggaacgacagagctcaaattatggcagtagctgctggagaagctgatattgctgtagctaacacatattatttagctcttatgctatctggtaacaaaggtgcagaacaacaagaagctgctaaaaaagttaaagcatttttcccaaaccaagatggtagaggaacacatatgaatattagttgtgctgctttagttaaaggtgctccaaacaaagcaaatgcaatcgcacttgttgactttttattatcacctgaagctcaagagcactttactaataatacttttgagtttccaatgattgctggtgtttcaccaagtccattagtagtaaacaatttgggattagattttaaacaagatctaaaaacaaaagtttctagttatggaaaacaccaagctgctgcactagaagtaatgacagctgctggttggaagtaa

SEQ ID NO: 245058 - DNA, 811 bp, Unknown
  Bacterial polypeptide expressing nucleotide sequence isolated from the Sargasso Sea
aatgaaaaaagtaacaataataagtttatttgtttctttaatagtctcgtcttttgcttttgcaaatgaagtaaatatcttcaacgcaagacattacaaggcagataatgagctttatagcaaatttaccaacaaaactggaattaaagtaaacctgattaatggaaaggctagtgcattagaaaaaaggatgattgaagaaggcaccgattcttctgctgatctttatattactgctgatgctggaagatgtggagctttcaaaactaaaggaatgacacaaagtggcttggtgtctccaacaattaaatcttctgttccaaaaaattttagaaccacacactgggtaggagtagcaaaaagagcaagaataatttattactcaccagaaagagttagtggtgctgaattatcaggattaacatacgaagatctagctgacccaaaatggaaaggtagattagtaattagaaaatcaagtaacatttataacaagtcacttgtagcttcattaattgagaataatggaaaaaaagctgctgctgaatggtctaaaggagttgtttctaacatggcaagaacaccaaaaggaaacgatagagctcaaattatggcagttgcagctggagaagctgatattgctgtagcaaatacttattacttagcacttatgttatctggtaataaaggagcagaacaacaagcggctgctaagaaagttaaggcattttttcctaatcaaaatgatagaggaacacacatgaatattagttgtgcagctttagtaaaaggagctcctaataaggcaaat

SEQ ID NO: 245059 - DNA, 463 bp, Unknown
  Bacterial polypeptide expressing nucleotide sequence isolated from the Sargasso Sea
atgaaaggtttagactctaatcaaatatctcaagaatctaaaaaaaaggtctatgctataacgtacacaagttggaatagtgagatcgtgggaagccttctagatgaagtaactaaagaacttctcagaaatggggtagacgagaaaaatattttaagcaaagaagtgcctggagcattcgaattacctctagcttctaaagtttatgctttgaaagaaaaggtagacgttgttatagctctcggtgccattattagaggtgatacacctcattttgactatatctcaaaagcatgtatcgaaggtttaatgactgcttctcttgagacaaaaaagccaatagtctgtggcgtcttaactacggatgacattgcacaagcacaaaagagatctgatccaaatcaaatgaataaaggtgctgaatttgccgtaacggcaatgagtatggctggccttgactagt

SEQ ID NO: 245060 - DNA, 431 bp, Unknown
  Bacterial polypeptide expressing nucleotide sequence isolated from the Sargasso Sea
atggttatggtataaaaattacaaaacaagaattaatttgatgaaaaaaaaatatctaattgttgtagcagattattataaagacatttctgaaggcttaataaaaagtgcattaaaaataatttcaaaaaaaaatataataaaaattattaaagtacctggtgcttttgaaatcccagttacaatctcaaaaaatataaaaaaatttgatggttttttagccttaggatgtgtaatcaaaggtcaaactccacatttcgatttcatttctcaagcatcaacagatgccataatgaaattgtctatagatagtaaaaaacctattggaaatggaataattacctgtcttaatatgacccaagcaagagcaagaagaaaaaagggtgctgaagctgcaaaagcagtgatttcagttctatctcaaaaatgag

SEQ ID NO: 245061 - DNA, 451 bp, Unknown
  Bacterial polypeptide expressing nucleotide sequence isolated from the Sargasso Sea
atggctacgaaaaaaaataatatccatattgcaattgtagctagcaattttaatagagatattgtcgatcgtttatatagcggagccatttcaacgttagaaaaaaatggaataaatgaggaaaaggtaaaagttgttagagttcctggcgcatttgaaattccagtcacagttaaatcattacttgataagaaacaatataatgcaattattacactcggcgtaattataagaggagaaacacctcactttgagtatatttcaaatgcatgtgcccatggaatttcacagctagcaataaacagtggaacccctataatcttcggagttttaacagtggacaataaaacacaagcagagaagagatctaatattgatccgatggaaaagaataaaggatcggaagcagcacaagctgcattagatatggttgatttggattggttatgag

SEQ ID NO: 245062 - DNA, 754 bp, Unknown
  Bacterial polypeptide expressing nucleotide sequence isolated from the Sargasso Sea
acccaaagtggtttggtgtctccaacaattaaatcttctgttccaaaaaattttagaaccacacactgggtaggagtagctaagagagcaagaataatttactattcaccagaaagagttagtggtgctgaattatcaggtcttacatatgaaggtctagctgatccaaaatggaaaggtagattagtaattagaaaatcaagcaacatttataacaaatctcttgtagcttcattgattgagaataatggaaagaaagttgctgctgaatggtctaaaggagttgttgctaatatggcaagaacacccaaaggaaacgacagagctcaaattatggcagttgcagctggagaagctgatattgctgtagcaaacacttattacttggcactaatgctatctggtaataaaggagcagaacaacaagcggctgctaaaaaagttaaggcattttttcctaatcaaaatgatagaggaacacacatgaatattagttgtgcagctttagtaaaaggagctcctaataaagcaaatgctattgctcttgttgactttttattatcaccagaggctcaggaacattttacaaataatacttttgagtttccaatgatagctggagtatctccaaatccattggtagtgaataatttaggattagattttaaacaagatttaacaactaaagtttcaagctatggaaaaaatcaagctgctgcattagaggtaatgacagctgctggatggaagtaag

SEQ ID NO: 245063 - DNA, 433 bp, Unknown
  Bacterial polypeptide expressing nucleotide sequence isolated from the Sargasso Sea
gatgaaatattggctaattaaaacagaacccgaagaatggtcatggcaacaacaagtaaaatccggcaataaaggagcggaatggagtggagttagaaattttcaagcagcaaaaaacttaagagagatgaaaataggtgataagtgttttttttatcataccggcaaatcaaaaagtattatgggtatagttgtaattgctaaagaagcttttttagataaatcagataaaactcgaaaatttgtatcggtaattgtaaaagctttatatcccctgaaaagagaagtaagtttaaaagaaatcaaaaaaaataaggcttttagagatttttctctagttaaacaaagtcgcttatccgttatgagtgttagtttaaaacactggaaaaaaatatgtaagatgggtagagttttatatctaggggtattttta

SEQ ID NO: 245064 - DNA, 286 bp, Unknown
  Bacterial polypeptide expressing nucleotide sequence isolated from the Sargasso Sea
aatgaaaattaaaatttgtattatcatgtctagatacaataaagatattactaataaactattctccagcgcaaaaaaagttttacaaaaagaattaaaaaaaaaaatttatatagatttaatagaagttccaggagcctttgaaatacctgtatcaatatcaagagttgtaaaaaaatatgacgggtttattgccattggatgtattattaaaggtgaaacagcaaatttcaatttaatttctagcgctataactaacgcaattatgcaaatatctattaatgaa

SEQ ID NO: 245065 - DNA, 325 bp, Unknown
  Bacterial polypeptide expressing nucleotide sequence isolated from the Sargasso Sea
atgaataaaaaatatttaattgttgtagcagattattataaagatattgctgaaggcttaataaaaagtgctttaaaaataattccaaaaaaaaatataataaaaattattaaagtgcctggtgcttttgaaattccagttacaatctccaaaaatttaaaaaaatttgatggttttttagctttaggatgtgtaattaaaggtcaaacaccgcacttcgattttatttctcaagcatcaacagatgccataatgaaattatctatagatagcaaaaaaccaattgggaatggaataattacctgtcttaatatgactcaagcaa

SEQ ID NO: 245066 - DNA, 322 bp, Unknown
  Bacterial polypeptide expressing nucleotide sequence isolated from the Sargasso Sea
aaatattcatgaaattcatgttccaggtagttttgaactaatctttggaacaaaaactttaatcaataaagactatgatgcaataatttctataggttgcataataaagggtgagacaaaacattttgattttatttctgatgctgtaataaacggaattaaagatttaaatatattatctaatatcccaataattctttgtgtaacaactgacaacaatattcaacaatccattgataggagtgggggtaagtatggaaataaaggtgaagattcagcagaagctgccctaaaaatgattttaattagttcaaaaaaatag

SEQ ID NO: 245067 - DNA, 882 bp, Unknown
  Bacterial polypeptide expressing nucleotide sequence isolated from the Sargasso Sea
aatgaaaaaagtaacaataataagtttatttgtttctttaatagcctcatcttttgcaattgcaaatgaagtaaatatcttcaatgcaagacattacaaagcagacaatgagctttatagcaaatttaccaacaaaactggaattaaagtaaacctgattaatggaaaggctggtgcattagaaaaaagaatgatcgaagaaggcacagactcttctgctgatctttatatcactgctgatgctggaagatgtggagctttcaaagctaaaggaatgacccaaagtggtttggtgtctccaacaattaaatcttctgttccaaaaaattttagaactacacactgggtaggagtagctaaaagagcaagaataatctactattcaccagaaagagtaagtggcgctgaattatcaggtcttacatacgaaggtctagccgatccaaaatggaaaggcagattagtaattagaaaatcaagtaacatttataacaaatctcttgtagcatcattaattgaaaataatggaaagaaagctgctgctgaatggtctaaaggagttgttgcaaatatggcaagaacaccaaaaggaaacgacagagctcaaattatggcagttgcagctggagaagctgatattgctgtagcaaacacttattacctagcacttatgctatctggtaataaaggagcagaacaacaagcagctgctaaaaaagttaaggcattttttcctaatcaaaatgatagaggaacgcacatgaatattagttgtgccgctttaattaaaggagctcctaataaggcaaatgctatcgcacttgtagacttcttgttatcaccagaggctcaggaacatttcacaaataatacttttgagtt

SEQ ID NO: 245068 - DNA, 933 bp, Unknown
  Bacterial polypeptide expressing nucleotide sequence isolated from the Sargasso Sea
cgattctgactcattgactaagtcagcaatgactatgacaattactacagatgaagtgttagcttcacctccaactgtatcgatttttgatgaatcatacggatctggttcaacttacggagctcatgcttctgatagtgatcttaacaacttaggcgctgcagcttcagttacagttactttgtctgacacaactattgttgatacagataaagatggttcattcattgatgaactagtacttgctggtgcaactggtgttcatcctgttactgcggctactctagtaaatctagagattacagctgcttcaaacagctctgatgatgcttcagttacaataaagaacaataactcagctgctcttgcaaatgattcagctgacaaaataagaatctctggtaactttgatgctggtgctggtggtactgttgctacatctacaactgttgcagctgaaggtacagttacggctgttgctcaagattcaaaaacttataaagctacatttagtggatctgcattctcggatgctgctgctaatgattcaaaagctgttgtagtatcagcaactgatgcttcaacttcaccaaacacaggaactgttggtactagagatcaagggtctgcatctgtctataaatttagactagataagactgctcctgttttgaagaatgatccagatggtgatggtgctgttggttcaacaacaacacttccaagaccatatgtgatttttgaattcacagataactcaaatgttactgttgtttcagcttcattcggtggagatgatgtactagctagcctagctacaacaaataataagaagtacttcatggtaccttctgcagatcttactgctaaaacttatgttataaaagctaaaggtacagacttagctggtaacaaaggtgctgaaggcacata

SEQ ID NO: 245069 - DNA, 799 bp, Unknown
  Bacterial polypeptide expressing nucleotide sequence isolated from the Sargasso Sea
aatgaaaaaagtaacaataataagtttatttgtttctttaatagtctcatcttttgcaattgcaaatgaagtaaatatcttcaatgcaagacattacaaagcagacaatgagctttatagcaaatttaccgacaaaactggaattaaagtaaatctgattaatggaaaggctggtgcattagaaaaaagaatgattgaagagggctcagactcttctgctgatctttatatcactgctgatgctggaagatgtggagcttttaaagctaaaggaatgactcaaagtggtttggtttctccaacaattaaatcttctgttccaaaaaattttagaactacacactgggtaggagtagctaagagagcaagaataatctactattcaccagaaagagtaagtggtgctgaattatcaggtcttacatatgaaggtctagccgatccaaaatggaaaggcagattagtaattagaaaatcaagcaacatttataacaaatctcttgtagcatcattaattgaaaataatggaaagaaagctgctgctgaatggtctaaaggagttgttgcaaatatggcaagaacaccaaaaggaaacgacagagctcaaattatggcagttgcagctggagaagctgatattgctgtagcaaacacttattacctagcacttatgctatctggtaataaaggagcagaacaacaagcagctgctaaaaaagttaaggcattttttcctaatcaaaatgacaggggaacgcacatgaatattagttgtgccgctttaattaaaggagctcct

SEQ ID NO: 245070 - DNA, 752 bp, Unknown
  Bacterial polypeptide expressing nucleotide sequence isolated from the Sargasso Sea
acaaggtggattaatatctccaactatcaaaaattctgtaccaaaaaactttagaacatctcattgggttggtgtagctaaaagagcaagaatagtttactacgcaccagagagagttagtggtgctgagttatcaggattaacttatgaaagtctagctgatccaaaatggaaaggtagaattgcaataagagcatctagcaatatttacaataagtcacttgtagcttcattggtaaaaaataatggaaaaaaagcaactgcagagtgggctaaaggtgttgttgcaaacatggcaagagatccaaaaggaaatgatagagctcagattatggcagtagcagctggagaagctgatattgctgttgctaatacatattacttagcacttatgctttcaggaaataaaggtgcagaacaacaagctgctgcaaaaaaggttaaagcatattttcctaatcaaaatgatagaggaacacatatgaatattagttgtgctgccctagtaaaaggagctccaaataaagcaaatgcaattgcacttgttgattatttgttgtcaccagaagctcaagaacattttactaataatacttttgaatttccaatgattgctggtgtttcaccaaatccattagtagtaaacaatttaggtttagattttaaacaagatctaaaaacaaaagtttctagttatggagctaaacaagcagatgcgttagaagtaatgactgctgcaggttggaaatagc

SEQ ID NO: 245071 - DNA, 372 bp, Unknown
  Bacterial polypeptide expressing nucleotide sequence isolated from the Sargasso Sea
acttagctcttatgctatctggtaacaaaggtgctgaacagcaggaagctgctaaaaaagttaaagcattttttccaaatcaagatggtagaggaacacacatgaatattagttgtgccgctctagttaaaggtgctccaaataaagcaaatgctattgctcttgttgattatttattatcacctgaggctcaagagcactttactaataatacttttgagtttccaatgattgctggtgtttcaccaagcccattagtagtcaacaacttgggattagattttaaacaagatctaaaaacaaaagtttctacttatggaaaaaatcaagctgctgcattagaagtaatgactgctgctggttggaaataaa

SEQ ID NO: 245072 - DNA, 640 bp, Unknown
  Bacterial polypeptide expressing nucleotide sequence isolated from the Sargasso Sea
aatgttcactggcattattgaagagcttggagatatgcattccatacgctcgcatggtgatggatgccgtctgaaaattaacgcccacaccatacttagtgatgtatccattggggattcaatttctgtgaatggttgctgtttaacagtcgttgagtatgaaaataaaagttcagactcctggtttgctgtagatgtagttccagagtccttaagtttgacaaccatggggaaattggctgaaagggaaattgtcaaccttgaacgctctatgtcagcaaatggtcgatttggtggccatgtagttcaaggtcatgtagacgccatcgcggaggtattacacatccacgatcatgaagacggatcaaaacgcttaactttcaatatccctaaggatgtatctggtcaaattgtcagaaaaggatctgttgctcttgatgggattagcctcactgtcgccagcactaaccaagaacaaggaacttttgatattgcagtgataccacacactcttgaagtcacaacgcttggaaaaaaaatagttggagatcaagtcaacgttgaagctgatttgtttgcccgttatatcgcagggatcatcaatagcgattcatatgtagctctgaaaggaaaaaaataa

SEQ ID NO: 245073 - DNA, 725 bp, Unknown
  Bacterial polypeptide expressing nucleotide sequence isolated from the Sargasso Sea
tatgtctttatttgtatcggcttttgcagttgcaaatgaagtaaacatattcaatgcaagacactataaggctgatgctgaaatgtatgataaatttacagcagctactggaattaaagtaaatttaattaatggtaaatcaggagctttagaaaaaagaatagccgaagaaggagttgattcttcagctgatctttatatcaccgcggatgctggaagatgtggagcaatggatgctaaaggtttgcttcaaggcggtttatcatccaaaacaataaaagcatctgttccaaaaaacttcagaacaaacaaatgggttggagtagcaaaaagagcaagaataatttattactcacctgaaagagtaagtggtgctgaattatctggtttaacttatgaaggtttagctgatccaaaatggaaaggtagattagtaataagaaaatcaagcaatatttataacaaatcacttgtggcttcattaatagaaaataatggaaaaaaagctacagctgaatgggcaaaaggtgttgttgcgaacatggcaagagagcctaaaggtaatgacagggctcaaattatggctgttgcagcaggagaagcagatattgcggtagcaaacacttattatttagcacttatgttgtctggtaataaaggtgcagagcaacaagcagctgctaaaaaggtaaaagcatttttccctaatcaaaacgacagaggaa

SEQ ID NO: 245074 - DNA, 358 bp, Unknown
  Bacterial polypeptide expressing nucleotide sequence isolated from the Sargasso Sea
catcgcggatatttcagtccgttgggttcccggcgctttcgaaatcccatttacatgccaagaggtaatcgacaagacacacgtagacgcaatcattgctttaggctctgtagtcaaaggtggaactccgcattttgatttcgttgctggagagtgcataagagggattcaagcagtgagcctctcgacgaaaaccccgatctctttgggggtgctaactaccaacacctacgaacaagccctagaaagatcagatagcagctacgtcgatcatgacggatcctccggagataaaggcacatcagccgcagaggctgcgattactatgattcgactggtccggtcattgactggctaa

SEQ ID NO: 245075 - DNA, 548 bp, Unknown
  Bacterial polypeptide expressing nucleotide sequence isolated from the Sargasso Sea
catttacaacaaatctcttgtagcttcattaattgagaataatggaaaaaaagctactgctgcttgggcaaagggagtggttgctaacatggctagagaatctacaggaaacgatagagctcaaattatggcagtagcagctggtgaagctgatattgctgtagctaacacatattatttagctcttatgctatctggtaacaaaggtgcagaacaacaagaagctgctaaaaaagttaaagcattttttccaaatcaagatggcagaggaacacacatgaatattagttgtgccgctctagttaaaggtgctccaaataaagaaaatgctatagctcttgttgactatttattgtcaccttcagctcaagagcactttactaataatacttttgagtttccaatgattgctggtgtttcaccaagtccattagtggtaaacaatttgggattagattttaaacaagatctaaaaacaaaagtttctagttatggaaaaaatcaagctgctgcgttagaagtaatgactgccgcaggatggaaataac

SEQ ID NO: 245076 - DNA, 400 bp, Unknown
  Bacterial polypeptide expressing nucleotide sequence isolated from the Sargasso Sea
aatgaaaaaaaaagtctgtatagtattatcaacctacaactataaaatcacttctaaactatatagtagtgcggtaaaagagttaaaaaaactaaatttaaaaaaagtttatctagttaaagttcctggagcttttgagatacctgtttctatatctaaattggtaaaaaaatatgatggttttattgcaattggatgcgttataaaaggagaaacacataattttgatttaatttccaaagctataacaaatgggattatgaaaatatcaattaaagaaaaaaaaccaataggaaattctatacttacattgtttaataaaaaacaatcttataaaagatataatcgtgggaaagaagcagcaaaagcagtatatgaagttcttaaaattgatacctaa

SEQ ID NO: 245077 - DNA, 702 bp, Unknown
  Bacterial polypeptide expressing nucleotide sequence isolated from the Sargasso Sea
attgttatcaacttttgcaatcgcaaatgaggttaacatattcaatgcaagacattataaagctgacgcagaactttatggaaagtttaccgctgctactggtattaaggtaaatttaattaacggtaaatcaggtgctttagaaaaaagaatgatcgaggaaggagctgattcttcagcagacctttacatcacagctgatgcaggaagatgtggtgcttttcaagctaaaggtatgacacaaagtggattagtgtcatcaacgataaaatcatctgttccaaaaaacttcagaacaactcattgggttggagtagcgaaaagagcaagaataatttactactcaccagaaagagttactggtgctgaattatctggaatgtcatatgaaggtttagctgatccaaaatggaaaggtagactagtaattagaaaatcaagcaatatttataataaatctcttgtagcttcattaatcgacaataatggaaaaaaagctactgctgattgggcaaagggagttgttgctaatatggctagagagtcaacaggaaatgatagagctcagattatggcagtcgcagctggagaagcagatattgctgtagctaacacatattatttagctcttatgttatctggaaacaaaggtgcagaacaacaagcagctgctaaaaaagttaaagcattttttccaaatca

SEQ ID NO: 245078 - DNA, 364 bp, Unknown
  Bacterial polypeptide expressing nucleotide sequence isolated from the Sargasso Sea
ttatgttatctaggaaataaaggagctgaacaacaagcagcagctaaaaaagttaaagcatttttcccaaaccaaaacgatagaggtacacacatgaatataagttgtgctgccatggtcaagggtgcgcctaataagtctaatgcaatagcacttgttgagtatttattaactccagaggctcaaaaacattttactaataatacttttgagtttccaatgatagagggtgtttcaccaaatccattagttgtgcataatttaggattagattttaaacaagatctaaaaactaaagtttcaagctatggagcaaaacaaacagatgcattagaggtaatgacagctgcaggttggaagtaaa

SEQ ID NO: 245079 - DNA, 947 bp, Unknown
  Bacterial polypeptide expressing nucleotide sequence isolated from the Sargasso Sea
cgctagtcacgtgagttacgtaaggccctacgaaatatcaatcgaaatttcggagctcgaattacgcagatacggaatcacattgaatcaagttagccaggccattagaagcagctccttcgatatgccaggtggcaccatcaaaaccaacaatggcgagattctgataagaacaaccggccaagcttactggggtgcggaatttgaagaagtggtggtggtaacaaaaaaggacggtactcgagtgacattaggagacatcgcgaccatcagagacacttttgaagaaggcgatctagtagccgaatttaatggagtccgaggtgtagtggtcaatgtatctcaggtgggaaaagaagacctaatgcaaatcgctcgagacacaaaagtggtcgttgacaagtttagggctagtcttccccaagagattagcctggacatatggatagatacctctgaagagttaaaagagcgaatgaatgtgctcctaaaaaacgcaggtggtggtcttatattagtgctgatcatcttaactctcttcttgaaattcaaaattgctatgtgggtagcgattggcataccggtagctttgcttggcactctggccttcttgcctcttttcgacatgacaatatcgaccatgacagtaatggcttttattttagtcctaggtatcgtcgttgacgacgcaattgttgtgggagagaggatctacggccacgaacaattgggcaaagatcctcttaaagccgcagtagaaggaacctgggaggtttcgactcctgtaatttttggagttctcacaactatagcggcgttcttacctttagtgatatccgaggggcgcatgactccatttttcgcccccataggttatgtcgtcattatcgctctagcttgttctaatattgaatcgcagttgatcttgccttcgcatctagctcatc

SEQ ID NO: 245080 - DNA, 289 bp, Unknown
  Bacterial polypeptide expressing nucleotide sequence isolated from the Sargasso Sea
aatggataaatcatcaatcaagatctgcattgtcgcctctcaattcaatgagctcattgttgatagcttgatcaagagttcaattcaagctttagaagaaaatggatatcaatctgatcctgagattttcaaagtacccggagcatatgagttacctctggcagtaaagaatgttgcagaaaagaaaaaaccagatggaatcatcgctttgggtgcaattgtaaggggtgcaacaccacactttgattatattgcttcagagacagcggccggtctgactaagatcagt

SEQ ID NO: 245081 - DNA, 421 bp, Unknown
  Bacterial polypeptide expressing nucleotide sequence isolated from the Sargasso Sea
atgggcactaatttaaaccaagaacctgatcactatattgaacctaatcaatcaatcattggatcattaaatggcactaatttatccattggtattgtatgtgcacaatttaatcaatttattacaaaatcgctattaatgggggctataaatggactaaccgaacatggcgtaactaaagattcgatttttacacattgggtaccaggtgcatttgaagttccattaattaccgatttaattttaccaaaatatgatgctgtgattgcaattgcatgtgtcattcgtggtgatacaccccactttgattacgtttgtgatggcatcacatccggattaacaaatgctataaatacgcatcaaaaaccaaccattttttgtgtaattactactaatacggcggagcaagcagaagaacgat

SEQ ID NO: 245082 - DNA, 811 bp, Unknown
  Bacterial polypeptide expressing nucleotide sequence isolated from the Sargasso Sea
agtgcattagaaaaaagaatgattgaagaaggcacagattcttcagctgatctttatattactgctgatgctggaagatgtggagctttcaaggctaaaggaatgactcaaagtggtttggtgtctccaacaattaaatcttctgttccaaaaaattttagaactacacattgggtaggagtagctaaaagagcaagaataatttactattcaccagaaagagttagtggtgctgaattatcaggtcttacatatgaaggtctagctgatccaaaatggaaaggtagattagtaattagaaaatcaagcaatatttacaacaaatctcttgtagcttcattgattgagaataatggaaagaaagctgctgctgaatggtctaaaggagttgttgctaatatggcaagaacaccaaaaggaaatgacagagctcaaattatggcggttgcggctggagaagccgatatcgctgtagcaaatacttattacttggcacttatgctatctggtaataaaggagcagaacaacaagaagctgctaaaaaagttaaggcattttttcctaatcaaaatgatagaggaacgcacatgaatattagttgcgcagctttagtaaaaggggctcctaataaagcaaatgctattgctcttgttgactttttattatcaccagaggctcaggaacattttacaaataatacttttgagtttccaatgatagctggggtatctccaaatccattagtagtgaataatttaggattagattttaaacaagatttaacaactaaagtttcaagctatggaaaaa

SEQ ID NO: 245083 - DNA, 814 bp, Unknown
  Bacterial polypeptide expressing nucleotide sequence isolated from the Sargasso Sea
tatgcgcttcaatggtaagcgctgcgcggtggtgcacgtggcgcgcacgggcgatcaaaacgcactgaagattgagcacacggtaaaggattacctcgccaagctcatgccgcaattgcccgagggcgtgagcatcaatatctggaacaaccgcgcggacatcatcaagaaaaggctcgtcacgctcaacgactcggcgttcgtcggcatcggttgcatcatcgtgctgcttggcttgttcctgcgcccgggcgtggcgttttgggtgtgcctcggcgtgccgatcgctttcatgggcgccttcgcaatgatgccgtaccttggcgtaacaataaacctcttcacactgtacggctttattctcgtgctcggcattttagtggatgacgccattgtcactggcgaacgaatacatgcatttcaacaacgcggtggcactggcttggaaggtgccatcaagggcgcacaagaagtcgctacgcccgttatctttggcgtgcttactacggccattgcctttgtcccactattacttgtggaaggccgacgtgggcaaatttttgcacaaatcccgctcgtagtgatcccgtgcctgctcttttcgctggtggaatccaaactcatcctgcctgcacacctcagccatttgtccaccggcaaacctccacgcaacaagctcagcactctggcccgtatgcaacgctggtgcgcagatagcctcgagtggtgcatcgatcgcatttaccggcccacccttggaatggccagtgtacatcgttacgccactctcgccattttcgtgggcattgcggtg

SEQ ID NO: 245084 - DNA, 235 bp, Unknown
  Bacterial polypeptide expressing nucleotide sequence isolated from the Sargasso Sea
aatgaaaaaaaaaattttaattgttgtagcaaattattatgaaaatattgccaggtctttattaaacagcgcaaaaaataaaattaaaaataaatgtagtataaaggttatttacgtacctggtgcttttgaaatacctgtaacaatatcaaaaaatttaaacaaatttgacggattcatcgctttaggatgcgtgatcaaaggtcaaacacctcattttgattttatatcaaaa

SEQ ID NO: 245085 - DNA, 962 bp, Unknown
  Bacterial polypeptide expressing nucleotide sequence isolated from the Sargasso Sea
aaccttgatgcacgtctcaatggagtgaatgcagcaataatagacgtaatgcgggtcggtgacgaagatatcataacctcagccgctcaggtcagagaattcatggcctcggccaactttaaccttccagccggcatggaacttgaaatcgtttctgactcttcagagagtacaaaaacacgaatagatacagtagctaagaacgcttacaccggtcttattttggtcctcgtaattcttgctatgtttttgcgtttcaaaatagctatctgggtcgcagcgggaattcctatagctattctcggggctttaattgcatttccaccgatggggcttacaattagctcgctaacggtaatgggttttatactagtcctgggaatagtggtagacgatgcgattgttgttggagagcgagtacatgcttatgagcaaaagggtctcagtaagagcgcagcagcaatagaggggaccgtcgaagtttcaataccggtgatatttggtgtgttgactacgattgcggcctttcttcctctcctcgtggacgatacgcaattttcttctttttctaaactcattggtggaactgttgtattttgtctgatcgccagcttgctggaatctcagctcattcttcctggccacattgctcaccgcaaaaccaggggctattttatggaagggtctcgtttagttaatgcctggcaaagttttcagagccgaatagctagtgcgctagaaaatttcgctgagttaggttacaagcgcgctctgacagtagtccttaaatatcggtatgcggcttgggcaactgcgacaggagtcatcgttgtagttctcgctttattatggagtggaagagtggtatttcaattcatgccctcaattgagggagatagaatttggagtacgattactatgcccgccggagtaccagcttctcttactcaagaagctgtggg

SEQ ID NO: 245086 - DNA, 588 bp, Unknown
  Bacterial polypeptide expressing nucleotide sequence isolated from the Sargasso Sea
caaaatggaaaggcagattagtaattagaaaatcaagtaacatttacaacaaatctcttgtagcatcattaattgaaaataatggaaagaaagctgctgctgaatggtctaaaggagttgttgcaaatatggcaagaacaccaaaaggaaacgacagagctcaaattatggcagttgcagctggagaagctgatattgctgtagcaaacacttattacctagcacttatgctatctggtaataaaggagcagaacaacaagaagctgctaaaaaagttaaggcattttttcctaatcaaaatgatagaggaacgcacatgaatatcagttgtgccgctttagtaaaaggagcgcctaataaagcaaatgctatcgcacttgtagacttcttgttatcaccagaggctcaggaacatttcacaaataatacttttgagtttccgatgattgcaggggtatcaccaaatccattggtagtgaacaatttaggattagattttaaacaagatctaacaactaaagtttcaagttatggaaaaaatcaagcagcagcattagaggtaatgacttctgctggatggaagtaag

SEQ ID NO: 245087 - DNA, 391 bp, Unknown
  Bacterial polypeptide expressing nucleotide sequence isolated from the Sargasso Sea
gatgaaaaaaaaatatttaattgttgtagcggattattataaagatatttccgatggtttaataacaagcgctttaaaaataattccaaaaaaaaatatcataaaaattataaaagtacccggtgcttttgaaatcccagttacaatatcaaaaaatttaaaaaaatttgatggttttttagctttaggatgtgtaattaaaggtcaaacaccacactttgattttatctctcaatcgtcaacagatgccataatgaagttgtcaatagaaagtaaaaaacctattggaaatggaataatcacttgtcttaacatggctcaagcaagagcaagaagaaaaaaaggtgctgaagctgcagaagcagtgatttcagttttgtctcaaaaatga

SEQ ID NO: 245088 - DNA, 281 bp, Unknown
  Bacterial polypeptide expressing nucleotide sequence isolated from the Sargasso Sea
aatggataaatcatcaatcaagatctgcatcgtcgcttctcaattcaatgagctcattgttgatagcttaatcaagagttcaattcaaactttagaaaaaaatggatatcaatctgatcctgagactttcaaagtaccaggagcatatgagttacctcttgcagtgaagaatgtcgcagaaaagaaaaaaccagatggaatcatagctttgggtgcaattgtaaggggtgcaacaccacactttgattatattgccacagagacagcggccggtctgacta

SEQ ID NO: 245089 - DNA, 295 bp, Unknown
  Bacterial polypeptide expressing nucleotide sequence isolated from the Sargasso Sea
cttcgaattaccaatcgcagctaaaaccctcatgaaaaaaaagagttatgacgttgtaattgctcttggggcagtgatccgtggtgaaacttcccactatgatgtagttatatctgaggcgagtaaaggtatttcgcaagtttcaaatgaaaataatgttccaattatttttggagttttaactactgatactatgcaacaggctttagaaagagcagggattaaaaataatcttggttggaattatgctttacaagcaattgagatgggatccttaattaaaaatttaaattaa

SEQ ID NO: 245090 - DNA, 550 bp, Unknown
  Bacterial polypeptide expressing nucleotide sequence isolated from the Sargasso Sea
aacatatacaataaatctcttgtagcttcattaattgaaaataatggaaaaaaagctactgctgcttgggcaaagggagtggttgctaacatggctagagagtctacaggaaatgatagagctcaaattatggctgtagctgctggagaagcagatatcgctgttgctaatacatattacttagctcttatgttatctggtaataaaggcgcagaacaacaagaagctgcaaaaaaagttaaagcattcttccctaatcaacaagatagaggaacacacatgaatataagttgtgctgctttagttaagggtgcacctaataaagaaaatgctgtagcacttgttgactttttactatcacctgagtctcaagagcattttacaaataatacttttgagtttccaatgattgctggtgtttcaccaagtccattagtagtaaacaatttaggattagattttaaccaagatctaaaaacaaaagtttctagttatggaaaatatcaagcagacgcactagaggtaatgacagctgctggttggaaataag

SEQ ID NO: 245091 - DNA, 286 bp, Unknown
  Bacterial polypeptide expressing nucleotide sequence isolated from the Sargasso Sea
atggctatttttgagggttcttttactaatgcctctactttaaaagttgggattgtaatagcaagatttaatgatttaattacaaataaaattctatctggttgtcttgattgtttaaaaagacatggtttagatacttctgaattaagcaatcaagtagatatagtttgggttcctggttcattcgaattaccaatcgcagctaaaaccctcatgaaaaaaaagagttatgacgttgtaattgctcttggtgctgtgatccgtggtgaaacttccccactatgat

SEQ ID NO: 245092 - DNA, 460 bp, Unknown
  Bacterial polypeptide expressing nucleotide sequence isolated from the Sargasso Sea
atgattgcgattataaaaagtgaatttaataaagaaatagttgatggactcctagagggctgtaaaagagcattagatactaaagaagtcaaacttaaatttcgtaaatcaaaggtttttgaagttattactgttcctggagcttttgaattgcctgcagcagcaaaatcttgtttaagtaaccataatgttggtggtagttatttttcctcaaaatacaaagcaattattactcttggttgcgtaattaaaggtgaaactgatcattatgactatatttgccaagctgtaacacagggtattatggatgtgtcaattcaatctcaagtgccaattctttttggggtgctaacttgtcagaatgctgaacttgcttttgaaagaagcagagacaacgactctaataagggttacgaagttgggttagctgctttagaacttcttaatttgagtaagtagc

SEQ ID NO: 245093 - DNA, 448 bp, Unknown
  Bacterial polypeptide expressing nucleotide sequence isolated from the Sargasso Sea
aatgcgagtagcgatagtagtagcagaatatcatcatgcgatgaccagtgagttgttgcgtgccgcaacagcacgtttggctgagcatggagtgagtttgtcttcacaagacgtgacttgggttccgggtgccgttgagctgccaatagcagcacaacgatatgcattaacggggcgctttgatgcgattattgtattcggtgttgttattgaaggtgaaacagcacactttacctacgtttgccagcaagtcagcgcgggcgtcagtcaagtgagtttaacgcacaatatcccggtcttgtttggcgtgttgacgacgccatccgaagcgttaacctgggagcggttgggaggaaatagtggccatatggggatcgaagcggcggacggtgctgttaacatggttaacgcgttgcgcgcgattgacggtgagagcgcaggtgactga

SEQ ID NO: 245094 - DNA, 748 bp, Unknown
  Bacterial polypeptide expressing nucleotide sequence isolated from the Sargasso Sea
ggatacaatgaaaaaagtaacaataataagtttatttgtttctttattagtctcgtcttttgcaattgcaaatgaagtaaatatcttcaatgcaagacattacaaagcagacaatgagctttataacaaatttaccaacaaaactggaattaaagtaaacctgattaacggaaaggctggtgcattagaaaaaagaatgatcgaagaaggcacagactcatctgctgatctttatatcactgctgatgctggaagatgtggagctttcaaagctaaaggaatgacacaaagtggattggtgtcttcaacaattaaatcttctgttccaaaaaattttagaactacacactgggtaggagtggctaaaagagcaagaataatttactattcaccagaaagagtaagtggtgctgaattatcaggtcttacatatgaaggtctagccgatccaaaatggaaaggcagattagtaattagaaaatcaagtaacatttataataaatctcttgtagcatcattaattgaaaataatggaaagaaagctgctgctgaatggtctaaaggagttgttgcaaatatggcaagaacaccaaaaggaaacgacagagctcaaattatggcagttgcagcaggagaagctgatattgctgtagcaaacacttattacttagcacttatgctatctggtaataaaggagcagaacaacaagcagctgctaaaaaagttaaggcattttttcctaatcaa

SEQ ID NO: 245095 - DNA, 415 bp, Unknown
  Bacterial polypeptide expressing nucleotide sequence isolated from the Sargasso Sea
atgcaatattggttaattaaaactgagccggaagattggtcatgggaagaacaggtaaaatgcggaaacaaaggagctgaatggaatggagtaagaaattttcaggctacaaaaaatttaaaaaatatgaaaataggtgataagtgttttttttatcatactggaaaaataaaaagtattataggtatagctaaggttacaaaagatgcttttttagacaaaacggacaaaacaaaaaaatttgtatctgttgttgttaaagcattatatcccctaaaaagggaagtaagtcttcaggaaatcaaaaaaaataaggaatttagagatttttctcttgtaagacaaagtcgattatccgttatggcggttgatttaaaatactggaaaaaaatatgtaagatgggtaaagtttaat

SEQ ID NO: 245096 - DNA, 463 bp, Unknown
  Bacterial polypeptide expressing nucleotide sequence isolated from the Sargasso Sea
catgaatcaaatagaaggtgatttaatagccacagatctaaaaattgcctttgtggtatcaagatttaatgagtttgtctgtgagcgtctgctggaaggcgctttggattcacttgtaaggcatggcggcaataaggacgaggtaacagtattaagagttccgggtgccttcgaacttcccttagctgccaaaaaaatggctgagagtgggaattgtgatgctatcgtctgcctgggagttgttattcgcggagagacttcacattacgattatatatgtgcaaatgcatcaagcggaatcgcttctgtatccctggaaacaggaattcctgttagctttggtcttctaactactgaaacacttgagcaggcaattgagcgttctggttctaaagctgggaaccatggtcgttatgcaactgaatgcgcgattgaaatgatacgtctgataaagcaaatatag

SEQ ID NO: 245097 - DNA, 379 bp, Unknown
  Bacterial polypeptide expressing nucleotide sequence isolated from the Sargasso Sea
aatgactttgtctgattttgatttggtaatacgtggtggcacaattgtgaatgctgctgaaatctcaaaatgtgaagttggtataacagacggccgcattgtcgcattaggcgaagccttgggcacaggaaaacaagagatcgatgccgcaggtaaattcgtaatgccaggcgggatcgatagtcattgtcatattgatcagcggtcaagcggtggcggtagaaacgctgagacattcttaagcggcactcgatctgccgcttgtggcggaacaacaactattatttgcttcgccgcgcaggaaaaaggagaactcctaactccggtagtagaagaatatcacaagcgtgcgaagcaatcctgcatcgactatagtttt

SEQ ID NO: 245098 - DNA, 361 bp, Unknown
  Bacterial polypeptide expressing nucleotide sequence isolated from the Sargasso Sea
cttgagaacaactaaagagcttcttaagaatggtgtcgataaaaaaaatatccttgtccaagaagtgccaggagcatttgaattacctttggcgtctaaaaaatgtgccttaaaagagaatatagatattgtcatagctcttggagccattataagaggtgacacacctcattttgactatatctctaaagcctgtattgatggcctaatgtcagtatctcttgaaactaaaaaaccaataatttgtggtgttttaacaacagacgatgaatcgcaagcaaacaagagggctgatccagatcaaatgaataaaggctcagaatttgctttaacagccatgagtatggttgatcctgattaa

SEQ ID NO: 245099 - DNA, 222 bp, Unknown
  Bacterial polypeptide expressing nucleotide sequence isolated from the Sargasso Sea
tgattcgcggggaaacacctcatttcgattatgtggcggccaatgctgcaaacgggattgcttcggtctcccttgatagcggaattcccgtcagtttcgggatcctcactaccgatactattgagcaggccattgaacgttccggtactaaagcaggcaatcagggaagaaatgcgaccctgacggccattgaaatggcctcccttttggcaaaaatctagt

SEQ ID NO: 245100 - DNA, 838 bp, Unknown
  Bacterial polypeptide expressing nucleotide sequence isolated from the Sargasso Sea
aatgaaaaaaataacaataataacagttttatttgcaatttggacgagtatttcatttgcgaatgaagttaatattttcaatgcaagacattacaaagctgatgctgaactttacaataagtttacagcattgacaggaatcaaggtaaatttaattaacggaaaatcaggagctttagaaaaaagaatgatagaagaaggccctgattcttcagcagacctttacattacagcagatgctggaagatgtggtgcttttcaagcaaaaggtatgacgcaaggcggattaacttcatctacaattaaatcgtctgttccaaaaaactttagaacatcacactgggttggagtagcaaaaagagcaagaataatttattattcaccagaaagagttactggtgccgaactatctggaatgacttatgaaggtctagcagatccaaaatggaaaggtagattagtaattagaaaatctagcaacatttataataaatctcttgtagcttcattaattgcgaataatggaaaaaaagcaactgctgaatgggcaaagggagttgttgctaacatggcaagaccttctgaaggaaacgacagagctcaaattatggcagtagctgctggagaagctgatattgctgtagctaacacatattatttagctcttatgttatctggtaataaaggtgcagaacaacaagaagctgctaaaaaagttaaagcattttttccaaaccaggatggcagaggaacacacatgaatattagttgtgctgctctagttaaaggtgctccaaataaagcaaatgctatagcgcttgttgactacttatgtcac

SEQ ID NO: 245101 - DNA, 421 bp, Unknown
  Bacterial polypeptide expressing nucleotide sequence isolated from the Sargasso Sea
atgtttgcaatcgtaaaaagtaatttcaacacaaaagtaacctcaggactgcttaatggatgcctagatgcattaaataaacagggttttaatgatcagcaaataaaaatttttgaggttcctggcgcattcgagattcccttcgcgattaataagattctaaaatctagagctgattttgatgctataattgctcttggcgcaatcataaaaggtgaaaccgatcattatcattacatatctgattctgttacaaaaggtataatgcaaataacccaaaattctgaaattccgattatttttggagtattaacttgccaaaacagccaattagcctttttgcgatcaaataacgataaaaaaaataaaggctttgaggcaggtgaagcagcaatcgaaatgcttaatcaagattcatgat

SEQ ID NO: 245102 - DNA, 805 bp, Unknown
  Bacterial polypeptide expressing nucleotide sequence isolated from the Sargasso Sea
atgaaaaaagtaacaataataagtttatttgtttctttaatagtctcgtcttttgcttttgcaaatgaagtaaatatcttcaacgcaagacattacaaggcagataatgagctttatagcaaatttaccaacaaaactggaattaaagtaaacctgattaatggaaaggctagtgcattagaaaaaaggatgattgaagaaggcaccgattcttctgctgatctttatattactgctgatgctggaagatgtggagctttcaaagctaaaggaatgacacaaagtggcttggtgtctccaacaattaaatcttctgttccaaaaaattttagaaccacacactgggtaggagtagcaaaaagagcaagaataatttattactcaccagaaagagttagtggtgctgaattatcaggattaacatacgaaggtctagctgacccaaaatggaaaggtagattagtaatcagaaaatcaagtaacatttataacaagtcacttgtagcttcattaattgagaataatggaaaaaaagctgctgctgaatggtctaaaggagttgtttctaacatggcaagaacaccaaaaggaaacgatagagctcaaattatggcagttgcagctggagaagctgatattgctgtagcaaatacttattacttagcacttatgttatctggtaataaaggagcagaacaacaagcggctgcaaagaaagttaaggcattttttcctaatcaaaatgatagaggaacacacatgaatattagttgtgcagctttagttaaaggagctcctaataagg

SEQ ID NO: 245103 - DNA, 580 bp, Unknown
  Bacterial polypeptide expressing nucleotide sequence isolated from the Sargasso Sea
aaaggcagattagtaattagaaaatcaagtaatatttataataagtcactggtagcatcactaattgaaaataatggcaagaaggccgctgctgaatggtctaaaggagtggtttcaaatatggcaagaacaccaaaaggaaatgatagagcccaaattatggcagttgcagccggagaagctgatatcgctgtagcaaatacttattacttagcacttatgttatctggcaacaaaggagcagaacaacaagctgctgcaaaaaaagtcaaagcattttttcctaatcaaaatgacagaggaacacacatgaatattagttgtgcagctttagttaaaggagcacctaataaagcaaatgcaattgcacttgtagacttcttgttatcaccagaagctcaggaacattttacaaacaatacttttgagtttccaatgatagcgggtgtatctccaaatccattagtagtaaataatttaggattagattttaaacaggatctaacaaccaaagtttcaagctatggaaaaaatcaagctgctgcattagaagtaatgacagctgctggatggaagtaag

SEQ ID NO: 245104 - DNA, 891 bp, Unknown
  Bacterial polypeptide expressing nucleotide sequence isolated from the Sargasso Sea
aatatttttaatgcaagacattataaagctgatgcagaactttacgataagtttacagcagccactggaattaaggtaaatttaattaacgggaaatcaggagctttggaaaaaagaatgatagaagaaggttctgattctgctgcagatctttacatcacagctgatgctggaagatgtggcgcttttcaagcaaaaggtatgacgcaaagtggattaacttcatctacaattaaatcatctgttccaaaaaactttagaacatcacactgggttggagtagctaaaagagcaagaataatttactactcaccagaaagagttactggtgctgaattatctggaatgacttatgaaggtctagctgatccaaaatggaatggtagattagtaattagaaaatcaagtaacatttacaacaaatctcttgtagcttcattaattgcaaacaatggaaaaaaagctactgctgcttgggcaaaaggagttgttgctaatatggcaagagaatctactggaaatgatagagctcaaattatggcagtagctgctggagaagctgatatagctgtagctaatacatattatttagctctgatgttatctggtaacaaaggtgcagaacaacaagaagctgctaaaaaagttaaagcattttttccaaatcaagatggaagaggaacgcacatgaatattagttgtgctgctctagttaaaggtgctccaaacaaagcaaatgctattgctcttgttgattacttattatcaccttcagctcaagaacacttcactaacaatacttttgagtttccaatgatttctggtgtttcaccaagtccattagtagtaaacaatctgggactagattttaaacaagatctaacaacaaaa

SEQ ID NO: 245105 - DNA, 460 bp, Unknown
  Bacterial polypeptide expressing nucleotide sequence isolated from the Sargasso Sea
catggctagagaatctacaggaaacgatagagctcaaattatggcagtagcagctggagaagctgatatagcagttgccaacacttattatttagctcttatgttatctggtaacaaaggtgcagaacagcaagaagctgctaaaaaagttaaagcatttttcccaaatcaagatggtagaggaactcacatgaatattagttgtgctgctctagttaaaggtgctccaaataaagcaaatgcaattgcacttgttgactttttattatcagctgaggctcaagaacactttactaataatacttttgagtttccaatgatagcaggtgtttcaccaagtccattagtagtgaacaatttagggttagattttaaacaagatctaaaaactaaagtttctagttatggaaaacatcaagctgctgcgttagaagtaatgacagctgctggttggaagtag

SEQ ID NO: 245106 - DNA, 682 bp, Unknown
  Bacterial polypeptide expressing nucleotide sequence isolated from the Sargasso Sea
attgctagttgcaaattcagtttttgcaaatgaagtgaatgtttttagtgcaagacattacgattctgatgttcagctttataaaaaatttacatcaaaaactggaataaaagtaaatgtagtatctggaaaagataaagcattacaaaaaagaataaaagaagaagggaaggacagtaaagcagatatttatataactgctgatgctggaagattaggagcttttcaatcagaaggaatgtttcaaaaaggtgcaagttcagcagctattaaaaaagttgtacctgctaactttagatcaccttattgggttggaatagctaagagagcaagaataatttattacaatccaaaaacagttgatccttcgtggaatatgagctacgaagatttagcagacccaaaatataaaggtagagtagtaataagaaaatcaagcaacatttacaatcagtctttagttgcatcacttattaaaaataatggtgaaaaaaaaacagcagcttgggccaaaggaatggtaaataactttgctagaaaaccaactggtaacgacagagcacagatattagccgtagctgctggagaagcagattgggcagtagcaaacacttattacttagctttaatgttatctggaaacaaaggtgctgaacaacaagctgcagctaaaaaagtaatg

SEQ ID NO: 245107 - DNA, 826 bp, Unknown
  Bacterial polypeptide expressing nucleotide sequence isolated from the Sargasso Sea
caaagattcttctgctgatctttatatcactgctgatgctggaagatgtggagctttcaaggctaaaggaatgactcaaagtggtttggtgtcttcgacaattaaatcttctgttccaaaaaattttagaactacacactgggtaggagtcgcaaaaagagcaagaataatttattactcaccagaaagagttagtggtgctgaattatcaggtcttacatatgaaggtctagctgatccaaaatggaaaggcagattagtaattagaaaatcaagcaacatttataacaaatctcttgtagcttcattaattgagaataatggtaagaaagctgctgctgaatggtctaaaggagttgttgctaatatggcaagaacaccaaaaggaaatgacagagctcaaattatggcagttgcagctggagaagctgatattgcagtagcaaatacttattacttggcacttatgctatctggtaataaaggagcagaacaacaagcggctgctaaaaaagttaaggcattttttcctaatcaaaatgatagaggaacacacatgaatattagttgtgctgctttagtaataggagctccaaataaagcaaacgctattgctcttgttgactttttattatcaccagaggctcaggaacattttacaaataatacttttgagtttccaatgatagctggggtatctccaaatccattggtagtgaataatttaggattagattttaaacaagatttaacaactaaagtttcaagctatggaaaaaatcaagctgctgcattagaggtaatgacagctgctggatggaagtaa

SEQ ID NO: 245108 - DNA, 256 bp, Unknown
  Bacterial polypeptide expressing nucleotide sequence isolated from the Sargasso Sea
atgactttaaaaatatgcatagtttcatctaagtataatgaaaaaatcatagacggaatatacaaaaatgcagttgccgaattaaatgctgtcaaaataaaaaaatttgattcaatatcagttccaggagcttttgaaatacctgttgctatatcgaaaattattaaaaaatatgatggagttattgcaattggatgtataataaagggagagactccaaattttgatttcatttcaaaatctataactgatggaa

SEQ ID NO: 245109 - DNA, 248 bp, Unknown
  Bacterial polypeptide expressing nucleotide sequence isolated from the Sargasso Sea
aatgaaaactaaaatttgtattgttgtttcaacctacaatgaagatattacaaaaaaattgtattctaacgcaaaggaagaattagaaaaatcaggaattaaaagaatagatactattgaggttcccggtgcattcgaaatacccgtagttatatcaaaacttagcaaaaaatatgatggatttatagcaatcggatgcatcattaaaggtgaaaccgccaattttgatttgatttcaaatgctataa

SEQ ID NO: 245110 - DNA, 435 bp, Unknown
  Bacterial polypeptide expressing nucleotide sequence isolated from the Sargasso Sea
aaaaagccgcccgcatcgcgatcgtggcttcggtgtacaatgccgaatatgtcgacagcatgatcgatgcggcattggaaaccttggctggcagtggcgtggatgatgtggagctgatccgcgtgcccggcgcatttgaaattcctgtggtcgccgctaaattggctcaacgcaaacgcctccgccccgaggcagttatgtgcctaggcgtcatcctgcgaggcaaaactacgcacgctgagcacatcggtcagtcggtcacgcaatccctcgcacagatcgccactgacacaaccgtccctatgatccatgaggtgttgctgctggaaaacaaagcccaagccaaggagcgttgcctttccccaaaaaccaaccgcggtttcgaggcggcgcacacagctctgatcatggccggcttgattcgggaaatttaat

SEQ ID NO: 245111 - DNA, 318 bp, Unknown
  Bacterial polypeptide expressing nucleotide sequence isolated from the Sargasso Sea
aaaatattttaagtaaagaagtgcctggagcgttcgaattacctctagcttctaaagtttatgctttgaaagaaaaggtagacgttgttatagctcttggtgccattattagaggtgatacacctcattttgactatatctcaaaagcatgtatcgaaggtttaatgactgcttctcttgagacaaaaaagccaataatttgtggcgtcttaactacggatgacatcgcacaagcacgaaagaggtctgatcccaacgaaatgaataaaggtgctgaatttgccgtatcggcaatgagtatggctggccttgactagt

SEQ ID NO: 245112 - DNA, 289 bp, Unknown
  Bacterial polypeptide expressing nucleotide sequence isolated from the Sargasso Sea
atggctatttttgagggttcttttactaatgcctctactttaaaagttgggattgtaatagcaagatttaatgatttaattacaaataaaattttatctggttgtcttgattgtttaaaaagacatggtttagatacttctgaattaagcaatcaagtagatatagtttgggttcctggttcattcgaattaccaatcgcagcaaaaaccctcatgaaaaaaaagagttatgacgttgtaattgctcttggggctgtgatccgtggtgaaacttcccactatgatgtag

SEQ ID NO: 245113 - DNA, 715 bp, Unknown
  Bacterial polypeptide expressing nucleotide sequence isolated from the Sargasso Sea
gttgataatatctacttttgcaacagcaaacgaagtaaatatttttaacgcaaggcattacaaagctgacgctgaactttatggaaagtttacagctgcaactggaatcaaagtaaatttgattaatggtaaatctggtgctttagaaaaaagaatgattgaggagggttcagactccgcagcggacctttacattactgctgacgctggaagatgtggagcatttcaagcaaaaggaatgactcaaagtggattaacatcttcaacaattaaatcatctgttccaaaaaactttagaacatcacattgggttggggtagcaaaaagagcaagaataatttattactcacctgaaagagtcactggcgctgaattatccggaatgacttatgaaggtttagctgatccaaaatggaaaggtagattagtaattagaaaatcaagcaatatttataacaaatctcttgtagcctcattaatcgcgaataatggaaaaaaagcaacagctgaatgggcaaagggagttgttgcgaatatggctagagagtctacaggaaacgatagggctcaaattatggcagtagcagctggggaggctgatattgctgtggctaacacatattatctagctttaatgttatctggaaacaaaggtgcagaacaacaagaagctgcaaaaaaagttaaagcatttttttccaaatcaagacggtag

SEQ ID NO: 245114 - DNA, 1030 bp, Unknown
  Bacterial polypeptide expressing nucleotide sequence isolated from the Sargasso Sea
atgaaaaaaatatcaatttttgcgttaattattactttattaggctcaacaattgttacagcaaatgaagtaaatatttttaatgcgagacattataaagctgacgcagagctttatggaaagtttactgcagcaacaggaattaaggttaatttgattaatggtaaatcaggagccttagaaaaaagaatgattgaagaaggtgcagattctgcagcagacctttacattacagctgatgctggaagatgtggtgcttttcaatcaaaaggtatgacacaaagtggtttaacttcatctacaattaaatcatctgttccaaaaaactttagaacatctcactgggttggagtagcaaaaagagcaagaattatttactactcacctgaaagagttacaggcgctgaattatctggaatgacttacgaaggtttagcagatccaaaatggaaaggtagattagtaattagaaaatcaagtaacatttacaataaatctcttgtagcttcattaattgaaaataatggaaaaaaagctactgcagaatgggcaaaaggagttgttgctaatatggctagagattctaaaggaaatgatagagctcaaattatggctgtagctgctggagaagcagatattgccgtagccaatacttactatttagcgcttatgttgtctggtaataaaggtgcagaacaacaagcagcagctaaaaaagttaaagcattctttcctaatcaacaggacagagggacacatatgaatattagctgtgctgctttagtcaaaggtgctccaaataaagcaaatgcaatagctcttgttgattatttattatctgctgaagctcaagaacattttactaacaatacttttgagtttccaatgattgcaggtgtttcgccaaatccattagtagtaaacaatttgggattagattttaaacaagatctaactacaaaagtttctagttatggaaaaaagcaagctgatgctctagaggtgatgacagcagctggttggaaataat

SEQ ID NO: 245115 - DNA, 700 bp, Unknown
  Bacterial polypeptide expressing nucleotide sequence isolated from the Sargasso Sea
tagaacaacacactgggttggagtagcaaaaagagcaagaataatttactactcaccagaaagagttactggcgctgaattatctggaatgacttatgagggtttagcagactcaaaatggaaaggtagattagtaattagaaaatcaagcaacatttataataaatctcttgtagcttcattaattgcgaataatggaaaaaaagctactgcagaatgggcaaagggagttgttgctaacatggctagagaatctacaggaaacgacagagctcaaatcatggcagtagctgctggagaagctgatattgctgtagctaacacttattatttagctcttatgttgtctggtaacaaaggtgcagaacaacaagcggctgctaaaaaagttaaagcatttttcccaaatcaagatggaagaggaacacacatgaatattagttgtgctgctttagttaaaggtgctccaaataaagcaaatgcaatagctcttgttgactacttattatcacctgaagctcaagaacactttactaataatacttttgagtttccaatgatagaaggcgtttcaccaagtccattagtagtgaacaatttaggattagattttaaacaagatctaaaaactaaagtttctagttatggaaaacatcaggctgctgcactagaagtaatgacagctgctggttggaagtaa

SEQ ID NO: 245116 - DNA, 665 bp, Unknown
  Bacterial polypeptide expressing nucleotide sequence isolated from the Sargasso Sea
aagaataatttactattcaccagaaagagttagtggtgctgaattatcaggtcttacatatgaaggtctagctgatccaagatggaaaggcagattagtaattagaaaatcaagcaacatttataacaaatctcttgtatcttcattgattgagaataatggaaagaaagctgctgctgaatggtctaaaggagttgttgctaatatggcaagaacaccaaaaggaaacgacagagctcaaattatggcagttgcagctggagaagctgatattgctgtagcaaacacttattacttggcactaatgctatctggtaataaaggagcagaacaacaagcggctgctaaaaaagttaaggcattttttcctaatcaaaatgatagaggaacacacatgaatattagttgtgcagctttaataaaaggggctcctaataaagcaaatgctattgctcttgttgactttttattatcaccagaggctcaggaacattttacaaataatacttttgagtttccaatgatagctggggtatctccaaatccattggtagtgaataatttaggattagattttaaacaagatttaacaactaaagtttcaagctatggaaaaaatcaagctgctgcattagaggtaatgacagctgctggatggaagtaag

SEQ ID NO: 245117 - DNA, 1030 bp, Unknown
  Bacterial polypeptide expressing nucleotide sequence isolated from the Sargasso Sea
aatgaaaaaagtaacaataataagtttatttgtttctttaatagtctcatcatttgcttttgcaaatgaagtaaacatcttcaatgctagacattacaaggcagataatgagctatatagcaaatttaccaacaaaactggaattaaagtaaacctgattaatggaaaggccagtgcattagaaaaaagaatgattgaagaaggcactgattcttcagctgatctttatatcactgctgatgctggaagatgtggagctttcaaagctaaaggaatgactcaaagtggtttggtgtctcccacaattaaatcttctgttccaaaaaattttagaactacacactgggtaggagtagcaaaaagagcaagaataatttactactcgccagaaagagttagtggtgctgaattatcaggtcttacatatgaaggtctagctgatccaaaatggaaaggcagattagtaattagaaaatcaagcaacatttataacaaatctcttgtagcttcattgattgagaataatggaaagaaagctgctgctgaatggtctaaacgcgttgtttctaacatggcaagaacaccaaaaggaaatgacagagctcaaattatggcggttgcagctggagaagccgatatagctgtagcaaatacttattacctagcacttatgctatctggtaataaaggagcagaacaacaagcagctgctaaaaaagttaaggcatttttccccaatcaaaatgatagaggaacacatatgaatattagttgtgcagctttagtcaagggagctcctaataaggcaaatgctatcgctcttgttgactttttattatcaccagaggctcaggaacattttacaaataatacttttgagtttccaatgatagctggggtatctccaaatccattagtagtgaataatttaggattagattttaaacaagatttaacaactaaagtttcaagctatggaaaaaatcaagctgctgcattagaggtaatgacagctgctggatggaagtaa

SEQ ID NO: 245118 - DNA, 1652 bp, Unknown
  Bacterial polypeptide expressing nucleotide sequence isolated from the Sargasso Sea
tgctgtattgagtatcgatgttaagggcataatcacaaattgtaacgacattgcgcttaaaacgtttggttacacgcgaagcgagttaatcgctcagtctgtagagattctaatgccagaaccttatgcgtctaaccatgctttttatatgcgcaattatatggagactggggtaggtaaaattataggagtaggtcgtcagcttccggctaagcgaaaaaacggcgatatattccagatggaattgtcattgtcggagagttttgaccagggtgaaaggggatttataggtgttatacgggatattagtgaacgtatagaagcgcaggataccatttataacctcgcttatactgactctgttacccgccttcgaaatcagcagtggttccatcaacgctttaaagacttgatgttacgcgcatcgttgaagcaagaatatatacatattttgttgttagatatcgataatatggcgcaaatcaatacgcgtttcggctttggtaacggcaactatgctataagaaagattgcagagcagttgcttttcgtcatcggccacgattatgaaatttttaaatatggcggtgatagttttgtcgtactgtctaaaaaaacctacataaaagaagacctccataaatttgatgcgaacttagtggaaagcgcactccttagtccacgtcatttcgatattgtcataaattcagtgaaatggtctcttactgcgtcacttggcagtgctatctttaacccgcaaggtcaaagctttgagtcaatcatcaatgtaatcgaacaggctgttaaaagggcaaaaaggtcggcaccttttggtctttgtcatatttcagaggatgggtttaaagagttcgaccgttatttagatataaaatctaagcttgaacaagcgatagaacgcgatgaattatcaatagtacttcagcctcaagttacccatgatggaacggtttcttctttcgaagcgttggtgcggtggtactcgaaagagttaggtccagtaagcccaagtgaatttattcctattgccgaagagagctacgctatctgcgaaataggtgacatagttttaagaaaaacgctgagcgttattagtaacttcgtgaaaagcggtttaaaaaccagtattgcgatcaacataagcgctagacaaatcgttgtgcctgactttataaattcgctactttctcgcgtaaatcaatacggcattccacctcacatgttaatgctggaattaacagaaactgctttagtggtggatattgagctggttaaggaaaccatgcttgaactcgcaagattcggctttcgcttttcaattgatgatttcggtactggatattccagtcttgcatacctgaaagttctcccaatcagtgagcttaaaattgataagtactttgtggacgacataggaaaagactttgatggaaaagcggcgcagattgttgatgcaattattgaaatggccaaagcactgaatgtcacatgtattgcagagggtgtagagagtgaagagcagctaaaatacctaataggtaaaggctgtggaaaatttcaaggctattacttctcaaggcctgaaccggaagcacattgggcgggaatcaatgaaaacacaaaactaccctaaa

SEQ ID NO: 245119 - DNA, 715 bp, Unknown
  Bacterial polypeptide expressing nucleotide sequence isolated from the Sargasso Sea
atgaaaaaaataacaactataagtttaattctttcattatttgtatcaacttttgtaatcgcaaatgaggttaatatttttaatgcaagacattataaagcagatgctgaactttacggaaagttcacagcagcaactggaattaaggtaaacttaattaacgggaaatcaggagccttagaaaaaagaatgattgaagaaggtgctgattctgcggcagatctttacatcacagctgacgctggtagatgtggtgcctttcaagcaaaaggtatgacgcaaaatggattaacttctgcaacaattaaatcatccgttccaaaaaattttagaacatcacattgggttggagtagcaaaaagagcaagaataatttactactcaccagaaagagttactggtgctgaattatctggaatgacttatgaaggtttagctgatccgaaatggaaaggtagattagtaattagaaaatcaagcaacatttataacaaatctcttgtagcttcattaattgcgaataatggaaaaaaagctactgctgaatgggcaaagggagttgttgctaacatggctagagagtcaacaggaaatgatagagctcaaattatggcagtagctgctggagaagctgatatagctgtagctaacacatattatttagctttaatgttatctggtaacaaaggtgcagaacaacaagcaggctgctaaa

SEQ ID NO: 245120 - DNA, 517 bp, Unknown
  Bacterial polypeptide expressing nucleotide sequence isolated from the Sargasso Sea
atggaaatcggacaataccaaccgaatctcgaaggcgacggcctgcgtatcggcatcgtgcaatcgcgcttcaacgaacccgtgtgcaacggcctcgccgacgcgtgcgtcgaggaactggaacgcctcggcgtcaccggtgaagacgtgctgctcgtgtcggtgcccggcgcgctggaaatcccgctcgcgctgcagaagctcgcggaaagcggccagttcgacgcgctgatcgcgctcggcgcggtgatccgcggcgagacctaccacttcgaactcgtgtcgaacgagagcggcgcgggcatcacccgcatcggcctcgacttcaacctgccgatcgcgaacgcggtcctgacgaccgaaaacgacgaacaggccgtcgcgcgcatgaccgaaaaaggtcgtgacgccgcacgcgtcgccgtcgagatggccaacctgacgatggccctcgaccagctcggcgacgacgacgaggacgaagaggaagaagacgacgaagaggagcgcgcatgaa

SEQ ID NO: 245121 - DNA, 472 bp, Unknown
  Bacterial polypeptide expressing nucleotide sequence isolated from the Sargasso Sea
tatgagtaaaaaaggtctttcagaagacataacaataactaaaacatccagcggttctttttatggaatcatttcaacaaactggaattctcatatagttgatgtacttaaagagaatgctatttctgctttacttgagaatggagtcgatgaaagtcacattattcaaagagttgtgccaggagcttttgagcttccagttgcagctaaaaatctttgtcctgacgtagatgctgttattgcattaggagcaattattaaaggcgaaactcctcattttgactttatttcacaagcttgttctattggtcttatgcaagcatcactagaaaccagtaaaccggttctttttggagtgcttacaactgaaaatgagcaacaggcaaaagatagagcatcagcaaaaaaacaaaataaaggtagagaattggcgcttagtgccttacaaatggtcgaacttctaaggaaatga

SEQ ID NO: 245122 - DNA, 1030 bp, Unknown
  Bacterial polypeptide expressing nucleotide sequence isolated from the Sargasso Sea
aatgaaaaaattatcaattttagctttagctctttcattattagtatcaacttttgtaatcgcaaatgaagtaaatatttttaatgcaagacattataaagctgacgctgaactttatggaaagtttacagcagcgactggaattaaggttaatttaattaacggtaaatcaggagcattggaaaaaagaatgatagaagagggagctgactcttctgcagacctttacatcacagctgatgctggaagatgtggagcttttcaagcaaaaggtatgacacaaagtggattaacttctgcaacaataaaatcatctgttccaaaaaactttagaacaccacattgggttggagtagcaaaaagagcaagaataatttactactcaccagaaagagttactggtgctgaattatcaggaatgacttatgaaggtctagctgatccaaaatggaaaggtagattagtaattagaaaatcaagcaacatttataacaaatctcttgtagcttcattaattgcaaataatggtaaaatggcaactgctgagtgggcaaaaggtgttgtcgctaacatggctagagaatctacaggtaatgatagagctcaaatcatggctgtagctgctggagaagctgatattgctgtagctaatacgtattatttagcactaatgctatcaggtaacaaaggcgcagaacaacaagcggctgctaaaaaagttaaggcattttttccaaaccaagatggtagaggaacacacatgaatattagttgtgctgctctagttaaaggtgctccaaataaagcaaatgctatagctcttgttgactttttactatcacctgaatctcaagaacactttactaataatacttttgagtttccaatgattgccggtgtttcgcctagtccactagtagtaaacaatttgggattagattttaaacaagatctaaaaacaaaagtttctaagtacggaaaacatcaagcagctgcactagaagtaatgaccgctgctggttggaaataa

SEQ ID NO: 245123 - DNA, 976 bp, Unknown
  Bacterial polypeptide expressing nucleotide sequence isolated from the Sargasso Sea
atgaaaaaagtgacaataataagtttatttgtttctttaatagcctcgtcatttgcttttgcaaatgaagtaaacatctacaatgcaagacattacaaggcagataatgagctttatagcaaatttaccaacaaaactggaattaaagtaaacctgattaatggaaaggccagtgcattagaaaaaagaatgattgaagaggggactgactcttcagctgatctttatattactgctgatgctggaagatgtggagctttcaaggctaaaggaatgactcaaagtggtttggtgtctccaacaattaaatcttctgttccaaaaaattttagaactacacactgggtaggagtagcaaaaagagcaagaataatttactactcaccagaaagagttagtggtgctgaattatcaggattaacatatgaaggtctagctgatccaaaatggaaaggtagattagtaattagaaaatcaagtaacatttataacaagtcacttgtagcttcattaattgaaaataatggaaagaaagctgctgctgaatggtctaaaggagttgtttctaacatggcaagaacaccaaaaggaaatgacagagctcaaattatggcggttgcggctggagaagccgatatcgctgtagcaaatacgtattacttagcacttatgctatctggtaacaaaggagcagaacaacaagaagctgctaaaaaagttaaggcattttttcctaatcaaaatgacagaggaacacacatgaatattagttgtgcagctttagttaaaggagctcctaataaggcaaatgctatcgctcttgttgactttttattatcaccagaggctcaggaacattttacaaataatacttttgagtttccaatgatagctggggtatctccaaatccattggtagtgaataatttaggattagattttaaacaagatttaacaactaaagtttcaagctagg

SEQ ID NO: 245124 - DNA, 994 bp, Unknown
  Bacterial polypeptide expressing nucleotide sequence isolated from the Sargasso Sea
ttgattgtatcgtcatttgcaatcgcaaatgaggtaaacattttcaatgcaagacattacaaagctgatgctgaactttatggtaagtttactgcagcaacaggaataaaagtaaacttaattaacggaaaatcaggagccttagaaaaaagaatgatagaagaaggcgctgattcttctgcagacctttacattacagctgacgctggaagatgtggtgcttttcaagcaaaaggtatgacgcaaggtggattaatttcacctacaattaaatcttcagttccaaaaaactttagaacagcgcactgggttggagtggcaaaaagagcaagaataatttactactcacctgaaagagttactggtgctgaactatctggaatgacttatgaaggtttagctgatcctaaatggaaaggcagattagtaattagaaaatctagcaacatttataataaatctcttgtagcttcattaatcgaaaataatggaaaaaaagctactgccgcttgggcaaagggagtagttgctaacatggctagagagtctacaggaaacgatagagctcaaattatggctgtagctgcaggagaagcagatattgcagttgctaacacatattacttagctcttatgttatctggtaacaaaggtgcagagcaacaagaagctgcaaaaaaagttaaagcattcttccccaaccaacaagatagaggaacacacatgaatataagttgtgctgccttggttaaaggtgcgcctaacaaagcaaatgctatagcacttgttgactttttattatcacctgagtctcaagagcattttacaaataatacttttgagtttccaatgattgctggtgtttcaccaagcccgttagtggtaaacaatttgggattagattttaaccaagatctaaaaacaaaagtttctagctatggaaaatatcaagcagatgcattagaagtaatgacagctgctggttggaaataag

SEQ ID NO: 245125 - DNA, 889 bp, Unknown
  Bacterial polypeptide expressing nucleotide sequence isolated from the Sargasso Sea
aattaaagtaaatttaattaatggtaaagctggagctttagaaaaaagaatgatcgaagaaggagcagactcagctgccgatctttacataacagcagatgctggaagatgtggtgcttttaaagctaaaggtatgacgcaagcaggacttgtttcgccaactatcaaatcttcagttccaaaaaactttagaacaactcactgggttggtgtagctaagagagctagaatagtctattacgctccagaaagagttagtggtgccgaattatctggattaacttatgaaagtctggcggatcctaaatggaaaggtagaattgcaataagagcatctagcaatatttacaacaaatctttagtagcatcattagtaaaaaataatgggaaaaaagctgctggagagtgggcaaaaggtgttgttgctaacatggctagagatccaaaaggtaatgatagagctcagattatggcagttgcagcaggagaagcagatattgcagttgcaaacacatactatttagctttgatgttatcagggaacaaaggtgcagaacaacaagcagctgctaaaaaagtaaaagcatttttccctaatcaaaacgatagaggaacacatatgaacattagttgtgctgctcttgttaaaggtgctccaaataaagctaatgcaattgcacttgtagattatttattatcacctgaggctcaagaacatttcactaataatacttttgagttcccgatgatttcaggtgtgtcaccaaacccattagtagtaaacaacttaggtttagattttaaacaagatttaaccacaagtgttgctagttatggagataaacaagcagacgcattagaagtaatgacagctgcaggttggaagtaa

SEQ ID NO: 245126 - DNA, 711 bp, Unknown
  Bacterial polypeptide expressing nucleotide sequence isolated from the Sargasso Sea
caaaaaactttagaacatcccattgggtaggagtagcaaaaagagcgagaataatttactactcaccagaaagagttactggtgctgaattatctggaatgacttacgaaggtttagcagatccaaaatggaaaggtagattagtaattagaaaatcaagcaacatttacaataaatctcttgtggcttcattaattgcgaataatggaaaaaaagctaccgctgaatgggcaaaaggagttgttgctaacatggctagagattctgaaggaaatgatagagctcaaattatggcagtagctgctggagaagctgatattgctgtagctaacacatattatttagctcttatgttatctggtaataaaggtgcagaacaacaagcagctgctaaaaaagttaaagcattttttccaaatcaagatggcagaggaacacacatgaatattagttgtgctgctctagttaaaggtgctccaaacaaagcaaacgctattgctcttgttgactttttattatcacctgagtctcaagaacactttactaataatacttttgaatttccaatgattgctggtgtttcaccaagcccattagtagtaaacaatttgggattagatttcaaacaagatctaaaaacaaaagtttctagttatggaaaacatcaagcagctgcattagaagtaatgactgcagcaggttggaaatagt

SEQ ID NO: 245127 - DNA, 924 bp, Unknown
  Bacterial polypeptide expressing nucleotide sequence isolated from the Sargasso Sea
acgaactttatagcaaatttactgaaaaaactggaattaaagtaaatttaataaacggaaaagctggtgcattagaaaaaagaattatagaggagggtgctgactctttagcagatctttatattactgctgacgcaggtaggtgtggagcatttaaggctaaaggaatgacacaaagtggtctggtgtctccaacaattaaatcatcagttccaaaaagttttagaactacacactgggttggagtagctaaaagagctagaataatttattactcaccagagagagtaactggagctgaattatcaggacttacctacgaaggcttagctgatccaaaatggaaaggcagattagtaattagaaaatcaagtaacatttacaataagtcactggtagcttcattaattgaaaataatggcaagaagtccgctgcagaatggtctaaaggagtggttgcaaatatggcaagaacaccaaaaggaaatgatagagcccaaattatggcagttgcagccggagaagctgatattgctgtagctaatacatactacttagcacttatgttatctggtaacaaaggagcagaacaacaagctgctgcaaaaaaagtcaaagcattttttcctaatcaaaatgacagaggaacacatatgaatattagttgtgcagctttagttaaaggagcacctaataaagcaaatgcaattgcacttgtagatttcttgttatcaccagaagctcaagaacattttacaaacaatacttttgagtttccaatgatagctggtgtatctccaaatccattggtagtaaataatttaggattagattttaaacaagatctaacaactaaagtttcaagctacggaaaaaatcaagcagcagcattagaggtaatgacagctgctgggtggaagtaag

SEQ ID NO: 245128 - DNA, 316 bp, Unknown
  Bacterial polypeptide expressing nucleotide sequence isolated from the Sargasso Sea
atgattgttattgtaaaaagtgaattcaataaagaaattgttgatggtcttttaaaaggttgtaaaagggcattagcagaaaaagaaattaaaattatttctgttcctggagcttttgaactacctgctgctgcaaaaaatgtttcaattcaatctaatttacctgaagctgttattaccttaggttgtgttatcaaaggtgatacggatcattacgattacatatgtcaagctgttacaaatggtattatggatatttcagttcaatccagtgtaccagttcttttttggagttcttacatgtcagaatgctgaa

SEQ ID NO: 245129 - DNA, 391 bp, Unknown
  Bacterial polypeptide expressing nucleotide sequence isolated from the Sargasso Sea
atgaaaaaaaaatatttaattgttgtagcagattattataaagatattgctaatggcttaattagcagcgctttaaaaataattccaaaaaaaaataaaattaaaattattaaagtgccaggtgcatttgaaattccagttacaatctcaaaaaatttaaaaaaatatgatggttttttagctctaggatgtgtaattaaaggtaaaacgccacactttgattttatttctcaagcttcaacagatgctattatgaaattatctatagatagtaaaaaacctattggaaatggaataattacctgtctaaatattgctcaagcaagagccagaagaaaaaagggtgctgaagctgcagaggctgtgatttcagttttgtctcaaaaatgag

SEQ ID NO: 245130 - DNA, 526 bp, Unknown
  Bacterial polypeptide expressing nucleotide sequence isolated from the Sargasso Sea
atgcgggttccaccacaatctgttccccatagtgaagcagttgcaggctgcaagaaatatgcattacaaacggcgtctgttccgggtactgtgcgcgttgcaattgctgtgtcgaaatataacgaggcaatcacaggccgactggtaaacggggcggtcgagactcttaatgccgctggtgtttcatctgaccgaattgaaatagcggaagttcccggagctttcgagttgccgcttgctgctcatgctcttgccggtagtggacgatttgcagcggtgctgtgtctcggtgcagttattcgtggtgagacaactcatgatcaacacatcaatacagcggttgccaacggtgtggaaagtgtcggtcggcagtgtggaattcccgttctcttcgggttgctcacgtgtgagacgcgaggtcaggcagaggcccgggctggtggtgatgttggcaacaaaggcgatgagtgtgcgaaggctgcgattgccataatgaacctgttggaagatcttcctaagaattgat

SEQ ID NO: 245131 - DNA, 866 bp, Unknown
  Bacterial polypeptide expressing nucleotide sequence isolated from the Sargasso Sea
taaatcaggagctttagaaaaaagaatgatcgaagaaggtgctgattctgcagcagacctttacattacagcagatgctggaagatgtggagcttttcaagcaaaaggtatgacgcaaagtggtttaacttcaccgacaattaaatcatctgttcctaaaaactttagaacatcacactgggttggagtagcaaaaagagcaagaataatttactactcaccagaaagagttactggtgcagaattatccggaatgagttatgaaggcctggctgatccaaaatggaaaggcagattagtaataagaaaatcaagcaacatttataataaatctcttgtagcttcattaatcgcaaataatggaaaaaaagctactgctgaatgggcaaagggagttgttgcaaacatggcaagaccttctgaaggaaacgacagagctcaaattatggctgtagctgctggagaagcagacatagctgtagctaatacatattatttagctcttatgttatctggtaacaaaggtgcagaacaacaagaagctgcaaaaaaagttaaagcatttttccctaaccaagatggtagaggaacacacatgaatattagttgtgctgctttagttaaaggtgctccaaataaagcaaatgcagttgctcttgttgactatttattatcaccttcagctcaagaacactttactaataatacttttgagtttccaatgattgctggtgtttccccaagtccattagtagtaaataatttgggattagattttaaacaagatctaaaaacaaaagtttctacttatggaaaaaatcaagctgctgcattagaagtaatgacagctgcaggttggaagtaga

SEQ ID NO: 245132 - DNA, 397 bp, Unknown
  Bacterial polypeptide expressing nucleotide sequence isolated from the Sargasso Sea
aatgaaaaaaaaaatttgtatagtcccatctgtttataacgcagaaattacaaataaaatggcccaaggtgcaattcgtgtactaaaagccaataacgttaaaacattaaagataatcaaagttcccggagcatttgaaattccacaagtaatatcaatgttgataaacaaatatgatggttttgtagctattggatgcattattaaaggtgaaactgcaaattttaatttattatcaagtgctgttacaaatggaattatgaaactttctatactaaataaaaaacctatttctaatggtttaataacatcctttactagaaagcaagcaacaaaaagaatagataatggaatggaagctgctcgagcagtcatcaaggctttgaaaataatttaa

SEQ ID NO: 245133 - DNA, 725 bp, Unknown
  Bacterial polypeptide expressing nucleotide sequence isolated from the Sargasso Sea
aaaagcagctgttccgtcaaactttagaacaaaccattggacaggaattgctaaaagagcaagaattgtttactacgctccagatagagtatcaggcgcggagttgtcgggtttaacttacgaaagtttagctgatccgaaatggaagggtagattagtaattagagcatcaggtaacatttataataaatcacttgtagcatcattagttaaaaataatggtaaaaaagctacagctgattgggcaaaaggtgttgttgcaaacatggctagaacaccaacaggaaatgaccgagctcaaattatggcagtcgctgctggggaagcagatattgctgttgctaatacatattatctagcattaatgttatcaggaaacaaaggagcagagcaacaagctgctgcaaaaaaagtaaaagctttctttcctaaccaaaatgatagaggaacacatatgaatattagttgtgctactttagtaaaaggcgcaactaataaagcaaatgctattaaacttgtagagtttttattaactccagaagctcaagagcactttacaaataatacttttgagtttccaatgatcgatggtgtttctccaagcccgctggttgtgaacaatataggattagattttaaacaagatctaaaaactaaagtttcaagttatggcgctaaacaagctgatgcattagaagtaatgacagcagctggttggaaataat

SEQ ID NO: 245134 - DNA, 1030 bp, Unknown
  Bacterial polypeptide expressing nucleotide sequence isolated from the Sargasso Sea
atgaaaaaaatatctatttctgcattaattttatccttatttatttcaacttttgcgatagcaaatgaggtgaatatttttaatgctagacactataaagcggacgcagaactttatagcaaatttacagctgcaactggaattaaagtaaatttaattaatggtaaagctggggctttagaaaaaagaatgatcgaagaaggggaagattcttctgctgatctttacattacagcagatgctggaagatgtggtgcatttaaagcaaaaggaatgacacaaggtggattaatatctccaactatcaaaaattctgtaccaaaaaacttcagaacaactcattgggttggtgtagctaaaagagcaagaatagtttactacgcaccagagagagtaagtggagcagaattatctggactaacttatgaaagtctggctgatcctaaatggaaaggtagaattgcaataagagcatctagcaatatttacaataaatctttagtagcatcattagtaaaaaataatggaaaaaaagctgctagagagtgggcaaaaggtgttgttgccaatatggcaagagatcctaaaggaaatgacagagctcagattatggcagttgccgcaggagaagcagacatagcagttgcaaacacatactatttagctttgatgttatccgggaacaaaggtgcagaacaacaagcagcagctagaaaagtaaaggcatttttccctaatcaaaatgatagaggaacacatatgaatattagttgtgctgctctagttaaaggtgctccaaataaagctaatgcaattgcacttgtagattatttgttatcaccagaagcacaagaacatttcactaataatacttttgagtttccgatgattgcaggtgtttcaccaaacccattagtagtaaacaacttaggtttagattttaaacaagatttaaccacaagcgttgctagttatggagctaagcaagcggatgcattagaagtaatgacagctgcaggttggaaataac

SEQ ID NO: 245135 - DNA, 5923 bp, Unknown
  Bacterial polypeptide expressing nucleotide sequence isolated from the Sargasso Sea
tacgcgagcaggatcgttctggtcggcacggagaatggcgtcggcgtgtcgaataaaggggttctcgccgcgcaggcaggtgatctcgtattgagcaccaatgggctgttgacgcttgccgggcagactagcgcgagcggtaaccttgccttgtcagcgcgcgacggcatcgacaacagcggcaccacctatgcgcagcataacgtgacagcgaacacgtctggcgcgctcacgaacagcggcgtgctggccgcgcagcagaatacgaccgtcaatgcgggtagtgtcgcctcgaccggcacgctcggcgcaggtgtgaacggcgacggcagcctggcgcaggcgggcgacctttctgtgacggcaggcggcacattgaccgcgaccggacgtaacgcggcgggcggcaatgcggcgctgaatggcgcgacggtcaatctcgcccgaagccgtacctcggctaacggagcgctggtcctgaccgcgagcggcggtgatctgaacctgtcgggcgcaacggtgacggcgggcggcgcgctggacacgcgcgcctccgggacgctcacgaacgacagcggtgtactgtcctcgggcggtgcgcagactgtcacggccggcgcactgtccaatcgcggtggccagatcgcctcgggtggcacgctcaacgtcactgcaactagtgacttgctgaaccagggcggcacgctgcaggcagcaggcgcgttctccgtcaatgcgggttcgctcgacaacacaggaggtcatgttgcagcgctaggcgcggacggcctcacgctgaccacaaccggtctgctgaacaacggcgcgagtgggaccggggttggcaccatcggcggcaacggcaatgtggccgtgcaggccggtcagatcgcgaacgctggttcaattacagcggtgcagtcgctgattgccggcgccgtgcagagcctgttcaacggcggcacgctggcggcaaacggcaacgtcacgctggccacaggttcgacgttgacgaatgcgaataccatcgcggcgggtcgtctggtcacgctttctgccgcgacgttcgacaacagccacggcaacctcggtgcggaccagctcgcgctgcatgcggcggacctggtcaaccgcggcggcactatcacgcagaccggcacgggcacgacgacccttgacgtgaccggcacgctcgacaactccggcggaacgctgcagaccaacagcgatagcctctcgctcagccccgctgcgctcgtcaacgacaacggcacgattgccagctccggcacgggcacgctaacggtcaataccggaacactgtcgaacaatggcggcaccatcgcgacgaatggtgcgcttgatgtccgctcgggtgcggcttcgaaccggggcggcacgctggccgcgcagacgggtgcgacgttgcacgtcgcctcgctggacaacagctcgggcggctacgtcggcgcgcagactgtttctgtgtcgggcacgggcgcagtgaacaacgcgggcggcacaatccaggccgatgacacgctgtccatctccgcacagtcgcttgccaacgatggcggttccatcgcgaacggcggtacgggcacgacgacggttagcgccagcggtgcaatcacgaacacgaccaacgggctgattggcggcaacggcgatgtatcggtatcgggcggcagcatcggcaatgcgggtggcaccgtcacggcgggtggcgcggccacggtgcagtccggcagcacgctcgataaccgggctggcctgactcagggcagtggcgctgtctcagtgtctgcgcgaggcgctatcgacaacacgggcgggcagatcgaggcagacggcactgctgccatgctcgccgtcacaggcgcatcgctcgacaacacgaacgggcgtatcgcgaacaccggatcaggcgcgacgacggtcagcgcggccaccgtcacgaacagcaatacgggcggtgtcgctggtgcgggcaccatcggtggcaacggcgacctgagcgtgaacgccgacacgctgtcgaacacgaatggcgcgcagcttgtgtcgggccacgacctcacgctgactatcacgcagcttgcggacaacacgaacgcgacgctctcgggcgcaaacaacgtcaccctcaacggcccaaacgcaggggtcatcaatgcgggcggctcgatccgcggcaacggtgcgattacgctgaatgcggcttcgctcgacaacacatctggccgcattggtaatgacacgggcagcggcggttcgatatccgtcaatgccggcacgctggcaaaccaggacggcgcaatcggcagtgaccagaatctgagtgtcactgcgaaccagcttacgggtgacggcaggatcattgccggtaacgacggtgcggtcacggtcaacggcgactacacgctcaccggcagcaaccagatccaggctaaccacgacctgacgttcacggcagcaggcaccttcacgaatcagggcacgctcggcgcggtgaacgcactgacggtgaacgcggcgaacgtggacaaccaggcaggcgcggatctgaactcgtcgaccacgacggtcaatgcggcgaacgcgatcaccaacgaaggccgcatcgaaggcgataccgttacgacacatagcgggtcgctggccaacacagcagcgatcatcggcaacacggtcacgctgaacgccagccattccatcgccaacaccggcactgccgccgtaatggccgcggcttcgcaactgaacctgtattcgcccggcgatatctccaatacgggcggtgcgaacctcttcagcctcggcgacatcagcatcgctgcagatggcacgcgcgatgcgaacggcgtgctcgcgaaccgcagccactccgttaccaacgaccagtccaccatcgaggcgcagggcagcatcgaaattgccacgcagacgctcaccaacacgcgccccgcgcccaccgtcgagacggtgacaaccggtgttgaagccgaacatcagaccaagcgctcgaagtacatggcctgcacgacgacgaacgccgacaagggttactgtacacaggccatgtgggacaacggctatatcgcgccggtcaacgcgaccttctccagcgcggacgttgtgtcgcaggcttccggtccgaatgcgacggacaggacgctggtggtgaacatcaacggccagccgcagacgatctggtacaacaccctgacggctaacaccgacggcacgatcaccgtcagctactgggacggctacgatccgcacgtcaactacgatcctggcaccgaatacgcgtcgcgcaacgacgcccacaagggttaccagcgtgtcgagatcgcccgcgacacgaccaccaccacgcagcaggaccaggtaagcggcccgcaggcgcagcaggcgcagatcatggcgggcggcaacatggtgcttgcgaacgtcggcacgctgaacaatgagtacagcgccattggcgcgggcggctcgatccagattggcagcgccgatgcgagcaccgatgcaaccggcgatgtggcgagcggcaactacggcggcacgctggtgaacaacatcggccagacgctctaccagtaccagaagcaggacatcgtttcgacctacgcgtggaacgagaacatttcgcgcgatgtcggcaccgtggttgagccgtcgatagttctgtccccggtcgccattggcggcacgggtgggacgatcatcgcgaacaacaccgtgcagatcagcgcgaccgacatcgacaacacgaacgtggcggcggccaactccgcaaccggcgcgacgggcggcacgctgggcgcgaacggcaccgtgggcggcatcaccggcacaggcgcgcagaccgtcaacctcgccaccggccagacacaaactattaacgcgccgcagtccattgccggaccgggcggtgcgctgaatatcacgctgccgtcgagcggcctgtatacctttaacacggcccccggcgcgtcgtatctggtggtcaccgatccgcgcctgaccagctacacgagtttcatatcgagcgactacatgctgggagcgctcggcctcgatccgtcgaagaccatcaggcggctcggtgacggcgcatacgaagaacagatggtacgcaaccagatcacgcagctcacgggccgggtctacctgcagggctacaccagcaacgaggacgagtatcgcgcgctgatgaacagcggcgtgaacgtcgcgaaggcattcaatcttgaaccgggcatggcactgagcgccgcgcagatggatgcgctgacgagcgatatcgtctggctggtcagccagagcgtcacgctgcccgatggcacgacgcaaacggtgctggccccggtcgtctatctggcccacgcccacgcgaacgacctgcagccgggcggtgcgctgatcgccgccgatgatgtggaaattcacgcgacgggcagcgcgaccaactcaggcgttatcaggggcggtacacagaccgttattgccgcgaccagcatcctgaaccggggtggctccatcggtaacggttcgggcagcagcacggacagcggcacgaccgtagtttcggcgaccaatgatgtcgtcaacgcgtcgggacgcatcaccggcaaccgggtcgccgtgcttgccggtcatgacatcgtgaacacgacgctggtggatagcgtgggcgtcagttcggcggtgggcgacagcaagatcagccagagcctgctgggcacacagggcacgattgcatcgacgggtgacctgcttgtcgtggcgggaaatgacctgtcagttcacggtgcaaacatcgcggctggcggcaacgcgcagatcgcagcgggtcacgatattacggtggataccgtgcagtctgatacgtcgcagtccgtgacgaagaacgaccagcaccattgggaagccagcagcacgctcaaccagacgagcggcatcagtgctggcggcgaccttgcgatgcagagcggtaacgatacgacgcttaaaggggcgacgctcagcgcgggcggtgatatgacggttgtcgcgggtggcaatctgacggccacgaccgtgaccaacaccgcgacctacaacaatgtcgccacggacgacaaaacccgcaaacagtccgagcgcagctacgacgaacaggcagtcggcacgaaccttatcgcgggcggcaatgccacgctcgcggccctgagtgccgatcccggcaaaggcagcgtcacgctcacgggttcgtcgctggcggcgggcagcggcgccgcaaccattgcagccacgagtgacgtgactatcaacgaaggccgcgaggaacacgattcgtacgcggcgaccgaatcgaagcgtggcagcttcgtgcatggctcgaccaccgacacgatgcggaacacgcaggcgaacatcggcgtgggtagcactgtgtccggcgacacggtcacggtcagtgcgggcagggatctgagcgtgaaaggttcgaccgtcgcgggcacgaacgacgtgaatctggctgcggcgggcaacgtgaacatcacgacctcacaggacacgcagggcacgtcgagctattaccagaagcacgcgtccggctttggcacgagcggcggaattggcatatcggtgggcagcaggacgcagaccgataccgctcacgacgctacggtaacgaacactggcagcacggtcggctcgctcaacggcagtctgaaccttaccgcaggcaaggacctgcatgtcacgggtagtgatctcgttgccgggcagaatgtcaccggcacaggcgcgaacgtcacgatcgactctgccgtcgatacgatgcaccacgacgagacgcatgcggtcaaacagagcggcttcacgcttgcgatcaaggctccggtggttgacgcggtgtcca

SEQ ID NO: 245136 - DNA, 958 bp, Unknown
  Bacterial polypeptide expressing nucleotide sequence isolated from the Sargasso Sea
aacattttcaatgcaagacattacaaagcggatgctgaactttacggaaagtttacagcagctactggaatcaaggtaaatttaattaacggtaaatcgggagctttagaaaaaagaatgattgaagaaggttctgattctgcagcagacctttacatcactgctgatgctggaagatgtggtgcttttcaagcaaaaggtatgacgcaaagtggattaacttcatcgacaattaaatcatctgttccaaaaaactttagaacaacacactgggttggagtagcaaaaagagcaagaataatttattactcacctgaaagagttactggtgctgaattatctggaatgacttatgaaggtttagccgatccaaaatggaaaggtagattggtaattagaaaatcaagcaacatttacaataaatctcttgtagcttcattaattgcgaataatggaaaaaaagctactgcagaatgggcaaagggagttgttgctaacatggctagagaatctacaggaaacgatagagcacaaattatggcagtagctgccggagaagctgatattgctgtagctaacacatattatttagctcttatgctatctggtaacaaaggtgcagaacaacaagaagctgctaaaaaagttaaagcattttttccaaatcaagatggcagaggaacacatatgaatattagttgcgctgctctagttaaaggtgccccaaataaagcaaatgctattgcacttgttgactatttattatcgcctgaatctcaagaacactttactaataatacttttgagtttccaatgattgctggagtttcaccaagcccactagtagtaaacaatttgggattagattttaaacaagatctaaaaacaaaagtttctagttatggaaaacatcaagctgctgcattagaagtaatgacagctgctggttggaagtaat

SEQ ID NO: 245137 - DNA, 965 bp, Unknown
  Bacterial polypeptide expressing nucleotide sequence isolated from the Sargasso Sea
aatgaaaaaagtaacaataataagtttatttgtttctttaatagtctcgtcttttgctattgcaaatgaagtaaatatcttcaatgcaagacattacaaagcagataatgagctttatagcaaatttaccaacaaaactggaattaaagtaaacctgattaatggaaaggccagtgcattagaaaaaagaatgattgaagagggggctgactcttcagctgatctttatattactgctgatgctggaagatgtggagctttcaaggctaaaggaatgactcaaagtggtttggtgtcaccgacaattaaatcttctgttccaaaaaattttagaactacgcactgggtaggagtagctaaaagagcaagaattatttactattcaccagaaagagttagtggtgctgaattatcaggtcttacatatgaaggtctagctgatccaaaatggaaaggcagattagtaattagaaaatcaagcaacatttataacaaatctcttgtagcttcattgatcgagaataatggaaagaaagctgctgctgaatggtctaaaggagttgttgctaatatggcaagaacaccaaaaggaaacgacagagctcaaattatggcagttgcagctggagaagctgatattgctgtagcaaacacttattacttggcactaatgctatctggtaataaaggagcagaacaacaagcagctgctaaaaaagttaaggcattttttcctaatcaaaatgatagaggaacacacatgaatattagttgtgcagctttagtaaaaggggctcctaataaagcaaatgctatttctcttgttgactttttattatcaccagaggctcaggaacattttacaaataatacttttgagtttccaatgatagctggggtatctccaaatccattagtagtgaataatttaggattagattttaaacaagatttaaaaactaaag

SEQ ID NO: 245138 - DNA, 391 bp, Unknown
  Bacterial polypeptide expressing nucleotide sequence isolated from the Sargasso Sea
atgaaaaaaaaatatttaattgttgtagcagattattataaagatattgctgatggcttaataagcagtgctttaaaaataattccaaaaaaaaatataataaaaattattaaagtacctggtgcttttgaaattccaattacaatctctaaaaatttaaaaaaatatgatggttttttagctttaggatgtgtaattaaaggtcaaacccctcactttgattttatttctcaagcttcaacagatgccataatgaaattatctatagatagtaaaaaaccaattggaaatggaataattacctgtcttaatatggctcaagcaagagcaagaagaaaaaagggttctgaagctgcagaagctgtgatttcagttctatctcaaaaatgag

SEQ ID NO: 245139 - DNA, 619 bp, Unknown
  Bacterial polypeptide expressing nucleotide sequence isolated from the Sargasso Sea
catgttcaccggcatagtacagggaaccgccgaactggtggccatcgacgagctgcccaactttcgtacccacgtgatccgcatgccgagcccggcctggggcgaggggctggcgctgggcgcctccgtggcccacaacggctgctgcctgaccgtcacccgggtcgagggggagctggtcagcttcgatctgatgcaggagaccctgcgcctcaccaacctcggccagctgcagccgggggacaaggtcaacgtggagcgggccgcccgctttggcgacgagattggcggccatgccatgtccggccacatcatgggtaccgcacaggtggtgtcggtcatcgacactcccaacaaccggcaggtgtggtatcgcctcgcccccacgctgatgaaatacgtgctgaccaagggttacatcggcatcgacggcatcagcctcaccgtgggagaagtgcgcagcaacgagttctgcgtcaatctcattcccgagacgctggcccgtaccaacctgggttgggtcaaagccggctggcacaccaacatcgagattgacccccagacccaggccatcgtcgacacggtggagcgggtactggcggcccgtcagccggggtaa

SEQ ID NO: 245140 - DNA, 394 bp, Unknown
  Bacterial polypeptide expressing nucleotide sequence isolated from the Sargasso Sea
atgaaaccaaaaatttgtatagttatttcaacttataatagcggtattacaaacaaattactttttagtgctaaaaatgaattaaaaagatacggagtaactagagcgaaggattataaggtacccggtgcctttgagataccagtcgctatagccagacttgctaaaaaatatgatgcctttattgcaataggttgtatcattaagggtcaaacagcaaattttgatttaatttcaaacgcaataacaaacgcaataatgcatttgtctataaccaaaaaaaagccgattggaaattcaattattacattatttaacaaaaaccaagcttccaaaagatataacaaaggcaaagaagccgctaaagctgtcatagaggttttaaagataaagt

SEQ ID NO: 245141 - DNA, 772 bp, Unknown
  Bacterial polypeptide expressing nucleotide sequence isolated from the Sargasso Sea
cttgttaatatcaacctttgcaatcgcaaacgaggtaaatattttcaatgcaaggcattataaagctgatgctgaactttatggaaagtttacagcagcgactggaattaaggttaatttaattaacggtaaatcaggagctttagaaaaaagaatgattgaagaaggagctgattctgcggcagacctttacatcacagctgatgctggaagatgtggtgcttttcaagctaaaggtatgacacaaaacggattaacttcaccgacaattaaatcatctgttccaaaaaactttagaacagcacattgggtaggtgtagcaaaaagagcaagaataatttactactcaccagaaagagttactggtgccgaattatctggaatgtcttatgaaggtctagctgatccaaaatggaaaggtagattagtaattagaaaatctagcaacatttacaataaatctcttgtagcttcgttaattgcgaataacggtaaaaaggctaccgctgaatgggcaaagggagttgttgctaacatggctagagaatctactggaaacgatagagctcaaattatggcagtagctgctggagaagctgatattgctgtagctaacacatattatttagctcttatgttatctggtaacaaaggcgcagagcaacaagaagctgccaaaaaagttaaagcattttttccaaatcaagatggtagaggtacacacatgaatattagttgtgctgctttagttaaaggtgctccaaataaagca

SEQ ID NO: 245142 - DNA, 355 bp, Unknown
  Bacterial polypeptide expressing nucleotide sequence isolated from the Sargasso Sea
atctggtaataaaggagcagaacaacaagctgctgctaaaaaagttaaggcattttttcctaatcaaaatgatagaggaacgcacatgaatattagttgtgccgctttaattaaaggagctcctaataaggcaaatgctattgcacttgtagacttcttgttatcaccagaggctcaggaacatttcacaaataatacttttgagtttccgatgattgcgggggtatcaccaaatccattggtagtgaataatttaggattagattttaaacaagatctaacaactaaagtttcaagttatggaaaaaatcaagcagcagcattagaggtaatgacttctgctggatggaagtaa

SEQ ID NO: 245143 - DNA, 400 bp, Unknown
  Bacterial polypeptide expressing nucleotide sequence isolated from the Sargasso Sea
aatgaataaaaaaatttgcattgttatttctacatataacgaacatattacaataaatttattaaaaagcgctaaaaaggaactagaaaaaaataaattcaaaaaaattagcgttataaaagttcctggtgcttttgaaattccagttacaatatcgaaattaataaataaatatgatggcttcattgccatcggttgtataattaaaggagaaacaactaattttgatttaatttcaaaagctataacaaatggtattatgagcctgtctataagtaataaaaaaccaataggcaactcaattcttacacttcttaaaaagaaacaggcgtttaacagatttaatagagggaaagaagctgccaaagccgtatatcaagttcttaaaatagagaactaa

SEQ ID NO: 245144 - DNA, 391 bp, Unknown
  Bacterial polypeptide expressing nucleotide sequence isolated from the Sargasso Sea
gatgaaaaaaaaatatttaattgttgtagcagattattataaagatattgctgatggcttaataagcagtgctttaaaaataattccaaaaaaaaatataataaaaattattaaagtacccggtgcttttgaaattccagttacaatctcaaaaaatttaaaaaaatatgatggttttttagctttaggatgtgtaattaaaggtcaaacgccacactttgattttatttctcaagcttcaacagatgccataatgaaattatctatagatagtaaaaaacctattggaaatggaataattacctgtctaaatatggctcaagcaagagcaagaagaaaaaagggtgctgaagctgcagaagctgtgatttcagttttgtctcaaaaatga

SEQ ID NO: 245145 - DNA, 391 bp, Unknown
  Bacterial polypeptide expressing nucleotide sequence isolated from the Sargasso Sea
aaaattctatctggctgtcttgattgtttaaaaagacatggtttagatacttcagaattaagcaatcaagtagatatagcttgggttccaggttcattcgaattaccaatcgcagctaaaaccctagtgaaaaaaaagagttatgacgttgtaattgctcttggggctgtgatccgtggtgaaacttcccactatgatgtagttatatctgaggcgagcaagggtatttcgcaagtatcaaatgaaaataatgttccaattatttttggagttttaactactgatactatgcagcaggctttagaaagagcaggtattaaaaataatcttggttggaattatgctttacaagcaattgagatgggatctttaattaaaaatttaaattaat

SEQ ID NO: 245146 - DNA, 334 bp, Unknown
  Bacterial polypeptide expressing nucleotide sequence isolated from the Sargasso Sea
aaaaggatatgattatgagcttgtggaggtccccggtgcctttgaggtacctgcagctttagcttatgctgcaaaaacgtctaaatatataggttatgttgcattaggatgtgtaataagaggagaaacttctcattacgattatgtttgcaatgaatctgcacgagcacttatgcaattatccattgaaggtttatcaattggttatggtatcttaacatgtgaaagtaaagagcaagctatagctagagctaatcctaaaggattaaataaaggtaaagctgcaactttagcttgtttaaggatgatagaactaaaaaaagaaatagattaa

SEQ ID NO: 245147 - DNA, 478 bp, Unknown
  Bacterial polypeptide expressing nucleotide sequence isolated from the Sargasso Sea
aatggctatttttgagggttcctttactaatgcatctactttaaaagttgggattgtaatatcaagatttaatgatttaattacaaataaaatcctatctggttgtcttgattgtttaaaaagacatggtttagatacttctgaattaagcaatcaagtagatatagtttgggttcctggttcatttgaattaccaatcgcagctaaaaccctcatgaaaaaaaagagttatgacgttgtaattgctcttggggctgtaatccgtggtgaaacttcccactatgatgtagttatatctgaggcgagcaaaggtatttcacaagtttcaaatgaaaataatgttccaattatttttggagttttaactactgatactatgcagcaggctctagaaagagcagggattaaaaataatcttggttggaattatgctttacaagcaattgagatgggatccttaattaaaaatttaaattaa

SEQ ID NO: 245148 - DNA, 347 bp, Unknown
  Bacterial polypeptide expressing nucleotide sequence isolated from the Sargasso Sea
agatacttctgaattaagcaatcaagtagatatagtttgggttcctggttcattcgaattaccaattgcagctaaaactctcatgaaaaaaaagagttatgacgttgttattgctcttggggctgtgatccgtggtgaaacttcccactatgatgtagttatatctgaggcgagcaaaggtatttcacaagtttcaaatgagaataatgttccaattatttttggagttttaactactgatactatgcagcaagctttagaaagagcggggattaagaataatcttggttggaattatgctttgcaagcaattgagatgggatctttaattaaaaatttaaattagt

SEQ ID NO: 245149 - DNA, 490 bp, Unknown
  Bacterial polypeptide expressing nucleotide sequence isolated from the Sargasso Sea
atggccactttcgaagggcgtttcagtgatacgtcgggactgcgcatcgctgtcgtggtggcccgattcaacgacttggtcaccagcaaactcttaagtggttgtctggattgcctgcatcgccatggcatcgacatctcagctgaaagtgcccagttggatgttgcctgggtgccgggttcctttgaattgccggtggtgacccagcaactcgcccgcagtggtcgctacgaggtgctgatcaccctgggggctgtgatccgtggtgacaccccccatttcgatgtggtggtggctgaatccagcaaaggaattgcagctgtctcgcgtgacacaggcatcccggtgatctttggcgtgctgactaccgacaccatgcagcaggccctggaacgggctggcatcaaaagcaatctgggttggtcctacggcttgcaggccttggagatgggatcgttgatggccacgcttgagagcgccagcgcttgat

SEQ ID NO: 245150 - DNA, 478 bp, Unknown
  Bacterial polypeptide expressing nucleotide sequence isolated from the Sargasso Sea
aatggctatttttgaggggtcttttactaatgcatctactttaaaagtaggaattgtaatagcaagatttaatgatttaattacaaataaaattctatctggttgccttgattgtctaaaaagacatggtttagatacttctgaattaagtaatcaagttgacatagtttgggtaccaggttcattcgaattaccaatcgcagctaaaactcttatgaaaaaaaagagttatgacgttgtcattgctcttggggctgttattcgtggtgaaacctctcactatgatgtagttatatcagaggcgagtaaaggtatttcacaagtttcaaatgagaataatgttccaattatctttggagttttaactactgatactatgcagcaggctttagaaagagcagggattaagaataatcttggttggaattatgctttacaagcaattgagatgggatctttaattaaaaatttaaattag

SEQ ID NO: 245151 - DNA, 493 bp, Unknown
  Bacterial polypeptide expressing nucleotide sequence isolated from the Sargasso Sea
aatgacgcccgaaaactctgaaagcaatcaaaatcaatctttatctatcgccatcgtagctggaaagttcaatttagagatcactgaaagactgattgacggagcgaaatcttatcttgaatcgcagggcatcgccccagattcgatacacacttactgggttcccggcgccttcgagatcccatttgcgtgcagtgccattgcaaagaacgcaagtgtagatgggatagtaacgctaggtgctgtagtcaggggtgggactccacacttcgagtttgtagccggcgaatgtgcaagaggagttcgtgaggtaagtattgacaccggtattcctatagcatttggagtcctaacaactgatactttagaacaagctcatcaacggtcagatatttcttatgttgaccacgacggctcaacgggagataagggatcagcagcggcctcggctgtttttgaaatgattaacttagtcaggacgctaaacgcctga

SEQ ID NO: 245152 - DNA, 478 bp, Unknown
  Bacterial polypeptide expressing nucleotide sequence isolated from the Sargasso Sea
atggctatttttgagggttcctttactaatgcatctactttaaaagttgggattgtaatagcaagatttaatgatttaattacaaataaaattctatctggttgtcttgattgtttaaaaagacatggtttagatacttctgaattgagcaatcaagtagatatagtttgggttcctggttcattcgaattaccaatcgcagctaaaaccctcatgaaacaaaagagttatgacgtcgtaattgctctaggggctgtgatccgtggtgaaacttcccattatgatgttgtcatatctgaggcgagcaaaggtatttcacaagtttcaaatgaaaataatgttccaattatttttggagtcttaactactgatactatgcagcaagctctagaaagagcagggattaaaaataatcttggttggaattatgctttgcaagcaattgagatgggatccttaattaaaaatttaaattaat

SEQ ID NO: 245153 - DNA, 895 bp, Unknown
  Bacterial polypeptide expressing nucleotide sequence isolated from the Sargasso Sea
gatgcgcgttggtgacgaagatattgttacatctgcctctcaggtcagagaattcatggcatccacgaactttaatcttccggcgggtatgcagcttgaaatcgtatctgactcgtctgagagtacaaagactcgtatccagacagtatcgaaaaatgcttacacagggcttgttttggttctagtgattcttgcgctctttctacgcttcaaaatcgctatttgggtagcagccggcattccaatagctatactaggcgcgttgatagcattccccccaatgggtcttaccattagttcattaacagtaatgggcttcatattagtccttggcatagtggttgacgatgcgatcgtggtgggagaaagagtgcatgcctatgagcagaaggggctaagcaagaatgcagcagctatagagggcaccgtcgaggtgtctgtaccggtaatttttggtgtcctgacgacgatcgccgcgttccttcccttgcttatagacaatacacaattttcatcgttctctaagcttattgggggcactgttgttttctgccttattgccagcctaatcgagtctcaattgatcctgccgggtcatatcgctcaccgcaagaccaaaggttactttatggatggctctcgtttggttaaggcgtggcagaatttccaaggtcgaattgcgagtgccttggaaaactttgctgagttaggttacaagagagccttaaaagtagtactcgactacaggtatgcggcgtgggccgctgccactggagtgatatgtgtggttctcgcattgctactcagtggtcgagtggtattccagttcatgccttcaatcgaaggagatcgaatttggagcaccttaaccatgcccgctggagtacctgcttcc

SEQ ID NO: 245154 - DNA, 439 bp, Unknown
  Bacterial polypeptide expressing nucleotide sequence isolated from the Sargasso Sea
cgttgaagcgcgattctataaagaaatcgccgacgagatggttgcgggagccattgccgcactcgaattggcgaacgcagagtttgagcggtaccccgtacctggcgcatttgaaattccggccgctgttaaatttgccgtgaaggcgatggaaattgacgagaccagacagcgcttcaatggatacgttacactcggatgcgttatccggggtgagacgacgcattacgactatgtctgcggagagagcgcgcggggcctgatggatcttgcaaaccggtattcgctcgctatcggctacggtattctcacctgcgaaaatcgagagcaagcatgggcgcgggcgtcccgggattgcggtgataaaggagccgccgcggcgaatgcgtgcctcgatatgctgcgtatgaagagcggcttcggcctctattcgagataa

SEQ ID NO: 245155 - DNA, 478 bp, Unknown
  Bacterial polypeptide expressing nucleotide sequence isolated from the Sargasso Sea
aatggcgacaattgagggtacctttgtcaattcctcttctttaagagtagctattgttatagctaggtttaatgatctcattactaataagctcttaagcggatgcatagattgtttatctcgtcatggcattgatgtatcagaatcaagtaatcaattagatattgcttgggtgccaggttcttttgaactgcctattatttctcaaaaacttgctcgtgatggtaattatgaggtggtaataaccttgggagctgtcattaggggtgacacaccgcattttgatgttgttgtctctgaggctagcaaaggaatagcaacagtatctagagaaacaggtgtccccattatctttggggtattgacaacagatacaatgcaacaagcgttagagagagcgggtattaaaaataatttgggatggagttatgcattgcaagctttagagatgggttccttgatgaaggcattgagttaa

SEQ ID NO: 245156 - DNA, 472 bp, Unknown
  Bacterial polypeptide expressing nucleotide sequence isolated from the Sargasso Sea
atttttgaggggtcttataccaacgcatctactttaaaagtaggaattgtaatagcaagatttaatgatttaattacaaataaaattctatctggttgtcttgattgccttaaacgtcatggtttagatacttctgagttaagtaatcaagtggatatcgtttgggtacctggttcatttgaattaccgattgcagctaaaactcttatgaaaaataagagttttgatgttgtaattgctcttggagctgttatccgtggtgaaacttctcactatgatgtagttatatctgaggctagcaaaggtatatcgcaggtttcaaatgagtataatattccaattatctttggagttttaaccactgatactatgcagcaggctttagaaagagcagggattaagaataatcttggttggaattatgctttacaagcaattgagatgggatctttaattaaaaatttaaattagt

SEQ ID NO: 245157 - DNA, 466 bp, Unknown
  Bacterial polypeptide expressing nucleotide sequence isolated from the Sargasso Sea
atggctatttttgagggttcttttactaatgcatcaactttaaaagttggtattgtaatagcaagatttaatgatttaattacaaataaaattctatctggttgccttgattgtttaaaaagacatggtttagatacttctgaattaagcaatcaagtagatatagtttgggttcctggttcatttgaattaccaattgcagctaaaatcctaatgaaaaaaaagagttatgacgttgtaattgctcttggggctgtgatccgtggtgaaacttcccactatgatgtagttatatctgaggcgagcaaaggtatttcacaagtttcaaatgaaaataatgttccaattatttttggagttttaactactgatactatgcagcaggctctagaaagagcagggattaaaaataatcttggttggaattatgctttacaagcaattgagatgggatccttaataaaaa

SEQ ID NO: 245158 - DNA, 478 bp, Unknown
  Bacterial polypeptide expressing nucleotide sequence isolated from the Sargasso Sea
atgactatctttgagggatcttttaccaatgcttctacattaaaagtaggtatagttgtagcaagatttaatgatttaattactaataaaatattatctgggtgtcttgattgtcttaaaaggcatggtttagatacttcagaaacaagtaaagaacttgatattgtttgggttccaggatcttttgaactgccaatagcagctaaaacacttttgaaaaaatctaactatgacgttgtaattgctcttggagctgttattagaggagaaacttctcattatgatgttgttatttctgaggctagtaagggaatttcacaagtttcatatgaaaataatgtcccaattatttttggtgttttaactactgatagtatgcaacaggctttagaaagagctgggataaaaaacaaccttggttggaattatgctttacaagcaattgagatgggttctttaatcaaaaatttaaattagt

SEQ ID NO: 245159 - DNA, 232 bp, Unknown
  Bacterial polypeptide expressing nucleotide sequence isolated from the Sargasso Sea
gctgtgatccgtggcgacaccccccacttcgatgtggtggttgctgaagccagcaaggggattgccgcggtggctcgggatgctgcggtgcctgtgatttttggtgtgctcaccacagacacgatgcagcaggccttggagcgtgcaggtatcaagagcaacctgggctggagttacgggctggaagccctggagatgggcagcctgatgcgggccttgccgtcggcttgag

SEQ ID NO: 245160 - DNA, 454 bp, Unknown
  Bacterial polypeptide expressing nucleotide sequence isolated from the Sargasso Sea
ttgattgaaggtgatttaaatggctcaaatttaaaaattggtattgtttgtgcaaagtttaaccaaacaattactaaatcattattgatgggagcaatatctggtttaactgatcataaagtagatgaaagtaatattgatacatattttgtaccaggtgcatttgaagtaccaatagttgttgataggattttcccaaaatatgatgttgtaattgcaatcgcatgcgtcattcgtggaggaacaccccactttgactatgtctgcgacggaatcacaactggaataacaaccgctattcacacacatcagaagccatgcatattttgtgtccttacaacagataatgaagaacaagcacatgatcgctccaaagaaaattcaaaagataataaaggctatgaagctgctttagctgcaattgaaacagctaatattttaacaaatgtttaag

SEQ ID NO: 245161 - DNA, 319 bp, Unknown
  Bacterial polypeptide expressing nucleotide sequence isolated from the Sargasso Sea
atgaaagaaattaccggagatgtggtagcccaagggttcaaattcgcctttgttgtggcacgtttcaatgaactcatcggagaacgtcttttggagggggcattagatacatttcaacgtcatgggggcgatccggacaatgctctcgttatccgcgtccccggagcttatgaaatcccattggctgcaaataaaatagcaggaaagggtgagcatgacgcggtggtttgtcttggagccgtgattcgcggggaaacacctcatttcgactatgtggcggcgcaatgctgcgaacgggattgcttcggtctcccttgat

SEQ ID NO: 245162 - DNA, 478 bp, Unknown
  Bacterial polypeptide expressing nucleotide sequence isolated from the Sargasso Sea
aatgactgtttttgagggatcttttactaatgcatctactttaaaagttgggattgtaatagcaagatttaatgatttaattacaaataaaattttatctggttgtcttgattgtttaaaaagacatggtttagatacttctgatttaagtaatcaagtagatatagtatgggttcctggttcattcgaattaccaatcgcagctaaaacccttatgaaaaaaaagagttatgacgttgtaattgcactaggggctgtgatccgtggggaaacttcccactatgatgttgttatatctgaggcgagcaagggtatttcacaagtttcatatgaaaataatgttccaattatttttggagttttgactactgatactatgcagcaggctcttgaaagagcagggattaaaaataatcttggttggaattatgctttacaagcaatagagatgggatccttgattaaaaatttaaattaa

SEQ ID NO: 245163 - DNA, 415 bp, Unknown
  Bacterial polypeptide expressing nucleotide sequence isolated from the Sargasso Sea
atggataaatcatcaatcaagatctgcattgtcgcctctcaattcaatgagctcattgttgatagcttaatcaagagttcaattcaaactttagaaaaaaatggatatcaatctgatcctgagattttcaaggtacccggagcatatgagttacctcttgcagtaaagaatgtcgcagaaaagaaaataccagatggaatcatcgctttgggtgcaattgtaaggggtgcaacaccacactttgattatattgccacagagacagcggccggtctgactaaggtcagtctagaatataatattccagtaggcttcggtgtgctcacatgcgacacaatggagcaggccatagaaagatctggtgagggctcaggcaataaaggcattgagtcaactgaagctgttatggaatgat

SEQ ID NO: 245164 - DNA, 430 bp, Unknown
  Bacterial polypeptide expressing nucleotide sequence isolated from the Sargasso Sea
atgtctatttttgaggggtcttttactaatgcatctactttaaaagtaggaattgtaatagcaagatttaatgatttaattacaaataaaattctctctggctgtcttgattgtttaaaaagacatggtttagatacttctgagttaagtgatcaagtcgatatagtttgggttcctggttcattcgaattaccaattgcagcaaaaactctcatgaaaaaaaagaactatgatgttgtaattgctcttggtgcagtgatccgtggtgaaacttctcattacgatgtagttatatctgaggccagcaaaggtatttctcaagtttcaaatgagaataacgttccaattatttttggagttttaactacagatactatgcagcaggctttagaaagagcagggattaagaataaccttggttggaattatg

SEQ ID NO: 245165 - DNA, 399 bp, Unknown
  Bacterial polypeptide expressing nucleotide sequence isolated from the Sargasso Sea
tatgattcaaaaaaaatgcaatgttttgattgttgctgctactttttataaaagtattatcgacgaattaatcaaaggtgccggtcaggtgttaaatgactctgacgtttcattcaatataattgaggttcctggagcgtttgaattaccagctgttgtttcaatggctttagcagtagaaaaaagtgaaaataaaaagatatatgacggttacataactcttggctgtgttatcagaggtgaaacaactcattacgattacgtctgcggtgaaacggcaagggcactgcaagagctgtccactaaacaccagcttgctttaggttttggcttattaacagttgagaacgtggaccaagccaaagaaagagcttttgttgatagaaaaaacaagggtgg

SEQ ID NO: 245166 - DNA, 439 bp, Unknown
  Bacterial polypeptide expressing nucleotide sequence isolated from the Sargasso Sea
atggataaatcatcaatcaagatctgcattgtcgcttctcaatttaatgagctcattgttgatagcttaatcaagagttcaattcaaactttagaaaaaaatggatatcaatctgatcctgagattttcaaagtacccggagcatatgagttacctcttgcagtgaagaatgtcgcagaaaagaaaaaaccagatggaatcatcgctttgggtgcaattgtaaggggtgcaacaccacactttgattatattgccacagagacagcggccggtctgactaaggtcagtctagaatataatattccagtgggctttggtgtgctcacatgcgacacaatggagcaggccatagagagatctggtgagggctcaggcaataaaggcattgagtcaactgaagctgttattggcatgatagaatttttacataatctataag

SEQ ID NO: 245167 - DNA, 289 bp, Unknown
  Bacterial polypeptide expressing nucleotide sequence isolated from the Sargasso Sea
tatgattgtggaatctcgttattacgaagagatcgcggaagagcttttaagcagtgtcaaacatgaactacaagttgctggtgcaacttatgagctatttgaggtacctggtgcctttgaaataccgacagcaattaaatgtgcgattgatgcacaagcgaatggttcttcactctccagttttgatggtttcattgcacttggttgcgtaattagggggcaaacgacccattatgactacgtttgtggggagagcgcgcggggccttcaagatattgctattaattat

SEQ ID NO: 245168 - DNA, 442 bp, Unknown
  Bacterial polypeptide expressing nucleotide sequence isolated from the Sargasso Sea
tctgatcgttgaggcgcgcttctacgacgacctggccgacgccctgctggaaggggccaaggagacgctgaaggcgcgcggcgccgacttcgacgtcatcaccgtgcccggcgcgctggaggtgccgccagccatcgccctggccgaggaggcgggccgctttccgaccgccccccgctatgacggctatgtcgccctgggcacggtcatccgtggcgagacctatcatttcgagatcgtctccgatcagtcggcggccggcatcatggctctcggcgtcaagggcgtcatcatcggcaacggcatcctgacgaccgaggacgaggaccaggcctggtatcgggcgcgtctttcggaaggggataagggcggcggcgcggccaaggcatgcctggacctcattgcattgaagaagcggttgcgtcatggcgtcggcgcatga

SEQ ID NO: 245169 - DNA, 463 bp, Unknown
  Bacterial polypeptide expressing nucleotide sequence isolated from the Sargasso Sea
atgaaagaaattaccggagatgtggtagcccaagggttcaaattcgcctttgttgtcgctcgtttcaatgaactcatcggagaacgtcttttggagggggcattagacactttccaacgtcatggaggcgatccggacaatgctctcgtaatccgagtccccggagcttatgaaatccccttggctgcaaagaaaattgcaggaaagggtgagcatgacgcggtggtttgtcttggagccgtgattcgcggggaaacacctcatttcgactatgtggcggccaatgctgcgaacgggattgcttcggtctcccttgatagcggaattcccgtcagttttggcatcctcacgaccgataccattgaacaggccattgaacgttccggtaccaaagcaggcaatcagggaagaaatgcgaccctgacggccattgaaatggcctcccttttggcaaaaatctagt

SEQ ID NO: 245170 - DNA, 478 bp, Unknown
  Bacterial polypeptide expressing nucleotide sequence isolated from the Sargasso Sea
tatggctatttttgagggttcttttactaatgcctctactttaaaagttgggattgtaatagcaagatttaatgatttaattacaaataaaattctatctggttgtcttgattgtttaaaaagacatggtttagatacttctgaattaagcaatcaagtagatatagtttgggttcctggttcattcgaattaccaatcgcagctaaaactctcattaaaaaaaagagttatgacgttgtaattgctcttggtgctgtgatccgtggtgaaacttcccactatgatgtagttatatctgaggcaagcaaaggtatttcgcaagtttcaagtgaaaataatgttccaattatttttggtgttttaaccactgaaactatgcagcaggctttggaaagagcaggtattaagaataacctgggttggaattatgctttgcaagcaattgagatgggatctttaattaaaaatttaaattag

SEQ ID NO: 245171 - DNA, 478 bp, Unknown
  Bacterial polypeptide expressing nucleotide sequence isolated from the Sargasso Sea
atggctatttttgagggttcttttactactgcctctactttaaaagttgggattgtaatagcaagatttaacgatttaattacaaataaaattctatctggttgtcttgattgtttaaaaagacatggtttagatacctctgaattaagcaatcaagtagatatagtttgggttccaggttcattcgaattaccaatcgcagctaaaaccctcatgaaaaaaaagagttatgacgttgtaattgctcttggggctgtgatccgtggtgaaacttctcactatgatgtagttatatctgaggcgagcaaaggtatttcgcaagtttcaaatgaaaataatgttccaattatttttggagttttaactactgatactatgcagcaggctttagaaagagcagggattaagaataatcttggttggaattatgctttacaagcaattgagatgggatccttaattaaaaatttaaattaat

SEQ ID NO: 245172 - DNA, 463 bp, Unknown
  Bacterial polypeptide expressing nucleotide sequence isolated from the Sargasso Sea
tatgaaagaaattaccggagatgtggtagcccaagggttcaaattcgcctttgttgtcgctcgtttcaatgaactcatcggggaacgtcttttggagggggcattagatacatttcaacgtcatggaggcgatccggacaatactctcgtaatccgcgtccccggagcttatgaaatccccttggctgcaaagaaaatagcaggaaagggtgagcatgacgcggtggtttgtcttggagctgtgattcgtggggaaacacctcatttcgactatgtggcggccaatgctgcgaacgggattgcttcggtctcccttgatagcggaattcccgtcagtttcggcatcctcacgaccgataccattgaacaggccattgaacgttccggtaccaaagcaggcaatcaggggcgaaatgcaaccctgacggccattgaaatggcctcccttttggcaaaaatctag

SEQ ID NO: 245173 - DNA, 478 bp, Unknown
  Bacterial polypeptide expressing nucleotide sequence isolated from the Sargasso Sea
aatggctatttttgagggttcttttactaatgcctctactttaaaagttgggattgtaatagcaagatttaatgatttaattacaaataaaattctatctggttgtcttgattgtttaaaaagacatggtttagatacttctgaattaagcaatcaagtagatatagtttgggttcctggttcattcgaattgccaatcgcagctaaaaccctcatgaaaaaaaagagttatgacgttgtaattgctcttggggctgtgatccgtggtgaaacttcccactatgatgtagttatatctgagacgagcaaaggtatttcacaagtttcaaatgaaaataatgttccaattatttttggagttttaactactgacactatgcagcaggctttagaaagagcagggattaaaaataatcttggttggaattatgctttacaagctattgagatgggatccttaattaaaaatttaaattaa

SEQ ID NO: 245174 - DNA, 562 bp, Unknown
  Bacterial polypeptide expressing nucleotide sequence isolated from the Sargasso Sea
gctgatccgaccattcacgcgcttaggcgctcactcaaaacactacggaattcacatggaaatcggacaataccaaccgaatctcgacggcgacggactgcgtatcggcatcgttcaggcgcgtttcaacgaacccgtctgcaacggtcttgctgactcgtgcatcgaagaactggagcgcctcggcgtgacgggcgaagacgtgctgctggtcaccgtgccgggcgcgctggaaatcccgctggcgctgcaaaagctggccgaaagcgcccaattcgacgccttgatcgcgctgggcgcggtgattcgcggcgagacgtatcacttcgagctggtgtcgaacgaaagcggcgcgggtatcacgcgcatcggcctcgactttggcattccggttgcgaacgccgtgctgaccacggaaaacgacgagcaggccgtcgcgcgcatgactgaaaagggtcgagacgcagcacgcgtggccgtcgaaatggcgaatctggccgtcgcgctcgaacaactcggcggtgacgacgaggaagaagacgaagaagaggaagaggcatga

SEQ ID NO: 245175 - DNA, 289 bp, Unknown
  Bacterial polypeptide expressing nucleotide sequence isolated from the Sargasso Sea
aatgattgcagtaataattagtgaattcaataaagaaattgtagatggtcttttagaaggatgtaagaaatctttaaaagatcataagctaaatataattaaagtcccaggggcttttgaattgcctgcatcagcacaaaaatgtgtagaatctgaaagatatgatgcagtgataacgttaggatgtgtaatcaaaggggatacagatcattatgactatatttgtcaagctgtatcaaatggaataatgaatatttctataaagtcacatattccctgtttatttggt

SEQ ID NO: 245176 - DNA, 349 bp, Unknown
  Bacterial polypeptide expressing nucleotide sequence isolated from the Sargasso Sea
atgatcaggataatcaaaagtaactttaatcaaaaagtagtagatggactgctagatggatgtctgcttgcattgaaagaaaaaaacataaaagatgaaaacataaatatttctgaagtaccaggtgcatttgaaatacccttcacaattaaaaatattttagcaaacgacaacatttcaactcaagctattattacattaggctgtgttatcaagggtgaaacagatcattataattttatttcgcaagccgtgacaaatagtattatggatttaaccttgacatcaaaaactcctatcctttttggtgttttaacttgtcaaagcgctcagcttgcatatgatagat

SEQ ID NO: 245177 - DNA, 439 bp, Unknown
  Bacterial polypeptide expressing nucleotide sequence isolated from the Sargasso Sea
atggataaatcgtcaattaagatttgcattgttgcttctcaattcaatgaactcattgttgacagcttaattaagagttctataaaaactcttgaagagaatggatatcaatctgaccctgaaatttttaaagtacctggcgcatatgagcttccgcttgcggttaaaaatgttgctgagaagaagaaaccaaacggaatcatcgcattgggggcaatcgttagaggggcaaccccgcattttgattatattgcttcagagacatcagcgggtttaactaaggtgagtttggagtccaatattccagtgggttttggcgtgcttacttgcgacacaatggagcaagccatagaaagatccggtgaaggatcaggcaataaaggaattgaatccactgaggcagttcttgggatgatagagctcctggcagatctttaaa

SEQ ID NO: 245178 - DNA, 439 bp, Unknown
  Bacterial polypeptide expressing nucleotide sequence isolated from the Sargasso Sea
atggataaatcatcaatcaagatctgcattgtcgcttctcaattcaatgagctcattgttgatagcttaatcaagagttcaattcaaactttagaaaaaaatggatatcaatctgatcctgagattttcaaagtacccggagcatatgagttacctcttgcagtgaagaatgtcgcagaaaagaaaaaaccagatggaatcatcgctttgggtgcaattgtaaggggtgcaacaccacactttgattatattgccacagagacagcggccggtctgactaaggtcagtctagaatataatattccagtgggctttggtgtgctcacatgcgacacaatggagcaggccatagagagatctggtgagggctcaggcaataaaggcattgagtcaactgaagctgttattggaatgatagaatttttacataatctataat

SEQ ID NO: 245179 - DNA, 499 bp, Unknown
  Bacterial polypeptide expressing nucleotide sequence isolated from the Sargasso Sea
attgttaatcaataaaattaaatcaactggagaaaatgatttaaataattattatagcactaaaaagcctattatttttataattaagagtctttatcatggcgatattacagatagcattgcatttgattttatagacaatcttcctgatgaatataaaaataaagtgatagtatttgaggttccaggtgcatttgaaataccattaattattaaacaaacacttgataagtatcgaaaaaagaataaagaaatatatatacttgcgcttggatgcgttattaaaggcgaaacaaaacacgatgaatatatttcatctacaataattaatgcaattagaaatcttagtttggaatataatacattaatcataaatggaatacttactacacttacaataaaacaagcaattgaaagggccggcataaaacaaagaaaaggaaaagaatatgcagagggattatcggttatgtcacaattaatcaataaactaagataa

SEQ ID NO: 245180 - DNA, 430 bp, Unknown
  Bacterial polypeptide expressing nucleotide sequence isolated from the Sargasso Sea
aattggtatcgtgatagcccgtttcaacgagttcataaccaagcagttgcttgaaggagccctcgaaactttgacaaattccggagttaaagaatcggacattacagtcacttgggttccaggtgccttcgaattgccagtagttgccaagaatttagcagataacactgatgtgaattcagtcatttgtttaggtgctgttataaaaggggagacagatcactacgatatggtcgcaggcaatgcagctagtggaattttaaccacctccttaagcacttctaaaccaatcatattcggggtattgacaacggatactttggagcaagcgatcaacaggtcaggtggtaaatcgggcaatgcaggaagacatgctgcagaggcggctatagagacttcgacagtaataaaccaaattaataacaaataa

SEQ ID NO: 245181 - DNA, 403 bp, Unknown
  Bacterial polypeptide expressing nucleotide sequence isolated from the Sargasso Sea
aatgatcgcagtaattattagtgaatttaataaagaaattgtggatggtcttttagaaggatgtaagaaatctttaaaagatcataagttagatataattaaagttccaggagcttttgaattgcctgcatcagcacaaaaatgtgtagaatctgaacgatatgatgcagtgataacgttaggatgtgtaatcaagggagatacagatcattacgattatatttgtcaagctgtatcaaatggaataatgaatatttctataaagtcacacatccctgttttatttggtgtacttacatgtcaaaatgctcaacaagcattcgaaagaagtagagataatgatttaaataagggttttgaagttggaaatgctgcaagaactcttttgaaatctactagatag

SEQ ID NO: 245182 - DNA, 463 bp, Unknown
  Bacterial polypeptide expressing nucleotide sequence isolated from the Sargasso Sea
tatgaaagaaattaccggagatgtggtagcccaagggttcaaattcgcctttgttgtcgctcgtttcaatgaactcatcggagaacgtcttttggagggggcgttagacactttccaacgtcatgggggtgatccggacaatgctctcgtaatccgcgttcccggagcttatgaaatccccttggctgcaaaaaaaattgcaggaaagggtgagcatgatgcggtggtttgtcttggagccgtaattcgtggggaaacacctcatttcgactatgtggcggccaatgctgcaaacgggattgcttcggtctcccttgatagtggaattcccgtcagttttggcatcctcactaccgataccattgaacaggccattgaacgttctggtacgaaagcaggcaatcaggggcgaaatgcgactctgacggcaattgaaatggcctcccttttggcaaaaatttag

SEQ ID NO: 245183 - DNA, 478 bp, Unknown
  Bacterial polypeptide expressing nucleotide sequence isolated from the Sargasso Sea
atgagttcaataaaaacaattgaaggcggttatagttttggttcagctaattatggaatagcagtgtcaagatttaatggttttatcgttgagcgattactgagtggtgctcttgaagctttgcgaaagcatggggtagaagatcgagaaatttctataataaaagtacccggcgcttttgagcttccattggccgtgaaagctatggcggaatcagaaaactatgatgcgattattgcgctcggcgcagtcattcgtgggggaaccgctcattttgaatacgtagcgggggaatgcgtcaaggggattagtcatgtggggcttactctaggccttcctgtttcctttggagttttaacagtcgatactatcgagcaggcaattgaaagagccggcagtaaggctggaaataaaggtgaggaagctgccttaacagcgatggaaatgctgagccttatgcgacaaattaaaggttagt

SEQ ID NO: 245184 - DNA, 463 bp, Unknown
  Bacterial polypeptide expressing nucleotide sequence isolated from the Sargasso Sea
catgaatcaaatagaaggtgatttaatagctacagatctagaaattgcctttgtggtatcaagatttaatgaatttgtctgtgagcgtctactggaaggcgccttggattcattttcaagacatggcggtagtaaagatcaggtaactgtaatacgagttccgggtgcattcgaactcccattagctgcgaaaaaactagctgaaagtgggaaatttgacgctatcgtctgcctaggagcagttattcgcggagagacatcgcattacgactatgtgtgtgcaaatgcgtcaagcggaattgcttcagtttcgttagataccggagttcctgtcagctttggtcttctaactacagactcacttgaacaagcaattgagcgttccggttccaaagcagggaaccagggtcgttatgcaattgaatgcgcaattgaaatgacacgtttaatgaagcaaatgtaa

SEQ ID NO: 245185 - DNA, 418 bp, Unknown
  Bacterial polypeptide expressing nucleotide sequence isolated from the Sargasso Sea
tgagtatatagattcagaaaatgacaaagaagcattatttgatgctgcatctggagtcctcactaatcctgctataaaaggtattacttgtgaatatcaaataaaaaaagttcctggagcttttgaaattccttttttgattgatcttaataaagatttatatgacggctttattgctttaggttgtattataagaggggagacatatcatttcgaagttatatcaaatgaagttacaagaaaattaatggatctttctatagatattcaaaaaccaataggttttggaatactcacttgtgagaatataaaacaagctttagaaagaagcgatcctaataaaggaaataaaggtgctgaagctgcaaaagcatgtctaagtttaatgttttatccaagatactctaaagatgaataa

SEQ ID NO: 245186 - DNA, 277 bp, Unknown
  Bacterial polypeptide expressing nucleotide sequence isolated from the Sargasso Sea
gatggcagatatcaaagtaattgaaggtgattttacccagtgcagcggccgttacgcgctggtggttggccggtttaacggctttgttgtagaaagcctggtggaaggtgcggtagataccctgcgccgccacggtattgccgatgacgacatcaccattatccgcgtaccgggtgcttacgaaatgccgctggcggtcaagcgtgtggcggaaacctctgactacgacgctatcatcgccctgggcgcagtgattcgtggtggtacgccgcacttt

SEQ ID NO: 245187 - DNA, 475 bp, Unknown
  Bacterial polypeptide expressing nucleotide sequence isolated from the Sargasso Sea
atgaacatcaaattcattgaaggggattatcagcttgcctcggcgcgatttggtattgcagtggcacgcttcaacagcttcatcgttgaccgcttgctggagggggccctcgaagcgctgcaaaagcatggtgtgatggaacgagatattaccgtggtaaaagtcccaggcgcttacgagctgccactggcggtcaagatgatgctggatcagaatagttacgacggcatcattgcggtcggcgcagtgatccgcggcggaacacctcactttgaatatgtcgcgggcgagtgtgtgaaaggactcagccaggccggccttaatgcgtctttgccggtaagctttggcgtattgacggttgacaccattgaacaggccattgagagagcgggaaccaaagccggcaataagggcgcagaagcggctatgacagccatggaaatggtcagcttgtctcgtcaactgaaagcctaag

SEQ ID NO: 245188 - DNA, 334 bp, Unknown
  Bacterial polypeptide expressing nucleotide sequence isolated from the Sargasso Sea
catgcccctgaagaccatcgaaggaaccttcatcgccccgcagggcaaatacgccctggtcgtaggccgcttcaacagcttcgtcgtcgagagcctggtcagcggcgcggtcgatgcgctggttcgccacggcgtcagcgagaacgacatcactatcatccgtgcaccgggtgccttcgagattccgctggttgcgcagaaggtcgcccagcagggtgaatacgatgccatcgtcgccctcggcgcggtcattcgtggcggcacgccgcacttcgaatacgttgctggcgaatgcaccaagggtctggctcaggtttccatggaattcggtgtg

SEQ ID NO: 245189 - DNA, 385 bp, Unknown
  Bacterial polypeptide expressing nucleotide sequence isolated from the Sargasso Sea
catgcaggtaattgaaggtaatatcagagcaaccggtaagaaatttgctatcgttgtatcacgctttaatagctttgtagttgaaagcttacttgaaggtgcactagatacactagagcgtcacggtgaagtgagtgatgacgatatcacgttagtacgtgtacctggtgcttacgagttacctgtagtagctaagaaattagctgagaaaaagtcatttgacgccatcatcgcactaggtgcggttattcgtggtggtacgccacactttgattttgtagcaggcgagtgtaacaaaggtcttgcgcaagtttctcttgaatacggtgtacccgtatcatttggcgtaattacaacagaatcaattgaacaggctatcgagcgt

SEQ ID NO: 245190 - DNA, 475 bp, Unknown
  Bacterial polypeptide expressing nucleotide sequence isolated from the Sargasso Sea
aatgacagaggttaaaataacagaaggcgatctgcacccaagagacgcaaggtttgcaattgtggcttcacgttttaatgagtttgttgtgaatgctctaattaagggcagcctcgattgcctggatcgacatggtgtagataaaaatgctattgaaataataaaagtaccaggtgcttatgaaattcccttggctgtcagtaagcttgctaaaactaaacgtgtcgatggaattattgcattgggagcagttataagaggtgcaacatctcactttgattatgtatcaagtgaatgtgctcgaggactgtctgaaattcagagtcaggagggtattcctgtcggttttggtgttttgatggtggatacgcttgaacaagcgctcgagagagccggtactaaggctggcaacaaaggcgaagaggcgacattagcggtcattgagatggttaatttgcttagaaaaatagattaa

SEQ ID NO: 245191 - DNA, 478 bp, Unknown
  Bacterial polypeptide expressing nucleotide sequence isolated from the Sargasso Sea
gatgagtacaattaagacaatcgaggggaattatgcccttgggtcctctagttatggaatagtaatctcaaaatttaacagcttcattgttgagcgcctgttagaaggtgcactggaggcttttcgaaaacacggtgtgcaagaccgggatatttcgattgtcaaagtgccgggtgcttatgagttacctctgacggctaaagtgatggcggaatcaggaaagtatgacgcgatagttgcgttgggggcagtaattagagggggtactccgcattttgaatacgtcgccggggagtgcgtgaaaggcttgggccaagtagcactgactgcgggattaccgctagctttcggtgtgctgacggttgatacaattgaacaagcgatagagagagcgggtaccaaggcagggaataaaggagaagaagcggctttaacggccatggaaatgcttagtttagtgcgtcaactccggacttag

SEQ ID NO: 245192 - DNA, 478 bp, Unknown
  Bacterial polypeptide expressing nucleotide sequence isolated from the Sargasso Sea
atgaacgtagttcaaggtaatatcgaagcgaagaatgccaaagttgcgattgtaatttcgcgttttaacagctttttagttgagagcctgcttgaaggtgcacttgacacgctgaaacgttttggccaagtcagtgatgaaaacatcactgtcgtccgtgtacctggtgcggttgagttaccgctggctgcacgtcgtgttgccgcaagtggtaagtttgacggtatcatcgcacttggtgctgtgatccgtggtggtacccctcattttgattttgttgcaggtgaatgtaacaaaggtctagctcaaatcgcattagagttcgatctgcccgttgccttcggtgtattgacgacagataccattgaacaagccattgagcgttcaggtactaaagcaggtaataagggcggcgaagctgcactaagcttgcttgaaatggtcaatgttctgcaacagctagaacaacagttgtaat

SEQ ID NO: 245193 - DNA, 478 bp, Unknown
  Bacterial polypeptide expressing nucleotide sequence isolated from the Sargasso Sea
aatgagttcaattaaaacaattgaaggcggttatggttttggttcagctaattacggaatagcagtgtcaagatttaatggttttatcgttgagcgattactgagtggcgctgttgaagctttgcaaaagcatggggtagaggatcgagaaatttccataataaaagtaccaggcgcctttgagcttccattagccgtaaaaactatggcggaatcagcaaactatgatgcgattattgctctcggagcagtcattcgtggtggaacagctcattttgaatacgtagcgggggaatgtgtcaaggggattagtcatgtggggcttactctaggtctcccggtttcctttggagtgttaacagtcgatacaatcgagcaggcaattgagagagccggaagtaaggcggggaataaaggtgaggaggctgccttaacagcgatggaaatgctgagccttatgcgacaaattaaaggttag

SEQ ID NO: 245194 - DNA, 466 bp, Unknown
  Bacterial polypeptide expressing nucleotide sequence isolated from the Sargasso Sea
atgcaggtaattgaagcaggcttaaccgctaaaggtaaaaaatttgccatcgttgtggccagattcaacagctttattgtcgaaagtttgttagacggcgctgtagataccttaaagcgtgtcggcgacatcgctgatcaagacatcactgtggttcgtatccctggcgcttttgaaatgccattagctgtacaaaaagttgcagccagtggtaagtatgacgcgatcatcgccttaggtgcggtgatccgcggtggtacacctcattttgaatacgtggcgggtgaatgcacaaagggcctggctcaggtgatgatgcagcacagtattcctgttgcttttggcgtattgactgtagacagtatcgagcaggctgttgagcgtgcaggtaccaaaatgggcaataaaggcgcagaagcagcgatgtcctcgctggaaatggtaaacgttctctctcagttgtagg

SEQ ID NO: 245195 - DNA, 463 bp, Unknown
  Bacterial polypeptide expressing nucleotide sequence isolated from the Sargasso Sea
atgaatcaaatagaaggggatttaatagctacagatttaaaaattgcctttgtagtatcaagatttaatgagtttgtctgtgagcgtttgttggaaggagccttggattccttttctagacatggcggcagtaaggataaagtaacaattttaaaagttccgggtgccttcgaacttcctttagctgctaaaaaactggctgaaagcaggaaatttgacgctatcgtctgtctaggagctgttattcgtggagagacatcacattacgattatgtatgtgcaaatgcttcaagcggaatagcatcggtctctctagaaaccggtgtccctgtcagctttggtcttctaactacagactcactggaacaggcaattgagcgttccggttctaaagctgggaaccaagggcgttatgcaactgaatgcgcaattgagatgacaagcctattgaagcaaatataag

SEQ ID NO: 245196 - DNA, 481 bp, Unknown
  Bacterial polypeptide expressing nucleotide sequence isolated from the Sargasso Sea
atgaccgtttttgaagggcgctttaccgatgccggcggcctgcgcattgccgtggtcgtggcccgtttcaatgatttggtcaccggcaagttgctgagtggctgtctggactgcctctcgcgccacggcattgatgtggctgagaccagcagtcagctcgatctggcttgggtgccgggcagttttgaaatccctttattggccaagcgcttagccggttcaggtcgctacgacgtggtgatcaccctgggcgcggtgattcgcggcgataccccgcatttcgatgtggtggtggctgaagtcagcaaaggtgttgctgctgtggctcgcgagagcggtgtgcccgtgatttttggggtgctcaccaccgacacccttcagcaggcccttgagcgggcgggcatcaagagcaatcttggctggaactacggcctgcaggctctggagatgggcagcctgatgcgctcggtgcctgcatgag

SEQ ID NO: 245197 - DNA, 475 bp, Unknown
  Bacterial polypeptide expressing nucleotide sequence isolated from the Sargasso Sea
atgacagaggttaaaataacagaaggcgatctgcacccaagagacgcaaggtttgcaattgtggcctcacgttttaatgagtttgttgtcaatgctctaatcaagggtagcctcgattgcctggatcgacatggtgtggataaaaatgccattgaaataataaaagtaccaggtgcttatgaaattcccatggctgtcagtaagcttgctagaactaaacgtgtcgatggaattattgcattgggagcagttataagaggtgcaacatctcactttgattatgtatcaggtgaatgtgctcgaggactgtctgaaattcagagtcaggagggtattcctgtcggttttggtgttttgatggtggatacgcttgaacaagcgctcgagagagcgggtactaaggccggcaacaaaggcgaagaagcgacattagcggtcattgagatggttaatttgcttagaaaaatagattaat

SEQ ID NO: 245198 - DNA, 478 bp, Unknown
  Bacterial polypeptide expressing nucleotide sequence isolated from the Sargasso Sea
atgaacgtagttcaaggtaatatcgaagcgaagaatgccaaagttgcgattgtaatttcgcgttttaacagctttttagtagaaagcctgcttgaaggtgcacttgacacgctgaaacgttttggccaagtcagtgatgaaaacatcactgtcgtccgtgtacctggtgcggttgagttaccgctggcggcacgtcgtgttgctgcaagtggtaagtttgacggcattattgcacttggtgcggtaatccgtggtggtacccctcactttgattttgttgcaggcgaatgtaacaaaggtctagctcaaattgcattagagttcgatctgccggttgctttcggtgtattgactacagataccattgaacaagctattgaacgttcaggtactaaagcgggtaacaagggcggcgaagctgcgctaagcttgcttgaaatggtcaacgttctgcaacagcttgaacaacagttgtaat

SEQ ID NO: 245199 - DNA, 466 bp, Unknown
  Bacterial polypeptide expressing nucleotide sequence isolated from the Sargasso Sea
atgaaaattattgaaggtaataagtacgcaccgggcaaaaaatttgccattgtcatttctcgttttaatgactttattggtagcagcctacttgaaggtgctgttgatgagctaaaacgtaccggtggtgtatctgatgacgacattactgtgatttatgtaccgggtgcagttgaattacctttagcggcaaaacgcgttgcagcaaaaaaagagtatgatgcaatcatcgctttaggcgtagtgataagaggtggaacaccacactttgacctagttgctggcgagtcaaacaaaggtcttgcgcaagtatcacttgagtatgatataccggttgcatttggcgtattaaccactgaaagcattgaacaagctattgagcgcgcaggtaccaaaatgggtaacaaaggcggcgaagctgctttgggtgcgcttgaaatggttaatgtgttagataaaatttaag

SEQ ID NO: 245200 - DNA, 490 bp, Unknown
  Bacterial polypeptide expressing nucleotide sequence isolated from the Sargasso Sea
atggccacctttgagggacgtttttctgatgcgtcaggactgcgcatcggcgtcgtcgtggcccgtttcaatgatctggtcaccgccaagttgctgagcggttgcctggattgcctcaaacgtcatggtcttgatgtgtcagagaccagcggccaattggacgtggcgtgggtgccggggtcgtttgagctgccgatcgtggcgcagcagatggcccgcagcggccggtatcacgtgttgatcaccctgggcgcagtgatccgtggtgatactccccacttcgatgtggtggtggcggaagccagcaaaggcattgcagcggtggctcgcgatgctgcggtgccggtgatcttcggcgtgttgaccaccgacacgatgcagcaggcgctggagcgggctggcatcaagagcaatctgggctggagttatggcctggaagccctggagatgggcagcctgatgcaggccttgcctcaggccgccagctgat

SEQ ID NO: 245201 - DNA, 454 bp, Unknown
  Bacterial polypeptide expressing nucleotide sequence isolated from the Sargasso Sea
atcttagcaacagcaaaaggaattggttcaggcttccctcttggtgcttgtttagcatcaaataaagttagcattggaatggtgcaaggaaaacacggatcaacttatggaggaaatccattggcggtatcagttggtagagaggttttggatattatttcaaataaaaaatttttaaaaaatgtagatacaatttcaagatacttatggaaaaatcttattaaattaaaaaaagattataatcaaattgttgagattagaggtgcaggcttacttttaggtataaaaacaaaacaaaataatttggttgtttcaaataaattaaaaaacaataaattattaactgtaccagctagtgacaatgtaattagactggcccctccattaataattaataaaaaacatgtagacgaagcgatacacataatagaggaaactctaaagaaattataat

SEQ ID NO: 245202 - DNA, 271 bp, Unknown
  Bacterial polypeptide expressing nucleotide sequence isolated from the Sargasso Sea
agaatcaaacgacaaaacaaaaaatatataagtgaagtaagaggtagaggattatttataggaattgatattataaaaaattcaaatcaactaaaaccaaataagcaattagcaaaaaaaattatcaattttatgagaaataatggaattttattaagtactgatggtcctcatgataatgttataaaaattaaaccaccattagtctttaataagcaaaatgttgataatgtttgtgaaaatttagagagtttttttaaaaaaatataaa

SEQ ID NO: 245203 - DNA, 322 bp, Unknown
  Bacterial polypeptide expressing nucleotide sequence isolated from the Sargasso Sea
ctacaagaaaacgcttccagtgtaggaaatcatttattggatggtttaaaaaacattcaaaataaatataatattattggggatgtgagagggaggggattatttattggaattgagttaataaaggatatggataatttagtgccagcggtggatgaggcggagatcgtagtaaatacaatgaaaaaaaaaggtattctcattagctcagatggacctgatcataatgtcttaaaaataaaaccgccgttagtttttaataagaaaaatgcaaactattttttagaatcttttgaagctgtgatctcaaaaaatttttaaa

SEQ ID NO: 245204 - DNA, 406 bp, Unknown
  Bacterial polypeptide expressing nucleotide sequence isolated from the Sargasso Sea
gatattgctattcaaatagatattgcgctagcgactgatactccagaaatgtcaggaaacggtgatattaaattaggtaatggcccatctatgagtctatattctttccatggtagaggaaccttgaatggtgttatacctcatccaaaattagtaaaactttttgaaaatacagcctcaaaacaaaatattaatttacaaagaagtgccacatcaggtattttaactgatgcttcgtatgttcaactattaggcaaaggaatagcatgtatcgatttaggttttccaattcgttactcacattccccaaatgaagtttgtgatattagagatatattcaagttaaaggaattactatttaaaaccataataagcatagataataaaataaatttaaaaagatgaa

SEQ ID NO: 245205 - DNA, 484 bp, Unknown
  Bacterial polypeptide expressing nucleotide sequence isolated from the Sargasso Sea
catgaatggggcaaaaatcaaacctgatattttagcaacagcaaaaggtataggctctggatttcctttaggtgcctgtttagcgacatcaaaggctagcttaggtatgacaaaggggaggcatggctcaacttatggaggcaatccattagctgtatcagttggaagagaagtattgaaaattatatcaaataaaaaatttttgaaagatgttgattttatagcaagatatatatggaaaaaattaaaaaaattagagagaaattatgatgagattgttgatgttagaggagccggattattgcttggtataaaaactaaacaaaataatgtaatgatttcaaataaattaaaaataaacaaattattaactgtccccgctggagagaatgtaattagattagctcctccactaattataaataaaaaacatgcagatgaagcaataagtataattgatcaaacactaaaaaaactatcatga

SEQ ID NO: 245206 - DNA, 622 bp, Unknown
  Bacterial polypeptide expressing nucleotide sequence isolated from the Sargasso Sea
tatggaaaatttaaaatcagagggcgtgaggctagaaaatattgccgctttctttgtcgagtcctttcaaggttggggagctattttttaccctaaagaatatattaaggctatgagaaaatgggctactactaataatactcttcttattttcgatgaaattcaagctggatttggtaggacaggaaaattttttgcatatgaacattatgaagtggaagcagatctcgtaatttgtggcaagggtatttcaggaagtatgcctttgtcagcagttattggtaatacagagctaatagagctagacgatggatataccagcacgcatggaggaaaccccttagcctgtgcagctggtttagggaacttagaagcgtttgaaaaagataatctattggatgtttcaaaaaagaaggagaaattatttttagaaatccttaatagttggaaagagaaatatcctagtagaataagtatgattctaggtaaaggaatgttatttggagtttttataactaaaaaaaattctgaagatttagatcatgatttaactaattatatctgtgaaagagcaatggaaaagggagtcttttctatttgtactggaagagggaccctttaa

SEQ ID NO: 245207 - DNA, 844 bp, Unknown
  Bacterial polypeptide expressing nucleotide sequence isolated from the Sargasso Sea
gcgtttcacggacgcacggcggcgtgtctgtcgttgacgcacacaaagtggattcataaactcgatttccccacgttcgattggccctcgtgtccgtttccgaagctgaaatatccgctcgaccgatacgagagagagaacgcggcggaggaggcgcgatgtctcgccgaggtcgaggcggcgttggatcgagacgcggacgtcgtgggcgtcatcgtcgaacccatgcaggcggagggcggcgataatcacgcgagcgcggatttcttccaaaagttgcgagcgttgacgaaatccagaggcgtgcgcatgatcgtggacgaagtgcagacgggatgcgggtcgagcggcaccttttgggcgcacgaggcgtggaatttggagcaccctccggacgtcgtgacgtttagcaaaaagatgcaaatcgccggtttctacgccgtcgcggatctcgctcccgagctcccgtatcgcatattcaacacgtggatgggagatcccgcgaagctcgtgcaactcgaggtggtgctcgattgcatcgaagagagcaacttgttagatctcgtcaagtcgtcgggggcgacgcttctcgagggattagaaaaactccaggcgaaatttccgaaaattttgagcaacgctcgaggggtggggaccctcgtcgcagtggacgccgacacacccgccagacgcgacgccattttgcacgcactgttgcaagacggcgtcgacatcggtgggtgcggcgtctcgacgattcgcgcgagacccggtcttctttttacctcggcgcacgccgccgtcttcctcgatgccttagagcgcgttctcgataaagatgtag

SEQ ID NO: 245208 - DNA, 645 bp, Unknown
  Bacterial polypeptide expressing nucleotide sequence isolated from the Sargasso Sea
taattagaaataatattgatataggatctcctataacttacaaaccttgcatagaatttattggctctaactgcttagcaggcacatctcttgatgatagagttggttgtggaataattttagaagttttagagaaacttaaaaaaattaaaaatagaccaacagtccatattgttttttcagttcaagaagagtttaatttaaggggagtgcttcctatggcacaaaaacttaaccccgatattgctatacaaattgatattgcacttgcaactgatactccagaaatgtcaggaaacggagatattaaattaggttatggcccctctatgagtctatactcttttcatggcagaggaaccttgaatggtgtcatgcctcatccaaaattagtaaaactttttgaaaatacagcctcaaaacaaaatattaatttacaaagaagtgccacatcaggcattttaactgacgcatcatatgttcagctattaggaaagggaatagcatgtatcgatctaggttttccaattcgttactcacattcaccaaatgaagtttgtgatattagagatatatttaagttaaaggaattactatttaaaactataataagaatagataataaaataaatttaaaaagatgaa

SEQ ID NO: 245209 - DNA, 898 bp, Unknown
  Bacterial polypeptide expressing nucleotide sequence isolated from the Sargasso Sea
gtggccgccgagcagttgcggcgcatgaactccaatacgcggtatttgcacccggcacagacggcctttgcggacaagatcctgtcaaaattgcccgatcattttgaggtctgtttctttgtgaattcgggcaccgaggccaatgagctggcgctacgtcttgcacgcgcgcacaccggcgcaaaaggcatggtgacgcccgatcacggctatcacggcaataccaccggagcgattgatatctccgcttacaagttcaacaaacccggcggtgtcggccaagcggattgggtggaattggtagaggtcgcggacgactatcgcggtcgcttccgtcgcgatgatccagaccgcgcgcagaagtttgcggatctggtggaccccacaattgcctcgcttcaggccaaagggcatggggttgcaggatttatcgccgagacatttccctctgttggaggtcagatcattccgccaacgggttatctatctgctgtatatgaaaaaatccgcgctgcaggcggagtttgcatcgcggatgaagtccagaccgggctgggtcggttgggcgattattactttggctttgaacaccaaggcgcgttgccggatatcgtggtgatgggcaaacctatcggcaatggtcatccgcttggggtcttggtcaccaccaaagcgattgcagagagttttgacaacgggattgagtttttctcgacttttggcgggtccacgctgtcgtgtcgcatcggcaaagaagtgttggatattgtcgatgacgaagacttgcagaccagtgcccgcaaccggggtgcagagcttatgtcggggctaaaggcgctcgaaaccaaatacccttgcgtcggtgacgtgcggggtatggggttgtttttagggctgg

SEQ ID NO: 245210 - DNA, 946 bp, Unknown
  Bacterial polypeptide expressing nucleotide sequence isolated from the Sargasso Sea
tgcgcgccgcgaccggcatggaaaacatgtttttctgcactcgggtgcagaggctaacgaggcggccataaaactcgcacgccggtatggcgatcaaaaagggatcgcgtcaccccagatcattgtgctcgatggcgccttccatgggcgcaccctcggcgcactctctgctaccggcaaccaaaaaatccgacagggatttggtccgctgcttgaggggttccaacgcgtggcgcctgacgacctgcccgcagtcgaggcgctggcggctgaacgtcaggatatcgttgcggtgctggtggaaccgattctaggcgagggaggcatcaggccactcgccattgactatcttaaaagtctgcggcgactgtgtgatcagcacggatggctgttgatattcgatgaggtgcaaaccggcaacggtcgctgcggatcaacctatgtgtttgaacagttgggcgttgaaccagatgtattgctgaccgccaaggggttaggcaatggtctgcctattggtgtttgcatggcgaagggtgtcgccgcagaacagttgggcccgggcgatcacggctctacttatggtggcaacccgctctgctgtgcggcagcgcaagccgtgctgaccgcgctggccaaggacggtgtgatgcaacaggccaccctcatacgcgaggcgctggtcagcgccctgcaagacaatctgtgcgacgccaagctgatcagcgaagtgcgaggcaaagggctcatgatcggcatacagcccaacactgagaccggcgagatcgttaagcgcggtctggaccacggtttactgctgaatattgctgggggcgatactatccgcgtgctaccgccgctcgtgatgaccctggagcaagccggcgagttgggcgcgggcatcgcacacattctcaacgacattgcagagcaggaagacaacgcatga

SEQ ID NO: 245211 - DNA, 619 bp, Unknown
  Bacterial polypeptide expressing nucleotide sequence isolated from the Sargasso Sea
gaagttaaagtagcaggtggtgtttgcattgctgatgaggtccaaacaggtttaggacgactaggtgatcattattttgctttcgaacaacaacagattttacctgacatcgtagtcctaggtaaaccaataggaaatggacatcccattggagcagttgttaccacccaaaagatagctaaggcctttaacaatggaatcgaatttttttcaacatttggaggatctgatctttcatgtttgatagcaaacgaagttttagaaattgttgatgacgaaatgctaggggataatgcaaagcaaatgggattgtttcttgaaaaggggttaatggaattacaactcgcttcccaattaataggcgatgtaaggggcatgggtctattttggggagtggaaattattaggaattttgagactaaagaagcaggaacctctgaggctaattacatttgtaatcggttgcgggagaagaggattcttgttgggatagaaggaccttgcgaaaatataatcaagataaggccaccgttaagtttaagtcacgatgatgttaaaatatttttaagagcatttgccgatgttttggaggaatcgtattttagggtaggcagttaga

SEQ ID NO: 245212 - DNA, 376 bp, Unknown
  Bacterial polypeptide expressing nucleotide sequence isolated from the Sargasso Sea
ttccggggactctgggtctactttcggcggaaatccattagcaatggctgtgggtaattgtgttatggatattgttaacaaggttgatttcttgtcaaacgttgaaaagaacggacttttcttcaaaaatcaactgaataaattgtgtgaaaaatatccaaatgttatcgctgaaattagaggcctgggtctaatgatcggaattaagtgttcggtagctaataatttattagctaataaactatatgaaaatggcatcctcactgtgaatgcagcagacaatgtaattcgaatactaccaccactcaacataagaatgtctgaaatcaagaaggttatgtccttattcgaaaaatcaattaaagaaattttataa

SEQ ID NO: 245213 - DNA, 639 bp, Unknown
  Bacterial polypeptide expressing nucleotide sequence isolated from the Sargasso Sea
aactgctgcgcgaagcctgcgaccgctacggcgtgcacctgattcacgatgaaatcgccgtcggcttcggccgcaccggcagcctgtttgcctgcgagcaggccgacatcgcgccggattttctctgtctgtccaaggcgctgaccgccggctacctgccgatggcggtgtgcatgaccaacgacaccatttaccaggccttctacgacgattacgagagcatgcgcgccttcctgcactcgcacagctacaccggcaacccgctggcctgcgctgccgcgctggcaacgctggacctgctggagcgcgacaacgtgatcgaggccaacaaggcgctgtcggcgcacatggccaaggccaccgcgcattttgtcgaccacccgcacgtagccgaagtccgccagaccggcatggtgctggccatcgagatggtcaaggacaaggcgacaaaagaggcctacccctggcaggagcggcgcggcatccgcgtctatcagcacgcactgaagaatcaggccatgctgcgcccgctcggcagcgtggtgtacttcatgccgccctatgtgattacgccggagcagatcgaccatctggccagcgtcgcctgggaaggcattcagctggccacccgggactgac

SEQ ID NO: 245214 - DNA, 526 bp, Unknown
  Bacterial polypeptide expressing nucleotide sequence isolated from the Sargasso Sea
gttcaatgtggatttggcagatcaggtaaattattctcacatgaatgggcaaaaataaaacctgatattatgtctgtagcaaaaggtataggatcgggttttccacttggagcctgtatgtcaacaaacaaagcatgtgttgcaatgactaagggtagtcatggatcaacctatggtggtaatccgttagctatgagtgtaggtttagaagttttaaaagttatctctaataaaacatttctttcaaagattgataaaactgctagatatttttggaaaaatttaaaagaattagagaaaacttctaatattatttcagaggttagaggtgcaggacttttattaggaattaaaacaaatattagtaatatagatttttctgaacaacttaaaaaaaataaattattaaatgtgccagctgcagataatacagtaagactagcaccaccacttattgtatcttataaagaaattgataaatcaattgctataattaaaagaagcttgaaggaattatcaagatgaa

SEQ ID NO: 245215 - DNA, 874 bp, Unknown
  Bacterial polypeptide expressing nucleotide sequence isolated from the Sargasso Sea
tcttctatttcgtcattaatatcaaaaagggaaaaaaattttagttctaacttatcacttagctacaatatccctatttatttcaaaaaagctgcttttcaatatatgtatgatgaaaaaggtaggacttttttagatgcctataataatattcctcatgttggacattgtcatccaaagacaattttaagtagtcaaagacaaatgtcaaaactaaatactaatacgagatatctatacgactcattatatagttatacagagaagcttctttcgaagtttcctaaaaatttaaataaagttttctttgttaattctggcagcgaggcttctgatttagctgtaagaatggcaaaatggcatactagaaaagataaaattgtggtcattcaacaaggatatcatggtcatactcaaattggaatagaaataagtgattataagtttaataatatcaaaggaattgggaaacagaatcatattataagaactcctataccagcttctaatatgagaattaaaaactctaatgattatattgatggttttgataatcaacttttagaaaatgaaaatcaaatagcgctttttataagtgaaactatattagggtgtgctggtcaagtatgtttaccaaaaaactttttaaaaaatatttactccaaaattagaaaacagggcggagtttgtatagcagatgaagtacagactggatttggaagaacaggagataacttttgggcatatgaagatcaagaggttgttccagatattgttattctaggaaaacctatggctaatggacatccaatgggcgcagtaattaccagtgaagaaattagtagctcttttgaagaaggggtagagtttttta

SEQ ID NO: 245216 - DNA, 795 bp, Unknown
  Bacterial polypeptide expressing nucleotide sequence isolated from the Sargasso Sea
ggggtcgcagattagcgatatagacgggcatactacagttgatgccgttggaggcctttggtgtgtaaacctaggttactcaaatgaagcggttaaaaaagccatatcagagcaactcaatcatctaccttattattctggttttgcagggacaaccaatccagctgctattgaagcgtcttttatggtcaaagaaatgtttaaagctgatggaatggaaaaagtttttttcacatcaggtggatcagactcagtagaaacctgcctaaggttgtctcggcaatatcaccggttgcggggggaacctacgagaacaaaattcatatccctaaaaaaaggataccacggaacgcactttggtggggcatccgtgaatggaaataataggtttagaatagcatatgaacctttgttgccgggctgttttcatttacctagcccgtacacttatcgaaatccatttaacgaaaccgatccccagaaattagctctaaatattgcgcaggctttcgaagatgaaattgcttttcaagacaaaaatactattgctgcttttattatggaacctatccaaggagcaggtggcgtaatagttccagatccttctttcatgggcctcatgcaagaaatttgcgagagaaatggcatactgatgatctcagatgaagtaataactggttttggcaggactggatcctggtcgggctcaaggcactggaacgttaaaccagacatgatgagtatggctaaaggtattacatcaggttatttccctgtcggtgcagccctaatggg

SEQ ID NO: 245217 - DNA, 825 bp, Unknown
  Bacterial polypeptide expressing nucleotide sequence isolated from the Sargasso Sea
aggttatggaagagaagaatagctgaagtagccaaaaagcaaattaaagaattagcttattataatagtttttttaaaactagtaatattcctacagccaatttatctgcattattggttaacataacacctaatggtttaaatcatgtcttttatgccaattcaggttctgaagctaatgataccattataagaatggtcagacatttttggaatcttgaagggcaacctaaaaaaagaataataataggtcgtgaatttggttatcatggatcaacaataatgtctgctagtatgggtggaatgatggacatgcataaacaagcagcaaatgagccagattttgaacatattctagccccttattcttttaaatatcaaggtgatgaaactgaagaacacttctcagaaatttgcgcaaattggcttgaagagaaaataattgaattaggcaatgaaaatattgcagcatttgttgctgaaccaattcaaggtgcaggaggcgtaataatccctccaaaaaattattttaattttattcaagagatatgtaaaaaacacaatatattatttatagtagatgaagtaataactggttttggtagaactggtttttggtttgcctctgaaccaatgaaacttttacctgatttgatgactacagctaaaggattgacttctggatatattccaatgtcagcagtaatggtaggtgacagagttgcagataagctgattaatcatggtggtgagtttaatcatggttttacttattcagctcaccctgttgctgctgctgtagcaattgaaaatctaaaaattatt

SEQ ID NO: 245218 - DNA, 951 bp, Unknown
  Bacterial polypeptide expressing nucleotide sequence isolated from the Sargasso Sea
tttgtaaaaggagaaggtgtttgggttacagatataaatgataataaatatttggactcaactggaggtctatggtttaagggtgctggatatggcagagaagaaataggaaaagcaatttatgaacaaatttgtgaaatagaaactcctccagctatggcagcctgtattccacaaatcgaacttgctgcgaaaattgcagaaatatatcctgataaatctgctagatccttttttacttcaggtggatcagaatctgttgaaactgcagtaaaaatggcaaaaaaatatcaaataaatacaggtaagtctggtgcttataaggttatatcaaggagatattcttatcatggagcgacagcaatggcagtaagccttgggaagccttcaacctcagatactatgggccctgaaatgcctggagctattcatgtgcaaaattgggattcatacagaatacctaataatatggatcctgttgactatgctattttttgtgcaaatcaatttgaagaagctatcaaacatacaggccctgatagtgttgcagcgatgattgctgaaccaatatcagttgcctttggaatccatattcctccaaaagaatattggcaaagattaagagaaattgctgatgaatataatgtagtactaatagctgatgaggtgattacagggtttggaaggactggtaaatattttgctactgatcattgggatatgatgccagatattacaactgttgcaaaatcattaactagcggatattctcctctaggagctgcaatagctacaaaaaagatatcagattcctttattggaacggaaaaagaaatgtttttgcatttgattacttttggtgggcaccctgcatcttgtgctgcgggtttaaagaatcttgaaatttatgatagagaaaaattagtagaaaattcaaaaaatatgggagag

SEQ ID NO: 245219 - DNA, 808 bp, Unknown
  Bacterial polypeptide expressing nucleotide sequence isolated from the Sargasso Sea
gaatgtacctagtgcttggtatagttccttagaaaattttattgttagaggtaaaaatgctgagatctgggattcggaaggcaatcgatatttagattatgtaggaggatacgctgttttaaacactggccatcttcatccaagagttgtggatagagtcaaaaatcagcttgataatttttcacattcatgttttgcatttgcaccacatgaaaatgctgtaaaactagccgaagaattaaatataagatatccaatagaaactgatactaaaacctttatggttaatagtggtgctgaggctgtagaaaatgcagtcaagattgcaagatactttacaaacaaaaaagcaattttatcttttaaaggtggtttccacggaagaacttatcttgcaatgggattaaccggaaaagataagccttataaagaaggtttcggaccatttcctgaattcgtaaagcatgctgtttacccatacagctacagagatatttctgatgaggatgcattgctgagtgtcaataaattattaaacaatacccttgatcctaatgacacagcagcaattgtgattgaaatagaacttggggaaggtggatatattccagcttcaagttattttttatcgcaactcagagatatttgtgacaaacataatatcttattaatttttgacgaagtacaaacaggatatggacgtacaggaaatatgtttggtgcagaaacagtgggtgttacaccagacatggttacattggctaagggaatttgctggtggttttcctttagctgcagttttaggtaa

SEQ ID NO: 245220 - DNA, 634 bp, Unknown
  Bacterial polypeptide expressing nucleotide sequence isolated from the Sargasso Sea
tcccagatcttttatgcttgaggcgtttcaaattgttaatgaagcggggggattgtgtgtcgttgatgaggtccagatcggatttggtagacttggatcgcacttttggggctttcaaatgagtggcgttgttccagacataatcacacttggtaaatcaattggaaatggtcaccctctatcagtggtaattacaaaaaaaaatatagctgatgtatttaataatgggatggaatattttaactcatttggagggaatccagtatcatgcgaaattggacaggcagttttagatgtaattaaggaagaaaagcttcaagaaaacgcttctagtataggaaatcatttattggatggtttaaaaaacattcaaaaaaagtataatatcattggggatgtaagaggcagaggcttatttattggaattgagctaataaaggatatggataatatggtaccagcagcagatgaggcggagatcgtagtaaatgcaatgaaaaaaaaaggtattctcattagctcagatgggcctgaccataatgtcttaaaaataaaacctccgttagtttttaataagaaaaatgcaaactattttttagaatcttttgaagctgtgatctcaaaaaatttttaa

SEQ ID NO: 245221 - DNA, 362 bp, Unknown
  Bacterial polypeptide expressing nucleotide sequence isolated from the Sargasso Sea
atcaacctttggaggcaatcctttagcaatggcaattggaaatacagttattgatatagtctcaaatagaaagtttctaaataacgtaaaaaaactttctaaatattttctctcaaatttaaatcttctcaaatcaaaatatcctagagttataaaagagataagaggaagaggcttgttgattggaattcagctttttaaagatcaaacaaaatttattaagaaattgatggataataaactcttgacgattcgtgcggctgataatgttatacgtattttaccgccattaaatgtaaaaaaatctgagatcaaccaagctttaaagattattgaaaaagtttgtgccagctttgaataaa

SEQ ID NO: 245222 - DNA, 624 bp, Unknown
  Bacterial polypeptide expressing nucleotide sequence isolated from the Sargasso Sea
ggtacctcgatcgcctgcgcgagatttgcaccagacatggaattctgttgattttcgatgaggtcattactggatttggccgcacaggagcatccttcggcgcggaacggttcaacgtacagcctgacctaatgacgatggcaaagggccttaccaatggcgccgtgccaatgtcagcggttggcataaataacttaatttacgatgccctaatggaaggtccgccagaaattattgaattattccacggttacacttactccggacatcccctcgcctgcgcggcggctctggcagcactcgaaatttatgaaaacgaaagattgtttgatcgatgcgctgaattagaactctattgggaggacgcggttcattctctgagggaccgcaaaaacgtcattgatattcggaatattggcctagttgcgggcattgagctgctgccgagagacggcgccccagcggcacgcggctacgactgttttatccaatgcttcagggaagggcttctcctgcgtcaaactggtgacacggttgcccttgcgcctccccttatcatcgaaaaagaagagatcgaccggacagtcgaaatcttagggaacgtcattaacagcctcgactaaa

SEQ ID NO: 245223 - DNA, 865 bp, Unknown
  Bacterial polypeptide expressing nucleotide sequence isolated from the Sargasso Sea
tactcttatagacttaagtccatataaatttaatggaaaaggtggattaggaaaaaaagattatgttcatattttggatatgccagatccaataagaggtaaatggaaatacaaagataagaattggtctggacaatatatagatgatgctattagaaatattcgagaagttagtaaaattaaaaaaatctcttgtctgttttctgaaagtattttaggatgtggaggtcaaataattcttccaaaaaaatatttaaaaaaaatattttatgaaattagaaaaaataaaggactttgtattattgacgaagttcaaacaggttttggtagagtgggaaataatttttggtcttttcaagaacacgaagtaattcctgatatagtaactttaggaaaaccaatgggtaatggccatccattagcagctgtagtaacaactgaaaaaatagcaacagcttttaataatggtatggaatattttaattcttttggaggaaatccagtttcatgtgcagttggaaattcagtactacaggttattgaaaatgaaaaactccaaaagaatgctcacgaaataggaatatattttcttaataaattattaaaaattagaaataagaataaaaaatatattagtgaagttagaggaagagggctttttttaggaatagatataataaaaaataataataatcttgaacctaatcctgaattagctaaaaaaattattaattatatgagaaataatggcattctattaagtacggacgggccttttaacaatgttattaaaatcaaaccacctatgattttcaatagtgaaaatgttgatattgtgtgtgaaaaattatctaatttttttaaa

SEQ ID NO: 245224 - DNA, 763 bp, Unknown
  Bacterial polypeptide expressing nucleotide sequence isolated from the Sargasso Sea
tatctatatcgctcgtcacaggaaaacgcgctttcttttgaagcatacacaaccgcattagaagaaagcaacttattcacaacagatgttgctgccgccattattgaacctgttttaggagagggtggctatgtccctgctccagctgcttttttagaagccttagaaaaaatatgtaaatccaaaggtattttattaatcatcgacgaaattcaatctgggattggtcgaacaggtaagtggtttgcttttcaacatacttgcatacagcctgatattattgtgacagcgaaaggtttgggctctggaatgcctattggtgcttgccttgccaaaactaaaattatgaaccaatggccccctggagctcatggaggcacttatggaggcaaccctgtagcctgcgcggcaacagtagcgactcttgatattgtcgaaaaagttcagcaaaatgtaccttttttaagtcagcttgcctccaatcttcttcatgaaggattgcgtgaccaccccaatattggagacattcgtgtttttggccttatgattggcattgaatgtgtaaaagataaagtcacaaaagaaccacttcctgacttaattacattcacgcttaatgaatctctgaaacgtcatcttattgtgttatcctgtggcattcattacaacgttattcgtttagctcctccactaattatttcagaaaaagaattgcgttctggtttagcaacacttatcgaagtccttcatgattattattaac

SEQ ID NO: 245225 - DNA, 784 bp, Unknown
  Bacterial polypeptide expressing nucleotide sequence isolated from the Sargasso Sea
tttgaagcatctaggatttaaagttgatagctatccttattttaataatgaatcaaattcaattgattttgaaaatttgacttctaaaataaaaaagatatctaaaggtgatgttttagttatgcatgggtgttgtcataatcctactggagaagatttgaaagctgagcagtgggatgaagtttctgatatagctaaaagtaataatttattagtaatatgtgattttgcatatcaaggattagcagatggtttggatgatgatgctaatggtgtaagaaaaatgattagaaatttagataatttaatcatttgtacttcgtattcaaagaattttggcttatacagcgaaagagttggatgtttaatttataattcaaaaaatgaatcgaattgcgcacctgttctaagtcatatgaagaaaactgctagatcaaattattcaaatcctccagctcatggttctgaaatagttaaatttattttaagtcataattcattaagagataagtggcaagaagacttaaaaaatatgagggatagaataaaaaatatgagaaaattattagtaaaagaactaaaaaataaaggatgcgggaaagatttttcatttatagaaagacagaaaggtatgtttagttatactggtttaagtaaagatcaggttaatacattgaagaaaaataactcaatatatatcgttaattcagggaggataaatattgccggattaactactactaatgtgggatatgttgctaatgctattaatgatgtaatttaa

SEQ ID NO: 245226 - DNA, 149 bp, Unknown
  Bacterial polypeptide expressing nucleotide sequence isolated from the Sargasso Sea
aggcacacagggatctacctttggcggtaaccccttggcaatgtcggttggtaatgcggtaatgaatgaaattttcagaaaaggctttctttcaaaagttaaaagtaattcaaaatattttatttcagaattaaataaaattaaaaata

SEQ ID NO: 245227 - DNA, 926 bp, Unknown
  Bacterial polypeptide expressing nucleotide sequence isolated from the Sargasso Sea
tctaaagcgtcaggtaattatatttttgataaagaaggtaataaaattttagatgcaatggctggtctttggtgtgtaaatattggatatggcagagatgaattagcagaggttgccaaagagcagattttaagacttccatattataatagtttttttaaaacaaataatattcctgcagcaaagttatcaaaaaaattatctgagatcactcctcaaggattgaatcatactttttttgctaattctggttcagaggcaaatgatacaattattcgaatggtaaggcattactgggccctaaagagagagcctcaaaaaagaataattattggtagagagtatggttaccatggttcaacaattatgtccgccagtatgggtggtatggtggacatgcataaccaagctgcaaaagaaaatgacttccatcatattcctgctccttactcttttaagtataaagggaatcaatcagatgatttgtttgctgaaacatcttctaactggcttgaagagaaaattttagaacttggaaaagataaaatagcagcttttgtagctgagccaattcaaggtgctggcggagtaataatacctccaaatggctactttgaacacattcaagaaatttgcaaaaaatataacatattatttattgctgacgaagttatcacaggttttggaagaacaggtgagtggtttgcatcacaaaagatgaacctttctccagatatgatgaccttagcaaagggattaacctctggttatattccaatgtcagctgtaatggtgggtgaaaaagtagctagtacgtttattgaagagggtggagaattttaccatggctttacttattctggtcacccggtggcagcagctgtagcacttgaaaatttaaatattatcgagagagaaaatttaat

SEQ ID NO: 245228 - DNA, 898 bp, Unknown
  Bacterial polypeptide expressing nucleotide sequence isolated from the Sargasso Sea
cctttggctttgccaaattggccatggaagaacagaagtaattgaagccgtaacaaaacagatgaaaactctcgaggcttacaacatctttgatccctttactaatgaaccagcggcgaaactagccaaaatggtggcagaaagatcacctcatcctgaaggtcgtgtttttctaggctgctctggttccgaagcagtagacactgctctaaagctttcgaggctctaccagcaattaattggcgaaaatgaaaaacaaattgtcgttcgtcgcacaaacggttatcacggtactaacttcggtggaactagcgctcagggaatcgcaccgaatagggaaggttggggtgatttagtacctcatttcatggaagttccaaacaatgatcttgaagcggctgcgaccgtttttgcaaatcatggaaaccaaattgctgcaatgattgttgaacctatacaaggagcaggcggtgtttacccacccgtcgatggctacttggaaggccttcggaagctctgcgatgacaacggtgctttacttattttcgatgaagtaatttgcggttttggtcggacaggaaaatggtttggagctcaatattttggggtcaatccagacttaattacttttgctaaaggtgttacttctggttacttgcctctatcaggagtaatcgtttctagaaaaatttgcgaaatttttgaagagcccgattttattctgagaaccggctacacgtattccggtcatccaacttcttgtgcggcaggtatcgcaaatttagaattaattgaaagtgaatctttacttgatcgagcaagccatgttggagagcaaattagaactggtttggaatcattacaagcagatggtcttattgaatcttggcgcggaacc

SEQ ID NO: 245229 - DNA, 256 bp, Unknown
  Bacterial polypeptide expressing nucleotide sequence isolated from the Sargasso Sea
catgtttgaaacgattagaggacgtgggctgatgcttggtgctgtattatcaaaagcatggaaagggaaagcaccttcagttgtaaaggcctgtcaggaacacggtgtgcttgttttaacagcaggaccggatgttctgcgtttgatgccacctctgaatattctagatgaagagcttgaagccggattgaatcgtatcggcaaagcactgaaaaatttgcatgaagttgaattgtcttcttcaacaccaaaatga

SEQ ID NO: 245230 - DNA, 530 bp, Unknown
  Bacterial polypeptide expressing nucleotide sequence isolated from the Sargasso Sea
tgataatcggctacttccaattcaaggagagggaggtaatgtaaatttttctcctgcgaccaaactggaaattgatcttcttaagtggttacatgatagaatgaattacgtacctactgaagaggttttaagtggaagaggtttagtaaatatttacgattatcttgtagcaaagaaaaagtatgtttcgcaattctcaaccgcagaagagataggtcaagctgcaattaatggtgatataatatcaaaagatgctgcaaaattaatgattgaaatttttgcaacatcaattgcaaataatattttaataacaggcagtcaaaaatgcgtaattatctgtggtggaatatcagtaaaactacatgacttatttgttgaaagtagattttttgagaggctgaggaataaaggaaggtatcaagaatacgtcgataaagtgccaatattactatcttatgataaaaataacggattaaaaggagcagcggaagctttctataatcctttctttaagaataaaaccctttaac

SEQ ID NO: 245231 - DNA, 727 bp, Unknown
  Bacterial polypeptide expressing nucleotide sequence isolated from the Sargasso Sea
aatgctcaatgccgaaatttcccgccgtcgcgaagccgctatatcccggggtgtcggcatgcaaacgcaggtctatgtctcccgtgcgagcggtgccgaagtctgggatgtggaaggacgccgctatattgatttcgcggctggaattgccgtggtgaataccggccattgtcacccaaaggtgatggaggccgtgcgcgcacaaagcgaggtatttacccacacctgccatcaggtcctgccatatgaaaactacattcggctggccgaacgcctgaacgacaaggtgccgggcaactttgacaaaaagaccgtttttgtcaccaccggagccgaggccgtagagaacgcgatcaaaatcgcgcgtgtcgcaaccggacgatctgccatcatcgcctttggtggcgggttccacggtcgcaccttcatgggaatgagcctcaccggcaaggttgccccctataagaaagggttcggtgcgatgatgcccgatgtctttcacgtccccttccctgccgatcttcatgggatctcaacatccgatgcgctgacggcgatcgagaagctgtttaaagcagacctcgaccccgatcgcgtcgctgcaattattctggagcctgttcagggtgagggtgggttttatcccgcgccggctgagctgatgcgcggattgcgcgaactttgcgactcccatggcattttgttgatcgcagatgaggtccagacc

SEQ ID NO: 245232 - DNA, 646 bp, Unknown
  Bacterial polypeptide expressing nucleotide sequence isolated from the Sargasso Sea
gacgagatcgccgtgggctttggccgcaccggcagcatgttcgcctgtgaacaggccggcatccgcccggacttcctgtgcctgtccaaggcgctcaccggcggttacctgccactggccgccgtggtcgccaccgaagaggtctacagcgccttctacgacgactacccgaccctgcgggccttcctgcactcccacagctacacaggcaacccgctggcctgtgcggcggcgttggcgacgctggatatctttgaagaagacaacgtcatcgaaaacaacaaggccctggcccagcgcatggcgaccgccaccgcgcacttggtcgaccatcctcacgtgtccgaagtgcgccagaccggcatggtgctggccatcgagatggtgcaggacaaagccaccaaggccgcctacccgtggcaggagcgccgtggcctgaaggtcttcgagcacgcgctggagcgcggtgcgctgttgcggccactgggcagcgtggtgtatttcctgccgccgtatgtgattaccccggagcagatcgactttctggccgaggtggccagcgaggggatagatatcgccaccaacagcaaggtcagtgtggcggtgcccaaagattttcacccgggcttccgtgatccgggttgat

SEQ ID NO: 245233 - DNA, 832 bp, Unknown
  Bacterial polypeptide expressing nucleotide sequence isolated from the Sargasso Sea
atggcaaacactacacctacgactaattcattagagaattatttcctaccctttactgctaataaggactttaaaaaggatccaagattattggatagaggagaaggtgtatactattggaaccataaaggagatacagtcattgatgcttcgtcaggtctgttttgtgttccgttaggtcatggaagaaaagagatcgctgaggcagttcataatcaattattaaaattggattattcaccaagtttccaagtttcacatttgccagcttttgcttgtgcagagaaagttgctaatatgttaccaggagatctcaataatgtattttttacgatttgtggttcaacagcaatagactctgcaatcaaaattgtacaggcatatcagcatgcaattggacaatcacatcgaatgaaatttgtttctcgtgaaagagcttatcatggagtgaatataggtggaacttcactcagtggaatgatcaaaaatagagaaatttttaccgcagcaatgcctggggtaattcatttgcggcacacttggatggaagaaaataaattcacaaaaggtcagcctgaacatggtgctcatttagcagatgatctacagagatttgttgatatgtatggcccagagtcaattgcggcatgttttgttgagccaatagctggttccactggaacattagttccaccaaaaggatatttagaaaaattaagagctacatgtgataaatatggaattgtactaatatttgatgaagtaattactggatttggtagaacgggaaaatcatttggatcagtaaaatataatgttcaacctgatatgg

SEQ ID NO: 245234 - DNA, 1189 bp, Unknown
  Bacterial polypeptide expressing nucleotide sequence isolated from the Sargasso Sea
tatgaaaaactctcaaaatcttcaacatttgtggatgccattttcagccaatcgagcctttaaatcaaatccaagattaatgaatgaagcaaaaggaatgttttataaaaaaacggatgggacctcagttttggatgggacttcaggattatggtgttgtaatgcaggccataatcatccaaaaattgttagagccatacaagaccaggctggaaaattagattatgctccttcatttcaaatgggtcaccccctaggatttgaagctgcaagaaaattacttagtattgcacctacagatgattttcaatatgttttttttacaaattcgggttcagaatctgttgattcagctttaaaaatagcattaggataccagcaacatagagggaaagtagataaaacgatactagttggcagagaaagagcataccatggtgttggttttggtggaatttcagttggtggtttaccattaaacaaaaaacatttttccgttcttaaaaatgtagatcacgtagttactactcataatctagacaaaaatgcctttagcaaaggttccccaaaatggggcatggaattggctgatgatttgctacgtgttatagaaaaacatggagcagatcaaatagctgcatttatcacagagcccattgcaggatctacaggtgtattaattcctccagaaggatatttagaaaaggttcgtgaaatatgtactgaacatgatattttgctaatttttgatgaagtaattactggttttggaagattaggatccccttttgctgcgcaatattttaatgttatcccagatataattgtatgtgcaaaaggtcttactagcgggacggttcctatgggcgcagtaatggtaaaaaaagaaatttatgacacctatcaatgtggagatccaaaaacaattgatttttttcatggctatacttactcagcgcatccattagcagcatcagccatgattgcaactttagatgtgtatttagaagaaggtctatttgatcgagtaacacagattgcatcttattgggaggaagcactacactctttgaaaggtgttgaccatgtagtagatattcgcaatcttggacttgtaggtggaatcgaaatgtcttctagtaatggaaaaattgggaaaagagggtatgatgtttttgaaagcgcattt

SEQ ID NO: 245235 - DNA, 685 bp, Unknown
  Bacterial polypeptide expressing nucleotide sequence isolated from the Sargasso Sea
gacccaaaatcgattgcttgcgctgttattgaacctgttgctggtgaagggggttttatccctgcttctttgaaagccatgatgcagctaaaagaattttgtaatgagcatgatataattatggtggcggatgaggtgcagactggatttggtcgaactggtagtctttttgcaatgagtcaatttggtgtagagcccgacatcttcactttagcaaaatctattgccggcgggctccctttgagcggtgttgtaggcagagctgagataatggattcagttcatgtaggtggaataggaggaacctttggtggaaaccccgttgcttgtgcagctgcgctttctgttttagatattatggaagatgaaaaattgccacaacgcgctattcaaataggtgaaaaaatcaatacaatggttaaaggaatcatgaattcctgcccttggatcagcgggatcagaggattaggggctatgcagggtatagttattattgataaagatcatgagccagacaaggaacatacatcccgcatccatcaatatgcattagagaatggtttgatcatgatcactgcaggtacagatggaaatgttattcgtacattgatgcctttgaccataagggataatgaattagatcagagtctggaaattctctcaaacgcacttagagtaccctaag

SEQ ID NO: 245236 - DNA, 742 bp, Unknown
  Bacterial polypeptide expressing nucleotide sequence isolated from the Sargasso Sea
aggatttggtcctatgccagctggcataaagcatcatccatttaatcaggtagatggtttaaaaaaaatcatcaataaaaatactgctgcggttattatcgaactaattcaaggtgaggctggaatagtgcctgcaaaaaaagtattcattaatgaaattaaaaagttatgtagaaaaactaatgctttaattgttgtagatgaagtgcaatcgggtgttgggagaactggatacctttatgcatacgagaagtacaatataaagcctgacattctttgctctgctaaaggcatgggaaatggaataccaataggcgcaattcttacttctaataaagttgcaaaagcaatgcatgttggtgatcatggttcaacatatggaggcaaccctttagcttgctctgtttcatatgaagtattcaaagaagtatctaaaaaaagctttctaaattcagtaataaagaaagaaaaactctttttaagcttattaaatgatttaaacaaaaaatttgattgttttactgcggttagatcagcaggattatggattggtctagagcttaactctaaaatgaagaacctaacccttcaaaatattatgtcgtctgcatacgatgaaggattaatgatactaaaagcaaataataatacccttaggcttgcaccagcactgacaatttctgaaaaagagattaaattgggggttaaaaaattagaaaaaagtctttcaagaatcctctga

SEQ ID NO: 245237 - DNA, 826 bp, Unknown
  Bacterial polypeptide expressing nucleotide sequence isolated from the Sargasso Sea
tatgccaacacagattgcctctgtgaagcatgctatggcaccttattgttatcgatgtccactaaaattatctccagagaattgtgggacagcatgcgctaatgatgtagaggaattaatccagactacaacgactggcaaaatagctggtattcttgctgagcctataatgggagtcgggggttttataactcctccaaaagaatattttagtattgttgcagatattgtaaggaaatacggtggtatttttatttctgatgaggtgcaaacaggatttggccgtactggaaaaacttggggtattgagcattatggagtagaacctgatatgattacagttgcaaagggaatagcaaacggtttccctttggcagcagtcatttctacaaaagagatagctgattctcttgataaaaatacaatttcaacttttgggggtaatccagttagctgcgcatctgcaaatgctacgatagatataattgaaagagaaaacctcgctgagaatgcaaaagatatgggacgtatacttattaatggaatgaaaaaaatacaaaaacaataccctgaaaccataggggatgttcgtggaaaaggcttgatggttggtgtagaactagtgaaggatgaaacaataaaagatagaacaccagacgttgaatcaaccaataaaataatggaagaaacgaagaaacgaggtttattgattggccggggagggctatacggaaatagtttgcgaattgctcctgctcttaatattggttcagatgcaattgaagaggcattgcaaataattaatgaatcgtttggagcgttataa

SEQ ID NO: 245238 - DNA, 1318 bp, Unknown
  Bacterial polypeptide expressing nucleotide sequence isolated from the Sargasso Sea
tatgagcgatgctttaccaaatttggaacattattggatgccatttacaggcaatcggtactttaagaagaatccaagaatgttcaaaaaagccaatggaatgcattatacgacatacgatgacaagaccgtcatggatggcgtttcaggtctttggtgttgcaatgctgggcattgtcatccaaagatagttgaagccattcaaaagcaagctgaaacattggattacgcgactgcatttcagctcggccatcccacaatctttgcaatggcggagaagttggtggatatggcgcctaaagaattgactcatgcattctttacaaattcaggttctgaagcggtggatacagctttaaagattgcactcgcatatcatcgagccagaggtgaaggacatagaactcgtctcataggaagggagaagggataccacggcgttggttttggcggtatttctgtcggaggcatgtcgcccaatcgtaaaatgtttggcgcaatgttgccgggcgtggatcacctcaagcacacccataatcttgagcacaatgctttttcagtcggtcagcctcaatggggcgagcacctcgcagatcagttaacagaaatactcatgttgcatgatccatccacagtggcagccgtaatcatggagcccattgcgggttcagcaggcgtttatctcccacccgttggctatctcaatagaatcagagaaatttgtgacgagcacggcattctgcttatcttggatgaagtcatcactggatttggaagaacgggaagtaattttggagcagatgcattcaatgttacgccggatataatgaccattgccaaaggcatgaccagcggaacagttccaatgggcggtgttttagtcaaggaagaaatttacgatacgttcatgactgggccagaagaagcgatagagtttttccatggctatacctattcaggtcatcctttagcagctgcagcaggattggcaacgctcaatgtttatgaagaagaaggtctttttgagaacgctcgagagcttgcaccggttctggaggaagaagtgcacaagatcaaaggcacgaaacatgtgattgatatacgtaactttggtttattgggtgctgtggaattggatcctatagaaggaaagcctaccgcaagagcaatgagtgtattcagagaatgttttgacagaggggttctcatcagaaccacgggcgatacaattgcgatttgtccgccattcatcgccagcgctgatgacgttcgcaaagtggtgcataccgtcaaagaatcgctagaagcgatcggttaa

SEQ ID NO: 245239 - DNA, 1270 bp, Unknown
  Bacterial polypeptide expressing nucleotide sequence isolated from the Sargasso Sea
aatgtcaaatattgatttagaaacaattaaacaaaatgtacctgatgcttggatcccatcactagattcattgatagtaaaaggtagtaatgctgaaatctgggataaagataataataggtatcttgattatgtaggtggttatgcagtccttaatacaggacatctcaatccaagagtagttaaaaatgttgaagagcaactaaaaaactattcacactcttgctttgcattcgcccctcatgaaaatgcagttaaggtagctgaacaaataaataaaagatatccaattgaagaacatacaaaaacttttttagtcaatagtggggctgaagcaatcgaaaatgcaactaaaattgcacgctattatacaaaaagaaaaaacattattgcattcaaggggggatttcatgggagaacctaccttgcaatgggtttgactggaaaagataatccttataaaaatggttttggtcctttcccagaatttattcatcatgctgaatatccatatgcttatagagacgtaactgatgagatggctatagacagtgttaacaatatcttaaaaaataaagttgatatagatgatacagcagcatttgttgtagaaatacaacttggtgaaggcggatacataccttcttctgttgattttttagaggaactcaagagtattgctattaaaaatgatattttattaatttttgatgaagttcaaacaggatttggtagaacaggtgagatgtttggtgcgaatacagtaggcgttactcctgatatagcaactttggctaaaggaattgccggtggttttcctctagctgcagttgttggtaaaagtgaaataatggattccatacatgaagctggtattggaagtacttttggagcttcaccaatttcttgtgcagctgccttaggagtacttgaagtttttgataaagatgatttattaaatcatacaaaaaaacaagcagcgataatgaacgagtctttaaatctcctaatgaatgaatcaccatttataggtgatgtaagaggatatggaacaatgcttggagtagaaatagttgaagaccaagattcaaaaaaacctggaaaagaaatagcattaaaaattattgataattgtaaaaataatggtttgcttttagttaactgcggattagaaggaaatgttataaggtttatgggacctttgactacacctttagatcaagttgaagaggctttaaatatatttaataaatcagttatcaatatttaa

SEQ ID NO: 245240 - DNA, 1285 bp, Unknown
  Bacterial polypeptide expressing nucleotide sequence isolated from the Sargasso Sea
atgaagaatgctgacctgaagagccgtaaggacgccgccacgccgcgcggcgtcggggtgatgtgcgatttctacgctgagcgcgcggaaaacgccgagttgtgggacgtcgaggggcgccgtttcatcgatttcgccgcgggtattgccgtgtgcaacacgggccatcgtcacccgaagattctggcggcgatccgcgaccagcttgatcatttcacgcataccgcgtatcagatcgtgccgtacgcgtcgtacgtcgaactggctgagaagatcaacgcgcgtgcgccgggcgactatccgaagaagaccgccttcttcacgacgggtgctgaagcggttgaaaacgcgatcaagattgcgcgtgccgcgacgggccgtccgggcgtgatcgccttcacgggtggtttccacgggcgcacgatgatgggcatggcgctgaccggcaaggtcgcgccgtacaagatcggctttgggccgttcccggcggacgtgttccatgctccgttcccgaatcctctgcatggcgtgacgacggctgattcgctgaaggcgatcgagtttctgttcaaggccgacatcgatccgaagcgcgtcgcggcgatcattttcgaaccggtgcagggcgaaggcggtttctacccggcgccggccgagttcgtgcgcgcgttgcgcaagctgtgcaatgagcatggcattttgctgattgccgacgaagtgcagacgggttttgcgcgtactggcaagttgtttgccatgcatcactacgacgtggtgcctgatctgatgacggtggccaagagtctggcaggcggcatgccgttgtcgggggtagtcggtcgtgccgatctgatggatgcggcggcgcctggcggtctgggtggcacctatgcgggcaacccgctggcgattgcgtccgcgcatgctgtgctcgatatcatcgatgaagagaagctctgcgagcgggctaccgttctgggtgatcgcgtcaaggcgaagctgatcgcgctgcagagcgaagttccgcagatcgccgatgtgcgtggaccgggtgggatggttgctgttgaattctgcaaggccggtgggactgagccggatgctgagttcaccaagcgggtgcaggcgctggcgcttgagcgtgggttgctgttgctggtttgtggtgtttattcgaacgtggttcggttcctgttcccgcttacgattcaggattcggtttttgatgaggctatggggattctggaagcggtgcttaaggagaatgttgctgtagctgtctgat

SEQ ID NO: 245241 - DNA, 1208 bp, Unknown
  Bacterial polypeptide expressing nucleotide sequence isolated from the Sargasso Sea
agttgatgccgttggagggctctggtgtgtaaatctaggttactcaaatgaagcagttaaaaacgccatatcagagcaacttaatcatttaccttattactctggctttgcaggtacaactaatccagctgctattgaagcctcttatatggtcaaagaaatgtttaaagctgatggaatggagagagtttttttcacatcaggtggatcggactcagtagaaacctgcctaaggttatctcggcaataccaccggttgcggggagaacctacgagaacaaaattcatatccttaaaaaaaggataccacggaacgcactttggtggagcatccgtaaatggcaataataggtttagaatagcatatgaacctttattgccaggctgttttcatttaccaagcccatacacttatcgaaatccatttaacgaaacagatccccaaaaattagcgctcaatattgcgcagaccttcgaagatgaaattgcttttcaggacaaaaatactattgctgcttttattatggaacctatccagggagcaggtggcgtaatagttccagacccttctttcatgggccttatgcaagagatttgcgagagaaacggcattctgatgatctcagatgaagtaataactggttttggcagaactggatcctggtcaggtgcaaggcactggaacgttaaaccagatatgatgagtatggctaaaggtattacatcaggttatttccctgtcggtgcagccttaatgggcgaaaaagtagcagatgtttttgaaaactctaatagtcctgaagctggcatatttcatggctacacttattccgctcatcctgttggcgcagctgctgtttgtgcctgcctttctgaaactcaaagaattagtacaaaagacaatgcaggagtgcgaggcaaacaactctatgagggcatactgaaactgaaaaagaaatttaatgttataggtgatgtaaggggaggtcagggtttaatggcagctattgaagttgtaagtgatcaaaagaaaaaaactgccatgagtatggatgaaatgaaaaaactacatcaaagtacttatgaagcaggagctatggttcggcttggattgaacaatgtcttaatgtcgccacctcttgtgatatcggaagcagaaatagaccagattttagatgctttggattatggtttttcatcgatgtaac

SEQ ID NO: 245242 - DNA, 652 bp, Unknown
  Bacterial polypeptide expressing nucleotide sequence isolated from the Sargasso Sea
aatgcttggtgaaggtggatttgttcctgcatctaaatctgaaatgaaagagctaaaaaaattctgtaaagaaaacgaaattctatttattgctgatgaaattcaaactggatttggacgaactggaacattttttgctatagaacaatttgatattgaaccagatatgataactatagcaaaatctattgcaggaggattacctttaagcggagttattggaaaaaaggaaattattgattccgttcatataggaggcattggaggaacttacagtggaaatccagtcgcttgtgaagccgccctagcagtacttgaaattatagaagaacaagaactacccaaaaaagctaaaaaaataggagatttgatacgatctagaattaatagtattcttcccatatgtccatggataaaagaagtaagaggaatgggtgcaatgataggaattgaaataattaatgataaaacaggagagcctgataaagaaagaacaaatagaatacatcaacaagctcttaggaatggtttaataatgattactgctggaacatttggtaatattatacgaacattaatgccgctaactattgataaagcaacacttaatgaagggatagatattttaattaatgctctaaaaacacattaa

SEQ ID NO: 245243 - DNA, 1399 bp, Unknown
  Bacterial polypeptide expressing nucleotide sequence isolated from the Sargasso Sea
catgccgaatcattcgctcatcgaagccgaccgcaaacatctgattcacccggttatcagctaccgcgcgcacgaagcccgcggcgtcaccgtcctcgagtccgcccgcggcgccttcctgcgcgacgcggccggcaacgagctgctcgacgccttctccggtctgtggtgcgtgaacgtgggctacggccagcaaagcatcgtggatgccgccacagagcagatgaagaaactgccctacgcaaccagctatttccatttcggctcggctccggcaatcgaactggcgcaaaagctggtagaggtctcgcccgcgtcgctccaacatgtgtatttcacgctgggcggctccgatgcggtcgattcggcgatccgtttcatcacacactacttcaacgcaaccggtcgcccggcgaagaaacacatcattgcgctgcaacgcggctaccacggttcatcgacgatgggcgcggggctcaccgcgttgcccgcgtttcaccgcaatttcgatctgccgctgccgaaccagcatcatctgccgtcaccgtatgcctaccgtaacgatttcgccgacgacgccgcgctgatcgccgcttcggtggccgcgctcgaagcgaaagtggccgaactcggcgcggacaacgtcgcggcgttcttctgcgaaccgatccagggctcgggcggcgtaatcgtgccgccggtcggctggttgaaagcgatgcgcgacagttgccgtaagcttggcattctgttcgtcgccgacgaggtcattaccggcttcggccgtacgggtccgctattcgcctgccagggtgaaaacgtcgagccggatctgatgaccgtggcgaaaggcctgaccgccggttatgcgccgatgggtgccgtgctgatgtctgacgaaatctatcaaggcatcgcggacggcgacgccgaagcggtggtcggccacggccatacgtactcggcgcatccggtcagcgccgcgatcggcctcgaagtactgcgcctctatcacgaaggcggcctgctcgcgaacggcgtcgcctgtggcccgcgcttcgcacgcggcctcgacgcgctgctcgcgcatccgttggtgggcgactcgcgccatcgcggcctgctcggcgcgctcgaactggtgtcggacaaggacagcaaggccggtttcgatccgtcgctgaaactgtcggaacggatcgccgccgcgtcctatgaaaaccgcctgattttccgcgcgttcggcgacaacattctcggttttgcgccggcgctgtcgtacaccgaggcagagttcgatctgatgttcgaacgcctcgaaaagaccctcgacgacgtcctcgcgcaagccgatgtccgggccgcgttgaacgtcaaaattcatgccactgcgtgctag

SEQ ID NO: 245244 - DNA, 1387 bp, Unknown
  Bacterial polypeptide expressing nucleotide sequence isolated from the Sargasso Sea
tatggatggaacgcctcgtgataatgatatttctaaaatagttgaagctgatcgtgcacatatttggcatcacctaattcagcataagccatttgagacaaatgaacctcgcattatagttgaaggtaaagacatgcgagtttgggaccaaaatggcaaggagcacatagatggtgtttcaggcggtgtatggacagtaaatgttggctatggaagagagcgaatagctaacgcggtacgtgatcaattgctaaagctaaactactttgctggtgctgccggatcagtccctggatcaatctttgctgaaaaacttatcgaaaaaatgccgggtttaagccgagtatattactgtaattctggctctgaggctaatgaaaaggcattcaaaatgataaggcaaattgcccataaaagatatgggggtaagaaaaataaaattctttacagggaccgtgattatcacggaacaaccatctctactctttcagccggggggcaagatgaaagaaatgcacaatatggcccatatacaccagggtttatccgcgtaccacattgcctagaataccgagcgcaatgggatttaagtggcgaggaatacggtcaacgcgcagctgatgcaatagaggaaataattttggcagaaggtcccgatactgttgggggtctttgccttgaaccagttaccgcaggtggtggagttataacgcccccaccaggttattgggaacgtgttggggaaatttgtaaaaaatacgaaatcttattgcatatagacgaggtcgtttgtggggttgggcgaactgggaaatggtttggctaccaaaactttggcataaaaccagatatggtaactatggctaagggagtagcatctggctacgctgcaatagcatgcttagtcactacagaaactgtttttgaaatgttcaaagacgatgctagcgatccaatgaactattttcgcgatatatcaacctttggaggatgcacagccggccccgcagctgcgattgagaatatgaacatcatagaagaagaaaatctccttgataatacgttagtaatgggagatcggttaatggcgaacttgcgagagttaagtgagaaacacgaagtgatcggtgatgtaagaggcgctggtctgttttgtggtgcagagcttgtcgcaaatcgacttgacaagacaccggccgacgaaaaaatggtgcaagccgttgtggctgactgtatggcacagggaattattattggagcgaccaatagatcgttacctggattgaacaatacactatgtttcagtccagcccttatagcgatgcccgatgatatagacgccattaccgagtcggtggatatagctttaacaaaggtttttgggtga

SEQ ID NO: 245245 - DNA, 628 bp, Unknown
  Bacterial polypeptide expressing nucleotide sequence isolated from the Sargasso Sea
attcaaggggaaggtggtattaaaattcctaatcctgaatatttatctaaacttagatctatctgtgatgccaatagctggctattgatgatcgatgaggtacaatcaggtttttgcagaactggaaaatggtttgcttatcagcatagtacaatattgcctgatgtcgtgacagttgctaaagctttagggaatggagttcctattggtgcatgccttactaataagaaagcctcagagattttgactccaggaactcatggttcaacatttggtgggaattttttgtccaccactgttggtttaaaagttcttgatatcatgaaggaaaaaaatctttgtagaaatgcgcggcttatgggtacatatttagaacaagaattaaaaaataaattaatgggccttagcatagttaaagaaattaggtgcaaaggtcttatgattggaatagagttaaaagtgaaatgcttagatcttgttgaagaggcattgaataataaactggtaataaatgttacaaaagagaacacgataaggatgttgcctcctctcattattaataaatcagagatagacgttattgtgaagatactatataaaataatcagcagggttagatatgagtaaa

SEQ ID NO: 245246 - DNA, 445 bp, Unknown
  Bacterial polypeptide expressing nucleotide sequence isolated from the Sargasso Sea
taggacttactgttgttataacgccatttacgatggattttattctgatgatcaaagtcacacttttcttcatggtcattcctacactggaaaccctttagcttgcgctgctgctaatgcttccatagctctttttgaacaaaatgagctatggaataatatagaagtaatttcaaaaagaatcagttatcacatcgaaaagattcaacacttaaaatctgtaagaacggctcgttcttttggaatgattggagctattgagattgatgctggtggagcatcttcttattttaataaatctggaaaagaggtgtataaaaagctgttgaaaagtggcattatattaagacccttaggaaatgtctttgctgtagtgcctccatatattattactgagaaacaagtagatgaaattttcagaaaattaaatgaggttttagggtag

SEQ ID NO: 245247 - DNA, 441 bp, Unknown
  Bacterial polypeptide expressing nucleotide sequence isolated from the Sargasso Sea
aaggaataggttcaggatttccattgggtgcatgtttagcgacttcaaaggcgagtgttgggatgactactggaaaacatggctcaacgtatggaggcaatcctctagcagtagcaattggaagagaagtattaaagattatttcaaataaaaaatttttaacagatgtagattttatatctagatatttatggaaaaatttaaaacaattgcatagtaattatgatgaaattctggatattagaggtgctggacttttacttggtattaaaactaaacaaaataatgtaatgatttctaatatattaaaaaaaaacaaattattaactgttccagctggagataatgtaattagactagctccaccactaattataaataagatacatgtagatcaggcaataaaaatattggatcaaacatttaagacattattatgaa

SEQ ID NO: 245248 - DNA, 362 bp, Unknown
  Bacterial polypeptide expressing nucleotide sequence isolated from the Sargasso Sea
aacttatgggggaaaccccctaggttgttcgataggattaaaggttatagatattatttctgaccccaattttctatatgatgttaatcgtaaagcaaaactttttcatgatggcctactggaacttttgaagaaaaacacctctgtttttgaggaagttcgtggcaaaggtctgatgttaggactcaagtgtaaagtcagaaatatagatgttgtaaatgcaggttattcaaaaaagttactaacggttccagcaggagataacgttgtacgacttttgccccctttaaccatttctgaaaaagatataactgaggcgcttaaaaagttagatggcgtaatggaagttctttctcaataaa

SEQ ID NO: 245249 - DNA, 1066 bp, Unknown
  Bacterial polypeptide expressing nucleotide sequence isolated from the Sargasso Sea
ttgcatgcccaccctgagctcagcggcgaggagcatcagacggcagccctggtggctggagagttgcgggcctgtggctggcgcgttcaggagggtgtcggacggactggagttcttgcggaggcggggccgctggatggccgcacggttggccttcgggttgatatggatgccctgcctgtggaggagcgcaccggtctcccctttgcctccacccgtcagggggtgatgcacgcctgcggccatgacctgcacacctgcattggactcggtgtggctcggctgcttggagccaaaccgacgctgccctttcgggtccggctgctgtttcaacccgcagaggagctggctcagggggcggtctggatgcgtgatgccggcgccaccgacgggctgagtgccctattcggcgtgcatgtggtgccgaatctgccggggggcagcgtgggcatccgccgcgggtgcctcaccgcagcagcgggagaactggagatccagatccaaggggaaggcggtcacggagcccgtccccatcaggcggtggatgcgatctggcttgccgcccgggtggtgacagaactgcagcaagcgatcagtcgccgcctcgatgcactgcagccggtggtcattagcttcggacgggtggagggtggccgtgccttcaatgtgatcgccgatcgggtgcggctgctgggcacggtgcgttgcctcgatctggagctgcatgggcgattgccggcctggatcgacgacaccgtccaggcgatctgccgaagtggtggtggcgaggcggaagtgagctaccgctgcattgctccaccagtgcacaacgaccccgggcttaccgatctgatggaacgccgagctgtgcagctgctgggccgggaccaggttctgcctgttgatctgccgtcgttgggggctgaagacttcgccgagctgttgcgggatgtgcccggcaccatgctccggcttggggtggccgggccggatggctgtgcgccactgcatcacggccggtttgccttggatgagcgggctttaggcgttggcattcaggtgctca

SEQ ID NO: 245250 - DNA, 1267 bp, Unknown
  Bacterial polypeptide expressing nucleotide sequence isolated from the Sargasso Sea
tatgtcagtaaagataataactaatataccagggcctcgatcattagatttggcagaaagaagatccaatagtgtagcacaaggccatggaactgtttgcaatgtttatataaaaaaaggagaaggatccttattaactgatgtggatgataatgtattcattgattttgcaggtgggattggaaccattaatattgggcattcacatccaaaagtaacagaggtagttaataaccaggttaataattacttacatacctgttttactgtagctccttatgaaagctatataagactcgctgaaaaattgtctagtctagtcccaataaaggaggaatgtaaagctgctttttttaactctggcgctgaagcagttgagaatgctgtaaaaatagccagatcttattcaaatagaaaaggtgttttagtatttagtcatgcatatcatggtaggacattaatgactatgtctatgacatataaagaagatccatataaaaaagggtttggtccatttgcgcctgaagtatatacactaccttatccaaataatgaaaacaaaataaactttgataaagttaatccagaaaacattgcttgtgcagttattgagcctgttcttggagaaggtgggtttattccagcttctaaatcagggatgaaagaactaaaaaggtattgtactgaaaatgaagtattattaattgctgatgaagtacaaaccggtttttgtagaacaggatctttattcgcaattgaacaatatgatatagaaccagatatgataaccatggcaaaatctattgctggaggattacctttaagtggtgtggtaggaaaaagaaaaataatggattccgttcatatcggtggtatagggggaacatatagcgggaatccagtttcttgcgaagcagctttagcagtccttgaaattatggaagaggaaaaattagcagaaaaagctaataaaataggtaatattttaaagtctcaaattgaaagcattataccacaatgcccttggataaaagaaattagaggacttggtgcaatgataggaattgaaattgtcgatgagaaaacaggagatcctgataaagaacggactaaccgtatacataaaaaagctcttgaaaatggtctaataatgattacttcagggacatttgggaatgtcatacggaccttaatgcctcttactattaatgataatacccttaatgagggtgttgatatattagtaaatagtcttaaaaatcattaa

SEQ ID NO: 245251 - DNA, 1252 bp, Unknown
  Bacterial polypeptide expressing nucleotide sequence isolated from the Sargasso Sea
cgtcaatccccgggacctaaatctttatcgcttgcacagagaaggtctagcagcgtggctaaaggtcatggtaccgtctgtaatgtgtatattgaaaaagcagaggggtctttactagaagatgtagatggtaatttatttattgattttgcaggagggatagggactatgaatgtgggacatagtcatcccaaaatattggaaagaataaaaaatcaattagacaaatactcgcacacgtgtttttcagtagcaccttatgagagttatattaaactagcggaaagattatcagaattggttccaatatctggtgcctctaaagctgccttttttaattctggtgctgaggctgtagaaaatgctatcaagatttccagatctttttcaaaaagaactggggtcttggtcttttctgaggcctatcacgggagaacgcttatgacaatgacaatgacctacaaggatgatccatacaaaaaaggtttcggtcctttctcccctgaagtttatcgtttaccgtatccctcaaagaaaaataaaattaattttgaagatcttgattttgatccaaaaagcatagcttgtgcggtcattgagcctgttttgggtgagggaggtttcatcccagcttcaaaaaaagggatgaaatcagttgaacaattttgcaaacagaatggaattcttcttgttgttgatgaggttcaaactggctacggaagaacgggtagttttttggcaatagaacagtttgatattgagcctgatattattacagttgctaagtcgattgccggtggtattcctttgagtggcgtcattgggaaagctgaaattatggactctgttcatatcggggggataggcggtacatatagtggaaatcctcttgcttgtgaggctgctcttgctgtattggatataatgtcctctgaaaaattaccagaaaatgcgaatgaaattggaaatgtctttcgtactaaaatagatagtatgattcacaatgctccttggatcaaagaagtgagagggttaggtgctatgatggcgatagaaatttgtgatccagatacgggggagcctgataaagatagaactaatcgaatacataagaatgctcttgagcatggccttgtgatgattaccgcaggcacctatggtaatgttatacgaacgttaatgcctttaaacattgatagatccaccttggaagaaggcttagaaattttgtgtgattgccttatggcttgaa

SEQ ID NO: 245252 - DNA, 1324 bp, Unknown
  Bacterial polypeptide expressing nucleotide sequence isolated from the Sargasso Sea
tatggcaaacaccacacctacgactaattctctcgaaaattactttttacccttcactgcaaataaggatttcaaaaaagatccaagacttttggatagaggggaaggtgtatactattggaaccataaaggtgatacggtaattgacgcttcttcaggattattttgtgtacctttgggtcacggaaggaaagaaattgcagacgctgtacaccagcaattattaaaattagattattcaccaagcttccaggtttctcacttgcctgcatttacttgcgctgaaaaagttgcaaaactattacctggtgacttaaacaatgtttttttcacgatttgtggatcaacagcaatagattcagctataaaaattgttcaagcatatcagcatgcaattggacaagctcatcgaatgaagtttgtatcacgtgaaagagcttaccacggtgtaaatattggtggtacatctctaagtggtatgattaaaaatagagaaatatttactgctgcaatgcctggcgttattcatttaagacatacttggttagatgaaaataagttcacaaaaggtcaaccagaacatggtgcacatttagctgatgaccttcaaaggtttgttgatatgtatggtccagagtcaattgctgcatgctttgtcgaacctatcgcgggatcaacgggaacattaattccacctaagggatacttagaaaagttaagagcaacatgtgataagtatggcatcgtattaatttttgatgaagttattacaggatttggaagaacaggaaagtcttttggttcagttaaatataatgttcaaccagatatgatcactatggctaaagctattacgaatggttcccagccaatgggagccgttggggtttctgataaaatttataacgcaattgttgacaatggccctgaacacggagttgagttttttcatggctacacatactcaggtcaccctgcatgtgttgcagcttcattagctacattagatatttatgaaaaagaagatatttttgcaagagctgaaaagatgtcaccttattttttagatgctgtttttgatgcgtttaaagatgttccggctgtaacagatgttcggggagatggaatgatggctgccatcgatcttgcagttgataaaactccaggggtacgtggatatgatgctcaaaagaaaacttttgcgaatggagttcatattaaatttactggcgacagcggtataattgcacctgctttgattgccgaagaaaagcacattgacgaaatgttacaaaaaataaaagaagtagttgttaaatattaa

SEQ ID NO: 245253 - DNA, 1177 bp, Unknown
  Bacterial polypeptide expressing nucleotide sequence isolated from the Sargasso Sea
ctggatcaggagctgttgaacggcctggatcaggccctgcccgagctgatcgagctgcgccgacatctgcatgcccaccctgagctcagcggagaggagcatcagacggcagccctggtggctggagagttgcgggcctgcggctggcgcgttcaggagggcgtcggacgcacgggggttgtggcagaagccggtccgctggatggccccacagttggtctgcgggtggatatggatgccctgcccgtggaggagcgcaccgggctctcctttgcctccacccgtcagggggtgatgcacgcctgcggccatgacctgcacacctgcatcggacttggtgtagcacggctgttgggggccagggaggagttgccctttcgggttcgtttgctgtttcaacctgctgaggagctggctcagggggcggtctggatgcgtgatgccggcgccaccgacgggctgaacgccctttttggcgtgcatgtggtgccgaatctgccggggggcagcgtgggcatccgccgcggttgcctcaccgcagcagccggagaactggagatccagatccaaggggaaggcgggcatggtgcccgtcctcatcaggcggtggatgcgatctggcttgccgctcgggtggtgaccgaactgcagcaagccatcagtcgccgcctcgatgcactgcagccggtggtgatcagcttcgggcgggtggagggtggccgggccttcaatgtgatcgccgatcgggtgcgcctattgggcacggtgcgttgcctggatctggatctgcatgggcgattgccggcctggatcgacgacaccgtgcaggcgatctgccgcagtggtggtggcgaggcggaggtgagctaccgctgcattgctccaccggtgcacaacgaccctggcctcactgatctgatggaaggccgagctgtgcagctgctgggccgggaccaggttctgcctgttgatctgccgtcgctgggagcagaagacttcgccgagctgttgcgggacgtgcccggcaccatgcttcggcttggggtggccgggcttgatggctgtgcaccactgcatcacggccggtttcagctggatgagcgggccttgggggttggcattcaggtgctcaccgccacccttctggaatggatggaggtgcagtcaccccgatgaa

SEQ ID NO: 245254 - DNA, 504 bp, Unknown
  Bacterial polypeptide expressing nucleotide sequence isolated from the Sargasso Sea
ggcaattattcgctcatgaatgggcagaaattgaaccagacataatgatggtagcaaaaggtattggtggtggatttccattaggggctgttcttgcaaaagaaaatgcagcaagcgggatgaccgctgggactcatggatcaacttatgggggtaaccccttgggttgttcgatagggttaaaggttatggatattatttctgacccaaattttttatatgatgttaatcgaaaagcaaaactttttcatgatggattactggagcttttgaggaaaaacacctctatttttgaggaagttcgtggcaagggtttcatgttaggactcaagtgtaaggtcaaaaatacagatgtcgtaaatgcagcttattcaaataagttactaacggtgccagcaggagataacgttgtacgccttttgcccccgttaaccatttctgataaagatataaacgaagcgctgaataaattagatggcgtaatgacagctctttctcaataaa

SEQ ID NO: 245255 - DNA, 1357 bp, Unknown
  Bacterial polypeptide expressing nucleotide sequence isolated from the Sargasso Sea
atgaaagtgctaattttaggtgctggtcgtgttggtggtagtcttgcacgtgctctagtaaataacgggtatgacgttgcaattattgatcaagataaaaacgcacttaattctctagaagaaaagctagatattttaacaatagaaggtcatgcatctcatcctgtatcaataaaaaaatctagtgcagacgagtctacaacagtaatagctgttacatcagatgacgaggtaaatataatcgcatgtcagatagccaagaaatcgtttaatgttaaaaaaacgatatgcagaatcactgattcggcatatggaaatgatttgacagtttttggtgataatgcaatagatattctcataagcccagaaaacgaagtaaaaaatcatcttaaagatttaatacttcaccctggagctcaccaaatcgaaaaatttgctgatggaaaagttaatcttgttagtgtaagggccagaaaaaaaggcaagcttgttggaagagagcttaagggtattaaagatgatatgccagaaacagatgcatttattgcttcaatataccgaaaaggtaaaccatttattccatctggtgaaacaataataaaagaaaatgatgaggtatatttcatctcgtctgaaaaaaataccgatcaaattgtagatgagtttagagatcatgaagaaacttattctagagtcatgattgttggtggtggaaaaataggtatgtctcttgcaaaagaaattgaaggagaatacaaaactaaaataatagattcggatgaagaaaaatgtgcaagtttatctaaacaactggataaagctattgttcttcatggatctgctacagatgaggatttgcttaagagtgaaagtatttcgaatatagatattttttgcgcccttactgatgatgatgaaacaaatttaatgtcatccttgctcgcaaagaagatgggagctaaaaaaacaatgattatcttaaacaacccctcttatttgggtctagtgccagggtttatagacatctatgttgcaccatatagacttaccgtttcttctgttttacaagacttacgagacagtgatgtaacacaagacgtaatgcttaaaatggatacaggtgctgaagctgttgaaggcatagtgcatgcaaatgagtatacttcatcgctttttggaaaatctatcaaagagatttctctaccagagggcgcttccataggagcagttataagacatggagagttaataatgccaaggtcggaggtcgagctttgtttaaatgatcatctaataatatttttagctaataaaaatatgatgtcagaagttgaggttttgttcaaaacaaactgat

SEQ ID NO: 245256 - DNA, 364 bp, Unknown
  Bacterial polypeptide expressing nucleotide sequence isolated from the Sargasso Sea
tatgtctaatccattagcttgtgcagcagctaatgcctcaattaatctatttaaaaaccaacctaggttagaacaagttaagaatatagaaagagatttaaaaaaaggtttagaagtgtgtaaagatatgaatatagttgtagatgttagaattaaaggtgctttaggtgttattcaagtaaaagaaatgcataatttaaattggttaagaaagagatttgtagaagagggtgtctggattagaccttttttagatgtaatctatttgatgccctcatttattatatcaaataatgatttaaataaacttatgaatgctataactagtatcattccagaatgggaacataagtataaaaattaa

SEQ ID NO: 245257 - DNA, 231 bp, Unknown
  Bacterial polypeptide expressing nucleotide sequence isolated from the Sargasso Sea
ttgataataatattattaaagaaatcagagggaaagggttgtggattggaatggagcttaataagcacaatttcaatgcaaaagatttatgtttaatgttgttaaatgaagggctgttgtgtaaagaaactcataaatctgtaataaggtttgctcctccattaatgatcactaaaaaagagattgactgggcaattgaaaaaattacaaaagttatttcttcaatttgat

SEQ ID NO: 245258 - DNA, 622 bp, Unknown
  Bacterial polypeptide expressing nucleotide sequence isolated from the Sargasso Sea
ttacctcaatcgaatcagagaaatatgtgatgagcatggaattttactcattcttgatgaggtcattaccggatttggcagaactggaagtaattttggttcagatgcatttggtgtgacaccggatatcatgaccattgcaaaagggatgacaagtggaacagttccaatgggtggggtattggttaaggaagagatttacgatactttcatgactggacctgaggatgcgatcgagttttttcacggttatacctactcaggacatcctttggctgcagcagcaggactcgcaacactcaaggtttatgaagaagaaggactttttgaaaatgcaataaagttgtcaccagttttggaagaagagatccatcaaatcaaaggaacgaaacatgtgattgatatcagaaattttggtttattgggtgcagttgaactgaatccaattgaaggcaagccaactgcaagggcgctcagtgtatttagagagtgttatgacagaggcgttctgatcagaaccactggtgacacaattgcgatgtgccctccatttattgcaactgccgatgatattagaaaagtggtgcatactgtcaaagaatcactagaagcaatcgaataa

SEQ ID NO: 245259 - DNA, 1201 bp, Unknown
  Bacterial polypeptide expressing nucleotide sequence isolated from the Sargasso Sea
catgttcgaccacattcccgcctatccgggcgacccgatcctgagcctgaacgaggactttcaactcgacccgcggcccaacaaggtcaacctgagcatcggcatctatttcgacgacgccggcaagttgccggtgatggacgccgtgcggcacgccgaaaccgcgctgctcggcgcgatcgggccgcgctcgtacctgccgatggcgggtctgccgctgtaccgcgacgccgcacaggcgctgttgttcggcgcgaatcacgaagcgcgtgcggcgggccgcatcgccactttgcagaccattggcggatcgggcgcgctgaaagtcggcgcggattttctgaagcgttatttcccggcctcgcagatatggatcagcgatccgagctgggaaaatcatcgcgtggtgttcgaaaacgcgggcctcacggtcaacacttatccgtattacgacgaacgcaccggcggcttgcgtttcgccgacatgatcgagacgattagccgcttgccggagcaaagcatcgtgctgctgcacgcgtgctgccacaacccgaccggcgtcgatctgagccccgcgcaatgggcggaactggtgcccgtattgcaacgccgcaagctgattgcgttcgtcgacatggcgtatcaaggtttcggttcgggcctcgaggaggacgccgcctgcgtgcgcctgctcgccgatgcgggcgtgccgttgatcgccgccaattcgttttcaaaaaacttttcgctgtacggcgagcgctgcggcgcattgagcgtagtgtgcaagagccgggacgaggcggctcgcgtgctcggccagttgatgtcggcggtgcgcgccaattacagcaatccgccgacgcatggcgcacggctcgttgccaatgtgctgtcggatgcgtccttgcgggcttcgtgggaagcggaactcgctactatgcgcgaacggattctggccatgcgcggcacgattcacgacggcctcgccggccgcgtcgatgaagtgatgcgcgcgcgctatgtcgcgcagcgcggcatgttcacctacacgggcctgagcgaagcgcaggtcgagcgtttgcgcagcgaatatgccgtgtatgtgctgcgttcggggcgcatgtgcgtcgccggattgaatgcgcgcaacgcgggctatgtggcgtcgtcgatcgcggcggtggtggcaggcgcttaa

SEQ ID NO: 245260 - DNA, 1098 bp, Unknown
  Bacterial polypeptide expressing nucleotide sequence isolated from the Sargasso Sea
tggattacgcaactgcctttcagcttggccatccaacaatctttgcaatggctgaaaagttggtagacatggcaccaaaggaactgacgcatgcttttttcacaaattctggttcagaggctgtcgatacagctcttaaaattgctcttgcatatcatcgagccagaggcgagggacatagaacaagactgatcggcagagaaaagggatatcatggtgttggttttggcgggatttcagtcggcggtatgtcacccaatcgcaagatgtttggcgcaatgctacctggagtcgatcatctgaaacatactcataatctagagcacaatgcttactcagttggtcaaccaaaatggggagatcatcttgctgatcagctaacagaaatattgatgttgcatgacccgtccactgtggcggcagtcattatggagcccatcgctggttcggctggtgtttatcttccacctgttggttacctcaatcggatcagagaaatatgtgatgagcatggaattttactcatccttgatgaagtcattaccggatttggcagaactggaagtaattttggttcagatgcatttggtgtgacaccggatatcatgaccattgcaaaagggatgacgagtggaacagttccaatgggtggggtattggttaaggaagagatttacgatactttcatgactggacctgaggatgcgatcgagttttttcacggttatacctactcaggacatcctttggctgcagcagcaggactggcaacactcaaggtttatgaagaagaaggactttttgaaaatgcaaggaaactggcaccagttttggaagaagagatccatcaaatcaaaggaacgaaacatgtgattgatatcagaaattttggtttattgggcgcagttgaactgaatccaattgaaggcaagccaactgcaagggcgctcagtgtatttagagagtgttatgacagaggtgttctgatcagaaccactggtgacacaattgcgatgtgccctccatttattgcaactgccgatgatattagaaaagtggtgcatactgtcaaagaatcactagaagcaatcgaataag

SEQ ID NO: 245261 - DNA, 874 bp, Unknown
  Bacterial polypeptide expressing nucleotide sequence isolated from the Sargasso Sea
ttttgcgggatttcagtcggtggtatgtcacccaatcgcaagatgtttggcgcaatgctacctggagtcgatcatctgaaacatactcataatctagagcacaatgcttactcagttggtcaaccaaaatggggagatcatcttgctgatcagctaacagaaatattaatgttacatgatccgtccactgtggcggcagtcattatggagcccatcgctggttcggctggtgtttatcttccacctgttggttacctcaatcgaattagagaaatatgtgatgagcatggaattttactcatccttgatgaagtcattaccggatttggcagaactggaagtaattttggttcagatgcatttggtgtgacaccggatatcatgaccattgcaaaagggatgacgagtggaacagttccaatgggtggggtattggttaaggaagagatttacgatactttcatgactggacctgaggatgcgattgagttttttcacggttatacctactcaggacatcctttggctgcagcagcaggactggcaacactcaaggtttatgaagaagaaggactttttgaaaatgcaagaaagttggcgccagtattggaagaagagatccataaaattaaaggaacgaaacatgtgattgatatcagaaattttggcttattgggcgcagttgaactgaatccaattgaaggcaagccaactgcaagggcgctcagtgtatttagagagtgttatgatagaggcgttctgatcagaaccactggcgacacaattgcgatgtgccctccatttatcgcaactgccgatgatattagaaaagtggtgcatactgtcaaagaatcactagaagcaatcgaataag

SEQ ID NO: 245262 - DNA, 1366 bp, Unknown
  Bacterial polypeptide expressing nucleotide sequence isolated from the Sargasso Sea
atgaataaagatattttaatttcaggtgaaaaaatagaagaattacaaagcttagcatctcaaaatctatttatgcatgctcaacaaattaacgattgggctggtgacttaagaatttttgttaaaggagaaggagtttgggttacagatgtaaatggtaacaaatatcttgattctaccggaggattgtggttcaaaggtgccggatatgggagatcagaaattggtcaagctatttatgaacaaatatgtgagattgaaactcctccagcaatggcagcttgtataccacaaatagaattagcagctaaaattgctgacatatatcctgataaatctgctagatctttttttacttcaggaggctcagaatcagttgaaacagctgttaagatggccaaaaaatatcaaatgaatacaggaaaatcaggagcttataaggttatttcaagaagatattcatatcatggagctactgcaatggccgttagcttaggcaagccttctacttcagataccatgggaccagagatgcctggagcaatacatgttcaaaattgggattcctacagaatacctaaaaatatgaattcagtagactatgctattcactgtgctaatcaatttgaagaagctataaaacatactgggccagatagtgttgctgcgatgattgctgagccaatttctgtagcgtttgggatacatattccacccaaagaatattggcaaagattaagagaaattgcagacgaatataacgttgtcttgatagctgatgaagttataacaggatttggtagaacggggaaatattttgctactgaccattgggatatgattccagatataacaacagttgccaaatctctaactagtggatattctccattaggagccgcgatagctacaaaaaaaatagcagactcatttattggtagtgaaaaagagatgtttttacatttgataacctttggtgggcatccagcatcatgtgcagcaggcctaaagaatcttgagatttatgaaagagaaaatttagtagaaaattccaaagacaatggagattacctgttaaacaagctagaagatctaaagaaatctaaaatcgtaggtgatgttaggggattagggctacttgctgctattgagttagtcaaggataaaaaaactaaagaaaaactccctgcagcaatggaaatacaaaaaaagattccaaaatacttgaataaaagtaatattttcacatttagagcgggtgatattatttctttgtgtcctcctctaaatatcaataaggatgagatagactttttagtagagggtttgagtagcgctattagtaggatagaaaaagaactttaat

SEQ ID NO: 245263 - DNA, 1291 bp, Unknown
  Bacterial polypeptide expressing nucleotide sequence isolated from the Sargasso Sea
atgaccgtgaagaatgccgacctgcaggcccgcaagaacgccgccaccccgcgcggcgttggcgtgatgtgcgatttctacgcagcccgcgccgagaacgcggaactgtgggatgtcgaaggccgccgcttcatcgatttcgccgccggcatcgcggtgctgaacaccggccaccgccacccgaagatcgtcaaggcgatcgcggatcagctgaacaacttcacgcacaccgcttaccagatcgtcccgtacgcgtcgtacgtcgagctggctgaaaagatcaacgaccgcgcgccgggcgatttcccgaagaagactgcgttcttcacgaccggcgcggaagccgtcgagaacgcgatcaagatcgcgcgcgcagcaaccggccgtccgggcgtcatcgcgttctcgggcggcttccacggccgcacgatgatgggcatggcgctgaccggcaaggtcgctccgtacaagctgaacttcggcccgttcccgggcgacgtgttccacgcgccgtacccgaacgccgtgcacggcgtgacgaccgccgactcgatcaaggcgatcgagatgctgttcaaggccgacatcgatccgaagcgcgtcgccgcgatcatcttcgaaccggtccagggcgaaggcggcttcaacccggcgccggccgagttcgtgcgcgcgctgcgcaagatctgtaacgagcacggcatcctgctgatcgccgacgaagtgcagacgggcttcgcgcgtaccggcaagctgttcgcgatgcagcactacgacgtgctggccgacctgatcacgatggcgaagagccttgcaggcggcatgccgctgtcgggcgtcgtcggccgtgcggacgtgatggacgcggcagcgcccggcggcctcggcggcacgtacgcgggcaacccgctggccgtcgcatcggcacacgcggtgctcgagatcatcgacgaagagaagctgtgcgagcgcgcaacgcaactgggcgacgtgctgaaggcgaagctgaacgcactgcaggccgacgtgccgcagatcgccgacgtgcgcggcccgggcgcgatgatcgcggtcgagttcctgaagccgggctcgggcgagccggatgcggaattcacaaagcgcgtgcagacgcgtgcgctcgagcgcggcctgctgctgctcgtgtgcggcgtgtactcgaacgtcgtgcgcttcctgttcccgctgacgatcccgcaagccgtgttcgacgaagcgctcgtgatcctcgaggaagtgctgaaggaaacggtcggcgtgccggcctgag

SEQ ID NO: 245264 - DNA, 1054 bp, Unknown
  Bacterial polypeptide expressing nucleotide sequence isolated from the Sargasso Sea
atggtatacatccaaaatgatcaattacaatctaatgtacctagtgcttggtatagttccttagaaaattttattgttaaaggtaagaatgctgagatctgggattctgaaggtaatcgatatttagattatgtaggaggatacgctgttttaaacactggccatcttcatccgagagttgttaaaagagtaaaaaatcagcttgataatttttcacattcatgttttgcatttgcaccacatgaaaatgctgtaaaactatccgaagaactaaacaaaagatatcccatagaagctgaaactaaaacctttatggttaatagcggtgctgaggctgtagaaaatgcagttaaaattgcaagatactttacaaacaaaaaagcaattttatcttttaaaggtggcttccacggaagaacttatcttgcaatgggattaaccggaaaagataagccatataaagaaggcttcggaccatttccagaattcgtaaagcatgctgtttacccatacagctacagagatatttcagatgatgatgcattgctgagtgtcaaagaattattaaacaatacccttgatcctaatgacacagcagcaattgtgattgaaatagaacttggggaaggtggatatattccagcttcaagttattttttaacgcaactcagagatatttgtgacaaacataatatattattaatttttgacgaagtacaaacaggatatggacgtacaggaaatatgtttggtgcagaaacagtgggtgttagaccagacatggttacattggctaaaggaattgctggtggttttcctttagctgcagttttaggtaaatcagaaattatggattcgattcatgatgctggtattggaagtactttcggtgcctcacctgtatcctgtgcggcagctttaggagtactagatgcatttgacaatgaaaatattttaaaaaatgcaaacaatcaagctaaaacaatgaatacagttttattcaatttaatgaatgaatttgattttattggagacgtaagaggttatggtccaa

SEQ ID NO: 245265 - DNA, 1395 bp, Unknown
  Bacterial polypeptide expressing nucleotide sequence isolated from the Sargasso Sea
gaataattttcctggagtaggagaagaatatttactcaagatttgggagcaaatttcccttgatccaaatatcattttgaaaattcctgaaactttttttaccaacagatctaaaataaaaaatgttttatccaaaagaaaaaagaatattggtttaaacttatcaatttcatataaagaacctcttcatatgctggaagcaaaagatcaatttttttatgatgaaaatgggagaaaatatctagattgtgtgaacaatatttctcatgttggtcattcaaataaatttgttcacaaagctcttgtcgctcaaaatctcaaaatgaatactaatactagatatctttacaaaattattaatgaatatagtgataaattattaaaaactttccccaaaaaactaaataaaatattctttgtttgtacaggctcagaagcaaatgatttagcattaagaattgctaaaacatatacaaaaggaacaaacatattagttatggacaatgcatatcatggccatacaaattcattaatagatataagtccatataaatttaaaagtaaaggtggtgagggtaaaaaaaattatgttcacgtattaagaatgccagactctataagaggtaaatggactgaaaaaaataaaaattgggttaataaatatattgatgaagctagtgtaaaaattaataaaagttttaataataaaaacaaattatcttcatttttctttgaaagcattttgggatgtggtggtcaggtagtattgcctaaaaattatttaaaaaatatttttaaatttgtaagaaaaaaaaatgctctttgtatagcagatgaagttcaaacaggttttggaagagtgggagatagtttttgggcttttgaagctcatggagtaattcctgatattgttactctaggaaaacctatgggcaatggacatccaatagctgctgttattactactgaaaaaatagctaatacttttaataatggaatggagtattttaattcctttggaggaaatcctgtatcttgtgcagtagccaatgctgttttagattttattgagaaagaaaatttgcaaaataacgcaaaggttattgggaattatttcattaaggaattaaataaaataaaatcaaaatttccaaacttaattagtagtgtcactggaacaggcttatttattggaattgatttaattacaaatggaaatccattggctcctaattcaaaactagctaaaaatttaattaataatttaaggcatagagggattttattaagcactgatggtccatataataatgttattaaaattaagccaccaatggtttttaataaagcaaatgttgattttgtctgtagagaaataaaagattttttagttta

SEQ ID NO: 245266 - DNA, 337 bp, Unknown
  Bacterial polypeptide expressing nucleotide sequence isolated from the Sargasso Sea
ttagcggcaaaggttgcaaccaaggctatagagctattatttgatgagggacttattgaaaatagtaatcgtttgggcgattacttcatctcaaaattaaaagaaattgataacaagatcataaaagaagtaagaggaaaaggattatggattggagtggaattaaatgaatcaaaggttaatgcaaaagatttatgcttgatgttgcttaaagagggtcttttgtgtaaagagacacataaaactgttattaggtttgcgccaccattgatgatttcaaaagatcaaattgattgggcaattgagaaaattaccaacgtaataagatcaatctaaa

SEQ ID NO: 245267 - DNA, 1006 bp, Unknown
  Bacterial polypeptide expressing nucleotide sequence isolated from the Sargasso Sea
catgcaacaacagtcagacaaaaaaagtcattttttttatttatccaatacagacaggccgatgctggatgtcgctgatggagtttatctttacgataaatctggcaaccgttatttagatgcttcaagcggtccaattgtttcgaatataggtcattcaaatccaaatgttattgctgccatgaaaaaacaaatggataaaacaactttcggttaccgccttaactttcttactgagccaaccgaaaggttagcagagctgacagcatcgctcatgccagagggaatcaatcaaattttcttcacatcaggtggctctgaatctgtggagagctgtataaaactcgctcgtcaatatgcggtcaatacgaaaaaagagagcaaatggaaaataatttcgctgtatccatcctaccacggaggtacgcttggtgcgctggcgattactggaatggatccttttgtagatcctttctcaaagatgatgaaagtcatgccaaaaatccccgccgcaacttgttaccttgataacgatgaactgactgaggaggaaagaggaataaaatatgcggatcttcttgaaaaagaaatactggatcaagggcctgattctgttctcgcgtttattttcgagcctattggaggtgcctcgacaggagccattgtgccacctgactcatactttaaaagaatatacgaaatttgtaagaaatatgatgttcttataattactgatgaggttatgacgggtgcaggcaggacgggtaagtttttagcgggtgaacattggaacttctctcctgacattatcgcaatggcaaaaggttttgcggctggttatgccccattgggagtggtcgcagctaaggatgagatagttgaggtcgttaatgagtcgggcggatttcttcatggtcatacctacgcaggtaatcccctggcatgtgcggctggtctcgctgttataaatgaaataattgataataacttgataaaaaatgcccaa

SEQ ID NO: 245268 - DNA, 1516 bp, Unknown
  Bacterial polypeptide expressing nucleotide sequence isolated from the Sargasso Sea
tttgatattattcacaatcataatgaaattataaattatataaataaattcaactttggtaatatttttaaatttaatttacttgataaaaataaatctatcttaaaattaagttttgattcacctttattaaaaggtaatccagataatagtttgcttaaaaaaagagttaataaaatatttaaagaagataattctaatataggaataggtttatacaatgaaaaaagaaaagtttataagggccctaactttatttctgaattaaatacgaatgaaagacgtaatattcatttaggtgtagatatctttatcgataagggaacagatttatttgcaccaatagacggtaaaattataattttaaaaaataataattttaaatatgactatggccccaccctagttttagaacatagttttaaaaataataaattttatactctatacggtcatttatccaaaataatgtttcaaaaactaaaaattggaaaaaaaattaagaaaggtgattggattggtaaaattggtaattctaatgaaaatggaaaatggttaccgcatttgcattttcaaattattttagacttattaggacaaaatgaaaattttccaggagtaggtgaagaatttttattaaatatttggaataaaatttcgcctgatccaaatttaatactgcgaattccaaaatcattttattctaataataataattttagagatactttaaaaaaaagaagaaaaaatatttctgataatttatcaatttcttacaataaacctctccatatgctcgaagctaaggatcagtatttttttgacagatatggtaggagatacttagattgtgtaaataatatttcccatgttggtcattcaaattctcatgttcataaagcaatgattgagcaaaatctaaaacttaatactaatacaagatatctatatgatactattaatgattatagtgaattacttttaaataaatttccaaagaaattaaataagatattttttgtatgcacaggatctgaagctaatgatttagcgtatagaatagctcaaacttatacaaatgcgaaagatgtctttgtaatggataatgcttatcacgggcatactaattccttaattgacctaagcccatataaatttaatagcaagggtggtttaggtaaaaaagattacgttcatgtattagatatgcctgatccattaagaggaaagtggagatatcaaaactctaattggattcaaaaatatatagatgaagctaaaacagtaattagaaataaaatcaaagaaacaaaaattgcatgtttttttgctgaaagtatacttggttgtggtggtcaagttattcttccaaaaaattatttaaaagaaatattttcagaaattagaaaaaataatgctttatgtattgtcgatgaggtacaaactggttttggacgtgttggaagaaatttttggtcatttgaagagcatggtgtcgttccagatatagtcacat

SEQ ID NO: 245269 - DNA, 556 bp, Unknown
  Bacterial polypeptide expressing nucleotide sequence isolated from the Sargasso Sea
tgggtttggcagacttggatcgcacttttggggctttgaaatgagtggcgttatcccagacataatcacacttggtaaatcaattggaaatggtcaccctctgtcagtggtaattacaaaaaaaaatatagccgatgtatttaacaatggtatggaatattttaactcatttggagggaatccggtatcatgcgaaattgggcaggcagttttaggtgtaattaaggaagaaaaactccaagaaaacgcttccagtgtaggaaattatttattggatggtttaaaaaacattcaaaataagtataatatcattggggatgtaagaggcaggggattgtttattggaattgagctaatagaggacatggataatttagtgccagcggtggatgaggcggagattgtagtaaatgcaatgaaagacaaaggtatcctcattagcttagatgggcctgatcacaatgtcttaaaaataaaaccaccattagtatttaataaaaaaaatgcagattattttttggagtcttttgaagctgttttattaaaaagtttttaa

SEQ ID NO: 245270 - DNA, 1240 bp, Unknown
  Bacterial polypeptide expressing nucleotide sequence isolated from the Sargasso Sea
ggtaaagaattattacgaagagcccatcgttgtatctaatgcaaaagggtcaatagttaaagaccttgatgggaaatcttatttagatttttttggtgggatactcactgtctcgatcggccatgcaaatgaggaggtcaacaccgctgtaaagacccagatcaatcatctcacccatatttcttctttatatccttctgtcccagtcgtagatctagccgagaggttggtaaaacttgcgccgcaaaatttagagaaagtatttttaaatgctacggggacagaggctgatgaaactgctgtaatgctcgctcaattatacacaggaaattcagaaattttagctctaagacatggatattctggtagatcaatgctggctcagtcactcactgcacatgcaccttggcgagctatgccaacacagattgcctctgtgaagcatgctatggcaccttattgttatcgatgtccactaaaattatctccagagaattgtgggacagcatgcgctaatgatgtagaggaattgatccagactacaacgactgggaaaatagctggtattcttgctgagcctataatgggagttgggggttttataactcctccaaaagaatattttagtattgttgcagatattgtaaggaaatacggtggtatttttatttctgatgaagtgcaaacagggtttggccgtactggaaaagcatggggtattgagcattatggagtagagcctgatatgattacagttgcaaaggggatagcaaacggttttcctttggcagcagtcatttctacaaaagagatttctgattctcttgataaaaatacaatttcaacttttgggggcaatccagttagctgcgcatctgcaaatgctacgatagatataattgaaagagaaaacctcgctgagaatgcaaaaaatatgggacgtatacttattaaaggaatgaaaaaaatacaaaaacaataccctaaaactataggggaggttcgtggaaaaggcttgatggttggtgtagaactagtgaaggatgaaacaataaaagatagaacaccagacgttgaatcaaccaataaaataatggaagaaacgaagaaacgaggtctattgattggccggggagggctatacggaaatagtttgcgaattgctcctgctcttaatattggttcagatgaaattgaagaggcattgcaaataattaatgattcatttggagcgttataa

SEQ ID NO: 245271 - DNA, 1138 bp, Unknown
  Bacterial polypeptide expressing nucleotide sequence isolated from the Sargasso Sea
acaaaacaactttctgaccttccgtactactcttcttttgcgggcactaccaaccctatggcaattgaagcatcctacatggtgcgaaatttattttctgaagacggcatgagccgcgtattttttacttcgggcggctcggactctgtcgacacatgcctacggctggcccgccaatatcaccgactaaaaggcgaaccaacccgtacaaaatttatttctttaaagaaaggttatcatggaactcactttggcggtgcctcagtaaatggtaataatcggttcaggataaactatgagccactcttgccaggctgtttccatcttccaagcccatatacgtatagaaatccatataatgaagctgactccttaaaattagctcaaaatatcgctgccgcattcgaagatgaaatagcatttcaaggagcaaatagtattgccgcttttataatggagcccattcaaggtgccgggggtgtaatcgttcctgatccaatgtttatgaccctcatgagacaaatatgcgatagacatggcatcttacttatatcggatgaagtcataactggtttcggtcgcaccggagactggtcaggcgcgcgccattggggtgtccagcccgatatgatgagtattgccaagggtattacctctggatactaccctgttggagcagcattgatgtccgataaagtcgcggaagtttttgaaaatgacgatacgggtgatgcagcaatctttcatggttatacctattctgctcatccggtcggagcagcagctgtgatagcatgtttatcagaaactgaacgtctagataccaaggtcaacgcccaagtgcgtggaacacaattatataatggcgtaatggagttggctaaaaaacatactatagtgggagatgtaagaggtggacatggcctgatgcttgggattgaactcgtttcagatcaaagtaaaaaaacaccattagacatgagtaatatgaaaaaaatacatcaaaaaacttatgaatttggtgccatggtccggctgggcttgaacaatattttgatgtcacctccattaacaatatctgagaacgaagtgaatcagatactaggtgctttagacgaggggttaacagcaatttgac

SEQ ID NO: 245272 - DNA, 810 bp, Unknown
  Bacterial polypeptide expressing nucleotide sequence isolated from the Sargasso Sea
aatgaacccaaaagaagcaagaaataatatagataaacatatgctagcagatggcatgtctcaaattatagatctaaataaaagccatggatcatggctggtagatgctagggatagccgtgaatatttagatctattctcaatgtttgcatcgttatcggttggctataatcatccctatcttatagataataaagagcgtttaatgtcatctgccataaataaacctacgaattcagatgtttattccgtagaaatggcagaatttgtatcgactatgggacgcgttgcacaacccgactatcttccttatgcattttatattgaaggtggcggtttagccgttgaaaatgcactaaaaaccgcatttgattggaaggttagaaaaaatctttcagctggaaaaggtgaaaaaggttctaaaattattcattttaaagaatgctttcatggtagaactggctacacaatgagtttaacagattctcctgatccaagaaaaactttatattttcctcaatttgattggcctagaatagataatcctaaaattaattttccccttgatcaaaatttagatctagtgatagaaagggaaaagcacgcaattaaccaaattaaagatgcaatcacaaacaaccctgatgaaattgcaggattaattattgaaccgatacaaggcgagggtggcgataaccactttagaaaagagtttttagcggaattaagaaatttagctaatgaatctgattttcttttaatctatgatgaagtacaaactggtgttggtgtcacaggtaataatgtggg

SEQ ID NO: 245273 - DNA, 412 bp, Unknown
  Bacterial polypeptide expressing nucleotide sequence isolated from the Sargasso Sea
ggcagtattgatgaataagaaggtaagcaaagcaatggtgcctggaactcacggatcaacatttggaggtaatcccttagccatgtctgttggaaatgaagtcatggatataatttcaaataaaaaattcttgaataatgtcaaaaatttatcaaaatattttttaaaaaatttaaatattataaaagataaatatccaaatattattaaacaaataagaggaaaaggtttgttaataggaattcaattacatagagatcaaaccttattcataaaaaaacttatggaaaataaattattgactattaaagccgctgaaaatgttattcgtattttaccacccctaaatgtaaagaagagtgaaatcgacgtagcattaaaagttattaacaaagtttgcttagaattttag

SEQ ID NO: 245274 - DNA, 367 bp, Unknown
  Bacterial polypeptide expressing nucleotide sequence isolated from the Sargasso Sea
catggctctacatttggcggtaatccattagcgatgagtgcagggaatgcaattatggatgtgatgtttaaaaaaggttttttagttaacgtagctaaaaatggaaaatattttctaagtgaattaaataaacttaaaaataaatatcctaaaattataaaagaagttagaggaaaaggattattactgggtttatgtttacataaaaatcaagttccctttattgataaactattaaaaagtaatctgcttacaattagagctgcagagaatgttgtcagacttttgcctcctttaaatgtaacaaagcaggaaattaatttaagcttaaaaataatagataaggtttgcaaaaactatagatgaa

SEQ ID NO: 245275 - DNA, 875 bp, Unknown
  Bacterial polypeptide expressing nucleotide sequence isolated from the Sargasso Sea
taaatggcctcacattcatcagtactcagatcatgaaaaacctgaaggcatgagtagagaagattgggggattaaatcagctcaagaacttgaaaaagcaatttactttgagggggcaaattctgttgccgcctacattgccacgccacatggctgcggtagtgagtatgcggtggttcctccaaaagaatattggcaagaaataagaagaatttgtgatcattacaacgtgctcttgatagctgatgaagtagtcactggtttcggaagaactggaaaatggtttgcgatggaacactttggagtagaagtggatatcatgacaatcgccaaaggtatgtcgggttgttacgttcctatggggggtgttgttatttcagatgaaatcaatgaagcatttattaaaaataatgctgtgtttgctcatggctttaccaattcaggaaatcctcttgcctgcgcagctgcttccacggcaatcgacatttataaagatgataagttgatcgagaattctgctgcaatgggtaaaaaaattgaatcatacaaggatatgcttctttctcatcctactgtgaaggacatgagaggttggggattgatgtgggtcttagaaatggttgaaaacaaagacagcggagaatatttttccatcgaaaaaggagctgagggaacttttcactcaatagctatgcaaaacggtctcgttttttatagcactatgtacggcagaagaagagagcctttattcaaaagaggattgcctctgatgatcagtccacctttgtgcataaatgaatcccaaatagaagagatgatggagaaagtcgatcattctataagtctatgggaagcagaaatgggcgttgcttgaa

SEQ ID NO: 245276 - DNA, 811 bp, Unknown
  Bacterial polypeptide expressing nucleotide sequence isolated from the Sargasso Sea
cctgatccattaagaggtaagtggcgttataaagataaagattggattaagaaatatattcgtgaagcaaaagataaagtaaacaatcaatcgaaaattaaaaaattttcatgtttattcgttgaaactatattaggatgtggaggtcaggtcatacttcccaaaaattatttaaaagaagttttcaaggcagttagaaaaaataaagctttatgtattgttgatgaagttcagactggatttggaagagttggtaataatttttggtcatttcaggagcatgaggttataccagatattgttaccttaggtaaacccatgggcaatggacatcctattgctgcagtagtaacaacagaaaaaatcgcttcatcattcaataatggaatggagtattttaattcatttggcggtaatccagtatcttgtgctgtaggaaaatcagtattggaagttattgaaaataataaacttcaggaaaattcattaagtgtaggtaagtattttttaaataaactggaaaaaattaaaaataaaaataaaaaatatataagcgaagtgagaggaagaggtttatttattggaattgatattataaaaaattcaaatcaacttaaaccaaataaacaattagcaaaaaaaattataaattttatgaaaaataagggaattttattaagtactgatggtcctcatgataatgtgattaaaattaaaccacctttagtgtttaatagagaaaatgttgataatgtctgtaaaaatttagatagtttttttaaaaaaaatataaattttactccatataaaa

SEQ ID NO: 245277 - DNA, 562 bp, Unknown
  Bacterial polypeptide expressing nucleotide sequence isolated from the Sargasso Sea
atttgtgataagcataatattttacttttttttgatgaagttcaatcaggctttggaagatctggaaaattatattcatatgaatgggcaaagatcaaacccgatatattagctacagcaaaaggcattggatcaggctttcctctaggagcttgtttagcttcaaaaaaagctagcgaagcaatgacgaaaggaaaacatggatcgacatatggtggcaacccccttgcggtatctgtgggcagggaagttttgaaaataatttctgataaagtttttttaaaaaaagtagactctttatcaagatatttatggataaatttaaaaaaattagaagcaaaatatgatgaaattattgagataaggggcgctggattactgttaggtatcaaaactagaaaaaataatatatttatatcaaatttattaaaaaaaaataaattattgaatgtgccagcagccgataatgtaattagattagctccacctttagtaattacaaaaaaacatgctgatgaagcactaaagataataaatgaaacttttaaaaaattattatgaa

SEQ ID NO: 245278 - DNA, 844 bp, Unknown
  Bacterial polypeptide expressing nucleotide sequence isolated from the Sargasso Sea
gttattgaaaaaggaaaggggttttatgtttcagatagtgatggaaattcatatttagatttttttggtggcattctcactgtgtccgttggtcatgcgaatgatgaagtaaatacagcagtgaaagcacaggtcgatcgactaagtcatatttcgtctctttatcctagtatacctgtcgttgaacttgcagaaaagcttgttggattggctccagacaatctgaaaaaagtattttttaatgcatctggaactgaagcagacgagacagctgttatgatggctcaactttataccggaaatacagaggtcatagctttacgtcacggttattcagggcgttccttgctcgcgcaatcattgaccggccatgcaccatggagagcactgcctagccaggttggctcggtcaaacatgctttagcgccatattgttatcggtgccctctgaaaatgacatatccagaatgtggagtcgcttgtgcaaaagatgtagaagagctcatcaatacaacaaccactggtaaagtggctggtatcttggcagaacctattcaaggtgtcggaggatttattacccctccagatgaatattttagtatagtatcggatatcattcatgaccacggtgggatatttatttctgatgaggttcaaacagggtttggacgtacaggtaaaacatgggggatagaacattctggcgtagaacctgatatgatcacggttgcgaagggaattgcaaatggtatgccactagcagcggtcataacgacaaaggatatagcagattctcttcaaaaaaatacaatatctacttttggtggaaacccctgtaagtagt

SEQ ID NO: 245279 - DNA, 808 bp, Unknown
  Bacterial polypeptide expressing nucleotide sequence isolated from the Sargasso Sea
gcattaaaaattgcctgtcattacacaaagagaaaaaaaatattatcaatttcacatgcttttcacggtaggactgcagccgccgccgctgtaacgtggggctctgagtcttggtatggttttccatcaaaaccatttgaggtcgaatttattcccagaaacaactcagaccttgctagaaaaatgattaatagtgatattgcagcagtaatagttgaacctattcaaggtgtagctggcgccttcgatctatcagaagaatttctgaaatcaatcagagatgcttgtaatgatcactcagtattaatgatagtagatgaggtccaaagtggtatgggaagatctggcaaatactttgctatacaaaattttaatattgagcctgacataatgactgcagcaaaatcactggggggcggtttaccgtgttcagtgatttatataaatagcctccttgatgagaatattaaaaaaggcgaactaggatcaacatttggaggtaatccagttatttgttcagcaattgaattcgtaattcaacttatcaaagagaaaaatattctgaaaaatgttatcgaaaaagagaaagaaatacgtgagttttgtatcacaggtcctgtcaatgagattcagggtaaaggtctgttattgggcctgcatacagaactgcctgctcaggagattcaaaaaaaattattaaaaaagaacatcttaaccggtttaagttctgacccaaatattctcagacttcttccacccttagttcttagatcagagcatatagagagattgagtgaggctctctcag

SEQ ID NO: 245280 - DNA, 763 bp, Unknown
  Bacterial polypeptide expressing nucleotide sequence isolated from the Sargasso Sea
aaagataaaaattggtctagaaaatacatagatgatgctattaaaaaaataagagaagttgtaaaaaataaaaatttatcttgtttgtttgtcgaaagtattttgggttgtggagggcaattaattctcccaaaaaattatttgaaagaaattttttgggaaataaaaaaaaataatgcactttgtattgttgatgaggttcaaacaggttttggtcgagttggtagtaaattttggtcttttcaggaacacaatgtaataccggatatagttaccttaggaaaacctatgggtaacggacatcctatagctgctgtagtaacaactgaaaaaatagcaactatttttaataatggtatggaatattttaattcttttggaggaaaccctgtttcatgttctgtaggaaatgcagtactagaagtaattgaaaaagaaaatcttcaaaaaaatgccttagttgtaggtaagtattttttagcgaaattagaaaaacttaagaatgaaaataaaaaatatattagtgaagtaaggggtagggggctttttttgggtattgatataataaagaattacgatcatttgaaacctaataaaaaacttgcaaatcaaataatcaattatatgagagataatggtatcttattaagtaccgatggaccttatgataatgtaattaaaattaagccaccattggtttttaataaaaaaaatgttgattttgttttacattatttatatagtttttttaataaaatataaa

SEQ ID NO: 245281 - DNA, 850 bp, Unknown
  Bacterial polypeptide expressing nucleotide sequence isolated from the Sargasso Sea
gacgccgcgttcggcacgctcctgagccagctggtgctgggtgcggactcggcactgatcgccgagcagcgcgccggcgcaacgcaaacaccgggtggcaccggcgccctgcgcctggcgggtgatttcattcgtcactgcctgccggggcgcggtatctggctgagcgatccgacctggccgatccatgaaaccctgttcgccgaagccgggctaaaggttggacactacccctacgtcggcgccgacaatcgcctcgacgtcgaggccatgatcgcctccctcacccacctgcccaagggtgacgtggtactgctgcatgcctgctgccacaaccccaccggcttcgacctcactccgcgcgactggaaacgcgtgctggaggtggtcaaggcgcgtgagctgctgccgctgatcgacttcgcctaccagggcttcggtgatggcctggtagaagacgcctgggcggtgcgcctgttcgccgccgaactgccggagctgctgatcaccagttcctgctcgaagaacttcggcctgtatcgcgagcgcaccggtgccctgatcgtctgcgccggcgacgccgaaaagctcgtcgacatccgcagtcagctggcctccatcgcccgcaacctgtggtcgacgccgcccgcccatggcgctgcggtggtggcgcagatactcggtgacgacgagctgaaagggctctggctggacgaactggaaggcatgcgcctgcgcgtcgccagcctgcgccgcggcctggtcgaagcgctggtaccacactgtctgagcgaacgcttcgcgcatatcgccgaacagcgcggcatgttctcctacaccggcctgtcgc

SEQ ID NO: 245282 - DNA, 781 bp, Unknown
  Bacterial polypeptide expressing nucleotide sequence isolated from the Sargasso Sea
agggttgataatccaaaactagaatttccaattactgatgatgtgttacatcatgtaaaaatagcagaagacaaagtgattaaacagatagtgtcagcagtccataataatcctgatgaaattgcttgcttaattattgagccgattcaaggagaaggtggggataatcatttccgccaagaattttttcaacaattgcgatctcttgctgatgaacatgaatttttattgatatatgatgaagttcaaactggtgtaggtgtcactggtaatatgtgggcacaccagcaatttgctgaatcctgtcgaccagatataattagttttggtaaaaaaatgcaaatatgtggaattttttgcggtaatcgagtagatgaagtagaaaataatgtatttcatgagtctagcagattaaactctacttggggtggaaatattgcagatatggtacggattacaatatatttagaaataattgctaaagataatttggtaaataatgcttctgaaaatggtctttacttattgcaaaaacttcaaggtattcaagaagagtatagtgacattgtaagtaatgcccgtggaagtggattatttgccgcatttgatttacaagattctgaacaaagggactccttagcaagtttaattatttcagaaggtgctcttattcttggttcaggaaaaaaatcaatccgctttcgtcctcatttaactatttctaaggaagaaatagatcttgctgatcagattatcaggagagctattgctcgattgtgac

SEQ ID NO: 245283 - DNA, 573 bp, Unknown
  Bacterial polypeptide expressing nucleotide sequence isolated from the Sargasso Sea
taagaaaaatttgtaatgaaaaaaaaatattattaattttagatgaggttcaatgtggaataggtagatcaggagatttttttgcatttgaaggatcaaaaataaagccagatattgttcctatagccaagggaataggcggaggttttccattaggtgcagttttgatgacaaaaaaagttgcaaaatcaatgagtccaggaagtcatggttcaacttttggaggaaatccattagcaatgagtataggaaatgcagttttggatcaaatttttaaaaaaggatttcttaaaagtataaaaaatatatcaaaatatttttttaacgaattaaataaggttaaaaatgattatcctaaattgattaaagaagttagaggaataggtttattaataggtttacagctttttaacgaccaaaaaaaatttatacaaaaattagagaataataaactgcttacaatcagagctgctgaaaatgttgtaagaattttaccccctctaaatgtaaaaaaatctgaaataaaccttgcggtaaaaataattagaaaagtttgtaaagagtgtaaataat

SEQ ID NO: 245284 - DNA, 418 bp, Unknown
  Bacterial polypeptide expressing nucleotide sequence isolated from the Sargasso Sea
tatgggcgcttgtttatcaactactaaagcttctataggtatgactaaaggctctcatggctcaacttttggtggaaatccgttagcagtttcaattgctctagaggttgttaaaatattaaccactagtggttttttaaaagaagttgatgaaaaatctagatatttatggaagaaacttaaagaatttgaaaaaaattttgaagaaatagttgaagttcgtggagcagggttattattaggcatcaaaacaaaatcaagcaacattgaaataaataatatgtttcttaaaaataaattattatgtttattagctgatgataatataattcgtatagctccaccattaatagtaagcaaaaaagaaatagatcaagcattacaaatcatagaaaaagctttaatggagtatcaatga

SEQ ID NO: 245285 - DNA, 722 bp, Unknown
  Bacterial polypeptide expressing nucleotide sequence isolated from the Sargasso Sea
attggatcatattgaatttaaaaattttaagccaagatttccaaatatcagaagtaaaattaagaagaatacagcagcaataatgttagagacaataatgggtgagggaggaattaaatctattcccgataaatgcctcaagtatttaagaaaaatttgtaatgaaaaaaaaatattgttaattttagacgaggttcaatgtggaataggtagaacaggagatttttttgcctttgaaagttcaaaagtaaagccagatattgttcctatagccaaggggataggcggaggttttccattaggggcagttttgatgacaaaaaaagttgcaaaatcaatgagcccaggaagtcatgggtcaacttttggaggaaatccactagcaatgagtgtaggaaatgctgttttggatcaaatttttaaaaaaggatttctcaataatttaaaaaaaatatcaaaatatttttataaagaattaaataaaattaaaaaagattatccaaatattattaaagaaattagaggcaaaggtttgttaattggaatacaattacattttgatcaaatgaaatttattaaatctttagaaaaaaattatttattaacaatcagagctgcagatagagttataagagttctaccacctttaaatgttaaaaaaaatgaaattgatttagctttaaagattataaaaaaggtttgtagagaatataaaaagtaat

SEQ ID NO: 245286 - DNA, 934 bp, Unknown
  Bacterial polypeptide expressing nucleotide sequence isolated from the Sargasso Sea
aactgcattcgattgaaagtaagaaagaatatagcaaaaggcgtaaatggaaaaggctcaaaaattatacactttaaagaatgttttcatggaagaactggctacacaatgagtcttactgattcacccgatccaagaaaaacactttattttcctaaatttgactggccaagaattataaatcctaaaattaaatttcccttaaatgataaaaatttaaatagtgttattgaaaatgaaaaaattgctattaatcaaatcaaacaagctttacacgataaccctcatgatatagcaggcttaattatcgagcctattcaaggtgaaggaggggataatcattttagatgtgagttttttaaagaactaaggtctcttgctaatcaagaagaatttttattgatttatgatgaggttcaaacaggggttggcattactggtcaaatgtggtgccatcaatcatttaatcctaaaaattgtcaatgcacatgtgaggacgcttctactgcaccagatataattgcttttggcaaaaaaacccaagtgtgtggaatttttgccagtaaacgattagatgaagtagatgaccatgtatttcatgaatctagtcgaataaattcaacttggggcggaagtttagtggatatggttcgctttactttgtatcttgagatcattgaaaatgagaatttagtaaaaaacgcaaattcaatggggtctcatttaaccgaacgcttaacttctcttgaagaaaaatacgagaacaaagtatcaaacgtaagaaatagaggattatatggtgcttttgatttaattgatagcaaatctagagataaactgcttgaaataatattagacgaaggtgcaatgatgcttggctgtggaacaagatcaatacgctttaggccgcacttaaacatttctcctgaagaga

SEQ ID NO: 245287 - DNA, 913 bp, Unknown
  Bacterial polypeptide expressing nucleotide sequence isolated from the Sargasso Sea
tatattgaaggtggtggtttagccgttgaaaatgctctaaaaaccgcatttgattggaaggttagaaagaacctttcagctggaaaaggtgaaaaaggttctaagattattcattttaaagaatgctttcatggaagaactggctacacaatgagtttaacggattcacctgacccaagaaaaactttatattttcctcaatttgattggccaagaatagataatcctaaaattaattttccccttgatcaaaatttagatctagtaatagaaagggaaaatcaggcaattaaccaaattaaagatgcgatcactaataaccctgatgaaattgcaggattaattatagaacctatacaaggtgagggtggagataaccatttcagaaaagagtttttagccgaaataagaaatttagctaatgaatctgattttctattaatttatgatgaagtgcaaactggtgttggcgtcacgggtaatatgtgggctcatcaagcttttggagatactgttaggcctgatattatcagttttggtaaaaaaacccaagtttgtggaatttttgctggtgaaagattagatgaggtagaaaataatgtctttcatgaatcaagcagacttaattctacatggggtggatcattagttgatatggtaagatttactatttatttagaaattatagagaatgaaaaacttgttcaaaacgctagcgcagtaggtgagcacctatcaagttgtttgtataccctgcaaagcaatcatgataatttggtctctaacgcaagaaacagaggactgtttggtgcatttgatttaccggattcagatacacgtgataaagcaataaatagcataagcaatgaaggcgctatgatgctagggtgcggatctagatctattcgattcg

SEQ ID NO: 245288 - DNA, 731 bp, Unknown
  Bacterial polypeptide expressing nucleotide sequence isolated from the Sargasso Sea
ttatttagattttgttggaggatatgctgttttaaatacaggacatttaaatccacgagttattcaaagagtaaaaaagcaattaaacgattattctcattcatgttttgcttttgctcctcacgaaaatgctgttgagttgtgtgaagaaattaataaaagatatccaattaaaaagaaaactaaaacatttcttgttaatagtggtgccgaggcggttgaaaatgcaatcaagatcgctagatatgcaactggtaaagaaaagataattgcatttaaagggggttttcatggaagaacttatcttgctatggggttaacaggtaaggaaaaaccatacaaagaaggttttggtccatttcctaaatttataacacatgttgactatccgtatcattacagagacatatcggacgaaaaagtacttaaccaaattgaaaataccttattaaaaaaaatcgatccagacaaagttgcagctattgttattgaaatccaacttggcgaaggtggctatattcctgcaactgaaaattttctaaaacagctcaaaaaggttgcaaaacaacataatattttattgatttttgatgaagttcaaacagggtttgggcgaactggagaaatgtttggtgcagacaaaatcaatgttgaaccggatatggtcacactagcaaaaggtattggtggaggattcccacttgctgcagtcgtggcaaagctgaaataat

SEQ ID NO: 245289 - DNA, 676 bp, Unknown
  Bacterial polypeptide expressing nucleotide sequence isolated from the Sargasso Sea
cgccttgatagctgaaccgattcaaggagtaggcggcttcgcaacaccgcccgacggcttcttcggagcaatgcacaaggtccttgcagcgaatgacatcctgttcatcagcgatgaggtgcaaacaggttggggacgcaccggtgaccatttctgggggtacgaggcgcacggcatcactcccgatattttgaccttcgctaaaggggttggaaacggcatcactcttgcaggttgtgtggctcgagccgaagtgatgaatgttcttgaccgcacctccttcacgacatttggtggtaatcccctttcggttgcagcaggcagagcaaccctgaaattcgtaaaagatcatgatcttcaatcaaacgccgctgctcgtggtcagcaaatgaccgaaatgctcactggggcatgcgatacaaccgactgggtaggcgagctgcgaggtaagggcctcatgcaagccatcgaatgcgtgcaacccgggagtgttgagccaaatgctgcagctgctacgcaactgatcgaagtctgcaaggaccatggtttgttagtcggcaaaggtggtctttacggcaacgttattcgactcactccaatgctgaacgtgtctgaagaggagatgagtgagggttgcgagatcatcgtctctgcgttgaattcagttactggctga

SEQ ID NO: 245290 - DNA, 910 bp, Unknown
  Bacterial polypeptide expressing nucleotide sequence isolated from the Sargasso Sea
gccgaagaagtagcagcgatttccggcatccccgacgcacgagtcctatttacgacatcaggctctgaagcgaatgacaccgcaattttattagccaccaattaccgccaatcaaatcagttattggcgatgcgaaatagctaccacgggcgttcactgaccgctcaggctgttacctctcaccgcagctggttgactagcagctacagcggactggacgttcattttgttcaggggccttatcggcttagaagtccgttcagggagcttgaagacgaagcattcacacaggcgtgtgtgtcggatctggtccaactgctcgacatgaccgatgctggtggtttcgctgccttaatcgctgaaccaattcaaggagtaggtggcttcgcaacaccgcccgacggcttcttcggagcaatgcacaaagttctcgcagcaaacgacattttgttcatcagtgatgaggtgcaaacaggttgggggcgcaccggggaccacttctggggttacgaagcgcatggcatcactcccgatattttgaccttcgctaaaggggttgggaatggtatcacccttgcaggttgtgtagctcgagcggaggttatgaatgttcttgaccgcacctcctttacaacatttggcggtaaccccctttcggttgcagcaggccgagcgaccctgaaattcgtgaaagaccacgatcttcagtcaaacgccgctgctcgtggtcggcagatgaatgaaatgctcgctggggcatgcgatacaaccgactgggtcggtgagcttcgaggtaaaggcctcatgcaagccatcgaatgcgtgcaacccgggagtgttgagccccaatgttacggccgctacgcaactcatcgaagtctgcaaagaccaaggcttgttggtcggcaaa

SEQ ID NO: 245291 - DNA, 802 bp, Unknown
  Bacterial polypeptide expressing nucleotide sequence isolated from the Sargasso Sea
actgggtggatttcatggccgaacaatgggaagtgtgtcagcgacggcccagccgcaataccacgaagggctagggccaatggttgctggttttcagtatgccccgcatggtgatcttgatgctgttgagcaactgattgatgaacatactggtgggattatggtggaacccattcttggtgagggaggtgttgttcccgcaccagacggttttctccagggacttagacgtattgctgatgagcgagatctccttttggtatttgatgaagtacagtgcggatgtggccgaaccggcaaatggtttggttaccaacacttcggtgtcactccggacgttatgactcttgccaaaagtctctgcgctggagtctctggcggggcaatgctgacatctgttgatcttgcaaagtatcttcggccaggcatgcatgctgctacgtttggtggcaatccactggcggcagtagctggtattgcggctattgaaatgatcgaaaaagataatttactttctcatgttgagactattgcaaaaatctttcaggaacaattatctcacctgaaggacgagtgcgatgttattgtgagtgtacgagtcttgggaatgatgatcggcatagaactttcgatcgatggcactgcagtagtacaagcgtgcatggaaagaaaacttctcgtgaactgcacccaaggacgagtcattcgtctcttgccagccatgacactcagcccagacgaagcacgtgatggctgcaaccgtctgagggatgcgattactgaagttgcgtcacggtattag

SEQ ID NO: 245292 - DNA, 424 bp, Unknown
  Bacterial polypeptide expressing nucleotide sequence isolated from the Sargasso Sea
tacactagtaagaccagatatactatctgttatgaaaaagggagaacactcatccacgtttggaggaaatccattagcatgcgccgcgggaactgctacacttcaggcacttacacaagatggcttgattgaaaatgcaaaaagtatgggagaaaaattctcgaatggtttggaagagctcaaatcaaagcattcagtcattagagaaattagaggaaaaggtttgatgattggtgtggaattgaaatttgaagtcaaggatatcttaatggaaggaatcaaaaatgggttattactcttgtattctggtagaaacatcttaaggtttcttcctccgctggtcatctccgagggggatgttgtaaaaacactacaaatactatataagctactcacaaatgaggagaatagaagaaatgggtaa

SEQ ID NO: 245293 - DNA, 811 bp, Unknown
  Bacterial polypeptide expressing nucleotide sequence isolated from the Sargasso Sea
ggatcatggttggtagatgctagggatggccgtgaatatttagatctattctcaatgtttgcatcgttatcggttggctataatcatccttatcttatagataataaagagcgtttaatgtcttctgccataaataaacctacgaattcagatgtttattccgtagagatggcagaatttgtatcgactatgggtcgcgttgcacaacctgattatcttccatatgcattttatatagaaggtggcggtttagccgttgaaaatgctctaaaaaccgcatttgattggaaggttagaaagaacctttcagctggaaaaggtgaaaaaggttctaagattattcattttaaagaatgctttcatggaagaactggctacacaatgagtttaacggattctcctgacccaagaaaaactttatattttcctcaatttgattggccaagaatagataatcctaaaattaattttccccttgatcaaaatttagatctagtgctagaacgggaaaagcatgcaattaaccaaattaaagatgcgatcaataataaccctgatgaaattgcaggattaattatagaaccgatacaaggcgagggtggagataaccatttcagaaaagagtttttagccgaaataagaaatttagctaatgaatctgattttctattaatctatgatgaagtgcaaactggtgttggcgtcacgggtaatatgtgggctcatcaagcttttggagatgctgttaggcctgatattatcagttttggtaaaaaaacccaagtttgcggtatttttgctggtgaaagat

SEQ ID NO: 245294 - DNA, 820 bp, Unknown
  Bacterial polypeptide expressing nucleotide sequence isolated from the Sargasso Sea
tgggttgaaattatagaagtgcccgacgactataggggttcatttaaaaaagatgatccagatcgtgccgttaaatttgcaaatttggttgatggtgcaatcgaaagattaaacttgaaaggtattgggttatctgggttcataatggaaacatttccatctgtagggggacaaattatccctccgaaaagatatctagagcaagtttatagtaagataaggaaacatggtggagtatgtattgctgatgaagtgcaaacaggcttggggcgtttgggtgactactactttggatttgagtttcaagaagtaaatcctgacatcgtcgttcttggcaagcctttaggaaatggtcatccactaggcgcggttataaccacaagagagattggtgaaagcttcgataatggtatcgaatttttttcaacctttggtggctcaaatttatcatgcagaattggtgcagaagttttggatattgttgatgaagagaaacttcaaaaaaatgctaagacggttggcgattttttaatctctgggtttaatgagttaaaaaatgattttgattttattggcgatgttcggggaatgggcctttttatcggtatagaaataataaatggtgatgggtcagaagctacagaattatgcgcatatataaaaaataaaatgcgagaaaaccgtattttaattggaagtgacggaccaaaggataatattattaaaattaggcctccactaacaattgaaattgaagatgcgcagatgttgctaacaaatctgtctgaagtcctcgagcagactttagactggacttaga

SEQ ID NO: 245295 - DNA, 627 bp, Unknown
  Bacterial polypeptide expressing nucleotide sequence isolated from the Sargasso Sea
attcatccattctttcagaattaattcatttagcaaaaaaatacaatgtcataacaattgcagatgaagttttcacaggttttggtagaacaggaaagtggtttgcttgtgatcatatagaaaataaaccagatataatgtgtttatcaaaagctttaactggtgggttcttacctcttggcttaacagttgtaaatagcgatatatatgatgggttttattcagataatcaaagtcatacttttcttcatggacattcatatacgggtaatcctttagcatgtgctgctgcaaatgcatcaatctctctatttgtagatgataatttatgggaaaatatttctttaatttctaaaagaattaaatttcatattgaagaaattagttcccttaaaacagtaaggtctgcaagatcatttggaatgattggggctattgaaatagatgctggtggtaaatcttcttattttaataaatcaggtaaaagtatttataaaaaactgctaaaatctggtttgattttaagaccacttggtaatgtttttgctgtcataccaccctatataatcactaaggatcaaacagatgaggtttttaataaattaaaacaggttttgattaactaga

SEQ ID NO: 245296 - DNA, 430 bp, Unknown
  Bacterial polypeptide expressing nucleotide sequence isolated from the Sargasso Sea
cctataggtgcagttttgatgactaaaaaggcggcttctggaatgattccaggaacacatggctcaacatttggaggtaaccccttagcaatgagtatcggtaatgcagttttagatcaaatatttaaaaaaggttttttaacaaacgttaaaaaaatttctaaatattttcaatcagagttgaaaaaaatacagagtgaatattcaaaaattattaaggatgtacgaggagttggtttattaattggactgcaactttataaagaccatacagaatttattaaaaaattaatggataataatcttttaacaattagagctggagaaaatgtaataagaattcttcctccactaacggttaaaaaaaaagaaattgatttagcaattaaaattataagaaaagtttgtaaactatataaaaaagtataat

SEQ ID NO: 245297 - DNA, 784 bp, Unknown
  Bacterial polypeptide expressing nucleotide sequence isolated from the Sargasso Sea
catgggtagaacactagcagctattcatgcaagtggatcaaaaaaaatgacagaggggtttggtccaaaaatccctggttttgatcattttatatttggtaatcatcgatctttgagaaaatctataacaaaaaaaacagcagctattatggtagaaccaatattaggtgaaggtgggattaaagtcataccaaagtggtgcttaaaaggtttaagaaaattatgcgatcaaaaaaaaatattacttatttgtgatgaggtacaatgtggaataggtagatcaggaaaattttttgcatttgagtattcagggattaaacccgatattgtgcctattgcgaaagggataggaggtggtttccccttgggtgcagtgctaatgaacaaaaaagttgcaactggcatgactcctggaactcatggctcaacatttggaggaaatccactagctatgagaataggaaatgcagttttagacaaaattatgaaaaaaaagtttcttaaaaatattcaaaaaatttctaaatattttttaaatgaattaaataaaatcaaaaatgatcatccagatatcattaaagaaataagaggtcttggattgttaatcggtattcagctgtttaatgatcaagcaaagtttatcaaaaaacttgagaagaataagttgttaacaataaaagcagcagataatgttataagaattttaccacctttgaatgtaaaaaaagctgaaattgatataagcattaagataatcagaaaagtctgcaaagaatacaaataa

SEQ ID NO: 245298 - DNA, 586 bp, Unknown
  Bacterial polypeptide expressing nucleotide sequence isolated from the Sargasso Sea
aaatttttaaatatattaagaaaattctgttcaaaacatgatattctgctttttttagatgaggttcagtctggttttggaagatcaggaaaattatacgctcatgaatgggcaaaaattaaacctgatatattagcaacagcaaaaggaataggttcgggatttcctttaggtgcatgtttagcaacttcaaaggtgagtgttgggatgactagtggaaaacatggttcaacttacggaggcaatcctctagcagtagcaattggcagagaagtattaaagattatatcaaataaaaaatttttaacaaatgtagattttatatccagatatttatggaaaaatttaaaacaattacacagtaattatgatgaaattctggatattagaggtgctggacttttactgggtattaaaactaaacaaaataatgtaatgatttcaaataaattgaaagaaaataaattattaactgttccagctggagataatgtaattagattagctcctccactaattattaataagaaacatgcagatcaggcaataaaaatattagaccaaacatttaagacattattatgaa

SEQ ID NO: 245299 - DNA, 832 bp, Unknown
  Bacterial polypeptide expressing nucleotide sequence isolated from the Sargasso Sea
tcatccatatgtgttagataataaggatagacttttagctagtgctataaataagccaactaattctgatatttattcaaaatccatggcagaatttgtagacacaatgggcagaatagcgcagcctgactatttaccatattcattttatgtctccggtggtacattggcagttgaaaatgcattaaaagtagcatttgattggaaagtgcgtaagaatattgctaagggtaatcctgagctgggttctaaggttttacattttgagaaatgctttcatggtagatcaggttacactctatcgcttacagactctcctgatccaagaaaagttaaatattttcctaaatttgattggccgcgagtatcagcgcccgctattcattttccacttgatgttcatagtttggaagatgtaaaaaacagagagcagaaatcaataaaggaaataaaagatgcaattagtaataatccagatgatattgcgtgtattattattgagcctatacagggtgagggtggagataatcattttagacctgagttttttgttaaactcaaagagatttgtttagagaatgatattctcttgatctatgatgaagtacaaacaggtgtaggtataaccggtgagatgtgggcgcatcaacatatctgtaaaattaattgtgaatgtggttcattagatcattgtatatcagtagaacctgacatcataagttttggaaaaaaaacacaatgctgtggaatatttgctggtcaaaggattgatgaagtagagaacaatgtcttccaagagtctagcagaatcaactcgacttggggaggaaat

SEQ ID NO: 245300 - DNA, 775 bp, Unknown
  Bacterial polypeptide expressing nucleotide sequence isolated from the Sargasso Sea
gagcagcttttctcgctcctgcccgggaagatcgccgaatcctgcaagatccagttttgcagccccagtggcgcggatggcgtcgaagcggcgatcaagctgacccggcactataccggccgcccgacgatcatggcgttccacggcgcttaccacggcatgacgtccggcgcactcgccgcgtcgggaaacctcacgcccaagtcggccggcggcaatggacgcgacgttcatttcctgccctatccctacgcctttcgctgcccattcggcaccgacggctcggcgaccgatcaactcagcatcaactacatccggaccgtcctgtccgatcccgagagcgggatcacgaagcctgcggccatcatcgtcgaagtcgtgcaaggcgaaggaggctgcatcccggcacccgacacctggttgatcgagttgcgtgagctgacactgcggcatgaaatcccgttgatcgtcgatgaggtgcagaccggactcggtcgcaccggcaccctgttcgcgatcgaacattccggcatccggccggacgtactggtgctgtcgaaggcattcggcggcggctatccgttgtcggtggtggtctatgacgagcgcctggacacctggccgcccggcgcgcatgccggcacctttcgcggcaaccagattgcgatggtggcgggcttgtcgaccatgcgcatcgtcgagagagaagatctgtcggcgcacgcggacagggtcggcaaactcctggttgccggcctcgagaagaaaaaacgcc

SEQ ID NO: 245301 - DNA, 382 bp, Unknown
  Bacterial polypeptide expressing nucleotide sequence isolated from the Sargasso Sea
aatggattttggttcccatggttcaacttttggtggtaatccacttgcttgtacagtcggaaatgctgttttagatataatgctaaaagataaattttttagtgaaattaatgttgttgcaaaaaaactctatgaaggtcttcaaaatgtgattactgattttccaagcgttattgaaaatatcagaagaagaggatttattttagggctaaagtgtaaagttgaaaatgataagtttgttaatctagcaagagaaaaatatattctaactgtaaaagcatcagacaatgtagtaagacttttgcctccaataaatcttaccttaactgaatgcgatgaagcattagataaaataagagctacttgcagcgagttaaaataa

SEQ ID NO: 245302 - DNA, 433 bp, Unknown
  Bacterial polypeptide expressing nucleotide sequence isolated from the Sargasso Sea
cccgatcggagcttgtttagttactaataaagtatctaagggaatgaaatttggtagtcacggatcaacttttggcgggaacccattagcatgttctgttgctaaaagagttattgaaattatatccgaaaaaaaatttttaaatgatttaaatcaaaaagtaactttctttacaaataaattagaagcaattaaaaatacttataatcatttaattgatgaaattagaggaaggggttttttattaggtataaaatgtaaaattaataattctatttttatagagagattaagaaataatggcttgttagttgtcggagctaatgaaagtgtaattagaattttacctccgttaaatgtatctaagaaagagcttagaattgctttaaaaataatagagaaaacatgtatagatattaataataaaagatga

SEQ ID NO: 245303 - DNA, 682 bp, Unknown
  Bacterial polypeptide expressing nucleotide sequence isolated from the Sargasso Sea
cgttgtagagcctataatgggctgtggaggtcaggttatattaccagatgagtttctcaagcgatcttttgaattggtacgtgatgctggaggtatttgtattgcagatgaggtgcaaatcggatttggaagagttggaacagatttttggggttttgaaactgcttatgttgagcctgatattgtgacaatgggaaaatcaatgggcaatggtcatcctttatcagtggttgtaacaacaaaagatattgcagaaaagtttaataacggaatggaatatttcaattcatttggaggaaatccggtctcatgtgcggttggaaaggcagttttgcgtgctgtggaagaagagaacatgcaacaaaatgcaaataaaattggaaaatatttgttgcaggaattaaaagagctgcaatcagagttttcattgattggtgaggtgagaggaagaggattgttcattgggatagaattaataaaaaatagttcaaatctttcacctgcaagcaaagaggctgaagaggttgtaaataaaatgaagagaaaaaaaattttattaagcactgatggccctgatcacaatgttattaaaattaaaccacctatgatttttaatagacaaaatgctgacgaattagtattaaaactttcagaggttttgagtaatattgattatgaataa

SEQ ID NO: 245304 - DNA, 403 bp, Unknown
  Bacterial polypeptide expressing nucleotide sequence isolated from the Sargasso Sea
gttgtgtctccaccaggtgaacatggttcaaccttttggaggaaatccactttcagctaaagttgctaaaaaatctattgaggtaattatcaacgaaaaactaagcgaaaatgcatttgaattaggatgtttatttagaaaaagtttagatgattatatttctaagagtactatagcaaaattaattagaggcaaaggattgttaaatggtttagtcatagatgatgatagtaaaggaaataaagcttggcaaatttgcgttgatttgatgaaaaatggtgttttagcaaaacctacaaatagaaatgtaataaggtttgcacctccattagtaataaataaaacccaaattcaacaagctatcgtaattataaagtcaactttagttaaatttgaaaattaa

SEQ ID NO: 245305 - DNA, 906 bp, Unknown
  Bacterial polypeptide expressing nucleotide sequence isolated from the Sargasso Sea
aggaatgttttcatggaagaactggctacacaatgagccttactgattcacccgatccaagaaaaacactttattttcctaaatttgactggccaagaattataaatcctaaaattaattaccctttaaatgataaaaatttaaattctgttattgaaaatgaaaaaattgctatcaatcaaattaaacaagctattcatgacaaccctgatgatatagcaggcttaattatagagcctatacagggcgaaggtggagataaccatttcagatgtgagttttttaaagaactaagatcacttgctaatcaagaagaatttttattgatttatgatgaagtacaaacaggggttggcattactggtcatatgtggtgccatcaatcatttaatcccaaaaattgtcaatgcacatgtgaagatgcttctaccgcaccagatgtaattgcttttggcaaaaaaacccaagtgtgtggaatttttgccagtaaacgattagatgaaatagatgaccatgtatttcatgaatctagtcgaataaattcaacttggggaggaagtttagtcgatatggttcgttttactttgtatcttgagatcattgaaaatgagaatttggtaaaaaacgcaaactcaatgggctctcatttatccgaacacttaactgctattgaaaaaaaatatgaggataaagtatcaaatgcaagaaatagaggattatttggtgcatttgatttaattgatagcgagtctagggataagctccttgaaataatattagatgaaggtgcgatgatgcttggctgtggaacaagatcaataagatttagaccacatttaaacattacttcttccgagttagatcagggttttgaaatgattgatagggctttgaaaagatcttaat

SEQ ID NO: 245306 - DNA, 781 bp, Unknown
  Bacterial polypeptide expressing nucleotide sequence isolated from the Sargasso Sea
gatgcaagcagtattgaagatgtcattgcaagagaaaatatttctttaaatcaaataaaagatgcaattaaaaacaatcctgatgatattgcttgtatcattattgaaccaatacaaggtgaaggtggggacaatcattttagacctgagtttttaatagctttgaaagatttatgcctagagaatgatatgttgctggtttttgatgaagttcaaacaggagtcggtattactggggaaatgtgggcacatcaaaatttatgtaaagtttcttgtgattgtggatccataactagatgccagcctatggagccagatatcattagttttggtaagaaaactcaatgttgtggcatttttgctggaaaaagattagacgaggttgaaaataatgtattccatgaatctagtagaatcaactccacttggggaggaaacctggttgatatggttaggtttactatataccttgaaataatcgaaaaagaaaatcttgtaagtaaagcgagaaataatggtttgtatttattagaacagctaaatgggcttcaggctgaatttgattctatatcaaatgcaagaggtaaagggcttttttgtgcttttgatttaccaaatactgacctaagagattctttagcctcgaaacttatggataacaaagtaatcgtcttgggctctggaaaaagatcaattcgttttaggccacatctcaatattacaaaacaagatatagataaaggcataagcgcaatcaagaactgcttaaaaagtttgtaaa

SEQ ID NO: 245307 - DNA, 439 bp, Unknown
  Bacterial polypeptide expressing nucleotide sequence isolated from the Sargasso Sea
ttcatgccggtttcagtatttctctcttcagaagaggtgcttcaatggatgaatcttggatctcatggctctacatttggtggaaacccactgggttcagcgatagcaaaaagatcattggaactactcgaagaggagggtttgattgaaaacagtcgtgtcatgggagattatttcaaacaatctctgttagaacttaattctccaatcattaaagagatcagagggaaaggtctatggcttggtgttgagatagatcaaagctatatcactggaaaggacctctcgaagctgctactaaaaagaggaatcttgtgcaaagaaacacgtgacacaacgattcgattcgcaccaccactgatcatcaataaagacgagatcgattggggtgtcgaaatcattgatagtgcgtttaaggctattgaagaaaaggcctgat

SEQ ID NO: 245308 - DNA, 730 bp, Unknown
  Bacterial polypeptide expressing nucleotide sequence isolated from the Sargasso Sea
tatattaatattctaaaggagacaattaaaaagatacagaaaagaggtaagcaactttcattatttatcattgagccagttatggggtgcggtggtcagataatgattcctagatcatttatgaaagaagcatttcaaatagttaatgaagcgggcggattatttatagttgacgaagttcagatcgggtttggcaggcttggatcgcacttttggggttttcaaatgagtggcgttgttccagatataatcacacttggtaaatcaattgggaatggtcaccctctttcagtggtaattacaaaaaaaaatgtagccaatgaatttaacaatgggatggaatattttaactcatttggaggcaatccagtatcatgcgaaattgggcaggcagttttagatgtgattaaggaagaaaagctccaagaaaacgcttccaatataggagatcatttattggatggtttaaaaaacattcaaaataagtataatatcattggggatgttagaggcagggggttatttattggaattgaattaataaaggatatggataatttagtgccagcggtggatgaggcggagattgtagtaaatgcaatgaaagacaaaggtatcctcattagctcagatgggcctgaccataatgtcctaaaaataaaaccgccgttagtttttaataaaaaaaatgcagattattttttggagtcttttaaagctgttttatcaa

SEQ ID NO: 245309 - DNA, 786 bp, Unknown
  Bacterial polypeptide expressing nucleotide sequence isolated from the Sargasso Sea
tccggttattgatttagataaaagtcatggaagctggcttgtagatggcaacacgggagatgaatatcttgatatgttttctatgtttgcttctctatcagtgggttataatcatccgtatgtgttagacaataaagatagactattagctagcgcaattaataagccaactaattctgatatttattcaaaatctatggcagaatttgtagaaacaatgggaagggtagcgcagcctgactacttaccatattcattttacgtttctggtggtacattggcagtagaaaatgctttgaaggctgcattcgattggaaagtgcgtaagaatatcgctaagggtaaacctgaactgggttcaaaggttttacattttgagaaatgctttcatggtagatcaggttacactctatcgcttacagactctcctgatccaagaaaagttaagtattttcctaaatttgattggccccgagtatctgctcctgcaattcattttccgcttaatgatcagagtttagaggatgtaaaaaaaagagaggaaaaatcaataaatgaaataaaagatgcaattaataataatccagatgatattgcatgtattattattgagcctattcagggagagggtggagataatcattttagacctgaattttttattaaactgaaagaaatatgtttagaaaatgatattcttttaatttatgatgaagtacaaacaggtgtaggtataacaggtaagatgtgggcgcatcagcatatttgtaaaattaactgtgaatg

SEQ ID NO: 245310 - DNA, 636 bp, Unknown
  Bacterial polypeptide expressing nucleotide sequence isolated from the Sargasso Sea
ttcctaaaaattatcttaaagaagtatttaaagaaattagaaaaaataaagcattatgtattgtagatgaggttcaaactggatttgggagagtaggtaatgctttttggtcttttgaagaacatgatgttgttccggatattgttactttaggtaaacctatgggaaatggacatccgatagctgcagttataacatcagaaaaaatagcttcagtttttaataatggaatggaatattttaattcattcggaggaaatcctgtgtcctgtgcagtaggaaaagctgtactagaagttatagaaaaagaaaaacttcagcaaaatgcattagatattggtaaatatttcttaaaaaaacttcaaaatataaaaaataaaaataaaaagtacattagtgaagtcaggggtagaggtctgtttttgggtatagatattattcaagaagctaataaattaaaacctaacaagaaattagctaaaaaaattataaactttatgagagaaaaaggaattttacttagtactgatggtccttacgataatgttataaaaattaaacctcctttgttatttaatagagataatgttgataatgtctgtaaaaatttagaaattttttttaaaaaaatataaa

SEQ ID NO: 245311 - DNA, 634 bp, Unknown
  Bacterial polypeptide expressing nucleotide sequence isolated from the Sargasso Sea
aatggttgaaacaatattgggtgaaggtggaataaaagtaatccctgattggtgtttaaaggggttgagaaaattatgtagtaaaaagaaaatattattaattttagatgaagtacaatgtggaataggaagatcaggagatttttttgcttttgaaaagtccaaagtaaaaccagatattgtgcctattgcaaaaggtattggaggtggttttcctttaggagctgttttaatgactaaaaaagctgcatctggaatgatagcaggatcacatggatcgacttttggaggcaatccattagcaatgaaaattggtagtcaggtatttgatataatttcgaaaaaaagttttttaaataatgtcaaaaaaaactcaagctttttccttaaacaactttataaggttaaaaagagatatccaaaaattataaaagaaataagaggaagaggttttttaattggactacaattgtttaaagatcaaacaaattttattcaaaaactaatggataacaagcttttaacgattagagctgctgaaaatgttgttagaattttaccaccacttaatgtaaaaaaatcagaacttaatttagcattaaagataatcgagaaagtttgctcaacttattag

SEQ ID NO: 245312 - DNA, 741 bp, Unknown
  Bacterial polypeptide expressing nucleotide sequence isolated from the Sargasso Sea
aatatactaacgaagcaatagataaaattaaaacaatttcaaaaaataataaaatatcatgtttttttgcagagagtattttaggatgtggtggtcaagtaatacttcctaaagattatttaaagaaattatttaaagaaataagaaattttaatggtttgtgtatagtagatgaggttcaaactggttttggaagaattggcagcaatttttggtcattccaggcacacaatgttattccagatatagttacattaggtaaacctatgggcaatggtcaccctatcggagcagttataacaactgaaaaaattgcctctacttttaataatggaatggaatattttaattcttttggcggcaatccagtatcttgcgctgtaggtaaatctgttcttgaagtaattcaagataaaaaacttcaaaaaaatgcatctgtagttggaaaatatttcatgaaacaattaaataaaattaaaaataaacataataaatatattagcgaagttagaggtcgtggattatttttaggaattgatttaattgaagattacaacaattataaaccaaataaaaaattagcaaaaaaaattataaattatatgagagataggggaatcttattaagcacagatgggccatttgataatattattaaaatcaaaccaccattaattttcaataaaaaaaatgttgatcatatttgttatgctttagataatttttttaataaaaaataaa

SEQ ID NO: 245313 - DNA, 798 bp, Unknown
  Bacterial polypeptide expressing nucleotide sequence isolated from the Sargasso Sea
ataaatttagaggagaacatattgcgaaaggtaaaagcattaggcagtactacattcagcttctaaaagatacaattaaaaaaatccagcagagaggcaagcaactttcattatttataattgagccagttatgggctgcggcggtcagatcatgattcctagatcttttatggttgaggcctttcaaattgttaatgaagcggggggattgtgtatcgttgatgaggtacagatcggatttggaagacttgggtcgcacttttggggctttcaaatgagtggtgttgtcccagatataatcacacttggtaaatcaattggaaatggtcaccctctgtcagtagtaattacaaaaaaaagtatagctgaagtatttaacaatgggatggaatattttaactcatttggaggcaatccagtatcatgcgaaattggacaggcagttttagatataattaaggaagaaaagctccaagaaaacgcttccattataggagatcatttattggatggtttaaaaaagattcaaaataagtatgatatcattggggatgtaagaggcagaggattatttattgggattgagctaataaaggactcggataatatggtgccagctgcggatgaggcagattttgtagtaaatgcaatgaagaaaaaaggtattcttattagctcagatggtcctgaccacaatgtcttaaaaataaaaccgccactgatttttaataaagagaatgcaaactattttttagaatcttttgaatctattatatcaaaaattttttataaatgaa

SEQ ID NO: 245314 - DNA, 871 bp, Unknown
  Bacterial polypeptide expressing nucleotide sequence isolated from the Sargasso Sea
atacttacatgaatctattttggattatgccgaaaatcttacgagaacattacccaatagtcttgaggtttgttatttcaccaattctggaagtgagtctaacgatctagcacttcgtatagctcgctcatacagcaatagtaacgagtcgattgttttatcaagtgcttatcatggccatacagcttctttgatagatgtgagcccctacaaatttcttggtaatggtggtaacggtaagcctaattttgttcatttaatccccgtacctgataagtttagaggagaacacaaggagaaaggcaaaagcattggggagtactacattcagcttctaaagtccacaattaaaaatatccagcgtagagggaagcaactttcattatttattattgagccagttatgggttgtggcggtcagataatgattcccaaatcttttatgcttgaggcgtttcaaattgttaatgaagcggggggattgtgtatcgttgatgaggtgcagatcggatttggaagacttggatcgcacttttggggctttcaaatgagtggcgttgttccagacataatcacacttggtaaatcaattggaaatggtcaccctctgtcagtggtaattacaaaaaaaaatatagctgatgtatttaataatgggatggaatattttaactcatttggagggaatccagtatcatgcgaaattggacaggcagttttagatgtaattaaggaagaaaagcttcaagaaaacgcttccagtacaggaaatcatttattggaaggtttaaaaaacattcaaaaaaagtataatatcattggggatgtaagaggcagaggattatttattggaattgagctaataaaggat

SEQ ID NO: 245315 - DNA, 448 bp, Unknown
  Bacterial polypeptide expressing nucleotide sequence isolated from the Sargasso Sea
gatggtattcctctccaggaaatggggttacaaagtaaaagggattccggcgaaccaagccaagatcatctttgctgaaaacaacttctggggtcgaacactggcagcggtttcctcatcgtcggatccgtcggcctataacgactacggacctttcatgcccggctttgtctcggttccctacaacaacctggcggccctggaggaggagttgaaggacgagaacacggctgccttcatggtggagcccatccagggggaggcgggagtgtttgttccagacccgggttacctcaagggggtgcgagagctttgcacaaaacataatgtgctctggattgctgacgaggtgcagacgggtctctgcaggtggaaattaaatactaaagaggaaaaattaaatcaaaccatgttttcatctcaggactggccggatgctttgctgtga

SEQ ID NO: 245316 - DNA, 832 bp, Unknown
  Bacterial polypeptide expressing nucleotide sequence isolated from the Sargasso Sea
ctgaaaaaaagccatggatcctggttggtagatgctagggataaccgtgaatatttagatctattttcaatgtttgcatcgttatcggttggctataatcatccttatcttatggataataaagagcgcttaatgtcatctgccataaataaacctacgaattcagatgtttattccgtagagatggcagaatttgtatcgactatgggtcgcgttgcacaacccgactatcttccatatgcattttatattgaaggcggcggtttagccgttgaaaatgctctaaaaaccgcatttgattggaaggttagaaagaacctttcagctggaaaaggtgaaaaaggttctaaaattattcattttaaagaatgctttcatggtagaactggctacacaatgagcttaacagattctcctgatccaagaaaaactttatattttcctcaatttgattggccaagaatagataatcctaaaattaattttccactagatcaaaatttagatctagtattagaacgggaaaagcacgcaataaaccaaattaaagatgccatcactaataaccctgatgaaattgcaggattaattattgaaccgatacaaggcgagggtggagataatcattttagatgtgaatttttccaaaccttgagaaatttagcagatgaaaatgaatttctattaatttacgatgaagtccaaaccggggtaggaattactggtaatatgtgggcgcatcaatcattctcaccaagtggttgtaattgtgactgtaaaaattctaatacaaagccagatattatagcttttggtaaaaaaacccaagttt

SEQ ID NO: 245317 - DNA, 590 bp, Unknown
  Bacterial polypeptide expressing nucleotide sequence isolated from the Sargasso Sea
tttgtgtctcaaaagtctcagaaaattgtgcaacaaaaaaaatttgttattaattcttgatgaagtccagtgtggagtaggtagaacaggagatttttttgcttttgaacaatctaaagtaaaacccgatatagttccaatagcaaaaggaattggaggaggttttccgttaggagcagttttaatgaacaagaaagtggcttcaggaatgattgcagggtctcatggatcaacttttggtggaaatccactggcaatgactattggaagtactgtcatggacattgtttcaaataaaatatttttaaaaaatgttaaaaaaaattcaaaattttttcataatgaattaataaagattaaacataattttccaaaaatgattaaggaaataagaggaaaaggatttttaataggtatccaactttttaaagatcaaactaagtttatagaacttttaatgaaaaaaaaattactaactataagagcatctgaaaatgtggtaagaattttaccacccttaaatgttaaaaaaagtgaaataaaacaagctttaaaaataatccaaaaagtttgcattgatttgaaataaa

SEQ ID NO: 245318 - DNA, 844 bp, Unknown
  Bacterial polypeptide expressing nucleotide sequence isolated from the Sargasso Sea
aatgctgttaaaatatctaaatcctttactgggagaagcggaatacttgtattttcacatggatttcatggtaggacacagatgacgatgtctatgacatacaaagaagatccttacaaaaaaggttttggtccttttcttgcaaacatttatcgtcttgattttcctgaccaaaacttagatttagctaaaatcaatttcgatccaaaagaaattgcttgtatggtaattgaacctattgctggtgaaggaggatttatcccagtttcaaaagacatgatggtcacattaagaaaattctgtgatgataatggtatcgtaatgattgcagatgaggtgcaaactggttttggaaggacgggcactctttttgcaatggaacagtttgatgcagagccagatttatttacattagcaaagtccattgctggaggactacctttgagtggagtcattggtaggtcgagaataatggactctgcgcatgttggtggtattggagggacttttggtgggaacccggttgcatgcgcagcagcactagctgttttagatgttatgcttgataataaattacctcaaagagcatttgagattggatataaaatatgcatgaaggtagaagcgattatggatctatgtccatgggttgcaggtattcgaggtatgggagcaatgcagggaattattattattgatccagatagtggtaatccagataaaaaacgtacaaataggatacataaatatgcattagaaaatggtctaataatgattacagcgggaacatacggtaatattatacgtactcttatgcctttaactataaaagaagatgaataaa

SEQ ID NO: 245319 - DNA, 713 bp, Unknown
  Bacterial polypeptide expressing nucleotide sequence isolated from the Sargasso Sea
aatagatggatttgatcaagttccttttgctgatcatgaagctataaaaaaagctattaataaaaatactgcagcaattatgattgaaactattatgggcgagggaggtattaaagttgttcctgatttttgtttaaaaggattaagagatttatgtgatgaaaatggtttacttcttattttagatgaagttcaaagcgcttatagaactggtagcttttttgcatttgaaaaatctggaatcattcctgatatagttcctatagccaaaggtataggaggaggatttccacttggagcttgcctagttacaaaaaaagccgcaacaggaatgacacccggaacccatggttcaacttttggaggcaaccctttggctatggcagttggaaattcagttctcgatattctttttgaaaaagatttttttaacaaagtaaaacagaagggtgaatattttgataccgggttaaataaaattaaaaataaatttcctaaaattattactgaggtaaggggaattgggttaatgaaaggaataaaggtatcagtagataattctgaattcataaaaaaattgatgaaccataaaatgcttacagtaaaagcagaagaaagtgttataagactttttccacctttaatagtggaaaataaagagttagatgaagccattgataaaattcagattgtttgtaaagaaatgagttagt

SEQ ID NO: 245320 - DNA, 637 bp, Unknown
  Bacterial polypeptide expressing nucleotide sequence isolated from the Sargasso Sea
tgcctctatgcctattggatacaatcatccattattactagaaaacaaagaaagattaatagctccaacattaaataaaataactaactctgatatttattcaactgaaatggctgaatttgtttcaactatgggacgaattgcacagcctgattatttgccttatgccttttatgtagaggggggcgcgttagcggttgaaaatgcattgaaagctgcttttgattggaaagttcgtaaaaatttagctgcaggaataggtgaaaaaggttcaaagattattcattttaaagaatgttttcatggaagaactggctataccatgagtatgaccgattctcctgaccctagaaaaaccatgtattatccacaatttgattggcctcgaattgataatccaactattaattttcctcttgatgaagaatcgttaaataaagtaatacaagctgaaaatactgcagtcgatcaaattttagaggctttagataaaaataaaaatgaaattgctgctttaataattgaaccaatacagggtgagggtggtgacaatcattttagatgtgaattttttcaacaattaaggcaattagccgatgagcatgaatttcttttaatttatgatgaagtgcaaacg

SEQ ID NO: 245321 - DNA, 829 bp, Unknown
  Bacterial polypeptide expressing nucleotide sequence isolated from the Sargasso Sea
ttaaaaaacaaaaataaaaaaactattattacttttaaaggcgcttttcatggaagaacttttgcagctctatcagcgcaaaaaaataaaaagtactctgaaggctttacacctttacttagtggttttaaaaatattaccttcaatgatgaaaaagtattattgaaaaatattactaaagaaaccgctgcaataatgattgagcctgttcagggcgaaggtggtattagacccgcatcacttaagtttttaaaatatattaagaaaatctgtataaaacatgatattcttctttttttagatgaggttcagtctggttttggaagatcgggaaaattatatgctcatgaatgggctaaaattaaaccagatatattagcaacggcaaaaggaataggttcgggatttcctttgggtgcatgtttagcgacttctaaggcgagtcttgggatgatcagcggaaaacatggatcaacttatggaggcaatcctctagcagtatcaattggcagagaagtattaaagattatttcaaacaaaaaatttttaacacatgtagattttatatccagatatttatggaaaaatttaaaacaattacatagtaattatgatgatattctggatatcagaggtgctggacttttacttggtattcaaactaaacaaaataatgtaatgatttctaataaattgaaaaaaaataaattattaactgtcccagctggagataatgtaattagattagcgccgcctctaattattaataagaaacatgttgatcaggcaataaaaatattagatcaaacatttaagacattatcatgaa

SEQ ID NO: 245322 - DNA, 739 bp, Unknown
  Bacterial polypeptide expressing nucleotide sequence isolated from the Sargasso Sea
gtatataaaagaggctaaagataaaataacaaaacaatctaaaaacaaaaaaatatctagtttttttgttgaaagtattttggggtgtggtggccaagtaattcttcctaaaaattatttaaaagagatatttatagaaattagaaaaaataaagctttgtgtatagttgatgaagtacaaactggttttggtagggtaggttataacttttggtcttttcaagagcatgatgttattccagatattgttaccataggtaaaccaatgggcaatggtcatccaatctcagcagtaataacaacagaaaaaatagcgtcaactttcaataatggaatggaatattttaattcatttggtggaaatccagtctcttgtgcggttggaaaagctgtattagaagtcattgagaaagataaacttcaacgcaatgcattaaatgtaggaaattatttcttaaataaattacaaaaaataaaaaataaaaataaaaaatatattagtgaagtaagaggaagaggtcttttcttaggaatagatattattaatgaatatgatcaattaaaacctaacaaacaattagctaataaaattataaattatatgcgagaaaaaggaattttacttagcactgatggtccacacgataatgttattaaaattaaaccccctttagtattcaataaagcaaatgttgacaatgtatgtgaaaatttagaaatatttttcaaaaaaatataa

SEQ ID NO: 245323 - DNA, 680 bp, Unknown
  Bacterial polypeptide expressing nucleotide sequence isolated from the Sargasso Sea
tgaatccttgaaaaaatctataacaaaaaaaacagcagcaattatgatagagccagttttaggcgagggtggaattaaagtaataccaaaatggtgtttaaaaggtttaagaaaaatctgtgatcaaaaaaaaatactacttatttgcgatgaggttcaatgtggaataggtagatcaggaaagtttttcgcctttgaatattcaggaataaagccagatattgtgccaattgcaaaaggtataggaggtggttttccattaggagcagttctaatgaataaaaaagttgcgtcaagcatgacaccaggaactcatggctcaacatttggcggaaatccattagccatggaaataggaaatgcggtcttagataaaataatgaaaaaaaagtttttaaaaaacgttcaaaagatttcaaaatattttttcaatgagttgaataaaataaaaattcaatatccagagattattaaagaagtaagaggactagggctattaatcggccttcaattgcacaaagaccaaactaaatttattaaaaagcttgaacaaaataaattattgacgattagagctgccgataatgttatcagaatactaccacccttaaatgtaaaaaaattagagatagatatgtcaataaaaattattaaaaaagtttgtaaagagtataactaaa

SEQ ID NO: 245324 - DNA, 390 bp, Unknown
  Bacterial polypeptide expressing nucleotide sequence isolated from the Sargasso Sea
aaaagggagaacactcatctacatttggaggaaatccattagcatgtgccgcgggaactgctacgcttcaagcattgacacaagatggtttgattgaaaatgcaaaaagtatgggagataaactctcgaatggtttggaagagctcaaatcaaaacatgcaatcattagagaagtaagaggtaaaggtttgatgattggtgtggaattgaaatttgaggtaaaagatatcttgatggaaggaatcaaaaatggattattacttttgtattctggtagaaatatcttaaggtttcttccaccgctggtcatctccgaggaggatattactaaaacactacaaatattagataatctacttacaaatgaggagaatagaagaaatgcataag

SEQ ID NO: 245325 - DNA, 385 bp, Unknown
  Bacterial polypeptide expressing nucleotide sequence isolated from the Sargasso Sea
atggagtttgggtcacacggatcaacttttggcggaaatccgctagcgtgcagtgttggaaatgctgtactagatttgatgacttctccaaaattttttagcaaagttatcgcagtttctgaaaaattattattagatctaaataaagtcgctaatgattatccagaaattattggaggtataagaggaaagggctttattctaggattaaaatgtaacattaataatgaagattttgttaaacaagcacgtacaaattttattttaacggttaaggcctcagataatgttgtaaggcttcttcccccaataaatttatctaattcagaatctgatgaagcaatcgataaaattagatcgacttgcaaagagttatcctcgtgaa

SEQ ID NO: 245326 - DNA, 745 bp, Unknown
  Bacterial polypeptide expressing nucleotide sequence isolated from the Sargasso Sea
ctttgtttgctgcaacaatcccaagcatacagagggttttggtccaaaagtagaaggatttgatcaagtacctttcgctgatcatgaagcaataaaaaaaactataaataaaaatacagctgccattatgatcgaaacaattatgggagaaggtggaataaaagttgtacctgatttttgcataaagggtttaagagaaatatgtgataagcatggcatacttttaattttagatgaagttcagagcgcttatcgaacgggtagtttttttgcgtttgaacactctgggattattcctgacatagtgccaattgccaaaggaattggaggaggctttccattgggagcttgtttagttacaaaaaaggttgctgttggcatgactccagggacacacggaagtacatttggcggtaacccattaggaatggctgtaggtaatgcagtactcgatatcatttttaaaaaaggatttttagataatgtaaaagaaaagggtaaatattttagcgaaggtttaaacaaaattaaaagtaaacatcctaaaattattggggaaattagaggtgtcggtttaataaaaggattaaaagttttagtagataacgtagaatttataaaaaaattaatgaatcataaaatgcttacagttaaagctgaagaaaatgttataagactttttccgccacttatagtccaaaatcatgagttagatgaagcattaaacaaaattgaaaaagtttgt

SEQ ID NO: 245327 - DNA, 565 bp, Unknown
  Bacterial polypeptide expressing nucleotide sequence isolated from the Sargasso Sea
acacgacttattattaattttcgacgaaattcaggctggtattggacgaactggaaaatttttttcttatgagcatgccgatgtgattcctgacatagttgctgtcgctaaaggtattggcggtggttttccattaggttgttgtttagccacaagtgaggcagcctctggcatgactcttggtacccatgggtctacttttggtggaaaccctctagcctgtgctgttggtatagaagttttaaaccagatttttgcaaagggattcttggaagccgtgaaggctaagggtaagataattaggacaaacttagaaaacttagtacaaaaaaacccaacaatttttgaatcagtacgtggaaagggcctaatgttaggcctaaagtgtaaagttgaaaattttactgtaataaatgcagcatatgaaaataagttgcttttagttccagctgcagaaaatgttgttagagttttacccccattaaatgtaacttataaggaaataagagttgcgaccgagcggtttgaagctactgtcagctctctaaaaaagaatcatgaataa

SEQ ID NO: 245328 - DNA, 447 bp, Unknown
  Bacterial polypeptide expressing nucleotide sequence isolated from the Sargasso Sea
gccaaaggaatggaggcggctttcctttgggagcttgcttggttacaaaaaaagtttctgttggaatgacacctggaactcacggaagcacttttggtggaaatcctttagctatgtcagtaggaaatgcagtgctcgacattatttttaaaaaaggtttttttgaagaggtaaaagaaaaaggcaaatattttgatgagggtttaaataaaattaaaaaaaaatatcctaaaattattggagaaattagaggcatcggtttaattaaaggattaaagcttctggtagataacgtagaatttattaaaaaattaatgaatcataaaatgcttacagtaaaagcagaagaaaatgttataagactttttccgccacttatagtgaaagaaaaagaattagacgaagcaattggtaaaatagaaaaagtttgtgaagaacttagctaag

SEQ ID NO: 245329 - DNA, 642 bp, Unknown
  Bacterial polypeptide expressing nucleotide sequence isolated from the Sargasso Sea
ctataatggttgaaactattatgggtgagggtggaattaaagttatacctgactggtgtttaaaagaattgagaaaaatttgtaataaaaaaagaattttgttaattttagatgaagttcaatgtggtatcggtagatcaggtaatttttttgcatttgaaaattccaaagtaaaaccagatatcgttccaatagcaaagggtattggaggtggctttcctcttggagcagttttaatgaataaaaaagttgctaaaggaatgactgttggaactcatggttccacatttggagggaacccattagcaatgtcagtaggaaatgctgttttagatcaaatctttaaaaaagattttttaaaaaatgtgaagaaattatcaagatattttcataaagagctgaacaaaattaaagatgattttccaaaaatttttaaagaaataagaggtgttggttttttaattggtttaaagttatttaatgatcaaactaagtttattaataaacttatgataaatggattattaacaattaaggcagcagaaaatgtaattagagtattgccacctctcaatgttaaaaaaaaagacttagatttagctattaagattattagaaaagtttgtaaaacttataaataag

SEQ ID NO: 245330 - DNA, 703 bp, Unknown
  Bacterial polypeptide expressing nucleotide sequence isolated from the Sargasso Sea
tctaaaattaataaattatcatgtttatttgttgagagtattttaggatgtggaggtcaggttatacttccaaaaaattatttaaaggaagtcttcaaagaagttagaaagaataaagctttatgtattgtagatgaagtacagacaggatttggaagagttggtaataatttttggtcatttcaggagcatcaagttataccagatattgttactttaggtaaacccatgggcaatggtcatcctattgctgcagttgttacaacagaaaaaattgcctcatcatttaataatggcatggaatattttaattcatttggaggtaatcctgtatcttgtgctgtaggaaaatcagttttggaagttattgaaaataaaaaacttcagaagaatgcattaaatgtcggtaagtattttttaaataagttggaaaaaattaaacgtaaaaacaaaaaatatataagtgaagtgagaggcagaggattatttataggaattgacattataaaagattcaaatcaactgaaaccaaataagcaattagcaaaaaaaattataaattttatgagaaacaacggaatcttattaagcactgatggccctcatgataatgttataaaaataaagccacctctagtatttgaaaggcaaaatgttgataatgtttgtgataatttagaaaatttttttaaaaaaatataaa

SEQ ID NO: 245331 - DNA, 690 bp, Unknown
  Bacterial polypeptide expressing nucleotide sequence isolated from the Sargasso Sea
cttttgctgatcatgaggcaattaaaaaaactataaataaaaacacagcagcaattatgatcgaaactataatgggagaaggcggcattaaagtagtacctgatttttgcattaaagggttaagggaaatttgtgatgaacataatatacttttaattcttgatgaagttcagtctgcctatagaaccggtaatttttttgcctttgagcaatcaggagtcattccagatattgtacctatagctaaaggtattggaggtggttttccgcttggtgcatgtttagttacaaaaaaagtatcagttggtatgacgccaggatcacacggaagtacttttgggggaaaccctttagcaatgtcagttggaaatgcagttcttgatgttatttttgaaaaagattttatgaataatgtaaaaaagaaaggacaatactttgatcaagctttaaaaaaggtcaaagataaatatcctaaaataataaatgaaataagaggactaggtttaataaaaggaattaaaactcaagtagataatgtaaaatttattcaaaaactcattgaacataaaatgcttgcagtaaaagcagaagaaaacgttataaggcttttccctccacttacagtatcggacaaggaattagacgaggcaattacgaaaatagaaaaagtatgtaaagaaatgagctaga

SEQ ID NO: 245332 - DNA, 506 bp, Unknown
  Bacterial polypeptide expressing nucleotide sequence isolated from the Sargasso Sea
aaaatggttctcttatcaacatgcgaatataaaacctgacattgtgacatgcgctaaaggattaggtaatggagttccaattggagcatgtttggggaataagaaagccagtaacttatttacaccaggttcgcatggaagtacttttggaggaaaccctcttgtttgttctgtttcctcaaaagttatcgatgtgattgagaaaaataaattgtgtaaacaatctgaaaatattgggaactatctaattaatgagattaaaaataaagtacaagatctaagtgttgtaaaagaagttagaggaaaaggtttaatgataggcattgaaataaatataaaaaattctaatattgtaaaagattgtcttgataaaaaattaatacttaatcttacatcagaaaatgttattaggttacttccaccacttatattaaaaaagagtgaagctaattttatagctaaaacgcttcatcaaatattacaaggatattcaaatggaaagtaaa

SEQ ID NO: 245333 - DNA, 428 bp, Unknown
  Bacterial polypeptide expressing nucleotide sequence isolated from the Sargasso Sea
tccaataggtgcggtgctgatgacaaaaaaagtttctaaagctatggttccaggtacacacggatctacttttggtggaaatcctttagcaatgtcagtaggtaacgcagtaatggatgaaatttttaaaaaaggatttctctcaaaaattaaaataaattcaaaatattttattaaagaattaaataaattaaaaaataaatttccaaatattattaaagaaattagaggagtaggattgattttggggatacagttacatcatgatcagacaaaatttatagaaagtttaatgaaaaataaattattaacaattagagcggcagaaaatgttataagaattttacctccgttaaatgttaataaaaatgaaataaatttggctttaaaaattataaataaagtctgtgagggttataaaaaataat

SEQ ID NO: 245334 - DNA, 790 bp, Unknown
  Bacterial polypeptide expressing nucleotide sequence isolated from the Sargasso Sea
tttaaaaaatacattttttattgaaggtggtggtttagctgttgagaatgcattaaaggttgcttttgattggaaagtaagaaaaaatttagaaaatggtattaaagataaagggtatcaaattttacattttaaagaagcttttcatggaagaacaggatacactttatcattaacaaataccgatccaatcaaaacaaaattttttcctaagtttgattggcctcgaataactaatccacatttatcatttccattaaatgaaaacattctttctaatgtaaaggaaaaagaaaaaaaagctattaatgaaattaaggaggctcttaaaaataatttaaatgatattgcagggttgattattgagcctatacaaggtgaaggtggggaccatcattttagaggtgatttctttaaagaattaaaaaaattatctcttgagcatgattttttacttatttatgatgaggttcagacaggagttggtattacaggtaaaatgtgggcacatgaacattttgaagattgtcaacctgatattatttcatttggtaaaaaaacacaagtttgtggtgtattagctggagatagaataaatgaggtcgaaaagaatgtatttaaaaggtctagtcgaattaattctacatttggaggaaatcttactgacatggtaagattcaaaatcattttagaaacaatcaaagaatttaacttacttgataatgcaaaattaaatggtgaatatttattaaataaaataaatgaattagaggaagaattccctgcattt

SEQ ID NO: 245335 - DNA, 756 bp, Unknown
  Bacterial polypeptide expressing nucleotide sequence isolated from the Sargasso Sea
tatgtcaataaacttcaaagaggctaggtcattaataaataaatccatgctcgctgatggaatgtcgccaataattgaccttaaaaaaagtcatggctcttggcttcatgatggtgctacagggaaagaatatttagatttgttttctatgtatgcttctatgtctataggttataaccatccatatgtgctagataattctgatagaatatctgctgctgctatcaataagccagcaaattctgatatttattcacttgaaatggcaagttttgtagataccgttagaagaatagctcagcctgattatttaccctatgcattttttattgaaggtggagcgttggctgtagaaaacgcattgaaaactgcatttgattggaaagctagaaaaaatcttgataaaggaaagaaaaaaccaaaaaatatagtcattcatcttaaggactgcttccatggtagaacaggttacacaatgtcattgactgattctcctgaccctagaaaagtgatgcattttccaaaatttaattggcctagagtttcgaacccttatttgaaatttccgcttaacaagaaaaatatccaagatgtggaattattagaaaaaaaatccataagtgaaattaagaatatactagctaataatcctgatgatgttgcttgcctaattatagaaccaattcaaggtgagggtggagataatcattttcggtcagaatattttaaagaacttaagactctgtctctagaaaa

SEQ ID NO: 245336 - DNA, 1153 bp, Unknown
  Bacterial polypeptide expressing nucleotide sequence isolated from the Sargasso Sea
aatgagcacaaccaatgattcattgatggcacgtcgccaagccgcagtcgcaggcggtgttggtcaaattcatcctgtttttactgctcgcgccgaaaacgcgaccgtgtgggatgtggaaggtcgagagtttatcgactttgcgggtggtattgcggtgcttaacactgggcatttacatcctaaggtgaaggcggccgttgcggcgcagcttgaggatttctcccacacctgttttatggtgcttggctacgaaagttatattcaagtctgtgaaaaactgaatcagttagtgccgggagattttgccaagaagacggccttattcaccagcggctcagaggccgttgaaaacgcggttaaagttgctcgtgcatacactaagcgggcgggcgtgattgcctttacctcgggttaccatggtcgcactatggcggcactggcgttaacgggaaaggtcgcgccttacagtaaaggcatgggattaatgtcggccaatgtgttccgcgccgagtttccctgtgcgctgcacggcgtgtccgatgatgatgcgatggcctctatcgaacgcatctttaaaaacgatgccgagccgagcgatatcgcggccatcatcctcgagcctgtgcagggcgagggcgggttttatgccgcatcgccagcctttatgcagcgtttacgtgcgctttgcgaccgcgaaggcattatgctgatcgccgatgaagtgcaaacgggggcgggtcgtactgggaccttcttcgccatggagcaaatgggcgtgagcgccgatatcacgacctttgctaaatccattgccggtggtttccccctttcaggtattacgggtaaagctgaagtcatggatgccatcggtcccggtggtcttggtggcacctacggcggtaatccgctggcctgtgcggcggcgctcgccgtacttgaggtgtttgaagaggaaaagctgcttgaacgtgctaatgcaattggcgaacggattaagttggcgttaaatactatgcaggttgaacattctcaaatcgccgatgtgcgtggtctaggggcgatgatcgccattgaattgatggaggatggtaaacccgcgcctcagtactgtgcccaaatcttagccgaggccagaaaccgaggattgatc

SEQ ID NO: 245337 - DNA, 1354 bp, Unknown
  Bacterial polypeptide expressing nucleotide sequence isolated from the Sargasso Sea
atgaacaaatctgatattaggaaagttattggtcaaagtatcttagccgatggaatgtcccctgtaatagatcttgagaaatcacatggttcttggcttgttgataaagttacagacaaaaaatatttagatttattttcaatgtttgcatcactttctgtaggatataatcatccatatgttttagaacaatcagaaagattaaaaattgctgctatcaataaaccaacaaattcagatgtttattcacaggaaatggctgaatttgttcaaacctttaaaagagtggcacaaccagactatcttccattgacattctttattgaaggtggggggctagcagtcgaaaatgctttaaaagctgcttttgattggaaaaggagaaaaaatttagctaaagggagttctgctaaaggcgagaaagtaattcattttaaacaatgttttcatggcagaacaggttatacaatgtctcttaccgattctccagataagcgtaaaactatgtatttccctaaatttgattggcctagaattactaatccaaaaattacctttcctcttgcagataatattgatcatgtaattgagttagaaaatcaggcgattaatgaaataaaagatgctatcagcgataatccagacaatattgcttcaattattattgaacctattcagggtgaaggtggagataatcacttcagatgtgaatttatgcagtcattaagacaaattgctgatgaaaatgatattattttaatttatgatgaagttcaaacaggcgttggagtgacaggaaaaatgtgggcgcatcagcacttttcaaatgatgattgtagtgctagtcagtgtaagtgtggagatggtttattggcagtgcctgatataatttcatttggtaaaaaaacacaagtttgtggagttgcagctagtactagatttgatgaagttgatggtaatgtttttagagaatcttcaagaatcaattctacttggggtggaagtttagtagatatggtaagattgacaatttatcttgagctaattgaaaaagaaaatcttgttgaaaaagctgcagaaactggaaaattcttacaaaaaaatcttcatgatttacaaaatgaattcccttcattagtatccaatgctagaggaaaagggctatattgcgcttttgatttaccgtctagtgaagatagagataaattagctgaacttttattagatgagggttctattttacttggctctggaaattattctattcgttttagacctcatctaaatgttactgaagaagatattagcttcggtatggattgttttaaaagagctttaagtaaactatcataat

SEQ ID NO: 245338 - DNA, 1237 bp, Unknown
  Bacterial polypeptide expressing nucleotide sequence isolated from the Sargasso Sea
ttttgggacgtagatggcaataagtttttggatgttactggggggctgtggaatgtcaatgtagggcataatagaaaagaggttaaggaagctattgtcgagcaattggataagattgcctattacaatacgtttattaacaactcaaaccctccagcaattgagctgtccactcgcttgatggaaatgctgaaaatagaagatatgggaaaggtaatgtttggatctgggggatcagatgcaaatgaaaccgccttaaaacttgctcgtcaatactggaaactaatggatgaaccacaaaagacaaaaatcttctcgttaaaaagtgcatatcacggagtccagtttggagttctatcagctagcggtggtatccagtggagaaaggcctacgagcctcttttggctggctttttccaagttgataaccccgatatatacagaaatccctggacagaaagtgccgaagaactaggccaaatctgtgctgatattttggaccgagaaattcaacatcaaggcccagaaacagtagcagcattcatagctgagcccatacagggagccggcggtatgataatacctcctagtaattattggcctttaattagaaaaatatgcgacaaacataatattctattaattgcagacgaggtaatcactggattcggccgaacaggttcaatgtttgggacacgcgcatggggtgtaaaagcggacataatgagttttgcaaagggaattaattctggctacataccgctcggagcaacagctattagtaaaaaggtggaaagtgcgtgggaaagagaccaccctctatctgccataatgcatggttatacatattcggggcatcctcttgcatgcgctgccgccaatgccaacctggagattgttgtacgagagaatttatcagagaatgcggaaaaggttggcctctattttctaaaagagcttaaaaaacttagggataaacacttatctattggtgatgtaagaggtaaaggtttgatgttagcaattgaatttgtaaaggatcgcgatactaaagaaccatttgcattcaatgacccctaccctgccctgattgcgaaaaatgcacgaaatagtggtgtaatgatacgaaaccaagggcatcgaattattctttcacccgctctaacatttacaaatgatcaagttgacgaggccatacagggcataaacaaggcaattacttcggcatccaaatagg

SEQ ID NO: 245339 - DNA, 913 bp, Unknown
  Bacterial polypeptide expressing nucleotide sequence isolated from the Sargasso Sea
ctggaaaaggtgaaaaaggttctaagattattcattttaaagaatgctttcatgggaagaactggctacacaatgagtttaacggattctcctgacccaagaaaaactttatattttcctcaatttgattggccaagaatagataatcctaaaattaattttcctctagatcaaaatttagatctagtgttaaaacgggaaaagcatgcaattaaccaaattaaagatgcgatcactaattaccctgatgaaattgcaggattaattattgaaccgattcaaggtgagggaggcgataaccacttcagaaaagagtttttagcggaattaagaaatttagctaatgaatctgatttcctattaatctatgatgaagtacaaactggtgttggcgtcacaggaagtatgtgggctcatcaagccttcggagatactgttaggcctgatattataagttttggtaaaaaaacccaagtttgcggtatttttggtggaaaacgtttagatgaggtagataataatgtttttcatgaatcaagtaggcttaattctacatggggtggatcattagttgatatggtaagatttactatttatttagaaattatagagaatgaaaaacttgttcaaaacgccagcgttgtaggtgaacacctaacaagttgcttgcattccttgcaaagcaatcatgataatttggtctctaatgcaagaaacagaggactgtttggtgcatttgatttaccggattcagatacacgtgacaaagcaataaatagcataagcaatgaaggcgctatgatgctagggtgcggaactagatctattcgattccgccctcatcttaacattacaattaatgagctcgatcaaggctttgagatgattgataaagccttaagtaaattatagt

SEQ ID NO: 245340 - DNA, 1000 bp, Unknown
  Bacterial polypeptide expressing nucleotide sequence isolated from the Sargasso Sea
aatgaataaatctgatattagaaaagtaatcagcgaaagtatattagctgatgggatgtcacctgttatagatctgaaaaaatcacatggatcatggttagttgacaaggttactggaaaagagtatttagatttgttttcaatgtttgcttctttatcggtcggttataatcatccatatgtattagaacaatcagaaagattaaaaattgctgcaatcaataaacctacaaattcagacgtatattctcaagaaatggctgagtttgttcatacctttaaaagagttgctcaaccagattatttacctctaacattttttattgaaggaggaggtttagctgtagaaaatgctttaaaagcagcatttgattggaagagaagaaaaaatttagctaagggaagttctgctaaaggtgaaaaggttattcactttcaacaatgttttcacggtagaacaggttatacaatgtctttaactgattcacctgataaacgtaaagtcatgtattttcctaaatttgattggcctagaattaccaatccaaaaataacctttcctatagaagaaaatcttgaacatattattgagcttgaaaagaaggcgatttcagagataaaagatgctattaatgtaaacccagataatatagcttccattattattgaacctattcaaggtgaaggtggtgataatcactttagatgcgagtttatgcaaaatctcagagatattgcagatgaaaatgatattattcttatttatgatgaagttcaaacaggtgtaggggtaactggaaaaatgtgggctcatcaacacttttcaactggtgcttgtactaataattgcaaatgcagtgacagtcttacagctaaacctgatataattgcatttggtaaaaaaactcaggtttgcggagtggctgctagcgcaaggtttgatgatgttgaaggcaacgtttttcgtgagtcatctagaataaattcgacatggggcggt

SEQ ID NO: 245341 - DNA, 733 bp, Unknown
  Bacterial polypeptide expressing nucleotide sequence isolated from the Sargasso Sea
gtcgatcaaattttagaggctttagataaaaataaaaatgaaattgctggtttaataattgaaccaatacagggtgagggtggtgacaatcattttagatgtgaattttttcaacaattaaggcaattagccgatgagcatgaatttcttttaatttatgatgaagtgcaaacgggagctggaattactggttctatgtgggctcatcagcagtttaatccgaataagtgcaattgtgactgtaataacgctaatacacaacctgatattattagttttggtaagaagactcaagtttgcggaatttttgctggtaaaaaactagatgaagttgaaaataatgtttttcatgaatcgagtcgattgaactcaacgtggggtggaaatatagtagatatggttcgaattactatttatctagaaataattgctaaagaaaaattagttgaaaatgcttctttaaatggtcgttatcttctaaagaaacttcagggtattcaggaagagtatagtgacattataagtaatgcccgtggaagaggattatttgccgcgtttgatttacaagactctgaacaaagagattccttagcaaatttaattatttcagaaggtgctcttattcttggttcaggaaaaaaatcaattcgatttcgtcctcatttaactatttctaaggaagaaatagatcttgctgatcagattatcaggagagctattgctcgattgtgac

SEQ ID NO: 245342 - DNA, 1210 bp, Unknown
  Bacterial polypeptide expressing nucleotide sequence isolated from the Sargasso Sea
atggattccttcatagcaaaagggaaaaatgctgaaatatgggacaaaaataacaatcgttatttagattttgttggaggatatgctgttttaaatactggacatttgaatccacgagttgttcaaagagtaaaaaagcaattgaatgattactctcattcttgttttgcttttgcacctcatgaaaatgctgttgagttgtgtgaagaaattaacaaaagatacccaattaaaaagaaaactaaaacttttcttgtaaatagtggtgcagaagctgttgaaaatgcaatcaagattgctagatatgcaactggcaaagaaaagataatagcatttaaagggggttttcatggaagaacttatcttgctatgggacttacgggtaaagagaaaccatacaaagaaggctttggtccatttcctaaatttataacacatgttgattacccgtatcattacagagatatatcagatgaaaaagtacttaagcaaattgaaaatacactattaaagaaacttgatccaaataatgtcgcagctattgtaatagaaatccaacttggcgaaggtggctatattccagcaactgaaaaatttctaaaacagctaagaaaagttgcagaacaacataatattttattaatttttgatgaagttcaaacagggtttgggcgtacgggagaaatgtttggagcagacaaaatcaatgttcagccagatatggtcacattagcaaaaggtataggaggaggatttccacttgctgcagtcgttggcaaagctgaaataatggattcagttcatgatgctgggataggtagtacatttggagcgtcccctatttcttgtgcagctgctctgggtgttctagatgtatttgataaagatagtcttctagaaaaagtaaataagcaaacaaaaattatggataaatctttaggaaacataaatgacaattttgattttgttggagatgtaagaggttatggaattatgaaaggtgttgagattgtagaaagtaaagataataaaataccttctaaggatttagctatgagaataatcaataactcaaaaaagaatggattacttttagtaaattgtggcaaagaaggaaatgttataagatttatgggaccactaactacacctcttacacaaatcagagaggctatggagatgtttaatcaggcgttggagaaagtttaat

SEQ ID NO: 245343 - DNA, 1210 bp, Unknown
  Bacterial polypeptide expressing nucleotide sequence isolated from the Sargasso Sea
atggattcatttatagctaaaggtaaaaatgctgaaatttgggataaaaataataaccgttacctagattttgttggcggatatgccgtccttaatactggacatttaaacccaagagttgtgagaagagttaaaaaacaattaaatgactactcacattcatgctttgcatttgcaccacatgaaaatgccgttgaactatgtgaccaaataaataaaagatatccaataaatcaaaaaacgaaaaccttccttgtaaatagtggagctgaagcggtagaaaatgcaataaaaatagcaaggtatgcaaccggaagagaaaaaataattgcattcaaaggggggtttcatggaagaacttacttggctatgggtttaacaggcaaagaaaaaccgtataaagaaggatttggaccttttccaaaatttataagccatattgattttccatatgattacagaggtatatctgatgataaagttataaaacaacttcaaaacttaatttcaaaaaaaattgaccctaatgatattgctgcaatagtcgttgaaattcaactaggtgaaggaggatacatacctgcgtctaatggatttcttaaaaaactcagagagataaccaaaaaacataatattttgttaatttttgatgaagttcagacaggatttggtagaactggtgaaatgtttggtgcaacaaaagtaaatgttgagcctgatatggttactttagctaaaggtattggtgggggctttcctcttgcagctgttgttggcaaatctaaaattatggactctgttcatgatgcgggaattggtagtacatttggcgcttcacctatttcatgcgctgctgctcttggcgtactggatgtttttgataaagacaatctcctacaaaaagtaaacaagcaagaattaataatgaagaaatctcttgaaacaatgaaagaaaattttgagtttgttggagatgtcaggggttatggaataatgaagggtgtagaaattgtcgaaaataaagaaaataaaacagcatctaaagaattggcaacgaaaatcataagtaattcaaaaaagaatggattgcttcttgtgaactgtggaaaagagggaaacgttataaggtttatgggccctttaactacaccattaaatcaagtaagagaggcaatggaaatgtttaataacgctttggagaaaatttaat

SEQ ID NO: 245344 - DNA, 1216 bp, Unknown
  Bacterial polypeptide expressing nucleotide sequence isolated from the Sargasso Sea
catgtacgcacacgttcccgcctatccgggcgatccgatcctgtccctgttccagacgttccagcaggacgcgcatccgcacaaggtcaacctcagcatcggcctctgctacgacgacacgggccggattccggtgctcgacagcacacgcatcgcggccgagcgcctgcgcgaagccggcgctccgcacacctatctgccgatggaagggctcgccgcgtacaggcagggcgtgcagcgcctcgtgttcggcgcggactgcgcggcgctcgcggaagggcgtatcgcgacgctgcagacgcttggcggctcgggtgcgatccggctcggcgcggaattcgtgaagcgctacttcccggacagcgcggtctggatcagcgaccccacgtgggacaaccatcgcgtgatcttctcggcggccggcctcgacgtgcacacgtacccgtactacgacgaagcgcgcaacgatattcgcgtcgacgcgatgctcgcgactctcgatgcgctgccgccgcgcagcgtcgtgctgctgcagccgtgctgccacaacccgacggggctcgacctggggcgcgatgcgtggcgggcggtgatcgacgtgctcgcgcggcggggcctgattccgttcctcgacatggcctatcagggcttcggcgacggtctcgacgacgacgcgtgggccgtgcgcgccatcgtcgacgcggggctgcccgcgatcgtcggcaattcgttctcgaagaacttctcgctgtatggcgagcgcgtcggcgggctgtcgatcgtttgcgcgggcgcgggcgaggccgcgacggtgttgagccagctgcaggccggcgtgcgccgcacctattcgagcccgccgctgttcggcgcgcagctcgtgtcgacggtgctgaacgacgacgcactgcgcgcgcgctgggaaggcgaggtcgcgcaagtgcgcacgcgcatcaagcgcatgcgcggtgcgctgaaggcgcggctcgactcgcgcgcgcccgggcgttcgttcgacgccttggtcgcgcagcgcgggatgttcagctacacgggcatcgccgccgccgacgtcgaacgcctgcgcaccgggcacggcgtttacttgctgcgctcgggccgcatgtgcatcgcggggctgaacgacgcgaacgtcgatcacgtcgcgaacgcgatcgccgacgtactcggcggcgcattgcgccaggccgcctga

SEQ ID NO: 245345 - DNA, 1060 bp, Unknown
  Bacterial polypeptide expressing nucleotide sequence isolated from the Sargasso Sea
gttattgaaaagggaaaggggttttatgtttcagatagcgatggaaactcatatttagatttttttggtggcattctcaccgtgtccgttggtcatgcgaatgatgaagtaaatacagcagtgaaagcacaggtcgatcgactaagtcatatttcgtctctttatcctagtatacctgtcgttgaacttgcagaaaagcttgttggattggcaccaggcaatctagaaaaagtattttttaatgcatctggaactgaagcagacgagacagctgttatgatggctcaactttatactggaaatacagagatcatagctttacgccatggttattcaggacgttcattactcgcacaatccttaacaggccatgcaccatggagagcattgcctagccaagttggttcggtcaaacatgctttagcgccatattgttatcgttgccccttgaaaatgacatatccagaatgtggagtcgcttgtgcaaaagatgtagaagagctcatcaatacaacaactactggtaaagtggcaggtattttagcggagccaattcaaggtgttgggggatttatcacccctccagatgcatattttaatattgtttctgatattattcacgaacatggtggggtatttatttctgatgaggttcaaactgggtttggacgaacaggtaaaacatggggtatagaacattcaggtgtagaacctgatatgatcacagttgcgaagggaattgcaaatggtatgccacttgcagcggtcataacgacaaaggatatagcagattctcttcaaaaaaatacaatatctacttttggtggaaaccctgtaagtagtgctgcggcgaatgctactttagatataatagaaagagataatctaaaaacaaactcaattaaaatgggcgaaattttaaaagaaggattgcaaaaaatacagtccgaacacaaaaagatcattggtgatgtaaggggaaaagggttaatggttggacttgagctcgtaatagatgaaacaacaaaagatcgaactccaaaccccgaagcagttgatc

SEQ ID NO: 245346 - DNA, 1090 bp, Unknown
  Bacterial polypeptide expressing nucleotide sequence isolated from the Sargasso Sea
catggcaactaatccagaacttttaaaacgtcattctgaggtacttccctcatggttggctttatattatgaccctccaatttctatggattacggtcaaggtcgacatgtctatgatgttgaaggtaatcgctaccttgatttttttgggggaattctgactacaagtcttggttacgacatacctgaagtgactcaagctattaatcaacaggcatctaaagttcttcactcttcaaccttgtatctgtcagaaccaatgattgaattagcggaactagttacagaattatcaggtataccggacgctagagttttttttactacgtcaggcacagaagccaatgatgcagctttgttgttagctacttcatatcgtcgttcaaaccagatattggcacttagaaatagttatcatggacgttctttttcgactgtagcaattacttctcatagatcgtggtcgcctaccagcttgagtggcttatctgtaaattatgttcatggtggctatagattgcgaagtccatttaatgattttgatgatgacaactacaccaaagcctgtgttgatgaccttgtccaagtttttgacatgatgacatcaggagatgtagcaacgatgatcgctgaaccaatccaaggcgtaggtggtttcgctactccacccgatgggtttttcggcgcaatgaaaaaagagttggataacaggggtgtcttatttatctccgatgaagttcaaacaggctggggaagaaccggagaaaatttttggggttatcaggcacatggaatagtgcctgacatgatgacttttgctaaaggagttgggaacggtttagctctaggaggagtagtcggcagggcggaagtaatggaagcgatgccggctaattccatttcaacttttggaggtaatcccatagcatcggctggagcattagccacaataaattacatgcttgaacatgacacgcaaaaaaattcgaaagaaatgggcgagagactttcagaaggaataagcaaaactgtttcagattcacctgtgatagcagagatacgaggaagaggtctgatgcttgctatagaa

SEQ ID NO: 245347 - DNA, 1195 bp, Unknown
  Bacterial polypeptide expressing nucleotide sequence isolated from the Sargasso Sea
catgattttctctcaggtagtactcgcacccgctgatcccatccttggtttaaccgataccttcaaggccgatccacgccaagataaagtgaacctcggtgttggcatttataaggatgaagcagggcagactccagtattacagtcagtgaagaaagcagaagccctattgcttgagcaagagaagaccaagaactatttaggtattgaaggggttcaaacctataaccgcgtagtgcaagagctattatttggcgagggtagtgagcttgtgacgtcaggccgtgcagcgaccgctcaggcgccaggtggtactggtgcactgcgtattgccgccgagtttttactgcgcaacacgccatcgcgcactgtgtgggtaagtaacccaacgtgggctaaccatcagaatattttcgaaactgcaggtttaacggttaaagaatacggttactacaacgcagctgcccacgatatcgatttcgacggcatgatgacagatctcgccaatgcacaggcgggtgacattgttttactgcacggctgctgccataacccaactggcattgatttgaccttagcccaatgggaattggttgccaatctatgtgtagacaagcagttagtgccattgtttgactttgcttaccaaggttttggtgctgggattgaagaagatgctgctggcctgcgtttagtggctgcgaaagtacctgagttgttagtggctaactcattttctaaaaactttggcctctacaacgagcgtatcggcgctgtgactgtggttgcacaaaatgccgatgaagcggtgcgcgcctttagccaagtgaagcgtactatccgtgccaattactcaaacccacccgcacacggcgcgttgatcgttagcaccattttaagcgatgcggcgttaaaagcactttgggtacaagagttgaccgaaatgcgtgaacgtatcgccgagatgcgtactctgttcgtccaaagcttaaaggatgaaggcgtgactcaagactttagctttatttcccgccaaaacggtatgtttagcttctctggcttaaataaagcgcaggttgcacgcttgaaagacgagtttggtatttatatcgtcggctcaggccgcattagtgtggcgggtatgaccaaaaccaatatgcctgtgatctgtaaagcgattgctcaaattctttaa

SEQ ID NO: 245348 - DNA, 1300 bp, Unknown
  Bacterial polypeptide expressing nucleotide sequence isolated from the Sargasso Sea
atgaatcatagtgaatccatcaggaaaaaacataaaaagtatttatttgatgccgtaaagaatttttacaaagagccattggtcattgaagaaggtaaaggtttttatgtctcagatagtgatggcaggtcctatctggatttttttggaggaattctcactgtttctgttggccatgcaaatgatgaggtcaatactgctataaaagcacaggttgaccgtctcagccatatctcatctctctatcctagtattccagtagttgaccttgcggaaaggcttgttcgtctagcgcctggaaatcttgaaaaagtattctttaatgcctctggtactgaagctgatgaaacagcagttatgatggctcaactttacacaggtaatactgagatcattgctttacgtcacggctattctggacgatcattattggcgcaatccttaactgcgcatgctccatggagagccttacctactcaagtagcttctgtcaagcacgcactagcaccttattgttaccgttgtcctttgaaaatgacatacccagactgtggagttgcttgtgcaaatgatgtgaaagaacttataaataccacgaccactggaaaggtggcaggcattttagctgaaccgatccagggtgttggaggatttatcacacctccagacgaatattttaatattgtagctgatatcatacatgagcatggtggaattttcatttcagatgaagtgcaaactgggtttggccgaacaggaaagacatggggaatacaacattctggtgtagagccagatatgatcacagttgcaaaagggatagcaaatggaatgccactggcagcagttgtaactacaaaagatatagcagacactcttcaaaaaaatacaatatctacatttggtggtaacccagttagttctgcagctgcaaatgctactttagagatcattgagagagatgaattaaaagcaaatgccaatgagatgggagaaatattaaaggatggtctgataaaaatacaatctgaccatagagaggtcataggtgaagtcagagggaagggattaatggttggtcttgaacttgttgtagatgaaacaaaaaaagatcgcaccccaaatcctgatgcagttgatcgtttaatggaagagaccaaagatcggggccttcttattggacgtggtggcctttacggtaattgtgtacgtatctcaccatctctaaatataggtagaagtgaaattgatgaagctctatcgatacttgctagctcattcaggtctatagatcaataat

SEQ ID NO: 245349 - DNA, 871 bp, Unknown
  Bacterial polypeptide expressing nucleotide sequence isolated from the Sargasso Sea
atgagttctgtacttggcacatacgcgaggaaagatatttcttttataaaaggaaaaggttgttatctttacaccgaaaaaggagaaaaatatcttgattttgttcaaggtattgcgactaatattttgggacattgtcacgaagagttagtgaagactattaaaatacagtctgaaaagttatggcatgtatcaaatgcatttgttatccctgaacaagaaagattggctaaaagattaaccgataatacatttgctgattttgtttgttttcaaaattcaggtacagaggctacagaggcgagtattaaaattgctagaaaatatttccacaaaattggtaagtctgaaaaaaatagaattattacatttgaaggagctttccatggtagaactttggctgcactatttgccgcaaataacgcaaaacacacagaaggttttggtccaaaaatagatggatttgaccaagttccatttgctgatcatgaagccattaaaaaagccattaataaaaatactgctgcaataatggtagaaactattatgggagagggaggcattaaagttattcccgacttttgtttaaaaggtttaagagatttgtgtgatgaacatgatttacttcttattctagatgaagttcaaagcgcttatagaactggtagtttttttgcatttgaaaaatctggaattttgcctgatatagttccaatagccaaaggtataggaggagggtttccacttggagcttgtttagttactaaaaaggcagccaaaggaatgactcttggaacgcacggttctacttttggagggaatcctttagctatggcaataggaaattcagtgctagatattctttttgaaa

SEQ ID NO: 245350 - DNA, 1099 bp, Unknown
  Bacterial polypeptide expressing nucleotide sequence isolated from the Sargasso Sea
catgtctctgttcaccgccgtcgaaatggccccccgcgaccccatcctgggcctcaacgagcaattcaacgccgacaccaaccccaacaaggtcaatctgggtgttggcgtttatttcgacgacaacggcaagctgcccctgctgcagtgcgtgcaggccgctgaaaagaccatgatggaaaagcccacggcccgtggctacttgcccatcgacggcatcgtggcctatgacaacgccgtcaagagcctggtgttcggcgccgacagcgaacccgtgaagtccggccgcgtggccaccgtgcaggccatcggcggtaccggcggcctgaagatcggagccgacttcttgaagaaggtcagccccaacgccaaggtattgatctccgaccccagctgggaaaaccaccgcgcgctgttcactaacgctggttttgaagtggacacgtacgcgtactacgacgccgaaaagcgcggcgtgaacttcgaaggtttcctggccagcctgaacgctgccgctcccggcaccatcgtcgttctgcacgcctgctgccacaaccccaccggctatgacatcacccccgagcagtgggaccaggtcattgctgctgtcaaggccaagggcctgacacctttcctggacatggcctaccagggcttcggccacggcatcgccgaagacggcgccgtcattcagaagttcgtcgccgctggcctgaacttctttgtgtccacctcgttctccaagagcttcagcctgtacggcgagcgcgtgggcggcctgtcggtgctgtgcacggacaaggaagaagccagccgcgtgctgtcccagctcaagatcgtgatccgcaccaactactccaacccgcccacacacggcgggtgcggtggtggctgccgtgctgaacaaccccgagctgcgcgcgatgtgggaaaaggagctggccgaaatgcgcgtgcgcatcaaggccatgcgccagaagctggtcgatggcctgaaggccgccggtgtgaagcaggacatgagcttcatcaccacccagatcggcatgttcagctactccggcctgtccaaggaccagatggtgcgcctgcgcaatga

SEQ ID NO: 245351 - DNA, 1348 bp, Unknown
  Bacterial polypeptide expressing nucleotide sequence isolated from the Sargasso Sea
aatggaattatctgatattagaaaagttattgctggaagcattcttgcagatggcatgtcaccaattattgacttagagaaatctcacggttcatggttagttgataaagtaactggaaaagaatatcttgatttgttctctatgtttgcatctttgtcagtaggatacaaccacccttatgtattagagcagtcagaccgattaaaggttgctgctattaataaaccaacaaattctgatgtttattcattagaaatggcagaatttattgaaacatttaaacgcgttgcacagccagagtatttaccacatgcattctttattgaaggcggtggattagctgtagagaatgcattgaaagttgcatttgattggaagcgtagaaaaaatttagcaaaaggcagtagcgtaaaaggagagaaagttattcattttaaagaatgttttcatggtcgcacaggatacacaatgtctttaacagattctcctgataaaagaaaaactatgtattttcctaagtttgactggcctcgcattacaaatccaaaaattacatttcctctagataaaaacttagatcatgtaattgctttagaagaaaaagcgatagcagaaatcaaagatgcaattgctaaaaaccctgataatattgcttctattattcttgaaccaattcaaggagaaggcggagataatcatttcagatgtgagtttatgcaagaattaagaactattgcagatgaaaatgatatcatgcttatatatgatgaagtgcaaacaggaatcggtgttacaggtaaaatgtgggcacaccaacatttcgcagcacacgcatgtaatgactgttcttgcggagaagattcttctgcaagacctgatattatctcatttggtaaaaaaacacaagtgtgcggtattgcagttggaaaaagagttgaagaagtcgaaaagcatgtttttgaagaatctagtcgactaaactctacctggggtggaagcttagtagatatggtacgtcttactatctatttagagttaattgaaaaagaaaacttagtagaaagagcgaacgaaactgggtcatatttattgaactctatctatacattacaaaaagaataccctaatcttgtatcaaatgcaagaggcaggggtttatattgcgcattcgatcttccttcgggagaaaaaagagataaattatcagaattattattagaagaaggatcaattttattaggatctggacatcagtctatacgttttcgtccacaccttaatgttaaaaaagaagacattgattttggaatggactgctttaaaaaagctttaaacaagctaggataa

SEQ ID NO: 245352 - DNA, 1279 bp, Unknown
  Bacterial polypeptide expressing nucleotide sequence isolated from the Sargasso Sea
atgagcacaactaatgattcattaatggcacgtcgccaagccgctgtagctggtggagtgggtcaaattcacccaatttttactgcccgcgctgaaaacgcgagtgtgtgggatgttgaaggtcgagagtttatcgactttgcaggtggtattgctgtgctcaacactgggcatttacatcctaaggttaaggcggctgttgcggcgcagcttgaggacttctcccacacctgttttatggtgctgggttatgaaagctatattcaagtctgtgaaaaactgaatcagttagtgccgggggattttgccaagaagacggccttattcaccagcggctcagaagcggttgaaaatgcagttaaagttgctcgagcatatactaagcgggcgggcgtgattgcctttacctcgggttaccatggtcgcactatggcggcactggcattaacgggaaaggttgcgccttatagtaaaggtatggggttaatgtcggccaacgtgtttcgcgctgagtttccctgtgcgctacacggcgtgtccgatgatgatgcgatggcgtctatcgaacgcatctttaaaaatgatgcggagccaagtgatattgccgcaattattctcgaacctgtgcagggcgaaggcgggttttatgccgcttcgccagcctttatgcaacgtttacgtgcactttgtgaccgcgaaggcattatgttgattgccgatgaagtgcaaacgggggcgggtcgcacggggaccttcttcgcgatggagcaaatgggcgtgagtgctgatatcaccacctttgcgaaatccattgctggtggcttcccactctcaggtattacgggtaaagctgaagtcatggatgccattggccccggtggccttggcggcacctacggcggtaacccgctggcctgtgcggcggctcttgccgtacttgaggtatttgaagaggaaaagctgcttgagcgtgccaatgcgattggcgagcggattaagtcggcgttaaataccatgcaagtcgaacatccacaaattgccgatgtgcgtggtctaggggcgatgatcgccattgaattaatggaagatggcaaacctgcacctcagtactgtgctcaaatcttagtcgaggctagaaaccgaggattgattctcctctcctgcggcacctacggaaatgtgctgcgtattttggtgccattgacagtgccagacgagcagctcggagcggggctgggcattcttaaggcctgcttcgatgccgtgttaaaaggttaat

SEQ ID NO: 245353 - DNA, 1732 bp, Unknown
  Bacterial polypeptide expressing nucleotide sequence isolated from the Sargasso Sea
tgcgaatgaaagacgtaatattcatttaggcgtagatatctttattgatcaaggaacagatttatttgcgccaatagatggtaaaattataattttaaaaaataataattttaaatatgactatggtcccactctagttttagaacatagttttaaaaaatataaattttatactctatacggtcatttatccaaaataatgtttcaaaaactaaaaattggaaaaaaaattaagaaaggtgaatggattggtaaaattggtaattctaatgaaaatggaaaatggttaccacatttacattttcaaattattttagatttattaggacatgataagaattttccaggagtaggtgaagaatttttattcaatatttggaataaaatttcacctgatccaaatttaattctacgaattccaaaatctttttattttaataataataattttaaagatactttaaaaaaaagaagaaaaaatatttctgataatttatcaatttcttacaagaaacctcttcatatgcttgaagctaaagatcagtatttttttgatagatatggcaggagatacttagattgtgtaaataatatttcccatgttgggcattcaaattcctatgtccatgaagctatgactaagcaaaatttaaaacttaatactaatacgagatatctatacgatacaattaacgattatagtgaattacttttaagtaagtttccaaagaaattaaataagatattttttgtatgtacaggatctgaagctaatgatttagcttatagaatagctcaaacttatactagtgcaaaagatgtctttgtgatggacaatgcttatcatgggcataccaatgctttaattgatctaagtccatacaaatttaatagtaagggtggtttaggtaaaaaagattatgttcacgtattagatatgcctgatcctttaagaggtaagtggagatatcaaaattcaaattggattcaaaaatatatagatgaagctaaaacagtaattagaaataaaattaaagaaacaaaaattgcatgtttttttactgaatgtatacttggttgtggtggtcaagtaattcttccaaaaaattatttaaaagaaatattttcagaaattaaaaaaaacaatgcattatgtattgttgatgaagtacaaactggttttggacgcgttggaaaaaatttttggtcatttgaagagcatgatgtcgttcccgatatagtaaccttgggaaaacctatgggtaatggtcaccctatagctgctgttataacttcagaaaaaatagcttcaacttttaataatgggatggaatattttaattcattcggtggtaatcctgtttcctgcgctataggtaaagcagtattagagactattgataataataaattacaaaaaaatgctttgttagttggtaattattttttaaaagaattaaaaaaaatccaacttaaatataaaaaatatattagtgaagttagaggtagggggctttttttaggaatagatattattcaaaatagtaatgtgtctaaaccaaacaaaaaattagctaaattgcttattaattatatgagaaatcaaggtattttgttgagtactgatggcccttatgaaaatgttattaaaataaaacctcctcttgtatttacaaaattaaatgttgatcaggtatgtaaaaacttagaaactttctttaaaaaattataa

SEQ ID NO: 245354 - DNA, 1195 bp, Unknown
  Bacterial polypeptide expressing nucleotide sequence isolated from the Sargasso Sea
atgattttctctcaggtagtactcgcacccgccgatcccatccttggtttaaccgatacatttaaggccgatccgcgccaagataaagtcaaccttggtgttggcatttataaggatgaagcagggcagactccagtattacaatcagtgaagaaagctgaagccctattgcttgagcaagagaaaactaaaaactatttagggatagaaggggttcaaacctataatcgcgtagtacaagagctgctatttggtgaaggtagtgatctcgtgacttctggccgagcagcaacggcccaagcgcctggtggtacaggtgcactgcgtattgctgccgagttcttattgcgtaataccccatcgcgcactgtgtgggtaagtaatccaacttgggcaaaccatcaaaatatttttgaaactgcgggtttgacggttaaagaatacggttactacaacgccagtgcccacgatattgattttgatggcatgatgacagatctcgccaatgcacaggcgggcgacattattctactgcacggttgctgtcataacccaacgggtatcgatttaacgttaacccaatgggaattagtcgctaatctttgtgcggacaagcaattagttccattattcgactttgcataccaaggttttggtgctggtattgaagaagatgctgctggtttacgcttagttgcgtcaaaagtaccagaactattggtcgcaaattcattctctaaaaactttggtttatacaacgagcgtatcggcgccgtgactgtggttgcacaaaatgccgatgaagcggtgcgtgcatttagccaagtgaaacgtactattcgtgcaaattactcaaatccaccagcccatggcgcgttaattgtgagtacgattctgagtgatgcatcattgaaagccctttgggtacaagagctgactgaaatgcgtgaacgtattgccgagatgcgtacgctatttgtacaaagcttaaaagatgaaggtgtgacccaggactttagctttatttcccgccaaaacggtatgtttagcttctccggcttaaataaagcacaggttgcccgtttgaaagacgagttcggcatttatatcgtcggctcgggtcgcattagtgtggcgggtatgaccaaaactaatatgcctgtgatctgtaaggcgattgctcaaatcctctaac

SEQ ID NO: 245355 - DNA, 1279 bp, Unknown
  Bacterial polypeptide expressing nucleotide sequence isolated from the Sargasso Sea
aatgagcacaaccaatgattcattgatggcacgtcgccaagccgcagtcgcaggcggtgttggtcaaattcatcctgtttttactgctcgcgccgaaaacgcgaccgtgtgggatgtggaaggtcgagagtttatcgactttgcgggtggtattgcggtgcttaacactgggcatttacatcctaaggtgaaggccgccgttgcggcgcagcttgaggatttctcccacacctgttttatggtgcttggctacgaaagttatattcaagtctgtgaaaaactgaatcagttagtgccgggagattttgccaagaagacggccttattcaccagcggctcagaagcggttgaaaacgcggttaaagttgctcgtgcatacactaagcgggcgggcgtgattgcctttacctcgggttaccatggtcgcactatggcggcactggcgttaacgggaaaggtagcgccttacagtaaaggcatgggattaatgtcggccaatgtgttccgcgccgagttcccctgtgcgctacacggcgtgtccgatgatgatgcgatggcctctatcgaacgcatctttaaaaatgatgccgagccgagcgatatcgcggccatcatcctcgagcctgtgcagggcgagggcgggttttatgccgcatcgccagcctttatgcagcgtttacgcgcgctttgcgaccgcgaaggcattatgctgatcgccgatgaagtgcaaacgggtgcgggtcgtaccgggaccttcttcgctatggagcaaatgggcgtgagcgccgatatcaccacctttgcgaaatccattgccggtggcttcccactatcgggtattacgggtaaagctgaagtcatggatgccattggccctggcggccttggcggcacctacggcggtaatccgctggcctgtgcggcagcgctcgccgtactcgaagtgtttgaagaggaaaagctgcttgaacgtgccaatgcaattggcgagcggattaagtcggcgctgaatactatgcaggttgaacatccgcaaattgccgatgtgcgtggtctaggggcgatgatcgccattgagttgatggaagagggcaaacccgcgcctcagtactgtgctcaaatcttagccgaggccagaaaccgaggattgatcctcctctcctgtggcacctacggaaacgtgctgcgtatattggtgccattaacagtaccagacgagcagcttgctgctgggctgggcattcttaagtcctgcttcgatgccgtgttaaaaggttaa

SEQ ID NO: 245356 - DNA, 442 bp, Unknown
  Bacterial polypeptide expressing nucleotide sequence isolated from the Sargasso Sea
attggagggtgtttttccaataggtgcggtgctgatgacaaaaaaagtttctaaagctatggttccaggcacacatggatctacttttggtggtaatcccttggcaatgtctgttggtaacgcagttatggatgaagtttttaaaaaaggttttcttttaaaagttaaaactaattcaaaatattttatttcagaattaaataaaattaaaaataaatttccaaatattattaaagaaataagaggaataggattaattcttggaatacaattacatcaagaccagacaaaatttattcaaagtctaatgaaaaataaactattaacaattagagcggctgagaatgttattagaattttgcctccactaaatgttaataaaaaagaaataaatttagctttaaaaattatcaataaagtctgtgaaagttataaaaaataa

SEQ ID NO: 245357 - DNA, 1327 bp, Unknown
  Bacterial polypeptide expressing nucleotide sequence isolated from the Sargasso Sea
aatgaacaaatctgatattagaaaagttatcagcaaaagtattttagctgatgggatgtcacctgtcatagatcttgaaaaatcacatggatcatggttggttgataaggttactggaaaagaatatttagatttattctcaatgtttgcctctttgtcagttggttataatcatccatacgttttagagcaatctgaaagattaaaagttgctgcaatcaataagcctacaaattcagatgtatattcacaggaaatggccgagtttgtacaaacttttaaaagagtagcgcaaccagactaccttccactaacattctttattgaaggtggaggtttagctgttgaaaatgcattaaaagcagcatttgattggaagagaaggaaaaacttagcaaaaggcagttctgctaaaggagaaaaagttattcactttcaacaatgttttcatggtagaacaggttatactatgtctttaactgactctcctgataagcgtaaagttatgtattttccaaaatttgattggccaagaattaccaatccaaaaataacttttccgattgaagataatttagataacatcatagagcttgaaaataaagcaattgcagagattaaagatgcgatcaatgcaaatcctgataatattgcctctatcatcattgagccaattcaaggtgaaggtggtgataaccattttagatgtgagtttatgcaagctctaagagatattgctgatgagaatgatattattctcatttatgatgaagttcaaactggtgtaggagttaccggaaaaatgtgggctcatcagcacttttctactgccatctgtacaagtaattgtaattgtggagatggtctttctgctaaacctgacatcatttcgtttggtaaaaaaacacaggtttgtggtgtggctgctagcaccaggtttgatgaggttgaaggcaatgtttttcgtgagtcatctcgtataaattctacatggggtggaagtttggtcgatatggtaagattaacaatttatctagagcttattgaaaaagaaaatcttgtagataaagctgcacaaacaggtttattcttacaacagagcttgcacgatcttcaaaatgaattcccttctctagtttcaaatgccagaggaaaaggactatactgtgcttttgatcttccttcaagtgaagatagagataaattagctaatctattacttgatgaaggatctattttgttaggttcaggaaattattctattagatttaggcctcatttaaatgttaccgaagatgatatccaatttcggtatggactgttttag

SEQ ID NO: 245358 - DNA, 1201 bp, Unknown
  Bacterial polypeptide expressing nucleotide sequence isolated from the Sargasso Sea
atgttcgagaccctccagcaggcgccgcctgatccaatacttggtctgacgacggcgtttaacgaagactccaatccaaacaagatcaacttgggtgtgggagtatataaagacgcagaagggaacacgccggtctttgcttccgtaaagacagcggagcagaggatcctcgcgtcagaggatacgaagaactacctcacgatcggtggcgatgctgactacgcagatgccgttcagcatctgcttttcggagcggatcacgagatagtcacctccaaacgagcgataacggtgcagacaccaggtggtacgggcgcactccgagtcgccggtgacttcattcaccagctgttttcttctgcgacgctctggctgagtgacccgacctgggcgaaccacccgaaggtcttcggcgcggccggggttcggattaatacttatccgtactacgacacggagaagaatgagctcgatttcgacgctttcctgaaagcgctcggcgaggtgcctgcgggagatgtggttctgcttcacggatgctgtcacaacccgaccggaatggatccgacgccggagcagtggtcggagatcgctcacgtcgtcgaacgacagaaacttatcccactcgtcgatttcgcgtatcagggtttaggagacggtctggatgcagacggaagagggctgcaggctcttacggcgactgggtgcgagatgtttgtcgcgagttctttctcaaagaacttcggcctgtatcgcgaacgaatcggtgccttgacgcttgtgacacccgatcaggatgctgccaaggtggctcagagtcacgtgctgatcacgatccgcacgaactactcgaacccgccggctcatggttcctcgatcgtgaccgaggttctgaaggacccagatctgcgtgcgcagtgggacaacgaggttacggagatgcgtgaccggatcaacgggatgcgtcggcttcttgtcgatacgctcgatcgtaaaggtgtcaaacgtgacttctcctttatcgcaaggcagcgtggaatgttctcgttttccggcctgactccggagcaggttgacgcgcttagggagaagcattcgatctacgtcgtgaagacgggcgggcgcatcaatgttgccgggattcgcgaagaaaacatcgactacctctgtgagagtattgcggacgtcttgtcgacttgac

SEQ ID NO: 245359 - DNA, 1354 bp, Unknown
  Bacterial polypeptide expressing nucleotide sequence isolated from the Sargasso Sea
tatgaagatagaatttggagaagcgaggaagaccatcgggcagcatatgcttgcagatggcatgaatccggtcatagacctagaaaagagccatggttcatggttggtagatggtagtagtggaaaggaataccttgatcttttttcaatgtatgcgtcaatgtctgtcggatataatcatccttatgttcttgaaaataaagagcgcctgacaaaagcatccattaataagcctgcaaattctgatatatattcacctgaaatggcagcatttgtggaaacagtatctagagtttcgcagccaggatatcttccttatgctttctacattgaaggtggcgcacttgcggtagaaaatgcattaaaagcggcttttgattggaaagccagaaaaaacttaagtaaaggaaagaaaatacctaagaatctagttgtccatttaaaggattgtttccatggtcgcacagggtatacgatgtctctcacagattctccagacccaagaaaggttcaatattttcctaagtttgattggccaagaatatccaatcctgccatgatctttccagtcaatgaagagaacacaaatgctgtaattaaattggaaaaaagatctattgaggaactaaaaactgttcttcatgataatccggatgatgtagcctgcttaatactagagcctatccaaggcgaaggaggagataatcattttcgttcagagtactttaaagcgctaaagaccttatctttggaaaacgatttcttattgatctacgatgaagtacagactggtgttggtatcacgggtgaaatgtgggcccatcaacatttttgcatgccggaatgtgaaaacggttgtcaggttcattgtaagggaatcgaaccggatataattagctttggtaaaaagacacagtgctgtggaatatttgctggaaataggttgaatgaggttgacgatcacgttttcaaagaatcaagcaggatcaattctacatttggtggaaatttagtagatatggtaagatttactatatatctggaattgatagagaaagatgagcttgtgggtgctgcatcagctaatggtgaatatctactgggctgcttattggatcttcagaataaatatggtgatcttatgagtaactcgaggggaaaagggttattctgtgcatttgaccttccatcaccggaacaacgagataagtttattacggaaatggaagaacttggtgttcttattctaggttgtggtcacagatctattcgttttcgaccccatttaaatataacaaagggtgatatagatattggtatatccatgataggaaatgctctgtctcaactataa

SEQ ID NO: 245360 - DNA, 1228 bp, Unknown
  Bacterial polypeptide expressing nucleotide sequence isolated from the Sargasso Sea
aggaggacaatacatcttggcatagatgttttttgtaaaaaaaatactaaagttttttgtccctactatggtgaagtagttttagtggataattgccaagaaagacttgattatggtggatttatagtcctaaaacattttactaataataaatcttgtttcttttccctttttggtcatttggatcctaaatctataaatttaaaagtaggacaaagggttaaaaaagggaaaaaaatcggaaaaataggaaataataaagtaaatggtggatgggagccacatttgcacattcaactttccttaggtttgggacaagggaagaattggcctggtgtatgtaatgctaaagaattaaaattttgggaaaaatattgtccaaatcctgccccttttttaggtataaatccaaaaaaaattagatatgagagtatagaaaaaaaaacattagttcaaaatcgtaaaaaccattattcaggaaatttaaaaattagctataaaaaaccattaacaattatcagaggttataaaaactatttatttgatgaaactgggaattgttttttagattgttataataatgttcctcacgtaggtcattctcatcctagaatagcaaaattagtttataatcaattaaaattagtaaattctaatactagatatttacatccaattcaaaaagtcatatcagaaaatatattatctagatttccaaaaaaatttagtgctttataccttgtaaattctggatctgaagcaaatgaactagcacttcgtcttgcaaaaacttacacaaaatctgaagattttattacttttgatcatggatatcatggtaacacgaatggtgttttggaagtttcgccatataaattcaataaaccaagtggaattggtagaaaaccatgggtccatttaatggactgtcctgatccatttagaggagttgatccaagatatcaaattgatgagatattaaataaattggtttcaaaaaaaagagggatagcaggttttatttcggaaatctttccaagtgttgctggtcaaataatacctcaaaatggtgtaacgagctatatttacaaaaaagtaaaaaaagctgggggactttgtattgctgatgaagttcaaactggtttgggtcgattgggggaattttactttggatatgaacagcaaaaagttgatccagacatagtagttctaggtaaacccataggca

SEQ ID NO: 245361 - DNA, 1219 bp, Unknown
  Bacterial polypeptide expressing nucleotide sequence isolated from the Sargasso Sea
atgagtataaattttaaagatgcaagaaatgttatcgatcagcatatgctggctgatggtatgtctcctgttattgaccttgaaagaagtcatggttcgtggttggttgatggagtaactggaaaagaatatcttgatctattttccatgtatgcgtcgatgtctgttggctacaaccatccttatgtattggataatatagaccgattaactagagcagcagtaaataaacctgccaactcagatatatattctccccaaatggcagaatttgtagatactgtgggccgattagcgcaaccctcatatcttccctattcattttttattgagggtggggggttagctgttgaaaatgcgctaaaaacagcttttgattggaaagctaagaagaatatgtcccaaggtaaaaactctcctaagaatctcgtaattcacctcaaggattgttttcatggaagaacaggctacactatgtcgttaactgactcacctgatccaaggaaggtccagtattttcctaaatttaattggccacgagtccttaatccgtctatcaaattccctctagatgaaaaaagtattgatgaggttataacattagaggaaaaatcgttatctcaaattaagaaggttctattggataatcctgatgatgtagcatgtatgattctagaaccaattcagggtgaaggaggtgataatcatttcagggcagaatattttaagcagattaaacagctttcgctagaaaacaactttcttctcatctacgatgaagttcaaacaggaataggtattacaggcaagatgtgggcacatcagcacttttgtgagactaattgtatactagagtgtatatctcattgtaaatcgatggaacctgatattgtaagttttggaaaaaagactcagtgctgtggtatttttgctggaaaaagattagatgagatagatgaccatgtttttagagagtccagcagaattaattctacatttggtgggaatttagttgatatggtcagatttaccatttatcttgagctaatggaaaatgaaaacctagttgatttggcttctaaaaatggttcctatctactctcttctttagcttctcttcaaaatgaagagaccaacttggttacaaatgttcgtggcaagggattattttgcgcatttgatcttccctctaacgaatttcgggataaattgatatcta

SEQ ID NO: 245362 - DNA, 1171 bp, Unknown
  Bacterial polypeptide expressing nucleotide sequence isolated from the Sargasso Sea
atgagctctattcttggtacatacgcaaggaaacctattgcttttaaagagggtaaaggaagctatctttttgcagaaaatggtgaaaagcatcttgattttgttcaaggtataggaactaatattttaggtcattgtcatgaacatttggtgaaaactatacaagagcaggctaaaaaattatggcatgtttcaaatgctttcatgattccagaacaagaaaaactggccaaaagattaacagaaaatacttttgctgattttgtttgttttcaaaattcaggtacagaatccacagaagcaagtataaaaattgctagaaaatattttcacaaaattggtaaaccagaaaaaaatagaattatcacatttcaaggagccttccacggaagaactttggcagctttatttgctgcaaacaactctaaacataccgaaggttttggtcccaaggtggatggttttgaccaagtttcttttgctgatcatgaggctgtaaaaaaagccatcaatgataaaactgcagcaattatgatagaaacaattatgggggaaggtggaattaaagttgtaccagatttttgcataaaaggactaagagaaatatgtgatgaaaataatatacttttaatattagacgaagtgcagtgcgcttatagaacaggcaatttttttgcttttgaaagttcaggaataaaaccagatattgttccaatcgctaaaggcattggaggtggatttccacttggagcttgtttagtttcaaaaaaagtatcgataggaatgacacctggaactcacggaagtacttttgggggaaacccattagctatgtctgtaggaaacgctgtgctagatattattttagaaaaaggttttttaaataatgtaaaaaaaaaaggtaaatattttgatcaagctttgaatggaataaaaaacaaataccctaaaataataagtgagataagaggggtaggtttaataaaaggaataaagctattagtagataatgttgaatttattaataaacttatgaaccacaaaatgctcaccgtaaaagctgaagagaacgtaataagactttttcctccacttatagtgagtaacgaagaaatagatgaggcgattagcaaaatagaaaaagtttgtgatgagatgagtaaaaaatgaa

SEQ ID NO: 245363 - DNA, 697 bp, Unknown
  Bacterial polypeptide expressing nucleotide sequence isolated from the Sargasso Sea
atagaagaactaaaatctattctatataataatgcagatgatgtagcctgcttgattttggagcctattcagggtgaaggaggagataatcattttcgcacagaatatttgtcaaaattaaaagagctatctctagaaaatgactttttacttatttttgatgaggttcaaactggggtaggtattacaggaaaaatgtgggctcatgaacattctaatgttacacctgatcttatgagttttggtaaaaagacacagtgttgtggtatgtttgctggtaacaggcttaatgaggttgacgatcatgtgttcaaagaatcaagcaggatcaattctacatttggtggaaatttagtagatatggtaagatttacgatatatctggaattgatagagaaagatgagctagtatctgctgcatcggttaatggtgaatatctcatgggctgcttattggatcttcagaataaatatggtgatcttatgagcaactcaaggggaaaagggttattctgtgcatttgaccttccatcaccggaacaacgagataagcttattacagaaatggaagaacttggtgtgattattctgggttgcggtcaccgatccattcgttttcgaccccatttaaatataacaaagggtgatatagatattggtatatccatgataggaaatgctctgtctcaactataat

SEQ ID NO: 245364 - DNA, 1009 bp, Unknown
  Bacterial polypeptide expressing nucleotide sequence isolated from the Sargasso Sea
ccgtgttttaccgttgcgccttatgagctctatgttacattagcacgtagactgtctcagcttgttcccatatctgctgaatgtaaagctgcattttttaattcaggcgcagaggcggttgagaatgcagtgaaaatatctaaatcatttaccggtagaaatagtgtactggtattttcgcatgcttttcatggtaggacacaaatgaccatgtcaatgacatataaagaagacccatataaaaaagggtttggtccttttatctcgaatattcaccgtgttgaattcccagaaaaggaattggaccttaagagcctagagatcgatccgcgatcaattgcctgtgcagttattgaacctgttgctggtgaaggtggattcatgcctgtttcatttgatgccatgcgtcagctaagagacttttgtgatgagcatgatattattatggtggcagatgaggttcagacagggtttggtagaacgggtagcctttttgccatgagtcaatttggtgtggaacctgatatgttcacgttagcaaaatccattgcaggaggtctgccattgagcggtgttgttgggagatcggatataatggattcagttcatgtaggtggcataggaggtacattcggtggtaacccggtcgcctgtgcagcagcacttgctgttttagatattatggaaaatgaaaaacttccgcagcgtgcaatagaaattggagagaagatccgtacaatggttgagggggtcatgagctcgtctccatggatcagtgaggtaagaggcttgggtgctatgcaggggatcgtgatcactgataagaataatggcccggataagaaacatacatcccgcatatatcaaaatgcaatgaagaatggattaatgatgattactgcaggaacttatggtaatgttattcgtactttgatgccattaactataaagaatgatgagctggaccaaagcctggaaatactctcaaatgctttaagagtgccctaaa

SEQ ID NO: 245365 - DNA, 706 bp, Unknown
  Bacterial polypeptide expressing nucleotide sequence isolated from the Sargasso Sea
ggagatattgaaaaaataagagaaacagtaactgatcaaactgcatttgtgattttagaaccaattcaaggagaaagtggaattcatgttgcgcctgatggatttttacaagatgttaggaaattatgtgatgaaaaaggaattttactaatttttgatgaaattcaagcaggattaggacgtacaggaaagatgtgggcccatcaacattgggaaacagaaccagacatactttgtttagcaaaaggcattgcaggaggggtaccaatgggcgctacattagttagaccagatattttagcatgcatttcaaaaggagaacattcatcaacatttggaggaaatccactatcttgcgcagcaggagctgctacaatgcaggctttaacacaagacaaacttgtggagaattctgcaaatatgggaaaattattcagacaaggtttagagcaattaaaagaaaaacattcagtgattagagagattagaggaaaaggattgatgattggagtggagttgaaatttgaggttagagatatcctaatggaaggaattgaaaaaggactacttttactatattctggaagaaatatcctaagattactacctccactagtcataactgaagaagatgtaacaaaatctttagaaatacttgacgtattattcacaaatgaggagaacagaagaaatgctcaaggataag

SEQ ID NO: 245366 - DNA, 678 bp, Unknown
  Bacterial polypeptide expressing nucleotide sequence isolated from the Sargasso Sea
atgccatcactaaaaatactgcggcggtcttatttgagcccattcaaggtgaaggtggaatcatagagcctcctgaaaattggttgccagatatacgagagatttgcgatagaaacaatgtattaatgatcttagatgaagttcaatctggtcttggtagaactggaaagctatttgcatatgaacatgccaatattaggccagatggtttgatattaggaaaagcgctcggtggtggattcatgccggtttcagtatttctctcttcagaagaagtgcttcaatggatgaatcctggatctcatggctctacatttggtggaaaccctctgggttcagcgatagcaaaaagatcattggaactgctcgaagaggagggcttgattgaaaacagtcgtgtcatgggagattatttcaaacaatctctgttagaacttaattctccaatcattaaagagattagaggtaaaggtctatggcttggtgttgagatagatcaaagctacatcactggaaaggatctctcgaagcttttgctcaaaaaaggaatcttgtgcaaagaaacccgtgacacaacgattcgattcgcaccaccactgatcatcaataaagacgagatcgattggggtgtcgaaatcattggtagtgcgtttaaggccattgaagaaaaggcctgat

SEQ ID NO: 245367 - DNA, 748 bp, Unknown
  Bacterial polypeptide expressing nucleotide sequence isolated from the Sargasso Sea
aaataagaagtattctgaaaactatggacctttactttcaggttttaaaaaggttgaatttaataatattacaaaacttaaatcggcaataagtaaaaaaactgctggaatattaattgagccaattcaaggtgagggaggaattcgacctgcagatttaaaatttttgaaatttattagaaaaatatgtgataaaaaaaatatccttctttttttagatgaggtacaatgtggctttggaagatcaggaaaattattttcatacgaatgggcaaaaataaaacctgatatcatggcagttgctaaaggaattggttccggctttcccttaggagcatgtctttctaacaaaaaagcatgtattgcaatgacaaaaggaagccacggatctacatttggtggaaatcctcttgcgatgagtgtaggattagaagttttaaaaattatatctaataagagttttcttaaaagagttgataagttatcaagatatttttggcaaaaactcaaagatcttgaaaatcaatttgattatatagaggaagtaagaggtgctggtttgttattgggaataaaggttgctaataatcatatagaattttcaaacatacttaaaagtcaaaagttattaaatgttccagctgctgataacaccattagactcgctccaccattaattgttactcacaaagagattgataaatcaattagtattattaaaaaggttttaacaaaatataatgattaa

SEQ ID NO: 245368 - DNA, 742 bp, Unknown
  Bacterial polypeptide expressing nucleotide sequence isolated from the Sargasso Sea
atggctcaagaaattttaaatgatttatcacattatcacctagatctagaaaagaaatacggtgcgcatgattatcatcctttgcctgtagttttagctaaaggagagggtgtttatttgtgggatgttaatggaaaaaagtattatgattttctatcttcttattcagctgtaaatcaaggacattgtcatccaaaattagttgagcttattaaggagcaagctgagattttaactctaacatcaagagcctttcataataacaaacttggtgaatacatggaatacgcaactaagttgtttggttatgatcagttactcccaatgaatactggtgcagaaggagttgaaacatcaataaaaatttcaaggaaatggggttatctaaaaaaaagagtagaagataataaagcaaaaattattgtttgtgataataactttcatggaaggactacgacagtcatctctttttcttcccatgctggttccaaagattattttggtcctcatacacctggatttattcatatccctcataacgatctaaatgcattagaaaatattttagctaaagagaaaaatgttgtttcttttctagtagaaccaattcaaggtgaagctggagtaatcgtccctgatgataattacataaaaggggttagagaactttgtacaaaatataacatactgatgattgctgatgaaattcaaactggacttggtagaactaggttcattgctt

SEQ ID NO: 245369 - DNA, 394 bp, Unknown
  Bacterial polypeptide expressing nucleotide sequence isolated from the Sargasso Sea
ttgatagaaaaaacctcaaaagatttatcacaatttcacctagatctcgaaaagaaatatggtgcccacgattaccatccacttccagttgttttagaaaagggtgagggtgtatttatgtgggatgtaaatggaaaaaagtattatgactttctatctgcttattcagctgttaatcaaggtcattgtcatcccgaattagttagtttaataaaaaatcaagcagagacgcttacattaacatcaagagctttccataataataagcttggtgaatatatggagtttgcaacaaagttatttggatttgatcagttacttcccatgaatacaggtgctgaaggtgttgagacttcaattaaattatcaagaaaatggggatacttaaaaaaga

SEQ ID NO: 245370 - DNA, 514 bp, Unknown
  Bacterial polypeptide expressing nucleotide sequence isolated from the Sargasso Sea
tatgggtagaacaggaaaattatttgcatatgaatggtctgaagtaaatccagatattatgacaatagctaaagctattggaaatggttttccattaggtgcatgcctgacatcaaaaaaagttggtgaaaaaatggattttggttcccatggttcaactttcggtggtaatccacttgcttgtacagtcggaaatgctgttttagatataatgctaaaagacaaattttttagtgaaattaatgttgttgcaaaaaaactctatgaaggacttcaaaatgtgatttctgattttccaagcgttattgaaaatatcagaggaagaggatttattttagggctaaagtgtaaagttgaaaatgataagtttgttaatctagcaagagaaaaatatattctaactgtaaaagcgtcagacaatgtagtaagacttttgcctccgataaatctttcactaactgaatgcgatgaagcaatagataaaataagagctacttgcagcgagttaaaataa

SEQ ID NO: 245371 - DNA, 833 bp, Unknown
  Bacterial polypeptide expressing nucleotide sequence isolated from the Sargasso Sea
catgtcatcaagtttacaagacaattatataaaaaaagaatccttgtacggagcaaaaaattatgctccgctttctgttgttttaaatagaggtgagggtgcatatctttgggatgttgacggaaataagtatcttgatatggtttctgcatactctgctgtgagccatggtcattctcatccagaactagtcaagacggttcaagatcaagcaaataaattggctataacttctagagcattttatacagaaccttttggagattttttggaacaacttaccaaagttacaggttatgaaaacgttttgacaatgaatactggagctgaggcagttgaaacagcgattaaagctgcaagaagatggggttactccaccaaaggtattaaagaagataaagcagaaattattgttgcagatggaaattttcacggaagaactaccactatagttggcttttcgtctgaggactcttataaagatggttttggaccttttggtggaggttttgtggaggctaagtattgttgttctgaatgtagcgctgaagaatcacttaaatcttttaaaagtaaaattaataaaaatacctgtgcaattttaattgagcctattcaaggtgaagctggaattagagttcctgaagaaggttggttaaaaatgataagagatttatgtgatgaaaataatgttttacttatactcgatgaaattcaatctgggttaggtcgtacaggaaagctttttgcctatgaacacgaaaatattaaacctgatggtttaattcttggcaaagcgcttggaggggcgatgcttcccatctcagcctttt

SEQ ID NO: 245372 - DNA, 805 bp, Unknown
  Bacterial polypeptide expressing nucleotide sequence isolated from the Sargasso Sea
tttgtgcgaaggagcttttccggccggactttaaccactctctctgctggggacagcgaaaaatacagggagggttttgggccccgtcccggaggcttccaccatgtagcttttggaaatttaaatgaaatgagggctgctatgtccgctaaaactgcagctatattggtggagccaatacagggagaaggcggcataaatcccgcatcaactgcctacctaagagcactacgcgatattgccgatgaattcaacgcactactaatttttgatgaggtccagtgtggaatgggccgggcaggaaaattgtttgcctatgagctggcagatgtaacacccgatataatgggcctagcaaaaggaattggtggaggatttcccgttggtgccgttcttgcaacagaaaaggccgcttccggtatgatgccaggaacccacggatctacatatggtggcaatcctctggctatggcggctgcgaacgccgttctagatgtaataaatgaaccagatttcctctcctcaatcataaagaaaggaaacaagctgagggatgacctcacatcattagttgaaaagcacccttcagttttagaatcagtccgcggcgttgggttgatgctgggcgtaaaaagcattggccctaatctcgagttaatgacagcccttcgggagaataaactactcacagttgtagctggcgaaaatatagtcagaatcttgcctcctcttaatgtaagcgaagacgaattagacgaagctgtgcagaagatagaccaggtatgcaacaaaataactggttaga

SEQ ID NO: 245373 - DNA, 271 bp, Unknown
  Bacterial polypeptide expressing nucleotide sequence isolated from the Sargasso Sea
attgataacaaaaacctcaaaagatttagccaaatttcatctagatttagaaaaaaattatggtgctcacgattatcatccattacccgttgttcttgaaaaaggagagggtgtatttatgtgggatgtaaacggaaaaaaatattatgattttttgtcagcatactctgctgttaatcaaggtcattgtcaccctaagctcgttgatctaattaaaaatcaagctgaaacattaactctaacatcaagagcttttcataataataaattg

SEQ ID NO: 245374 - DNA, 994 bp, Unknown
  Bacterial polypeptide expressing nucleotide sequence isolated from the Sargasso Sea
tatggtgtctgcatattcagctgtaagtcatggacattctcatccagagctaattaaaactattaaggatcagtctgaaaagttagcaataacatcaagagcattttatacagaaccctatgcagattttcttgagttattaacaaagttatctggttttgaaagtgtattaacaatgaatactggtgctgaagcggttgaaaccgcaataaaagctgctcgaagatggggttattttagtaaaggcatttccaaggataaagctgagataattgttgcagacggaaattttcatggaagaactacaacgattgtaggtttttcatcagaggaatcatacaaaaaaggttttgggccttttgcaaatggattcgttacagcaaagttttgttggtcaggctgtaatttaactgaatcaattaaatcctttgcaaacaaaatcaataaaaacacttgtgcaattcttgttgaaccaattcaaggtgaagctggtataagagtccccgacaagggttggttaaaagaacttagaaaattatgtgataaagaaaatattcttttaattttagatgaaattcaatctggtcttgggagaactggtaaattgtttgcatttcagcacgaagatattattcctgatggattaattttaggaaaagctcttggcggtgcaatgatgcctatttctgcttttttaagctcaaaggaaataatgaatcattttaattctggatcccatggttcaacttttggaggaaatcctctggcatcaaaaattgcaacaagagcactacagcttttatatcaggattttttaatagaaaacagtaataatttaggaagttatttcaaggaatcacttcaggctattgataataagattatcaaggaggtcaggggaatgggggtatggattggaatggagttaaatgaatcaaaaattaatgcaaaagactttatgtttattattgttgaacgaaagacttctttgcaa

SEQ ID NO: 245375 - DNA, 963 bp, Unknown
  Bacterial polypeptide expressing nucleotide sequence isolated from the Sargasso Sea
tctgcttactcagcagtaagccatggacattcgcatccagaattaattaaaactcttaagaatcaatcatcaaaactagcaattacttcgagagctttttatacagaaccttttgcaaactttttagaaaaattatcaaatatttctggttatgagtcagttctaaccatgaatactggagctgaagcagttgagactgctataaaagcagcaagaagatggggttatttttcaaaaggaatccctgaggataaggcagaaattattgttgcaaatggaaattttcatggaagaacaaccaccattgttagtttttcctcagatttgtcatataaagatggttttggtccttttacaccagggtttaaaaatgcagattattgtggttcatgtgaatgtggatccatagaaagctgctcatcaattaaatcttttgaaaaaaaaattaataaaaatacatgcgctattttagtagagcctatccaaggagaagctgggataagggtgcctagtgagggatggctgaaagaactaagagaattatgtacagcaaaaaatattcttctgatcttagatgaaattcaatcaggtttgggtagaactggaaaactctttgcatatgagcacgaagatataattcctgatggtctaattcttggcaaagcactaggtggagcacttttaccaatatctgctttcttaagttcaaaagatgtgatgcaacattttaatcctgggtcacatggctcgacttttggaggcaatcctttggcctcaaaggttgctgccaaggctattgatttattatttgaagataaattaatcgaaaacagtaaaaagatgggcgattattttttatctaaattaaaacaaatagactctaaagctattaaagaagtccgaggaaaaggtttatggattgggatggagttaaataaatcagatataaatgcgaaagaattt

SEQ ID NO: 245376 - DNA, 886 bp, Unknown
  Bacterial polypeptide expressing nucleotide sequence isolated from the Sargasso Sea
ttatgggatgtagatggaaaaaggtattatgattttttgtcttcttattctgcagtaaatcaaggacattgtcacgatgaaataatagatgagttagttaaacaatcaaaaaccctgacattaacctctagagccttccataataataaacttggtgaatacatgaagtacgcatcaaatttatttggatttgagaggttgttaccaatgaatacgggggctgaagctgtcgaaacagctataaaagtttccaggaaatggggtcacacaattaaaagaataccatcgaatagtgctcaaattattgtttgcaaaaataattttcatggaagaacaacatccataatctcattctcttcagatgaatcatcaaaaaatcattttggcccacacaccccaggctttattgaaattgaatataataatattaaaagtctaaatttagaattaaaaaataatcccaatgttgctggttttttgattgagccaattcaaggtgaggcgggagtaaatgtacctgatttaaattatttgactgaagccaagaaattatgtcaaaaatataatgttttatttatcgtagatgagattcaaacaggtattggaagaactggttcattgttagcatcatgtggaaattgctcatgtgataataaatgtgaaagacaaaaaaactcatacataagaccagatattttaatactcggaaaagctctcagtggaggcacatatccagtttctgcaattttatgtgacagtgaaataatggatgtaattaaaccagggcaacatggaagtacgtttgggggaaaccctcttggatctgcaatggcaaaaagagccttagaggtgattatcgaagaaaaattaatcaaaactcaaggga

SEQ ID NO: 245377 - DNA, 692 bp, Unknown
  Bacterial polypeptide expressing nucleotide sequence isolated from the Sargasso Sea
gatttttggtgatttggataaagttaaagaagaaatttctgaagatacagcagcaattttaattgaacctcttcagggagaaggtggagtaatagaagccccaatagaatttattaagggaataagaaagttatgtgatgaaaataatattcttttaatttttgatgaagttcagtgtggaataggaagaacaggaaaaatgttcgcacatcaatggttagatgtagtacctgatataatgactgttgcaaaggcaataggtaatggttttccgcttggcgcatgcttaacaactgaaaaagcgggttcgacaatgaattttggctctcatggatcaacttttggcggaaatccattagcatcagcagttggaaatgctgttttggacattatgctcgaaaaggatttttttcttaatgttaaagaagtctcacaaaatttattttctggattgcaagaaattagtcaagagtttcctagtgtaatagaattggttagaggtcgaggtctaatgataggaataaaatgcaaaattaaaaacacagattttgtagaaaaggctagagtaaataaactattaacagtcaaggcatccgataacgtggttagactactccccccacttattttaaattctaatgagtgtgaagaaggcctatcaaaaattaggtctacttgtgagatgttttaga

SEQ ID NO: 245378 - DNA, 829 bp, Unknown
  Bacterial polypeptide expressing nucleotide sequence isolated from the Sargasso Sea
aaaaaatatttagattttctatcatcttattctgcagttaatcaaggacattgtaatagtaaaattttaaggtcatttactagacaagcaaggagattaacgcttacctcaagagctttttacaacagtgaacttggagattcacttgaatacataactaaaacttttggctatgataaaatgcttccaatgaattctggggcagaagctgttgaaagtgcaatcaaaatatgtagaaaatgggggcacgaagtaaaaggaataaaaaaagatgttgccaaaataattacttgcaatggcaattttcatggaaggacaacaacaatcatttcattttcatctagcaaaggaagtaaagaaaattttggtccactaacacctggatttgaaataatagattataataacatcaaacaacttgaagatgttcttaaaaaagacaagaatattgcaggttttttagtagaaccaattcaaggtgaaggaggtgtagttgtaccagatgatggatatctgtccaaagcaaaaaaattgtgtgaaaaatataatgttttgtttattgcagatgaaattcaaactggcataggaagaaccggaaagctacttgctagctggcatgaagatattattcctgatatagttatacttggaaaagccttatctgctggtttttatcctgtttcaggagtattaacatcaaaagagattatgaatgtaatgcaagttggatcacacgggtctacttttggtggaaatcctcttgcaggagtggttgcaaaagcttcaattaagtatactttggactataagctttcagaaaatgcagaaa

SEQ ID NO: 245379 - DNA, 490 bp, Unknown
  Bacterial polypeptide expressing nucleotide sequence isolated from the Sargasso Sea
ggactattttgagtttcttgaccacaatattgctccagacgttgtaactactgccaagggtcttggaaatggcatgcctataggagtctgtttggcccgaggagaggctgcaggcttgtttgagcctggaaatcacggatcaacctttggtggcaatcccttggcgtgtgccgctgcgcttgcagttatcgacaccatcgaacaagaatcgctttgtagcagagctagaatactcggggataggattctgagcggtttcaataagagtttaactggcaataatcaagtcaaagagattcgtggtaaagggctcatgctagctatcgaactgaatgaggatgctcccaatctcgtcaatgatgctttggaagctggtattttgatcaatgtagctcaaggtaatgtaatcagattgctaccgcccctcaccctgaccgacgaagaagctgattcgatcgtagaatcggtcagcaatctaatttcagattaa

SEQ ID NO: 245380 - DNA, 758 bp, Unknown
  Bacterial polypeptide expressing nucleotide sequence isolated from the Sargasso Sea
agatggggatattttacaaaaggaattccagagaataaagctgaaataattgttgctgatggtaattttcatggaagaacaacaacgattgttagtttttcttcggattcttcatataaagatggctttggtcctttcacgccaggatttgagagcgcaaattattgtggatcgtgcgattgtggatttataaataactgtatatcaatagagtcttttgaaagaaaaattaataaaaatacatgtgctattttagtggaaccaattcaaggcgaggcgggtataagagtaccaaaagatggatggcttaaagagttaagaaaactatgcacagaaaaaaatattcttttaattttagatgaaattcaatcggggttaggtagaacagggaaattatttgcatatcagcatgaaaatatcatcccagatggtttgatattaggtaaagcactcggtggggcaatgatgccaatatcagcatttttgagttctaaagaaattatgaaccactttaatgctggctcacatggttcaacattcggcggaaatccccttgcttctaaagtagcaactaaagcattagagctattgtatgcagataacttaattgaaaatagcgataagttagggcgttactttaaatcacaactccaatctattgatagtagtattatcaatgaagtcagaggcaaaggcttatggataggcatggagttaaatgaatccaaggtcaatgcaaaagatttatgtttattatt

SEQ ID NO: 245381 - DNA, 603 bp, Unknown
  Bacterial polypeptide expressing nucleotide sequence isolated from the Sargasso Sea
ttattcctgaagattgtttaaaaggattaagaaaattgtgcgatgagagaaatatattactaattttagatgaagtgcaatgtggtttaggaagaactgggaaactatttgcttttgaatgggcaaaaataaaaccagacattgtcccaatagctaagggaattggcgggggatttcctttaggtgcttgtttaatgaacaaaaaaactgcaagcaccatgactcctggttcacatggatccacttttggaggaaatccgcttgcaatgtcgattgcctcagttgttttagattatgtattaagtaaagattttttaaaaaatgttacaaaagttggaaattatctaaagaacaagttggaagaagaggtcatccaaaaatatccaactctagtttcaggtataagaggaaaaggtttaatgctgggtattgagtcaaaaattaaaaatgaaattttaatcaaggaaatgattaatcaaaaactactcacagttaaagcaagccaaaatattataagaattttacctccattaattcttgaggaaaagcatgttgatgaagcaatatcaaaaattaataaagcatttaggaacttaaaatgac

SEQ ID NO: 245382 - DNA, 853 bp, Unknown
  Bacterial polypeptide expressing nucleotide sequence isolated from the Sargasso Sea
agagggtgcatatctctgggatgttgatggaaataaatacttagatatggtttcggcatactctgcagtgagtcatggccattcgcatccagaattattgaagactcttcatgaacagtcttcaaagcttgcagttacatcgagagctttttatacagaacctttttcaacatttttagagaaactatcaaaggtgtctggttttgaatctattttaacaatgaatactggtgctgaagctgttgaaacagcgattaaagctgcaagaagatggggttacttttcaaaaggaattcctgaggataaggcagagattattgtagctaatggcaacttccatggaagaacaactacaatagttagcttttcttcggatgcttcctataaagatggttttggtccattcactccaggatttaacagcgctgaatactgtggatcctgtgactgtcaatcaattgatagctgcttatcgatagagtcatttgaaaaaaaaatcaataaaaatacatgtgctattttagttgagcctatccaaggagaagctggaataagagtacccactgatggatggttaaaacaacttcgtgctttatgcacctctagaaatattcttctaattttagatgaaattcaatcaggactcggaagaaccggaaagctttttgcctatgaacatgaaaatatcaaacctgatggattgattcttggaaaagcgctcggaggagcactactccctatttctgccttcctgagttcaaaagagattatgagtcattttaatccaggatcgcatggttctacttttggaggaaatccattggcttcaaagattgccataaaagcgattgat

SEQ ID NO: 245383 - DNA, 883 bp, Unknown
  Bacterial polypeptide expressing nucleotide sequence isolated from the Sargasso Sea
gatatgatgtcaggctattcagctgtgagtcatggacatgcacatccagaattgctacgagtctttcatgaacaatctagcaaattatccctcacatcaagagcattttatactgatactttaggaccatatctagaaaaaattacaaaaatgagtggatttgagatgtgcttacccatgaactctggtgctgaagcagttgaaacagcaataaaatcttcaagaagatgggcttatagaactaaaaaagtagaacctgaaaaagctgaaattgttgtagctgaaggaaacttccacggtaggactacaacaataattagcttttcaactgatgaaaattctagacatgactttggtcctcatacaccaggttttgtcactgtaaagtatggatgctcaaaatcattagaatcagcaataaataaaaatacagctgcagtactaattgaaccaatacaaggagaggcaggaatagtagttccacctgaaaattacttacctgaagttagagatatatgttcaaaacataatgtcttgatgattcttgatgagattcaatctggactaggtagaacaggcaaactttttgcttatcaacattgcaatatacagcctgatggattgatattaggtaaagcactaggtggtggctttatgcctgtgtcgtgctttttgtcttcgaaagaagtattacattggatgaatcctggatcccatggttcaacctttggaggaaatccgcttgctgctgctatagcaaaacgatctattgaattactcgaagaagatggccttattgaaaatagcagaataatgggtgactactttaaggaatcattattgaatttaaactctaaaattattaaagagatacgaggaaaag

SEQ ID NO: 245384 - DNA, 640 bp, Unknown
  Bacterial polypeptide expressing nucleotide sequence isolated from the Sargasso Sea
gatgctcgagccaattcaaggagaaggtggaataaacattagtaataatgatttcttaaaaaaagtgcgtaaactttgcacatctaacaaatggctactaatttttgatgaggtacagtgcggaatcggtcgaacagggaattggtttgcatttcaaaaagcggggataaaaccagacgtacttactctcgcaaaaggattaggttcaggcataccaatcggcgctttactggtaaaaggatcatacgccgatatacttggtcccggagaccatggttcaacatttggtggtaatcctttagcgatgcgggcaggattaaccacccttgatgtaatacaagaagagaagctcctcgaaaatgcaagaaatagaggaaatcaaattctcaaacgcttaaaatacgagctgagaaattatcctaatattttaagcattcgcgggattggtcttatgataggtatacaattaaaagtagagtgtagccagattacaaagattgctttggacaatgggttattggttaatgtcactaattctaatgtaattaggctactacctccgctcataattagtcaaagagaggttgaaattctgctatccaagctgattttgtctattaagacgttctttgaaaaatga

SEQ ID NO: 245385 - DNA, 850 bp, Unknown
  Bacterial polypeptide expressing nucleotide sequence isolated from the Sargasso Sea
tatcggactaagaatgtagaatcaaataaagcagagattattgttgctgatggcaattttcatggcagaacaacaacaattattagcttctctagtgattcaaattctaaagatgattttggtccacatacacctggttttgtttcagttgaatatggttcatcagaagcaattgaaaaagctataaatgaaaatacagctgcagttctcattgaaccaattcaaggagagggtggaattatagtgccacctgaaaattatcttcctgaagtcagagaaatctgcactaaacataatgtgctaatgattatggatgaaatccagtctggtttaggcagaacaggaaaaatgtttgcatttcagcactcaaatattcagcctgatggccttattttgggaaaagctttaggaggaggctttatgcctgtttcctgctttctatcatcaaaagaagtaatgcaatggatgaatccaggttcacatggatcaacatttggaggcaatcctctagcagcagctattgctaaaagatctttggaactactagaagaagagaatctaattgagaacagtagagtaatgggtgatttttttaaagaatctttaattgatatgaatagctctgtaattaaagaagtcagaggcaaaggtttgtggcttggtgtagaaattgatccaaatttcatttcaggcaaagaattatctgagatttttcttaatgaaggtatcttatgtaaagaaactcatgaaaccacaataagatttgctcctccactagtaatcaagaaagaagaagttgaatgggcattagaaataattaagaaagtcttcacccaaatcagtaattaag

SEQ ID NO: 245386 - DNA, 938 bp, Unknown
  Bacterial polypeptide expressing nucleotide sequence isolated from the Sargasso Sea
catgtcatcaagtttacaagacaattatataaaaaaagaaatcttatacggagcaaaaaattatgcaccactttctgttgttttaaacagaggtgagggtgcatatctttgggatgttgatggaaataaatatcttgatatggtttctgcatactctgctgtgagccatggtcattctcatccagaactagtcaagacggttcaagatcaagcaaataaattggctataacttcaagagcattttatacagaaccgtttggagattttttggaacaacttaccaaagttacaggttatgaaaatgttttgacaatgaatactggagctgaggcagttgagacagcgattaaagctgcaagaagatggggttattcctccaaaggtatcaaagaagataaagcagaaataattgttgcagatggaaattttcacggtagaactaccactatagttggcttttcatctgaggattcttataaagatggttttggaccatttggggagggttttgttgaggcaaagtattgttggtctgaatgtaatgctgaagaatcactaaaatcctttaaaagtaaaattaataaaaatacttgcgcaattttaattgaaccaattcaaggtgaagctggaattagagttcccgatgaaggttggttaaagatgataagggatttatgtgacgaaaataatgttttacttatactcgatgaaattcaatctgggctaggtcgaacaggaaagctttttgcctatgagcatgaaaatattaaacctgatggattaattcttggaaaagcacttggtggagcgatgctaccaatctcagcttttttaagttctaaagaagttatgaatcatttcaatgcaggctcacacggatctactttcggaggtaacccacttgctactaaagttgcaagcaaagcgctcaagcttt

SEQ ID NO: 245387 - DNA, 649 bp, Unknown
  Bacterial polypeptide expressing nucleotide sequence isolated from the Sargasso Sea
atgcatgatgaggtagctgcaatcattatagaacctattcagggcgagggtggggacaaccattttccgctagagtttttcaagaacttaagacgtatagcagatgaacgagactctcttcttatctttgatgaagtacaaaccggcttgggactaacaggtaaaatgtgggcttacgaacattttgacgttgtgccagatatgatgtgcttcggaaagaagactcaggtgtgtggattttgttcaactgacagaatagatgaggttaaaaataatgtgttcaacaccagcggtagaattaattctacttggggtggcaatattgtggatatggttagattccaatacataattgaagcaataaaagaacacggcctagttgaaaacgcccgagatgtaggtcagcatcttatttgggagctaaggaaacttccactcatagataacgtgagaggaagaggcttaatgatagcatttgatttgccagatgaacaggctcgtgacaccatgatgtcgctcttacaggaaaacatgctagcgcttaagtgtggaattcgctcaattcgattgagaccacctctaacattttccttagaggatgctaactcagcaaggaattttatctacgaggccatcacaaagctatgaa

SEQ ID NO: 245388 - DNA, 733 bp, Unknown
  Bacterial polypeptide expressing nucleotide sequence isolated from the Sargasso Sea
tatgaaagctccttttaatcctattgttcctaattttgaacatgttccctttggaaaaattgatcctataaaaaataaagacttaaatgaagtagcagctattttaattgaaccaatccaaggagagggtggaatttattctgcttctaaatcatatttaaatgatttaaaaaatttatgtttagagaatgacatactcttaatttttgatgaagttcaatgtggttttggtagaactggagaatggtttgcttctcagtattttgatatcgaaccagatattatctcaattgcaaaggcacaaggaggaggggttccaataggtgctgttatttttaatgacaatttaaaatttgaaaaaaaaatgcatgggagtacttatggaggtaacccattggcatgtgcagttggaatctctgtaatagattttataatagaaaatgatattttaaataatgtaaagaaaatgggagaatattttaaaacagaattaaataatcttttaaatctttatccaaatattttaaaagatgttagaggagttggtttgatgatagctctccaatttaggggccccgctggacctgccttaatgggtttattagataaaggagtgttggctctaacggcaggtaaacctaatttaagattcttacctccttatataattacaaaagatgaaatagattttgcaatttcatcattgaaagaagttcttggtgaggttagttga

SEQ ID NO: 245389 - DNA, 540 bp, Unknown
  Bacterial polypeptide expressing nucleotide sequence isolated from the Sargasso Sea
taattttagatgaaattcaatcagggttgggcagaactggaaaattatttgcatatcaacatgaagatatagttcctgatggtttaatcattgggaaagctcttggtggtgcattattaccgatatcagctttcttgggctcaaaagatttaatgcaacactttaatcctggatcacatggatcaacatttggtggcaacccattagctgctaaagttgcatcaaaagcaatagatctcttattcgaagacaaattaatagaaaatagtaaaaatatgggagactactttatatctaagttaaaacaaattaattctaaaattattaaagaagttcgaggaaaaggattatggattggtatggagctaaatgagtcagaggtcaatgcaaaagacctatgtttgatgcttcttaatgaaggacttttgtgtaaagaaacacacaagacggtcattagattcgcaccacctctaatgatttccaaaaatgatatagattgggcaatagaaaaaattacaaaagtaataacagctatctaag

SEQ ID NO: 245390 - DNA, 685 bp, Unknown
  Bacterial polypeptide expressing nucleotide sequence isolated from the Sargasso Sea
gttgtttgatagaaaaggtgaaataattgcttgttttatggttgaacccattcagggtgaggctggtgttattgtccctgatgatgactacctacctagggtttcagaattatgtaaaaaatataatatacttttatctgtagatgaggtacaaactggatttggaagaactggagcaaattttgctcatcagctatcaggcattgttcctgatattatgggttgtggaaaagcggctggtggaggcattcttccggtctcatttgtagccggacgtaaagatgttataaatgttttaacaccaggcagtgaaggatctacgtttggtgggtatccattagcatctgttgttggaacattcgcaattaaagtcctcattgaagataaattagctttaaatgcaaaagagcaaggagcctatttggtgtctcatttaaattcaattatgaatgattttcctgataaaattaaagaagttagagggaaaggtttgctcacagcttttgagatgcataacgaaccaaaattagatgggcatgcagtctctgtaggtttattaaatcatggtgtatatgcaaaagaaacacaccatactaccgtgcgcatagctccagcattaacaattaataaaaatcaaatagacgctcttgcagaagctattagaaccgtaataaaggatttataa

SEQ ID NO: 245391 - DNA, 643 bp, Unknown
  Bacterial polypeptide expressing nucleotide sequence isolated from the Sargasso Sea
ttattaccatgattttgctgccgttattttggaacctattcaaggagaaggacgagtaattattcctccagatggatatttgaaagcagttagagaagtctgtaatgagaatggcgttcttatgattatggatgaaatccaaaccggaattggaagaacgggctattggtttggatgtgaacatgaagatgttattccagatataatctgttcttctaaaatgcttggaggtggtattcctattggagctatgatagcaagcagcaaaatttcatttcaaagaggtaaacacggtagcacgtttggtggcaacctaattgggtgcgaagcggcgagtgcagttattgactttatgctagctcacaatacattagaacatgttaaaaatgtcggagaaaaagctattaactatttaaaaactcaaactgcaaacataacaaaagttaaggaggtcagaggaaggggttttatgatcggtatagagctctatgaaccagctgttccataccttagagctatttttaatgaaaagatcttagctttgagcgctggaaaaaaaataattaggctcctgccccctcttgtaacaagtgaagatgatttaatggatggtttgaataagataattagggtgttaaaatga

SEQ ID NO: 245392 - DNA, 772 bp, Unknown
  Bacterial polypeptide expressing nucleotide sequence isolated from the Sargasso Sea
taaagatggttttggtccattcactccaggatttaacagcgctgaatactgtggttcctgtgactgtcaatcaattgatagctgcctatcgatagagtcatttgaaaagaaaatcaataaaaatacatgtgccattttagttgagccaatacaaggagaagctggaataagagtacccactgatggatggttaaaacaacttcgtgctttatgcacctctagaaatatccttttaattttagatgaaattcaatcagggcttggaagaactggaaagctttttgcctatgagcatgaaaatattaaacctgatggattgattcttggaaaagctcttggaggagcaatactccctatttctgccttcctgagttcaaaagagattatgaatcattttaatccaggatcgcatggctctacttttggaggaaatccattggcttcaaagattgccataaaagcgattgatcttttgtttgaagaaaagcttatagagaatagtaaaaaaatgggtgaatacttcttaacaagcttaagacaaatagattcaaaaataattaaagaagttcgtggaaagggtctttggataggaatggaactaaataaatcagatgtgaatgcaaaggatttatgtttgatgcttttaaatgaaggtctgttatgtaaagaaactcataaaacagttataagatttgctccacctttaatgatttcaaaagaagatttagattgggcgattaataaaataactaaagtattaagagctatttag

SEQ ID NO: 245393 - DNA, 1177 bp, Unknown
  Bacterial polypeptide expressing nucleotide sequence isolated from the Sargasso Sea
atgcttgaagacgaaatacttggaaatttatatcaaaaacttccagtaactcttgaaaaaggtcttggctctcatgtttgggatattgatggaaatgagtacatagattgtatgggtgcatacggagttgcaattacaggccacagaaatcaacgggtaaacaatgcaatcaaaaaccaaattgataaaattatttcagtccatagttctttttacaataaaactcgtgaaaactttcttgaaactatttcacatgttgctccaaaaaacctttcaaatgtatatcttggaaatagtggaactgaagcaattgaagctgcaattaaattttctagaaaatatactgggaaaaaaggaatgattgccatgaagggctcatatcatggtagaacaatgggttctttatcactaacatttaccccaaaatacaaaaaatcctttgaacccatggtcgaaaatacacaattttctgaatttggcaatattactgatcttgaatctaaaataaattctgagactggattcattatcctagaacctatccaaggggaaagtggaattcatcctgcacctgatggatttcttcaacaagtaagaaaactatgtgatgaaaaaaatattgttcttgtttttgatgaggtacaatgtggcttaggcagaacaggaaaaatgtgggcatgtgaaaattggaatgttgttccagacatattgtgtacctcaaaaggtctagctggaggaattccattcagcgctacactaacaaaacctgaaattttagatagcatggaaaaaggagagcaatcttctacatttggtgggaaccctcttgcatgtgctgcctctgctgcaactttaactgcattaaccgatgacggtttaattgataatgctgcaaaaattggatcattgctttggtctggattagaaaaattaaaaaataaacataaaatcattcgtgaaattcgtggtaaaggtttgatgatagcaatagaatttgagattgatgtaagagaattattacttcatgcaattgaaagacgcataattttcttattttcattgtattctgataaaaatattctacgtttattgccacccttagtcttaactgaaaatgatgtatcagaaattctgtctgtattagatgaaattatcactaatgaagaaaatatctaga

SEQ ID NO: 245394 - DNA, 901 bp, Unknown
  Bacterial polypeptide expressing nucleotide sequence isolated from the Sargasso Sea
gtcttttttactaattcaggagctgaatctattgaatgtggaattaaaataataagaggatatcattcatattacaagactaacaaaacagagattattacttttgatggcgcttttcatggaagaacttatggagcactttctgcacaaaaaaataaaaaatactctaatggttttggccctatgcttagagggtttaaacaaatcgaatttaataatgaaaaaaaattaatatcggcaataaataaaaaaacagctggtattattattgaaccaattcaaggagaaggaggtattcgtcctgccaatctaagttttttaaaattactaagaaaaatctgtaacgaaaagaaaatcttactttttttcgatgaggttcagtgtggatttggaagatcaggtaaattattttcacatgaatgggcaaaaataaaacctgatattatgtctgtagcaaaaggtattggatcgggttttccacttggtgcttgtatgtcaacaaacaaagcatgtgttgcaatgactaaaggtagtcatggatcaacttatggtggtaatccgttagcaatgagtgtaggtttagaagtcttaaaaattatctctaataaaacatttcttacaaaagttgataaaacagcaagatatttctggaaaaatttaaaaaaattagagaattcatcaaatattatttcagaggtaagaggtgcaggacttttattgggaattaaaacaaatattagcaatatagatttttctgaacaacttaaaaaaaataaattactaaatgtacctgctgcagataatacagtaagattggctccaccacttattgtatcttataaagagattgataaatcaattacaataattaagaagagtatgaaagaactatctaaatgaa

SEQ ID NO: 245395 - DNA, 1111 bp, Unknown
  Bacterial polypeptide expressing nucleotide sequence isolated from the Sargasso Sea
aaatatcttgatatggtttctgcttattctgctgtaagtcatgggcattcgcatccagaattagttaaagcaatcaaaaatcaatcagaaaaactcgcgataacatcaagagcattttacacggaaccattcgctaacttcctagaatcattaacaaatatatcaggattcgaatctgtattaacaatgaatactggagctgaagctgttgaaacagcaataaaggctgcaagaaggtggggatatttcactaaaggtatatcagagaataaagctgaaattattgttgcagatgggaattttcatggaagaacaacgaccatagttggcttttcatctgaggagtcatataagaggggttttggaccatttagcaaaggttttgtagaagcaaaattctgctggtctggatgcagtaaagaagaatcaattgaatcatttaaagaaaaaataaacaaaaatacttgtgcaatattggtagaaccaatccaaggtgaggctggaataagggtgccagaaaaaggatggcttcatgagttgagagagttatgtaatgaaaatgatatcttgttaattcttgatgaaattcaatcaggattaggtcgaacaggtaaattatttgcatttcaacatgaggatataattccggatggtctgattcttggcaaagctttaggaggtgccatgatgccaatatcagcttttctaagttcaaaaaatgttatggatcactttaattctggttctcacggttcaacgtttggcggtaatcctttagcttcaaaaatagctacaagagcattagagctattgtatgaagacaatttaattgataacagttgcgagcttggtagttattttaaatcgaagttgagatcaattgataataatattattaaagaagtcagaggcaaaggattgtggattggaatggagcttaataagcacaatttcaatgcaaaagatttatgtttaatgttgttaaatgaagggctgttgtgtaaagaaactcataaatctgtaataaggtttgctcctccgttaatgatcactaaaaaagagattgattgggcaattgaaaaaattacaaaagttatttcttcaatttgat

SEQ ID NO: 245396 - DNA, 838 bp, Unknown
  Bacterial polypeptide expressing nucleotide sequence isolated from the Sargasso Sea
ttgaataatcaatattttatagagcttgaaaaagaaaacggggcccatgattacaatcctttaccagttgttttgtcaaaaggtaaaggagtttttctttgggatgttaatggtaaaaaatattatgattttttatctgcttattctgcagtaaatcaagggcattgtcaccctaaaataattaaagtattaaaagatcaagcctctaaacttacattgacatcaagagcttttcataatgacaaattaggagaatatatggaattcactactcagctttttggttatgaaagattacttccaatgaatactggggcagaaggtgtagaaacagctattaaaatagtgagaaagtggggtcacacaatcaaaggaattcctgatcattctgcaaaaattgtagtttgtgatggtaatttccatggtaggacatcaactattatttctttctctggtgataagggatctaaagaattttttgggccacatactaaaggattttataatgttccttttgatgatcttaattctcttgaagaggtctttaatcaggataaaaatattgcaggatttttggttgaacctattcagggtgaagcaggagttgttgttcctaaagagggatatttagaaggagttaggaaactttgtacaaaacacaacattctttttgttgccgatgagattcaaacaggattagggcgaacaggtaaattgttagcaacccaatatgaagactcaaaaccagatattttaattcttggcaaagcactttctggaggaacaattcctgtatcagctgttctttgtaattcagaaaataatggatgtaattaaa

SEQ ID NO: 245397 - DNA, 1048 bp, Unknown
  Bacterial polypeptide expressing nucleotide sequence isolated from the Sargasso Sea
catgaacagtcttcaaagcttgcagttacatcgagagctttttatacagaaccttttttcaacatttttagagaaactatcaaaggtgtctggttttgaatctattttaacaatgaatactggtgctgaagctgttgaaacagcgattaaagctgcaagaagatggggttacttttcaaaaggaattcctgaggacaaggcagagattattgtagctaatggcaacttccatggaagaacaaccacaatagttagcttttctacagatgcttcttataaagatggttttggtccattcactccaggatttaacagcgctgaatactgcggttcctgtgactgtcaatcaattgatagttgtctatcgatagagtcatttgaaaagaaaatcaataaaaatacatgtgccattttagttgaacctattcaaggagaagctggaataagagtgcccactgatggatggttgaaacaactacgtgctttatgcacctctagaaatatccttttaattttagatgaaattcaatcaggactcggcagaactggaaagctttttgcctatgagcatgaaaatattaaacctgatggattgattcttggaaaagcactcggaggtgcactgctccctatttctgcctttctgagttcaaacgagattatgaatcattttaacccaggatcgcacggttctacttttggaggcaatccattagcttcaaagattgctctaaaagcgattgatcttttgtttgaagaaaagcttatagagaatagtaaaaaaatgggtgaatacttcttaactagcttaagacaaattgattcaaaaataattaaagaagttcgtggaaaaggtctttggataggaatggaactaaataaatcagatgtgaatgcaaaggatttatgtttgatgcttttaaatgaaggtctgttatgtaaagaaactcataaaacagttataagatttgctccacctttaatgatttcaaaaaaagatttagattgggcgattaataaaataactaaagtaattaaagctatttaa

SEQ ID NO: 245398 - DNA, 1120 bp, Unknown
  Bacterial polypeptide expressing nucleotide sequence isolated from the Sargasso Sea
atgagcgaaaatcaaaaaaaatatatggatcaggaatccattcatggacctgataactacaaaccacttcctgttgtgttatctgaagccaaaggtgtatgggtatgggatgtggatcaaaataaatacttagatatgatgtctgcctactctgccgtcagtcatggtcacgcacatcctgagctggtgaaagtttttcatgagcaatcaaatacgttgtcactgacttcgagagcattttatacaaacacattaggaccctatcttgagacgatcacaaaaatgactggttttgaaatggctctgccaatgaattcaggtgccgaagctgttgagacagccattaaagctgcaagaagatgggcttatcgatccaagaaaatagaaaaagataaagctgaaatcattgtcgctgatggaaactttcatggaagaacaacaacaataatcagtttttcaagtgagccaaattcaaaagatgattttggacctcatacacccggttttatttcagttgagtttggaaacagtcaggctgttgaagatgccatcaccaaaaatactgcagcggtcttatttgagcccattcaaggtgaaggtggaatcatagagcctcctgaaaattggttgccagatatacgagagatttgtgataaaaacaatgtattaatgatcttagatgaagttcaatctggtcttggtagaactggaaagttatttgcatatgaacatgccaatattaggccagatggtttgatattaggaaaagcgctcggtggtggattcatgccggtttcagtatttctctcttcagaagaggtgctgcaatggatgaatcctggatctcatggctctacatttggaggaaatccactgggttcagcgatagcaaaaagatcattggaactgctcgaagaagagggtttgattgaaaacagtcgtgtcatgggagattatttcaaacaatctctgttagaacttaattctccaattattaaagagatcagaggaaaaggtctatggcttggtgttgagatagatcaaagctatatcactggaaaggacctctcgaagctgttgctcaaaaaaggaatcttgtgcaaagaaacccggacacaac

SEQ ID NO: 245399 - DNA, 1312 bp, Unknown
  Bacterial polypeptide expressing nucleotide sequence isolated from the Sargasso Sea
catggaaaaactcgagtatctgaagcaggtcgaatcgaacgcgcgaacctacgcgacctccttcccgcggctgttcacccatgcgaagggcatacgcgtacgcgacgccgacgggcaggaatacatcgactgcctgtcgaatgcgggcacgctcgcgctcggacacaatcacccggaagtcaatgaagccgtgatgcggtttctatcgtccgatcagatgcaacaggcactcgacctggcgacaccggcgaagcacgcattcgtcgagcagcttttctcgctcctgcccgggaagatcgccgaatcctgcaagatccagttttgcagccccagtggcgcggatggcgtcgaagcggcgatcaagctgacccggcactataccggccgcccgacgatcatggcgttccacggcgcttaccacggcatgacgtccggcgcactcgccgcgtcgggaaacctcacgcccaagtcggccggcggcaatggacgcgacgttcatttcctgccctatccctacgcctttcgctgcccattcggcaccgacggctcggcgaccgatcaactcagcatcaactacatccggaccgtcctgtccgatcccgagagcgggatcacgaagcctgcggccatcatcgtcgaagtcgtgcaaggcgaaggaggctgcatcccggcacccgacacctggttgatcgagttgcgtgagctgacactgcggcatgaaatcccgttgatcgtcgatgaggtgcagaccggactcggtcgcaccggcaccctgttcgcgatcgaacattccggcatccggccggacgtactggtgctgtcgaaggcattcggcggcggctatccgttgtcggtggtggtctatgacgagcgcctggacacctggccgcccggcgcgcatgccggcacctttcgcggcaaccagattgcgatggtggcgggcttgtcgaccatgcgcatcgtcgagagagaagatctgtcggcgcacgcggacagggtcggcaaactcctggttgccggcctcgaggggcttgccgaacgcttcccctgcctgggccagatacgcggccgcggcctgatgatcggcgccgaagtcgtcgtgcccggcacgcacggccgagccggcccgccccacacggaacgggccaaggccatcaagcggaactgcctgcgcaacgggctcatcgtcgaaaccggcggccgcaacggcgcggtactccggttcctgccgccgctgatcgtttcggaagcggacatccacgacattctcaatcgcttcgagcatgccgtggaaacggcctgccgcgcatag

SEQ ID NO: 245400 - DNA, 1051 bp, Unknown
  Bacterial polypeptide expressing nucleotide sequence isolated from the Sargasso Sea
gcacatcctgagctggtgaaagtttttcatgagcaatcaaatactttgtcactgacttcgagagcattttatacaaacacattgggaccctatcttgaaacgatcacaaaaatgactggttttgaaatggctctgccaatgaattcaggtgccgaagctgttgagacagccattaaagctgcaagaagatgggcttatcgatctaagaaaatagaaaaaaataaagctgagatcattgtcgctgatggaaactttcatggaagaacaacaacaataatcagtttttcaagtgaaccaaactcaaaagatgattttggaccacatacacctggttttatttcagttgagtttggaaacagtcaggctgtacaagatgtcatcactaaaaatactgcagcggtcttatttgagcccattcaaggtgaaggtggaatcatagagcctcctgaaaattggttgccagatatacgagaaatttgcgatagaaacaatgtattaatgatcttagatgaagttcaatctggtcttggaagaactggaaagctatttgcatatgaacatgccaatattagaccggatggtttgatattaggaaaagcgctcggtggtggattcatgccggtttcagtatttctctcttcagaagaggtgcttcaatggatgaatcctggatctcatggctctacatttggtggaaacccactgggttcagcgatagcaaaaagatcattggaactactcgaagaggagggtttgattgaaaacagtcgtgtcatgggagattatttcaaacaatctctgttaaaacttaattctccaatcattaaagagatcagagggaaaggtctatggcttggtgttgagatagatcaaagctatatcactggaaaggacctctcgaagctgttgctcaaaaaaggaatcttgtgcaaagaaacccgtgacacaacgattcgattcgcaccaccactgatcatcaataaagacgagattgattggggtgtagaaatcattggtagtacgtttaaggccattgaagaaaaggcctgat

SEQ ID NO: 245401 - DNA, 595 bp, Unknown
  Bacterial polypeptide expressing nucleotide sequence isolated from the Sargasso Sea
gagaaagggtggcttagaaagataagagacttatgtaaagacaataatgtattacttattttagatgaaattcaatctggtctggaagggacaggaaaattatttgcgtatgaacacgacaatataaaacctgatggtcttattcttgggaaagctttaggtggtgcaatgctcccaatttctgcatttttaagttcaaaagaagttatgaatcattttaatgctggttctcatggatctacttttggcgggaatccattggcaacaaaagtagcaagcagagcattacaacttttatatgaagataatttaatagaaaacagtgctgttttgggggagtatttcaaatcaagattacaatctatagataataagattatcaaagatgttaggggaaagggtttatggattggaatggagcttaatgaagcagaagtaaatgctaaagatttgtgtttgatgcttcttaatgaagggcttttatgtaaagaaactcataaaacggttatcagatttgcaccaccattaatgatttcaaaagatgatttagattgggctatcaaaaaaattactaaggtaattagagctatataaa

SEQ ID NO: 245402 - DNA, 1240 bp, Unknown
  Bacterial polypeptide expressing nucleotide sequence isolated from the Sargasso Sea
agtttacaagacaattttataaaaaaagaatcactgtatggcgctcaaaattattctccattatcagttgttctagaaaagggcgagggtgcatatctttgggatgttgatggtaataaatatctagatatggtctcagcttactcagcagtcagccatggacactctcatccagaattaattaagactcttcatgatcaatcttcaaaacttgcaattacatcaagagctttttatacagaaccctttgcaaactttttagaaaaattatcaaatatttcggactttgagtctgtgctgacaatgaatacaggagctgaagcagtcgagacagcaatcaaagctgctagaagatggggttatttttcaaaaggtatcccagaagatgacgcggaaataattgttgctaatggaaattttcatggaaggacaacaactattgttagtttctcctctgactcgtcatataaagatggctttggccctttcacacctggatttgaaactgcagattattgtggatcttgtgaatgtggacttattgataattgcttatcaattaaatcttttgaaaaaaaaattaatgagaatacttgtgcaattttagttgagccaattcaaggagaagctggaataagggttccaagtgaaggatggcttaaggagcttagagaattgtgtacagccaaaaatattcttatgatattggatgaaattcaatctgggttaggtagaactggtaaattgtttgcatatcagcacgaggacataattcctgatggtctaattcttggcaaagccctcggtggagcacttttaccaatttctgcatttttgagttcaaaagatgttatgcaacattttaaaccagggtcacatggatcaacttttggaggtaatccattggcttcaaaggttgctgctaaggctatagatttattatttgaagaaaaattaattgaaaacagtgagaagatgggtaattattttttatctaaactcagacaaataaattctaaagttattaaagaagttcgaggaaaaggattatggattgggatggaattaaatacatcagatgttaacgcaaaagatttatgtttaatgctgcttaatgaaggccttttgtgcaaagagacacataaaacagttataagatttgcaccacctttgatgatatcaaaagatgacttagactgggctattgataaaattactaaagtactaagaactatttaga

SEQ ID NO: 245403 - DNA, 812 bp, Unknown
  Bacterial polypeptide expressing nucleotide sequence isolated from the Sargasso Sea
catgtctaaaagtatacaagatgaacttataaaaaaagaatcgttttttggagcccaaaactattcacctctttctgtggttcttgagcgaggtgaaggagcatgcctttgggacgttgatggtaataaatatcttgatatggtttcagcatattctgctgtaagccatggtcactctcatcctgagcttgttaaaacaataaaagaacaatctgaaaaattggcaataacatcaagagctttttatacagaaccttttgcaaaatttttagaaaaattaagcactgtttctggttttgaaagtattttgactatgaacacaggtgcagaggcagtcgaaacttcgataaaagctgctagaagatggggctacttcacaaaaggaatacctaaaaataaagcagaaatcatagtcgctgatggaaactttcatggaagaacaacaactattgttggcttttcttcagaagagtcatataaaaaaggttttgggccttttggcgaaggttttattacagcaaaatattgttggtctgagtgtggcattgaagaatcaatagaatcttttaaatcaaagattaataaaaatacatgtgcaattttaattgagcctatccaaggtgaagcaggtattagggtgcctgagaatggatggttaaaagaattaagagacttatgcacatcaaataatgtattgatgattttagatgaaatacaaagtggtctaggaagaactgggaaattatttgcatttgaacacgaagatattactcctgatggacttattttagggaaagcgctggaggcgcgat

SEQ ID NO: 245404 - DNA, 805 bp, Unknown
  Bacterial polypeptide expressing nucleotide sequence isolated from the Sargasso Sea
gctgatggcaattttcatggcagaacaacaacaattattagcttttctagcgattcaaattccaaagatgattttggtccacatacacctggttttgtttcagttgagtatggttcatcagaagcaattgaaaaagctataaataaaaatacagctgcagttcttattgaaccaattcaaggagagggtggaattatagtgccacctgaaaattatcttcccgaagtcagaaaaatttgcactaaacataatgtgctaatgatcatggatgaaatccagtctggtttaggcagaacaggaaaaatgtttgcatttcagcactcaaatattcagcctgatggccttattttgggaaaagctttaggaggaggtttcatgcctgtttcctgctttctatcatcaaaagaagtaatgcaatggatgaatccaggttcacatggatcaacatttggaggcaatcctctagcagcagccattgctaaaagatctttagaactactagaagaagagaatctaattgagaacagcagagtaatgggtaatttttttaaagaatctttaattaatatgaatagctctgtaattaaagaagttagaggcaagggtttgtggcttggtgtagaaattgatccaaattttatttcaggcaaagaattatctgaaatttttcttaatgaaggtatcttatgtaaagaaactcatgaaaccacaataagatttgctcctccactagtaatcaagaaagaagaaattgaatgggcattagaaataattaagaaagtcttcacacaaatcagtaattaag

SEQ ID NO: 245405 - DNA, 1324 bp, Unknown
  Bacterial polypeptide expressing nucleotide sequence isolated from the Sargasso Sea
attgttaataaaaggatatggtgatgatctctccattaacggcactcgcataggtgacctcacaccccacgaacatgaaaagatagaaaagcaaaaaggaggtcagaattatgcgcctcttgaagatgttgttatttcaaaagtaaaagactcttcaacattaattgctaggaaacctgatcctggtgatgtgagtaaatatgttgaatctgaagttctagatggtctctgttgttattcagccgttaatcaaggacaattaaatcagactattgtagatgctgtgatacaccatttagataaagaaaaattacccactgttcctagatcgattcgtcataaatatatgagtgcttttttactatctgcaacggcagttactgaaatggatcgtgttattccaaaagtagccggagttgaatcatgggagctttcatttaagatatgcagaagatggggatatgaggtaaaaggaattccagatgataaggcaattattattggcgcaacaggaaattttcatggtaggtctcttgctgctgtatcattctcagatgaccctgattcaaaagaaaattttggtccattcgttccgggaatagagctagttccatacaataatattgaagcattagaaacattatttgaggaaaaaggtgaacacattgctgcatttatggttgagcctattcagggagaggcaggtgttattgtccctgatgatgactatttcttaaaagtatcagatttatgtaaaaaacataacattctactttccatggatgaggttcaaactgggtttggtcgcactggagagaattttgctcaccaattgtttggagtcaaaccggatattatgggttgtgggaaggcagctggtggcggcattctacctgtgtcttttgtggctggcagggatgacgtgctcggtgttctaacacctggatcagagggttcaacattcgggggatatcctctggcctctgtggtgggtacatatgcgattaaggtaatgatagatgcaaagctagcggaaaatgccaaaattaggggagatcaactgatgaaaaaccttaataacataaaagatcagtttcctgataaaataatggaagtaagagggaaaggattattgacggcgtttgagatgtttgatgagaaaaagttagatggacataaagtctctgttggtctattagatcgagatgtctatgccaaagaaactcaccatacaacggttaggttagctcctgcacttacaattagcagtcagcagatagatcaattatcagatgctgtaaaagatgttgtctcatcattataa

SEQ ID NO: 245406 - DNA, 1252 bp, Unknown
  Bacterial polypeptide expressing nucleotide sequence isolated from the Sargasso Sea
catgccatcaagtttacaagacgaatatattaaaaaagaatccttatatggtgctaaaaattattctccattatctgtggtactcaacaaaggagagggcgcatatctttgggatgtagatggtaataaatatcttgatatggtttctgcatactcagcagtcagtcatggacattctcatccaaaattaattgaagttattcatgagcaatcaaaaaaactatcaattacatcgagagcattttatacagaaccttttgcagattttttagaaaaattatcaaatctgtcaggatttgaatcagtattaacaatgaatactggagcagaggcagttgaaacagctataaaagctgcgagaaggtggggatatttttcaaagggaatccctgaggataaagcagaaattatagttgcagatggaaactttcatggaagaacaacgaccattgttagcttttcaacagatgatgcatataaaaaaggttttggaccatttactccgggctttgatgctgcaaatttctgtggctcctgtgagtgtgactctattgagaagtgtttgtcgatcaatacttttgaaaaaaaaattaatgaaaatacatgtgcaattttagttgaaccgatccaaggtgaagcaggaatacgggttcccagagaaggatggctaaaagagttaagagcattgtgtacagaaaaaaatatccttctgatattagatgaaattcaatcagggttgggaagaactggaaaactttttgcttatgagcatgaaaacatcaagcctgatggccttattcttggtaaagcattgggtggagctcttttaccaatttcagcttttttaagttcaaaagaaataatgaatcattttaaaccgggatctcatgggtcaacatttggtggaaatccgctagcatcaaaagtagcttcaaaagccttggatttattatttgaggaaaaattgattgaaaatagcaaaactatgggtgactattttttatcgaagctcaaagatattgattcgaaaataattaaagaagtcagaggaaaaggactttggataggcatggagctcaataatgcagaagttagtgctaaaaatctttgcatgatgttattaaatgaggggcttctgtgtaaagagacacatgagacagtaattagatttgctcctccactgatgattggaaaaaaagatattgattgggcactaaataaaataactaaagtgattacttcaattaaataa

SEQ ID NO: 245407 - DNA, 427 bp, Unknown
  Bacterial polypeptide expressing nucleotide sequence isolated from the Sargasso Sea
attgataacaaaaacttcaatagatttagccaaatttcatctagatttagagaaaaagtatggtgcccacgactatcatccattgcctgttgttcttaaaaaagggaagggtgtatacatgtgggatgtaaatggaaaaaaatattatgattttctatcagcttactctgctgtaaatcaaggccattgtcaccctaaacttgtagatttaattaaaagtcaagcaaatacattaaccctcacatcaagagcatttcataacaataaacttggtgagtacatggaatatgcaactaaactttttggatttgatcaacttttacctatgaatactggtgctgaaggtgttgaaacatctattaagctatcaaggaaatggggatatctaaagaaaaatgttgatgaagacaaagcaaaaattatagta

SEQ ID NO: 245408 - DNA, 793 bp, Unknown
  Bacterial polypeptide expressing nucleotide sequence isolated from the Sargasso Sea
atgagcgaaaatcaaaaaaaatatatggatcaagaatccattcacggacctgataactacaaaccacttcctgttgtgctatctgaagccaaaggtgtatgggtatgggatgtggatcagaataaatacttagatatgatgtctgcctactctgccgtcagccatggtcacgcacatcctgagctggtgaaagtttttcatgagcaatcaaatactttgtcactgacttcgagagcattttatacaaacacattgggaccctatcttgaaacgatcacaaaaatgactggttttgaaatggctctgccaatgaattcaggtgccgaagctgttgagacagccattaaagctgcaagaagatgggcttatcgatctaagaaaatagaaaaaaataaagctgagatcattgtcgctgatggaaactttcatggaagaacaacaacaataatcagtttttcaagtgaaccaaactcaaaagatgactttggaccacatacacctggttttatttcagttgagtttggaaacagtcaggctgttgaagatgccatcactaaaaatactgcagcggtcttatttgagcccattcaaggtgaaggtggaatcatagaacctcctgaaaattggttgccagatatacgagaaatttgcgatagaaacaatgtattaatgatcttagatgaagttcaatctggtcttggaagaactggaaagctatttgcatatgaacatgccaatattagaccggatggtttgatattaggaaaagcgctcggtggtggattcatgccgg

SEQ ID NO: 245409 - DNA, 1237 bp, Unknown
  Bacterial polypeptide expressing nucleotide sequence isolated from the Sargasso Sea
tatgtcacaaagtttacaagatgattatataaaaaaagaatcaatatatggcgctcaaaattattctccattatctgtagtcttagagaaaggagagggtgcatatttatgggatgtttatggtaataaatatctcgatatggtttcagcttattctgcagtaagtcatggacattcccatcctgagcttgtaaaaaccttgcaagatcaatcttcaaaattggcaataacatcaagagctttttatacagagccttttgcagattttcttgaatttctttctaagatttcaggttttgaaagcatcttagcaatgaatactggagctgaggcagtagaaacagcaattaaagctgcaagaaggtggggatactttacaaagggtattcctgataataaagccgagataatagtagcagatggaaattttcatggaagaacaacaacaattgtaggcttctcttctgatgatgcatacaaaaaaggttttgggccatttggagatgggtttattaccgctaagttttgctggtctgattgtagtattcaagactctattgattctttttctagcaaaataaataaaaatacatgcgcgattcttgttgaacccattcaaggtgaagcagggataagggtgccagatcatggctggttacaagagttgagaaagctgtgtgacaatgaaaacattttattaatcttagatgaaattcaatcaggtcttggaagaacgggaaaattattcgcccatgatcatgaagatattaagcctgatggattaatcttaggaaaagctttgggcggagctatgctacctatttctgcttttttgagctcaaaagaggtcatggatcattttaattctggctctcatggttccacttttggcggtaatccgcttgcttcaaaagtggcaaaaagagcactagaacttctttatgaagattctttaattgagaatagtcttactttaggagaatactttaaatcatctcttcaatccattgataacaaaattattaaagaagttagaggaaagggactatggattggaatggaattaaatgaatctaaagtaaatgctaaggatttatgtatgatgcttctaaatgaaggccttttatgcaaagaaactcacaaaactgttattaggtttgcaccaccattaatgatatctaaaaaggagattgactgggcaattaaaaaaattactaaagtaattcggtcagtttaa

SEQ ID NO: 245410 - DNA, 485 bp, Unknown
  Bacterial polypeptide expressing nucleotide sequence isolated from the Sargasso Sea
tgaccatgaaggaattaaacctgatggattaattttgggaaaagctctgggcggtgcaatgcttcctatttctgcttttttgagttcaaaagaggttatggatcattttaattctggttcacatggttcaacttttggtggtaacccgcttgcctcaaaagtagctaaaagagcgcttgaacttctttatgaagattcattaattgagaatagtcatgtattaggtgagtactttaaatcatctcttcaatccattgataataaaattatcaaagaagttagaggtaagggtctatggattggaatggaattaaatgattcagaagttaatgctaaagatttatgcatgatgcttttaaatgaaggccttctctgcaaagagacacataaaactgtcatcagatttgcaccacccttgatgatatctaaagaggaaatcgactgggcgcttgaaaagattactaaagtaattcgtgcaatttaaa

SEQ ID NO: 245411 - DNA, 1288 bp, Unknown
  Bacterial polypeptide expressing nucleotide sequence isolated from the Sargasso Sea
gatgatcacgagcaaatagaaaaagaaaaaggcggacagaattatgctcctttagagaatattgtcgtatctaaggtaaaagattcttctacattaatggcaagaaagcctgatcccaatgatgttaagaaatatatagagaccgagttaattgatggtctatgctgttattctgctgttaatcaaggacagttaaatcaaactattgttgacgcggttgttaaacatctcgaggaagagaaattgccaacggtgcctcgttccatacgtcacaaatatatgagtgcatttttactggcagctaccagtatcactgaaatggataaagtagtgccaaaagttgctggagtagaatcttgggaacttacatttaaaatatgcagacgttggggatatcatgttaaaggaatcaaggatgatcattgtatcatcgtaggagctaccggcaattttcatggaagaagtgttgctgcggtgtccatgtcagatgatcctgattccagagatggattcggcccattcgtaccaggaatagagcttgtcccttacaatgatattaatgccctagagtcactgttcaatgaaaaaggagatagaatagcagcctttatggtagaaccgatccagggtgaagcaggagtgatcgttcctgatgaagattattttataaaggtatctgacctatgtaaaaaacacaatattctattggctatggatgaggtgcaaacaggatttggcagaacaggtgcaaattttgcccatcaaatatttggtgtcaaaccagacataatggggtgcgggaaagcagctggaggaggcatcctacctgtttcattcgtagctggacgaaaagatgtgatcaatgtacttacacctggtagtgaaggatctacttttggtggttatcctcttgcatcggttgttggcacctatgccatcaaagtattagcagatgaaagacttgcagacaatgcaaaggtccaaggtgagcatttgatcggtaatttgaataagatcatgaatgagtttccagacaagatcaaagaagttagaggaaaagggcttctcaccgcgtttgaaatgcataatgaaaagcacctggatggtcataccgtgtccgttgaattattaaatcatggtgtatatgcaaaagagactcaccattcaacggttcgtcttgctcctgcattaaccatcaataacaatcagatcgatcaattatctgatgcgatccggtctgtcgtaaaggtttatagatatggatttcttaaaaaaacttggaatagat

SEQ ID NO: 245412 - DNA, 1249 bp, Unknown
  Bacterial polypeptide expressing nucleotide sequence isolated from the Sargasso Sea
catgtcatctagtttacaagacgaatatattaaaaaagaatctttatatggcgctcaaaactattcgcctttatctgttgtattagaaaaaggagagggtgcatatctttgggatgttgatggaaataaatacttagatatggtttcggcatactctgcagttagtcatggccactcgcatccagaattattgaagactcttcatgaacagtcttcaaagctctcagttacatccagagctttttatacagaacccttttcaatatttttagagaaactatcaaaggtgtctggttttgaatctattttaacaatgaatactggtgctgaggctgttgaaacagcaattaaagctgcaagacgatggggttatttttcaaaaggaattcccgaggataaggcagagattattgtagctaatggtaacttccatggaagaacaactacaatagttagcttttcttcggatgcttcatataaagatggttttggtccattcactccaggatttaacagcgctaaatactgtggttcctgtgactgtcgatcaattgatagctgcctatcgatagagtcatttgaaaagaaaatcaataaaaatacatgtgccattttagttgagcctatccaaggagaagctggaataagagtgcccactgatggatggttaaaacaacttcgtgctttatgcacctctagaaatattcttttaattttagatgaaattcaatcaggactcggaagaactggaaagctttttgcctatgagcatgaaaatattaaacctgatggattgattcttggaaaagcgctcggaggcgcgctgcttcctatttctgccttcctgagctcaaaagagataatgaatcattttaatccaggatcacatggttctacttttggaggaaatccattggcttcaaagattgccataaaagcgatagatcttttgtttgaagaaaagctcatagagaatagtaaaaaaatgggtgaatacttcttaacaagcttaagacaaatagactcaaaaataattaaagaagttcgtggaaagggcctttggataggcatggaactaaataaatcagatgtgaatgcaaaggatttatgtttaatgcttcttaatgaaggccttttatgtaaagaaactcataaaacagttataagatttgctccacctttaatgatctcaaaaaaggatttagattgggctatcgataaaataaaaaaagtattaagagctatatag

SEQ ID NO: 245413 - DNA, 664 bp, Unknown
  Bacterial polypeptide expressing nucleotide sequence isolated from the Sargasso Sea
aaagattaataaaaatacatgtgcaattttaattgagcctatccaaggcgaggctggtattagggttcctgaagatggatggctaaaagaattaagagatttatgtacatcaaataatatattaatgattttagatgaaatacaaagcggtttaggaagaactggaaaactatttgcatttgaacacgaggatgttactcctgacggacttatccttgggaaagcgcttggtggcgcaatgttgcctatttcagcctttttaagctcaaaggaaataatgaaccattttgattcaggctcacatgggtctacctttggaggaaacccattagcatcaaaagttgcaaccaaagccatagagctattatttgatgaggggcttattgaaaatagtaatcgtttgggtgattacttcatctcaaaattaaaagaaattgataacaagattataaaagaagtaagaggaaaaggattatggattggactggagttaaatgaatcaaaggttaatgcaaaagatttatgcttgatgttgcttaaagagggtcttttgtgcaaagagacacataaaactgttattaggtttgcgccaccattgatgatttcaaaagatcaaattgattgggcaattgagaaaattaccaacataataagatcaatctaa

SEQ ID NO: 245414 - DNA, 898 bp, Unknown
  Bacterial polypeptide expressing nucleotide sequence isolated from the Sargasso Sea
aaaaaagttaagcctggtaaagccgagataattgttgcagacggaaatttccacggccgaacaacgactttaataagtttttctagtgacgaaaattccaaggatgattttggcccccatacacctggttttatcagtgttaagtatggttgctctaaatctttggaagctgcaataaatgaaaatactgctgcagtgttaattgaacctatacagggtgagggtggaattattgttcctcctgagaattatttaaaagaggttcgagatatttgcactaaaaaaaatgtactaatgctgttagatgaaattcaatctggtttgggtagaactggaaagctttttgcttatcagcactcttgtggaaattgttcttgtgatatcggatgtaaacccaaccaaccccaagagtcaaaacctgatggattaatactaggtaaagcattaggaggtggttttatgcctgtatcttgcttcctttcttcgaaagaagtgatgcagtggatgaatcctggttctcacggctctacgtttggaggaaatccactagctgcagctattgcaaaaagatcaattgaattactagatgaagataaattaatagagaacagcaaagccatgggagagtattttaaaaaatcactaattgatatgaattcaaagattattaaagaagtaagaggtaaggggctttggcttggagttgaaatagatccgaaatacatttctggaaaagatttgtcaaaattatgtttagaaaatggaatattgtgtaaagaaacacatgaaactaccattagatatgcaccacctttaactatttcaaaaaaagaactcgattgggctattaacaaaataaaatctgtatttgaggaagtagaaaaaaaagctgcttaag

SEQ ID NO: 245415 - DNA, 1114 bp, Unknown
  Bacterial polypeptide expressing nucleotide sequence isolated from the Sargasso Sea
atgacacagagtttacaagatgattatataaaaaaagaatcaatatatggtgctcagaattattcacctttatctgtagttttagagaaaggagagggagcatatttatgggatgttgatggtaataaatatcttgatatggtgtcggcttactctgcagtaagtcatgggcattctcatccagaacttgtaaaaactttgcaagatcagtcttcaaaattggcaataacatcaagagccttttataccgagccttttgcagactttcttgaatctctttctaagatttctggttttgaaagcatattagcaatgaacactggagctgaagcagtcgaaacagcaattaaagctgcaagaaggtggggatattttacaaaaggcattcttgataacaaagcagagataatagtagctgacggaaactttcacggcagaacaacaacaattgttgggttctcttctgatgattcatataaaaaaggttttgggccatttggagatggatttattactgctaaattttgttggtctaattgtagtattcaagaatcaattgattcttttgcaagcaaaatcaataaaaatacttgtgcaattcttgttgaacccattcaaggtgaagcagggataagggtgccagatcatggctggcttcaagagttaagaaagctatgcgacaaagaaaatattttattaattttagatgaaattcaatcaggtcttggaagaacgggaaaattatttgcccatgaccatgaagacattaagcctgatggattaattttaggaaaagcattaggtggtgcaatgcttcctatttctgcttttttaagctcaaaagaggttatggatcattttaattctggatctcatggttcaacctttggcggtaatccacttgcttcaaaggtagcaaaaagagcactagaactcctttatgaagattcattgattgagaatagtcatgtattaggagaatactttaaatcatctcttcaatccattgataataaaatcattaaagaggtcagaggaaaggggttatggattggaatggaattaaatgattctgaagtaaatgctaaagatttatgcatgatgcttttaaatg

SEQ ID NO: 245416 - DNA, 682 bp, Unknown
  Bacterial polypeptide expressing nucleotide sequence isolated from the Sargasso Sea
aaggttgataaataataaaaatattgtaggttttttagtagaaccaattcaaggagaaggtggtgtagttgttccagatgctggttatttaaaaaaatgtaaaaagctgtgtgaaaaacacaatgttctcctcatagctgatgaaattcagacaggtgtatgtcgaacaggaaagttgttagctagtcatcatgaaaatatacaaccagatattgttatccttggaaaagcactttctggtggattctatcctgtttcaggcgttttaactagtaaagaaatcatgagtgttatgaaagttggacaacatggttctacttttggaggaaacccacttgcatgtgttgtagctaaagaagctataaagttttctgtagacaataatctgtctgaaaaagcgcataaacttgggctcatgtttagaaattatttggatgaaataaaagatgatatcccaataatgaaatctgttagaggaaaaggtttattaaatgcaattgttttagattgtgatgaaaattcagatattccctggaatatatgtcttgacatgagggataatgggttaattgcaaaacctacacaaggaaataaaattagatttgctcctcctctagttatttctaaaaagcaattaaaaaaagctttattaattatagaaaacagtcttcgcaaattttaa

SEQ ID NO: 245417 - DNA, 736 bp, Unknown
  Bacterial polypeptide expressing nucleotide sequence isolated from the Sargasso Sea
tttggaagctgcaattaacgaaaatactgctgcagtgttaatagaacctatacagggtgagggtggaattattgttcctcctgaaaattatttaaaagaggttcgtgatatttgcactaaaaaaaatgtactaatgttgttagatgaaattcaatctggtttgggcagaacgggaaaactttttgcttaccagcactcttgtggaaattgttcttgtgatatcggatgcaaacctaaccaacctcaagagtcaaaacctgatggattaatactaggtaaagcattaggaggtggttttatgcctgtatcctgcttcctttcttcgaaagaagtgatgcagtggatgaatcctggttctcatggctctacgttcggaggaaatccgttagctgcggctattgcaaaaagatcaattgaattactagatgaagataaactaatagagaacagtaaagtaatgggtgagtattttaaaaaatcactaattgatatgaattcaaagattatcaaagaagtaagaggaaaggggctttggcttggagttgaaatagatccgaaatatatttctggaaaagatttatcaaaattatgtttagaaaatggaatattgtgtaaagaaacacatgaaactaccattagatatgcaccccctttaactatttcaaaaaaagaacttgattgggctctaaaaaaaataaaatctgtatttgaggaagttgaaaaaaaagctgcctaa

SEQ ID NO: 245418 - DNA, 1229 bp, Unknown
  Bacterial polypeptide expressing nucleotide sequence isolated from the Sargasso Sea
aagtttacaagacaaactcataaaaaaagagtcactttttggagctcaaaattattcacctctcgctgtagttcttgagcgtggtgaaggggtatatctttgggatgttgatggcaataaatatctagatatggtttctgcttattctgctgtaagccatggccattcccatccaaagcttgtaaaaactctaaaggaacaatctgaaaagttagcaataacatcaagagccttctatacagaaccctttgctaaatttttagaaaaattgagtaacgtttctggctttgaaagcatcttaactatgaatactggtgcagaggcagttgaaacagcaattaaggcagccagacgatggggatactttacaaaaggaatacctgaaaatagtgctgagataatagttgcagatggaaattttcatggaagaacaacaacaattgtaggtttttcttcagatgattcatataaaaaaggttttggaccttttgcaaaaggttttgtcacagcaaaatattgttggtctgaatgtaatattgaagaatcaatagaatcttttaaagcaaagattaataaaaatacatgcgcaatcttaattgagcccatccaaggtgaggctggtattcgtgttccttcagacggatggttaaaagctttaagggatctatgttcatcaaacaatattttgatgattcttgatgaaatacaaagcggtcttgggaggactggaaaactttttgcattcgagcatgagaatataattcctgatgggcttattttaggaaaagctcttggtggtgcaatgctcccaatttcagcttttttgagttcaaaagaaattatgggccactttgattcgggctctcatggttctacttttggaggaaatcccttagcagcaaaagtagcaacaaaggctatagatcttctttttgatgaaaatcttattgaaaatagtaataatttaggtaaatattttatgtctgaactagaaaaaattgatagcaaaatcattaaagaagtaagaggcaaaggactttggattggtgtagagttaaatgattcaaagattcatgcaaaagacttatgcaagcttttattaaaaaaaggtcttttatgcaaggaaactcataaaacagtaataagatttgcaccgccattaacaatttctaaaaatgaaatagattgggctattaccaaaatagttgaagccctaaaggaaacttgat

SEQ ID NO: 245419 - DNA, 1081 bp, Unknown
  Bacterial polypeptide expressing nucleotide sequence isolated from the Sargasso Sea
ggccactcgcatccagaattattgaaggctcttcatgaacagtcttcaaagctctcagttacatccagagctttttatacagaacccttttcaatatttttagagaaactatcaaaggtgtctggatttgaatctattttaacaatgaatactggtgctgaggctgttgaaacagcaattaaagctgcaagacgatggggttatttttcaaaaggaattcctgaggataaggcagagattattgtagctaatggtaacttccatggaagaacaactacaatagttagcttttcttcggatgcttcttataaagatggttttggtccgttcactccaggatttagcagcgctgaatactgtggatcctgtgactgtcaatcaattgatagctgcttatcgatagagtcattcgaaaaaaaaatcaataaaaatacatgtgccattttagttgagcctatccaaggagaagctggaataagagtacccactgatggatggttaaaacaacttcgtgctttatgcacctctagaaatattcttctaattttagatgaaattcaatcaggacttggaagaaccggaaagctttttgcctatgaacatgaaaatatcaaacctgatggattgattcttggaaaagcgcttggtggagcactactccctatttctgccttcctgagttcaaaagagattatgaatcattttaatccaggatcgcatggttctacttttggaggaaatccattggcttcaaaggttgccataaaagcgattgatcttttgtttgaagaaaagctcatagagaatagtaaaaaaatgggtgaatacttcttaacaagcttaagacaaatagactcaaaaataattaaagaagttcgtggaaagggcctttggataggaatggaactaaataaatcagatgtgaatgcaaaggatttatgtttgatgcttttaaatgaaggtctgttatgtaaagaaactcataaaacagttataagatttgctccacctttaatgatttcaaaaaaagatttagattgggcgattaataaaataactaaagtaattaaagctatttaaa

SEQ ID NO: 245420 - DNA, 382 bp, Unknown
  Bacterial polypeptide expressing nucleotide sequence isolated from the Sargasso Sea
atgagcataatatcagacagtttaaaaagaattaagccatcgccaactatcgcagttactcagaaagctagagaattaagagcagctggtaaagatgtaattggtttaggagctggagagccagattttgacactccagaaaatataaaaaaggctgcgatcaaagctataaaaagaggagacacaaaatacactgctgtagatggcacacctgaacttaaaaaagctataattaagaaatttaaaagagaaaataaactcaactactctttagatcagatcactgttggcacaggaggaaaacaagttctttacaatgcttttatggctactcttaataaaggggacgaagtaattataccagcacctttttgggtatcat

SEQ ID NO: 245421 - DNA, 943 bp, Unknown
  Bacterial polypeptide expressing nucleotide sequence isolated from the Sargasso Sea
aatggaacaccaagctttaaaaaaagctattgttgctaaatttaaaagagaaaataaattaaaatactcagttgatcaaataactgttgggacaggaggtaaacaggttctctataatgcttttatggctactttaaataaaggggatgaagtaattattccagcacccttttgggtctcttatcccgacatggttttgttagcaggtggaaaacctaagatagtaaagtgtacagagcaagaaggctttaagcttacagcaaaaaaattaaaaaaagcaatttcaaaaaaaacaaaatgggtcattattaattcaccctcaaacccaacaggagcaggttattcaaaaaaagaaatacaagatttagcaaaggttctcattaagaataaaaaaatacatattttaagtgatgatatttatgagcacgttagatatgataactttaatttttttacaattgcgcaaatttcaaaattaaaagatagaacgcttactatgaatggtgttagtaaatcatatgcaatgacaggctggagaataggttatgcagctggcccaaaagatatcattaaagctattggtaaaatccaatcacaatctacatcaaatccttcttcaataagtcaagcagcagcagttgaggctttaaatggaaaacaaggttttataaaaactagagctaacgctttcaaagctagaagaaattttgttgtgaaatgtctaaatagtatcaagggtattaattgtttaacacccaatggtgcattttatgtgtttccaagttgtaaaggtttattgaataaaaagacaaaattaaaaacagatactaactttgttcaaaagttacttgaaaaagaaaatgtagcagttgttcaaggatctgcttttggattagatggatattttagaatttcttatgcaacctcgatgcaaaacttaaaa

SEQ ID NO: 245422 - DNA, 859 bp, Unknown
  Bacterial polypeptide expressing nucleotide sequence isolated from the Sargasso Sea
tgtaatttataacttaatgatggcaactttgaataaaggagatgaagtattaatacctgctccttactgggtttcctatcctgatatagttttattagcaggagctaacccaatagtaatagaatgttcagaagagcaaaattttaaattaactgccaaagatttagaaagtaaaataacaaataatactaaatggttaatattgaactcaccatcaaacccgacaggagcctgttattcagagcaggaaattaaaaatttatctcaagtcttaaaaagaaatcctcacgtaaatattttaagtgatgatatttatgaacatgttacttataataattttaagtttttcacaatagcccaagttcccgaactaaagagtagagtagtaactatgaatggtgtaagtaaatcttatgcaatgactggctggcgaattggttatgcggctgggcccaaagagataatcaaagcgattgcaaaaattcaatcacaatcaacaacaaacccatcttctataagtcaagcagctgcagtggaggcacttaatggagttcaagattttatatttataagatctaaagcgtttgaagagagacgtgattttgttgttaattcgttaaactcaatagatggaataaattgtttaaaaccagatggcgcattctacgtctttccaagttgcaaaagtttaattggtaaaaaagataaaaatggaaaaaaaattgaaaatgatactgattttgttcaatcccttcttgaaaaccacggaattgcagtcgttcaaggatctgcctttggtttagatggtttttttagaatatcttatgcaacttcaatgaataatctgaaaaagcaatga

SEQ ID NO: 245423 - DNA, 930 bp, Unknown
  Bacterial polypeptide expressing nucleotide sequence isolated from the Sargasso Sea
aaaatcaattacactacagatcaaatcacagttggaactggaggaaaacaagttctttataatgctttcatggcaactttaaataaaggcgatgaagtaattattcctgcacccttctgggtttcttatcctgatatggttttattagctggcggaaaaccaaagatagttaagtgtactgaggaagaaggatttaaacttactgcaaataaattaaaaaaagctatcaccaaaaaaactaagtgggtaattttaaattcaccttcaaatccaactggagcaggttattcaaagaaagaaattgaagatttagcaaaagttttaattagaaataaaaaagttcatattttaagtgacgacatctatgaacatatagcatatgataattttaatttttatacaattgctcaaaattccaagttaaaagatagaactttgacaatgaatggggttagtaaatcttatgcaatgacaggttggagaatagggtacgccgctggaccaaaagatatcattaaagcaattggaaaaattcagtctcaatcaacatcaaacccatcatcaataagtcaagctgctgctgtagaagctttaaatggaaatcaaggtttcataaaaaaaagatcaaaagcctttaaagaaagaagagattttgttgttaaaagtttaaacagcatcaatggtataaattgtttaactcctaatggagctttttatgtctttccaagttgtaagggattgttaaataaaaaaactaaattgaaaacagatacagagtttgttcaaaaactacttgagcaatgtaatgttgcagttgttcaaggatctgcatttggtttagatggatactttagaatttcttatgctacttcaatgcaaaatttgaagaaagcaatggatagaataaaatccttttgcgaaagttttttt

SEQ ID NO: 245424 - DNA, 968 bp, Unknown
  Bacterial polypeptide expressing nucleotide sequence isolated from the Sargasso Sea
tggtattcctgaatgtcgtcaagctgtaactagatggattaaaaaacgctataatgtagatatcgattttgaaagaattataatcatgccaggcggtaaaccaacaatgagttatgctatccaatgctttggtgaaccaggagcagaaattatacatccaactcctgcttttccaatttatgagtcaatgattaattatacaggatcaacttcagttacatatgatttaacagagaataaagatttaaaatttgacccagataaaatattatctttaattacagacaaaacacgtttgttagttttaattaatccaaataatccaactggaagctttgtggaaaaaaaagatatagacgttttagctgatggtcttaagaaacatcctcatgtaacaatacttagtgatgaaatttatagtagacaaatttttgatggaaaagaaatgccaacattttttaattatccagagttaagggaaagattaatagtattggaaggatggagcaaagcttattcaatgactggatggagacttggttggagtttttggccacaacacttagttgaacatgttaacaaattgttaattaatagtgtttcgtgtgttaatgctgccgcccaatttgcaggtatagctgcattagatggtccagatgactcaattgatgctatgatggaaaaattcactcaaagaagagatataatttataaaggtttgaatgatttaccaggtgttgaatgtagtttacccggtggagctttttatgcatttccaaaagttattggtactggaatgaatggagcagagtttgctagaaaagctatgcatgaagcaggagtagcaatagttcctggatcggcttttggtgaaacttgccaaaactatgttaggtttagttttgcggcctctagagataacatttctcaagctttagaaaatgtaaagaaaatgctaactaaataag

SEQ ID NO: 245425 - DNA, 949 bp, Unknown
  Bacterial polypeptide expressing nucleotide sequence isolated from the Sargasso Sea
agttgatggaactccagcattaaaaaaagcaattttaaaaaaatttaaaagagaaaacaaactaaactataaactagacgaaatcacagttggaactggagggaagcaagttctctataacacttttatggcaactttaaataaaggagacgaagttattattcctgcaccattctgggtttcatatccggatatggttctcttagcaggaggaaaaccaaaaatagtaaaatgtgatgaaaaagatggatttaaaattacacctgcaaaattaaaatctgcaattacaaaaagaacgaaatggataatccttaactcaccatctaatccaactggatctggatacagtaaattagaaattcaaaaattagctaaggttttaatcaaaaacaaaaaagttcacattttgagcgatgatatttatgagcatgttaaatatgataattttaaattttttactattgctcaaatttcaaaattaaaatctcgaacattaacaatgaatggagtgagtaaatcttatgcaatgactgggtggagaatcggttatgcggctggaccaaaagaaataatttctgcaattagaaaaattcagtctcagtctacttcgaatccatcatcaattagtcaagcagcagctgttgaagctttaaatggaaaacaagactttattaagaaaagagcaaaatcatttaaagaaagaagagattttgttgtaaaaagtttaaataatattgatggtattagctgtttaaaacctaatggtgcattttacgtgtttccgaattgtaaaaaacttttaaataaaagaactaaacttaaaaaagatactgattttgtccaaaagcttttagaaaaacaaaatgttgcagctgttcagggctcagcatttggtttagatggatattttagaatttcatatgcgacttcaatggcaaaactaaaatag

SEQ ID NO: 245426 - DNA, 739 bp, Unknown
  Bacterial polypeptide expressing nucleotide sequence isolated from the Sargasso Sea
tatgaccgaaagtagagatttttttattaatccagacaaaattttatcattaattaatgaaaaaactcgattgctaattttaaataatcctcataatccgacaggtggttttaccgaaaaaacaattattgataaactagcttttggtttaaaaaattttcctgatttagcaattttaagtgacgaagtatacgatagactaatttttgataataaaaaaattccaaccttactaaattatcccgaactttatgatagacttatagtgcttaatggatggagtaaaacttatgcaatgactggatggagattaggttggggcgtttggcctgaaaaattacttgatcacgtatttaaattttgtgtaaatagccattcgtgtgttaatacaccagcacaatttggtgctattgcagcgctagatggtcccgaagatcatttagaaaaaatgatggaagaatttaataaaagaagaaaattaattgtaagtggtttaaaaagtttaaaaggtgttagttgtagcttacccggaggttctttttttgtattccctaacattaaagataccggtatgaacggtgaagaatttgctaaaaaatgtttggatgaagctggtgtagccgttataccaggagtagcttttggaaaatttgccacagataatgtaagattaaattttgcgacatctagagaaaatataagtaaagcgatcgaaaaaatagataaaatacttaaataa

SEQ ID NO: 245427 - DNA, 884 bp, Unknown
  Bacterial polypeptide expressing nucleotide sequence isolated from the Sargasso Sea
tctgtataatacttttatggcaaccttaaataaaggtgatgaggtaattattcctgcacctttttgggtttcttatcctgatatggttttactagctgggggaaaaccaaagatagttaaatgcacggagcaagagggttttaaattaactccagcaaaattaaaaaaagcgattacaaaaaaaacaaaatgggtaattattaattctccttcaaatccaacaggggcaggttactcaaaaagagaaatacaagatttagcaaaagttttaataaagaataaaaaaacttatattttaagcgatgatatttatgagcatgttcgatatgataactttaacttttttacaatcgcacaaatttcaaaactaaaagacagaacacttaccatgaatggcgtaagtaaatcgtatgcaatgacaggctggagaataggttatgctgcaggtcctaaagatattattaaagctatcggtaaaattcagtcacaatcaacctcaaatccgtcatcaataagccaggctgcagcagttgaggcattaaacggaaaacaaggatttataaaaagtagagcaaatgcatttaaagcaagacgaaattttgttgtgaagagtttaaatgatattaaaggtattaattgtttaaatcctaatggtgcattttatgtatttccaagttgtaaaggcttattaaataaaaaaacaaaattgaaaactgatactgattttgtccaaaagttacttgaaaaagaaaatgtagctgttgtgcagggttctgcatttggtttagatggatattttagaatctcttatgcaacatctatgcaaaacttaaaaaaagccatgaatagaattagatctttttgcgagtctttgagtagataaa

SEQ ID NO: 245428 - DNA, 884 bp, Unknown
  Bacterial polypeptide expressing nucleotide sequence isolated from the Sargasso Sea
aagtgcaggtgaacctgattttgatgccccaaaagaagttatagaggctacaagtaaagctatatttgatggatttacaaagtacgggcccgcagcggggaatttagatctccgaaaagcaattgcaaataaacttcaaattcaaaacgatttaaattatgaatttgaaaatgtaatggtcacaaatggtgctaagcaagcaatatataatcttttccaagtattgttaaatactggagacgaagttattattccttctccatattggttaagttatccccagatggttagattggcgggtgggaagccaatttttacaaattcttctgcagaagatggattcaaaataaatatagaagatttgaagtctaaaatctcttcaaaaactaaatttataattatcaattctcctaataaccctactggaagagttatgtcaaaggaagaattattacaaattgccgatttagctagagaaaatccaaatatcaatattctttctgatgagatttacgaactaatccttaaaaaagaatttaaacactacagtttatcttcattagcaaatgacttaaaagatagaatttttataataaatgggtttgcgaaaggatgggctatgactggctggaggataggttatttagtaggtcccaaagatgtaatcaaagcatcctcagcattacaaagtcaaagtacaagtaatgtttgctcttttgttcaaaaaggtgctttagaggctttaaaaattaataatgagtttttctcaatgataaatagccattatgatcaaagaagaagacttctctatgagggccttaataatataaatgggatttatattgaagaacctaacggtgcattttacgcatttccaaattacc

SEQ ID NO: 245429 - DNA, 862 bp, Unknown
  Bacterial polypeptide expressing nucleotide sequence isolated from the Sargasso Sea
tggagatgaagtaattataccttcaccctattgggtgtcttataaagatatagtagaatttgctgaaggtattcctaaccttatagattgctcaatagaaaatggattcaaattgacatcagatgatcttgaatcagcgattaataaatctacacgttgcctgataatcaacaatcctactaatcctactggttctgtttacagtcatgatgaattaaaatctatttcaaacgtattggtgaaatatacaaatgtatttattatttcagatgatatttatgaatatttagtctatgacaatgctaaatttcataccattgcacagattgatgaaaatataaaaatgagaactctaacttgtaatggaatgtctaagtctttttgtatgacaggatggagattgggttacggtggaggaccaaaaatacttattgatgctatgtccaaattacagtctcaatctacgtttcatccctctacaatttcacagtatgcagccatagcggggttaaatggtagtagagaatttattactcagcaaaaaaaatcttatgaagaaagaagaaatattacaattagttatttaaataatattgatggagtttcgtgcaatacgcctgagggatctttttatgcttttccttcttgtatcgatctatatggcaaacgtacaccaaacggcgaaatattaaaaaatgatgttgatgtatgtaaatatattttacaaaaagctgaagtatccgtaactccagggagtttttttggaaaaaaagattacttcagagtatgctacacagctgaaaaaaaattattgttagacgctctagaaaggatttcaaatgctttaaccttaaataattga

SEQ ID NO: 245430 - DNA, 848 bp, Unknown
  Bacterial polypeptide expressing nucleotide sequence isolated from the Sargasso Sea
gatggaactcctggctttaaaaaaagcaatagttgaaaagtttaaaagagaaaataatttaaattttaatattgatcaaattacagttggaactggtggtaaacaagttctatacaatgcttttatggcaactttgaataaaggtgatgaggtaataatccctgcgcctttttgggtttcatatcctgatatggttttattagccggtggaaaaccaaaaatagtaagatgtgatgaaaaagacggttttaaattgacagcaaaaaaacttcaaaaagcgatttcaaaaaaaacaaaatggctaattttgaattctccatcaaacccaactggagctggttatactaaagatgaaattgaagatttggcaaaagtattagttaaaaataaaaaaattcatattttaagtgatgatatttatgaacacattaagtatgataattttaatttttttacaattgctcaaatatcaaagttaaaagatagaaccttaacaatgaatggggtcagtaaatcctatgcgatgactggatggagaatcggttatgcagctggtccaaaagacatcatcaaagcaataggtaaaattcaatctcagtcaacatcaaacccgtcatcagtaagtcaggcggcagcagtcgaagcactgaatggttcacaagattttatccaggaaagatctagagcattcaaagaaagaagagattttgtagtacaaagtttaaataatattaaaggaataagttgccttacacctaacggtgcattttatgtatttccaagttgcaaaggtttattaactaaaaaaacaaaactaaaaacagatacagactttgttcaaaaattac

SEQ ID NO: 245431 - DNA, 453 bp, Unknown
  Bacterial polypeptide expressing nucleotide sequence isolated from the Sargasso Sea
attcaatgacaggatggagattgggttggagtttttggcctaaaaatttagtagatcatgtaaataaacttttgataaatagtgtttcatgtgtgaatgctgcagcacaatttgctggtattgctgctttagatggaccagacgattcaattaatgagatgatggaaaaatttacgcaaagaagagatctaattcataaaggtttaaatgaacttgatggagtagaatgtagtcttccagggggagccttttatgcatttcctaaagttattggtacgggaatgaatggagcagagtttgccaggaaagccatgcacgaagcaggagtagcaattgtgccaggatcagcttttggtgaaacctgccaaaattatgttagatttagttttgcagcttctagagataatatttctcaagctttagaaaacataaagaaaatgctaactaaataag

SEQ ID NO: 245432 - DNA, 416 bp, Unknown
  Bacterial polypeptide expressing nucleotide sequence isolated from the Sargasso Sea
aatgagcataatatctaataatttaaaaagaattaaaccatccccaactattgcagttactcaaaaggcaagagaattaagagctgcaggaaaagatgtagttggacttggggcaggggaaccagattttgatactcctatcaatgttaaaaatgcagctattaaagcaataagagacggagatacaaagtatactgcagttgatggaactccagcattaaaaaaagcaattttaaaaaaatttaaaagagaaaataaactaaattataaactagatgaaatcacagttggaactggagggaaacaagttctctataatacttttatggcaactttaaataaaggagatgaagttattattcctgctccattctgggtttcatatccagacatggttctcttagcaggaggaaaac

SEQ ID NO: 245433 - DNA, 934 bp, Unknown
  Bacterial polypeptide expressing nucleotide sequence isolated from the Sargasso Sea
aggtggataaaaagacgttacaatgttgatattgattttaatagaattctaatcatgccaggtggaaaacctactatgagctatgctatccaatgttttggtgaaccaggagcagaaataatacatcctacacctgcgttcccaatatatgagtcgatgattaattatactggctcaacatctgtaccttatgatttaacagaggataaagatttaaaattcaacccagacaaaatattatctttaattactgacaagactagattgttagtcttaattaatccaaacaatccaacaggaagctttgttgaaaaaaaagatattgatttcttagctgacggtttaaaaaaatatcctcatgtaacaatattaagtgatgaaatttatagtagacaaatttttgataataaagaaatgccatcttttttccattatccagaattaagagaaagattaattgttttagagggatggagtaaagcttattcaatgacaggttggaggctcggttggagtttttggcctcaacacttaatcgagcacgttaataaattattaatcaatagcgtttcatgtgttaatgccgcagctcagtttgcaggaattgccgcgttagatggaccagatgactctatcaacgtaatgatggaaaaatttactcaaagaagagatctaatttataaaggtttaaatgatttaccaggtgtcgagtgtagtttaccaggtggagcattttatgcatttcctaaagtaattggaactggcatgaacggtgctgagtttgcaaggaaggctatgcatgaggcaggcgtagcaatagtccctggatcagcttttggcgaaacatgccaaaattatgtaagattcagttttgctgcatcaagagataatatttctcaagcattagaaaatatcaaaaaaatgctgaaatagt

SEQ ID NO: 245434 - DNA, 952 bp, Unknown
  Bacterial polypeptide expressing nucleotide sequence isolated from the Sargasso Sea
gctatacgggagggtgataccaaatataccgcagtgatgggtaccccagctttaaaaaaagcaataattaaaaaatttaaaaaagaaaataatttaaagtactcaaaagaggaaattactgtaggaacgggtggcaaacaagttatttacaatacattcgtcgcaactttaaatagaggagatgaagtaattattcctgcacctttttgggtttcttatccagatatggttttattagcaggtggaaaaccaaaaattgtaaaatgtagcgagtcagataattttaaattaactccaaaaaaattaataaatgctatttctaaaaaaacaaagtggttaatattaaattcaccatcaaatcctacaggtgtaatttatacaaaagatgagataaaaaaattatctaaagttttaattagacacaaaacaattaacattttaagtgatgatatctatgagcatatcacatatgacgaagcaaagttttttacaattgctcaaatatctaaattgaaaaatagaactcttactatgaatggcgtaagtaaatcttatgccatgacaggatggagaataggttatgcaggaggaccaaaagaaattattcaatctattcgcaaagttcaatctcaatcaacatccaatccttcatctgttagtcaagcagctgcagttgaagctttaaatggaacccagaaatttataaaaaaaagatctaaagaatttaaaaaaagaagagattttgttgttaggagcttaaataaaattaaaggaataaattgcttaacacctaatggcgctttctatgtttttccaagttgcaaaaaattattaggaaaaaagacaaaactaaaaacagattcagaatttgttgaaaaactcttacaaaaaggaaacgtggcggtagtacaaggatctgcatttggtttatctggtcattttagaattccta

SEQ ID NO: 245435 - DNA, 718 bp, Unknown
  Bacterial polypeptide expressing nucleotide sequence isolated from the Sargasso Sea
atgagcataatatcagacagtttaaaaagaattaagccatcaccaactattgcagttactcagaaagctagagaattaagagcagctggtaaagatgtaattggtttaggagctggagagccagattttgacactccagaaaatattaaaaaggctgcgatcaaagctataagaagaggagacacaaaatacactgctgttgatggtacacctgaacttaaaaaagctataattaagaaatttaaaagagaaaataaactcaactactctttggatcagatcactgttggcacaggaggaaaacaagttctttacaatgcttttatggcaactcttaataaaggggacgaagtaattataccagcacctttttgggtatcatacccagatatggttttgttagctggaggaaaaccaaaaataatcaaatgtactgaacaggaagggtttaaacttactccaaaaaaattaaaaaaagcaatatctaaaaaaactaaatggatcattcttaattctccatcaaatccaacgggagcaggttattcaaaaaaagaaattaatgacttagcaaaaattttaatcagaaataaaaaaatttttattttgagtgatgacatttatgaacatgttaggtatgacaactttaatttttttacaattgctcaaatttctaagctaaaagataggacacttacaatgaatggagtaagtaaatcat

SEQ ID NO: 245436 - DNA, 730 bp, Unknown
  Bacterial polypeptide expressing nucleotide sequence isolated from the Sargasso Sea
attgcaaataaacttcaaattcaaaacaatttaaatattgaatttgaaaatgtaatggtcacaaatggtgctaagcaagcaatatataatcttttccaagttttgttaaatgctggtgacgaagttattattccttctccatactggttaagttatccccagatggttaggttggcgggtggggacccaatctttacaaattcttctgctgaagatggatttaaaataaatataaaagatttgaagtctaaaatttcttcaaaaactaaatttataattattaattctcccaataaccctactggaagagttatgtcaaaggaagaattattgcaaattgccgatatagccagagaaaatccaaatatcaatattctttctgatgagatttacgaactaatccttaaaaaagaatttaaacactatagtttgtctacgctagcgaatgacttaaaggataggatttttataataaatggatttgccaaaggatgggctatgactggctggaggataggttatttagcaggtcccaaagatgtaataaaagcatcgtcagcattacaaagtcaaagtacaagtaatgtttgctcttttgttcaaaaaggagctttagaggctttaaaaattaataatgagtttttctcaataataaatagccattatgatcaaagaagaagtcttctctatgagactcttaaaaatataaatggtatttatatgaagaacc

SEQ ID NO: 245437 - DNA, 663 bp, Unknown
  Bacterial polypeptide expressing nucleotide sequence isolated from the Sargasso Sea
gaattaaaaaaagcaattgtcgaaaagtttaaaagagaaaataatttagattattcaattgatcagataactgttggaacagggggcaaacaagttctttataatgcatttatggcaactttaaacaaaggtgacgaggttataattcccgcacctttttgggtttcttatcctgatatggttttgcttgcaggtggaaaaccaaaaatagttaaatgtgatgaaaaagatggttttaagttaactcctaaaggacttaagaaagctatttcaaaaaaaaccaagtggttaattttaaactcaccttcaaaccctacaggagcgggatattcgaaagatgaaatagaaaatttagcaaaagtattaataggtaataagaaagtacacgttttaagtgatgatatttatgaacatattaaatatgataattttaatttttttacaacagctcagatatctaaactaaaagacagaacacttacaatgaatggtgttagcaaatcttatgcaatgacaggttggagaataggttatgctgctggtcccaaagatataattaaagctattggaaaaattcaatctcaatctacttctaatccttcttctgttagtcaggccgctgcagtagaagcattaaatggcactcaagattttattgatgaa

SEQ ID NO: 245438 - DNA, 883 bp, Unknown
  Bacterial polypeptide expressing nucleotide sequence isolated from the Sargasso Sea
aatgcattttttggctacagtagataaaggagatgaaatcatcattccttccccatattgggtttcatacccggatatggttttgttagtagaaggggaacctaaagttttagaatgttcactagaaaataattttaaaatcaatccgcaagatctagaaaaaattattacaaataaaactaaatggttaattttaaattctccttccaatcctacaggctcaatgtatacggaacaagaattaatgaatatatcaaaaatactatctaagcatcctcatgtatgggttttatcagatgacttatacgaacatattatctttgataatttaaaatttaaaaatattttacaggcagataattctttaaaaaacagaagtttaatagtgaatggagtgtcaaaagctcatgcaatgactggttggagattgggatacgctggtgggcctaaagaattaattagccaaatgaacatggttcaatcacaaagcactacgcatactagttcgatttcacaggctgcagcaattgaggctttgaagaatagtaaagattttattgaaaaaaataaaaaaatatttcaagaaagaagagatattgtttgttccaaattaaatgaatacgatggttttcaggtttttaacccgcagggctctttctatgtttatgtatgttgtaatgatttaatgaataaaaaaaaagaagatggaaatttaattaataacgatgtggaattatcagattattatttagatgatgcgggtgttgcagttgtgccaggagaagcatttggattatctaattttttcagaatttcttttgctacttcaatttctcttttagaagaaggctgtaataagatcatcgagtcctcgaagaattaa

SEQ ID NO: 245439 - DNA, 493 bp, Unknown
  Bacterial polypeptide expressing nucleotide sequence isolated from the Sargasso Sea
atgagcataatatctgacagtttaaaaagaataaaaccgtcacctacaatcgctgtaagtcaaaaagctagagaattaagagctgctggaaaagatgttataggattaggagcgggtgagccggattttgatacacctaaaaacattaaaaatgcggcaataaaagctattaaaaggggagatacaaaatatacagctgttgatggcactccagccttaaagaatgcgataattaaaaaatttaaaaaagagaataatttaaaatattcatcagaagaaataacagttggcacaggaggtaaacaagttctctataatgctttcatggcaactttgaataaaggagacgaagtaattatacctgcgcctttttgggtttcttatccagatatggttatgttagcagggggaaaaccaaaaattattaaatgtaacgagtcggataactttaagttaactccaaaaaaattaaaaaaggctattcaaaaaaaac

SEQ ID NO: 245440 - DNA, 823 bp, Unknown
  Bacterial polypeptide expressing nucleotide sequence isolated from the Sargasso Sea
ggcgatacaaaatatactgcagttgatggaactccagctttaaaaaaagcaataattaaaaagtttaagaaagaaaataatttgaagtattcaaatgacgaaataaccgtaggaacaggcggtaaacaagttctttacaatgcattcatggcaactttaaatagaggagatgaagtaattattcctgcacctttttgggtttcttatcctgatatggttctattggcaggcggtaaaccaaaaattgttaaatgcaatgaaacagataattttaaattgactccaaaaaaattaaaaaaagccatttctaaaaaaacaaaatggttaatattaaattcaccatcaaatcctacaggagtaagttacacaaaatctgaaataaataaattatctaaagtattaataaaaaataaaaaaattcatattttaagcgatgatatttatgagcatatcacatatgataaagctaagtttttcaccattgctcaaatatctagttttaaaaatagaactcttactatgaacggtgtaagtaaatcttatgctatgacaggatggagaataggttacgctggaggaccaaaagaaataataaaagctattcgtaaagttcaatctcaatcaacctcaaacccttcgtcagtaagccaggcagcggctgttgaagctttaaatggtactcagaaatttattaaaacaagatccaaagagtttaaaaaaagaagagattttgttgttaagagcttaaataaaattaaaggaataagttgtttaacacctaatggagcgttttatgtatttccaagttgcaaagatcttttga

SEQ ID NO: 245441 - DNA, 520 bp, Unknown
  Bacterial polypeptide expressing nucleotide sequence isolated from the Sargasso Sea
aatgccaacattttttaattatccagaattaagagaaagattaatagtattagaaggatggagcaaagcttactcaatgactggatggagacttggctggagtttttggccacaacatttagttgagcatgttaataaattattaattaacagtgtttcatgtgttaatgctgctgcacagtttgcaggaattgctgcattagatggaccagatgactcaattcatgaaatgatgaaaaaatttactcaaagaagagatttaatttataaaggtttaaatgaacttccaggagtagaatgtagtctacctggaggagctttttatgctttcccgaaggttattggtactggaatgaatggggcggagtttgcaagaaaagccatgcatgaagctggggtagcaatagtgccaggttccgcctttggtgaaacttgccaaaattatgttaggtttagttttgcagcttccagagataatatctcacaagccttagaaaatattaagaaaatgcttggttag

SEQ ID NO: 245442 - DNA, 565 bp, Unknown
  Bacterial polypeptide expressing nucleotide sequence isolated from the Sargasso Sea
atgagcataatatcagacagtttgaagaagattaaaccatcgcctactgttgctgtaactcaaaaagcaagagaattaaaagcagctggaaaagatgtcattggtctaggtgcaggtgagccagattttgataccccagacaatattaaacaagcagctataaaggcaataaatgatggtgatactaaatatacaccagttgatggtacaccagcattaaagaaagcaatcgtagaaaaattcaaaaaagaaaataatttagattatacaactgatcaaattacagttggtgcgggtggtaagcatgtaatttataatgcgatgatggctactttaaatgagggagatgaagttatagttcctgctccttattgggtttcttatccagatatggttttattagcaggcggaaaacctgtaataatggaatgtgatgagaaacaggcttttaaaataaatccatcagatttagaaaaatttataactccaaaaacaaaatggataatattgaactcaccttcaaacccaactggagcatgttatacagaacaagacattaaagcaa

SEQ ID NO: 245443 - DNA, 673 bp, Unknown
  Bacterial polypeptide expressing nucleotide sequence isolated from the Sargasso Sea
aatgagcataatatcagatagtttaaaaaggattaaaccatcacccactattgctgttactcaaaaagctagagaattaagagcagctggcaaagatgtaatagggctaggtgcaggtgagccagattttgatacaccaaataatattaagaatgctgccatcaaagctattagaggaggtgataccaaatatacagctgttgatggaactccagctttaaaaaaagcaataattaaaaaatttaaaaaagaaaataatttaaagtattcaaacgaggaaataactgtaggaacaggtggtaaacaagttctttataatgcattcatggcaaccctaaatagaggagacgaagtaattattccagcacctttttgggtttcttatcctgatatggttttattagcaggtggtaaaccaaaaattgttaaatgtaatgaggaagatagttttaaattaacacctcaaaaattaaggaaagcaatttctaaaaaaacaaagtggttaatattaaattcgccatcaaatcctaccggtgcgagttatacaaaatcagagataaaaaaattatctcaagtattaattaaatataagaaaattcaaattttaagtgatgatatttatgagcatatcacatatgaaaaagctaagtttttcaccatcgctcaaatatct

SEQ ID NO: 245444 - DNA, 670 bp, Unknown
  Bacterial polypeptide expressing nucleotide sequence isolated from the Sargasso Sea
atgcatcaagtttctgaaagaatgaacagagtattaccatcagcaacgagcgctgttctaaatcttgccgcaaaattaaaagaggaaggaagggacataatcagtcttggtgcaggtgagccagactttgacactcccctccatataaaagatgctgctattaaagctattaaagatggacatactaaatatacagccattgacggcacattaactttaaaaaaggcaattataaataaattcaaacaagataacgacctaatctatgattatgatcaaattattgtttctagtggcgcgaagcaaacattatttaatctctgcatggggcttcttcaacatggtgatgaagctataattccaagtccttattgggtttcatatccagatatggtaagaattgcagatgcgacacctaggtttattgagacaagcatagaaagtaattttaaaatatcacccaaaacacttaaagattcactaaataataaaactcgattaatttttttaaatagcccctcaaatccaacaggaagttgttatacaaaaaaagagttgcttgagattggagatgttcttgttaactatcccaacgtaattattgcttctgatgatatttatgaaaaaattcattgggggaaatctaagttttacaacattggcactgctg

SEQ ID NO: 245445 - DNA, 453 bp, Unknown
  Bacterial polypeptide expressing nucleotide sequence isolated from the Sargasso Sea
aatgagcataatatccgacagtttaaaacgtataaaaccatcgccaacaattgcggtcactcaaaaagctagagaattgagagctgctggaaaagatgtaattggattaggagctggtgaaccagattttgatacacctaacaatattaaaaacgctgcaataaaagccataagaggtggtgatacaaaatatactgctgttgatggaacaccggctttaaaaaaagcaataattaaaaaatttaaaaaagaaaataatttaaagtactctgctgaagaaataactgttggaacaggtggaaaacaagttctttataatgcattcatggcaactttaaataaaggggatgaagtgattattccagcacctttttgggtttcttatcctgacatggttctgttagcaggcggaaaaacaaaaattgtaaaatgtaatgaggtagataattttaa

SEQ ID NO: 245446 - DNA, 616 bp, Unknown
  Bacterial polypeptide expressing nucleotide sequence isolated from the Sargasso Sea
atgagcataatatcggacagtttaaaaaggataaaaccgtcacctacaatcgctgtaagtcaaaaagccagagaattaagagctgctggcaaagatgtaataggattaggagccggagagccagattttgatacaccaaataatatcaaaaatgcagcgataaaagctattaaaggtggtgataccaaatatactgcagttgatggaacccctgctttaaaaaatgcgataataaaaaaatttaaaaaagaaaataatttaaagtattcagcagaagaaataacagttggaactggtggcaaacaagttctttacaacgctttcatggcaacactaaacaaaggtgatgaagtaattataccggcacctttttgggtttcttatccagatatggtgttattagcagggggtaaaccaaaaatagtaaaatgcagtgagaatgaaaattttaagttaacaccagcaaaattaaaaaaggctatttctaaaaaaacaaaatggttaatactaaattcaccttcaaaccccacaggagcaagttatacaaaagcagagatagtaaaattatctaaagtgctaacaaattataaaagaattcatattttaagtcgatgat

SEQ ID NO: 245447 - DNA, 600 bp, Unknown
  Bacterial polypeptide expressing nucleotide sequence isolated from the Sargasso Sea
aatgagcataatatctgacagtttaaagagaataaaaccctctcctacaattgcagttacccaaaaagctagagaattgagagctgctggcaaagatgtgattggactaggggcaggtgagccagattttgatacacctgacaacattaaagaggccgcaataaaagctattaatgaaggagacacaaaatatactgctgttgacggtactccggctttaaaaaaggcaatagtcaaaaagtttaaaagagaaaataatctagattactccctagatcaaataaccgttggaactggtggaaaacaagttctttataatgcatttatggcaactttaaataaaggtgatgaagtaataattccagcacctttttgggtttcatatccagacatggttttgcttgcaggaggaaaacccaaaatagttaaatgtgaagaaaaagatagttttaaattaactcctaaaaaacttcagaaagctatttcaaaaaaaactaaatggttaattttaaattcaccctcaaatccaacgggagcaggttacactagagatgaaattgaaagtttggcaaaaatattaataaaaaataaaaaaatttc

SEQ ID NO: 245448 - DNA, 691 bp, Unknown
  Bacterial polypeptide expressing nucleotide sequence isolated from the Sargasso Sea
aataacagacaaaactcgattgttaattttgattaatcctaataatccgactggaagctttgttgagaaatcagatattgatgttttggctgatggtcttaaaaaacatcctcatgtaacaattcttagtgatgaaatttatagtagacaaatttttgatggaaaagaaatgccgtcgttttttaattatccagagttaagagaaagattaatagtgttagaaggatggagcaaagcttattcgatgacaggatggagattgggttggagtttttggcctaaaaatttagtagaacacgtaaataaacttttgataaatagtgtttcatgtgtgaatgctgcagcacaatttgctggtattgctgctctagatggaccagatgattcaattaatgagatgatggaaaaatttacgcaaagaagagacataattcataaaggtttaaatgaacttgatggagtagaatgtagtcttccagggggagccttttatgcatttcctaaagttattggcactggaatgaatggagcagagtttgcaaggaaagctatgcatgaagctggggtagcgatagtgccaggatcagcttttggtgaaacttgccaaaattatgttaggtttagttttgcagcttctagagataatatttctcaagctttagaaaatataaagaaaatgctcactaaataa

SEQ ID NO: 245449 - DNA, 346 bp, Unknown
  Bacterial polypeptide expressing nucleotide sequence isolated from the Sargasso Sea
atgatcctgaacgacccggagatgcgggcccagtggctaaaggagctcattgactgtctcagttgcgatgagctcatcgctgtgaccgaacgtattgactggatgcggaacgacccaatagcccgggagatgcggaagctgctgaaggagaagctcgagaaagtcggcgtcaagggcaactgggaccgctcaatgcgggcttggtcgatgatcagtatcgacagggaccacgtcacgaagcagattggcatgttcaccttcacgggcctcaacaaggagctcggggttcgcttgaacaaggagcaatccgaagccatggtcgccgagcatcacgccttggcctgag

SEQ ID NO: 245450 - DNA, 837 bp, Unknown
  Bacterial polypeptide expressing nucleotide sequence isolated from the Sargasso Sea
tgccatatgggtctaaggtagtggttttattgcccagttggccaaatattcctgcggtgcagaggatcatgggcgcgaaagtggagggagttcctatcggcatgaaggaagggaaatggcgtcttgacatggagaaagtgtttgatgcctgtgactcgaagactgctgcaattattattaattctcctaataatccttctggctggaccatgtccaatcaggaacaaagaacccttttagaatttacccggaaaaaaggcatctggattgtcagcgatgaggtttatgcgcggatcagttttaatgcgaaccatgcaccttcattttgtgaagttatggaagaagatgaccgagtgatcattgtaaatagtttttcaaaatcatgggcaatgaccggatggagattgggctggatcacagcacctgctcatcttggagtccagtttgaaaaacttaatgagtacaatgttgcaggtcctccacctttcatccagcaggctggtatcgctgcactcaaagaaggggaggcttttatacaagaaagtaataatcgctatcttaatgcactttcacattttactgaatgggcaaaggcccaagaacgtatcgaatttgcacctccaattgctgccttctacgcattttttaaaattcgagagggaaatgacagtttagaaatggcaaaagatcttcttaaaaagggtgttgggcttgccccaggccgtgcatttgggcctcagtttgattcttatctccgtctttgtttcgcgtcgtccattccaaaattggaaagaggccttaatcgattggaagactggctgatggattttaagtgaa

SEQ ID NO: 245451 - DNA, 880 bp, Unknown
  Bacterial polypeptide expressing nucleotide sequence isolated from the Sargasso Sea
cctgggtggaaaacctacaatgcattatgcaatacaatgttttggtgagccaggtgcagaaattatacatcctacaccagcttttccaatttatgagtcgatgataaattatacaggttcaaaaccagtaccttatgatttaacagaagataaagatttaaagttcaaccctgataaaatattgtctttgattacagataagactcgattgttaattctaatcaaccctaacaatccaacaggaagttttgttgagaaaagagatattgactttctagctgatggtctaaaaaaacatcctcatgtaacaatattaagtgatgaaatttatagtagacaaatttttgatggaaaagaaatgccctcatttttccattatccagaattaagagaaaggctaatagtgttagaggggtggagcaaagcatattcaatgacgggatggaggcttggttggagtttttggccacaacatttaatcgaacatgttaataaattattaattaatagtgtttcttgtgttaatgctgcagctcaatttgctggtattgctgcactagatggtccagatgactcaattaatgcaatgatggaaaaatttacacaaagaagagatttaatttacaaaggtttaaatgatttaccaggcgtagaatgtagtttgcctggaggagccttttatgcatttcctaaagtaattggtaccggcatgaatggtgcagaatttgcaagaaaagctatgcacgaagctggggtagcgattgtacctgggtctgcttttggtgaaacttgtcaaaattatgtgagatttagttttgccgcttcaagagacaatatttctcaagcattagaaaatatcaagaaaatgctgagtaaatag

SEQ ID NO: 245452 - DNA, 704 bp, Unknown
  Bacterial polypeptide expressing nucleotide sequence isolated from the Sargasso Sea
agcatagtttccaacaatttaaaacgtataaaaccgtcgcctactatagcggttaccacaaaagccagagaaatgcgggctgctggtaaagatgtaataggtttaggagctggagaaccagattttgatacccctgataacattaaaacagctgctattgaggcaataaaaaaaggagacacaaagtatactgcagtggacggaactcctgccttaaaaaaagcgattgtggaaaaatttcaaagagagaataatctaagctatacaaccgatcaaattactgtgggcacaggaggcaaacaagttttatataatacatttatggcaactttaaataaaggggatgaagtaattatccctgcacctttttgggtctcatatccagatatggttatgttggcaggcggaactccgaagatagtcaaatgtgatgaaaaagatggtttcaaaatctcagcaaaaaaattaaaaaaagttatatcgaaaaaaacaaagtggctaattttaaattcaccttctaatcctacaggagcaggatacacaaaaaaagaaattgaagaattaggagaagttttgcttaaaaataaaaacgtgtttatcttaagtgacgatatttacgaacatataagatacgataattttaatttttatacaatcgctcaaattccaaaacttaaagagagaactctaacgatgaatggcgt

SEQ ID NO: 245453 - DNA, 924 bp, Unknown
  Bacterial polypeptide expressing nucleotide sequence isolated from the Sargasso Sea
gacttgaatctttaagaaaagaaatatcaagaacaacgttgaaatattcgggtgtagaaattactgaaaataatgttgttgtatctaatggtggaaagcaagctattgttacagcactaatgtcaatcttagattctggtgatgaagtaataattcctgcaccgtattggacaacttatcctgaagcggtaaaacttgctggtggtgaaccggtttttattaaacctgacaaaaaagataattttaaaatttcagtttcggatcttgaaaaggcaaaaaattcacaaacaaaattattaatttggtgttctccatcaaatcctacgggtgtggtctattcaaaagaggaatcagaggaaatatataattgggtatttgaaaacgatatttggattttatctgatgagttatatgagcacttagtatatgaaggtaagacatcaccttcaccaggacagtatgacaaagaattaaaaaatacaataattataaatggtgtttctaaagcatatgctatgaccggttggagagttgggtggttggttgctaacttaaatgtcataggattagctaaaaaaatacaatctcaaatatcatctaatgtttcaaatatatctcagatagctgccgagactgcattaaaaaatggacttgatgtgactgaagaaatgaaaatatcattcaacagaagaagactttatgcaattgagaaaattaatgaaataaataacataagcgtcggtaaccctactggtgcattctatttgtttgttgatgtcagccaatactgcaatggaaattatgaaggtataaattcatccatagatttttgtaactggctactggataaatattttattgcatttgttccaggagaagtaattggtgcacccggggtatatgagattatcttatgcccttagc

SEQ ID NO: 245454 - DNA, 820 bp, Unknown
  Bacterial polypeptide expressing nucleotide sequence isolated from the Sargasso Sea
gcaatgatggctactttaaacgatggtgatgaagtaatagtacctgctccctattgggtctcttatcctgatatagttttattagcaggaggaaaaccagtaataatggaatgcaatgagaaacaaggttttaaaataaatccaaatgatcttgagaaatatataacaccaaaaacaaaatggattattcttaattcgccttcaaatccaaccggagcatgttattcagagcaagatataaaagcaattgcagatattttggaaaaacataatcatgtgtatattttaagcgatgatatttatgagcatgtgacttatgagggttttaaattttttacaattgctcaaattgaaaatttaaaggatagagtgcttacaatgaatggtgtaagcaaagcttattcaatgacaggctggagaatagggtatgcagctggtccaaaggatatcattaaagctattgctaaaattcaatcacaatcaacaaccaatccttcttctattagccaagctgcagcagttgaagcattaagcggaacacaagactttattaaagaaagagcaaattcctttgaggagagaagaaattttgttgttaaatctttaaatgaaatagaaggagtcgaatgccttaatccagatggagcgttttatgtatttccaagttgtaaaggtttaataggtaaaaaagatcctaatggaaatgaaatcaaatctgatactgattttgttcaatcattattagagaatagtggaattgcagtagtccagggatctgcatttggtttagaaggttttttcagaattttcttatgcaaca

SEQ ID NO: 245455 - DNA, 849 bp, Unknown
  Bacterial polypeptide expressing nucleotide sequence isolated from the Sargasso Sea
tcattattccagcaccttactgggtttcttatcctgatatagttttgcttgctggagcaactccaatagttgttgaatgctctgaggaacagggttttaaattaacagcaaaagatctagaggctgcaattaccaataatactaaatgggttatattaaattctccttcaaaccctacgggagcatgttactcagaacaagaaattaaaaacttagcacatgtattaaaaagaaaacctcatgtaaatgtattaagcgatgatatttatgagcatattatatatgaaggatttaaattttttacaattgcacaaataccagaattaaaaaataaagttgttacaatgaatggagtcagcaaatcttacgctatgactggttggaggataggttatgccgcaggagataaagaagtaattaaagccattgcgaaaattcaatctcagtcaactacaaatccatcttcaataagtcaggctgctgcagtagaggcattgaacggaaatcaggattttataccaacaagatcactttcttttcaagaaagaagagactttgttgtaaattcattaaatgcaattgatggaattaattgtttaaaaccagatggtgctttttatgtttttccaagttgtaaagaattaattggaaaaaaagatataaatggaaataaaatagaaaatgatactgattttgtaaaatctcttttagaaaacaacaatgttgcagttgtccaaggatcagcttttggaatagaaggttattttagagtatcttatgcgacttctatggaaaatttagacaaagctatgaaaagaataaaagagttttgcgagagtttaagctaaa

SEQ ID NO: 245456 - DNA, 739 bp, Unknown
  Bacterial polypeptide expressing nucleotide sequence isolated from the Sargasso Sea
gctttgaaaaatgcgataataaaaaaatttaaaaaagaaaataacttaaaatactctgcagaagaaataacggtagggacaggtggtaaacaagttctttataatgcctttatggcaactttgaataaaggtgatgaagtaattattccagcacctttttgggtttcttatccagatatggttcttttggcaggaggcaaaccaaaatttattaaatgcagcgaagcagataattttaaattaactcctacaaaattaagaaaagcaattactaaaaaaacaaagtggataatatttaattcgccatccaatcctacgggagcaagttacacaaagtccgagataaataaattatctaaggtgttagcaaaaaataaaaaaatttatattttaagtgacgatatttatgagcatatcacttacgataaagcaaagtatttcactattgcacaaatatctaatttaaaaagcagaactctcacaatgaatggagttagcaaatcttatgcgatgaccggatggagaataggatatgcaggaggtccaaaagaaataattaaagctatacgtaaagttcaatctcaatcaacatcaaatccttcatcgattagccaagctgctgctgtagaagctttaaatggaactcagaaatttataaaaacaagatcaaaagagtttaaaaaaagaagagattttgtggttaaaagtttaaataatattaaaggaataaactgtttaa

SEQ ID NO: 245457 - DNA, 371 bp, Unknown
  Bacterial polypeptide expressing nucleotide sequence isolated from the Sargasso Sea
aatgtccgcgtttgcatccgtgccaaaggccccagagaataagatattcaacttgaataccctgttcaaagcagacacattcccccaaaaactgaatctaggagttggggcttaccgtgatcatttgggcaggccatacgtattcaatgtggtaaagaacgcagagacgcacctttacaacgcgacaatgggtggggacttgaacaaagagtatttgccaattcgtggcgacgacggttttacgcgtgcctgtggagagctcttgtacggtgctgacagcgttgtattcaaagaaaagcgaatagcatcggttcaaagcatttctgggaccggggcgttaaggcttgcagccgattttctctcaaagtggg

SEQ ID NO: 245458 - DNA, 832 bp, Unknown
  Bacterial polypeptide expressing nucleotide sequence isolated from the Sargasso Sea
cctgggctatccaatctatgaatctcaaattgagtaccaaggtggaatagcgattccctacggttacatagagacggaaaccggttttagtcttgatctcgaagcaatcaaaagctcgattactccaaagaccaaagcaatcatctacaacaactttcaaaatccaaatagcgcagagtcatctgatagagagatggaagaattagcagagctctgtataaaaaacgatctttgggttctaagtgacgaagcttattttgagatacagtacagtggcaaccctctttccattgtaagcctgcctggcatgaaagagcggacagtaattctctacacatgttctaagcgattcgcaatgacgggttggcgactaggtgcggctgtaggtcccaaaaacgcaatcgatataattagtaagttcaataccaacatcgagtcgtgcactacgcattttatccaacgtggtatgaccgaagccatagagggcagcaccgctggtccagacggaattctatccgaactgcgaaaacggcgtgacgctaccgtagaaggcttgaatgctatagatggtatttcagtaaccgcacctaatagcactttttatttgtttccaaacgtaagtgaagttatgcaacgaaaaaatatcagtgacgttaatatcttgatggagcaagcactcactgagaccaatgtctcattctgcactcgtaaacattttggtaggttaattgaaaacgaagtgggcgattacttaagatttgcttattcagggattgatgttgaagacataaatgaaggcatgaagaaattaaaattgttttttgaaagctag

SEQ ID NO: 245459 - DNA, 736 bp, Unknown
  Bacterial polypeptide expressing nucleotide sequence isolated from the Sargasso Sea
attgaaattatcaaatcgtataaaattaatccagccatcgtctactatggcgcttacatcaaaggcgaatgagcttagaagtcaaggtgaggatatcatagtattgaccgttggagagcctgattttgatactccagaatatataaaagaagatgcaaaaaaggccatagatatgggcgagactaaatatactgcagttgatggtactgttgatttaaaaaaggcaataataagaaaatttcaaaatgagaataacttagattatagtcttgacgagataattgtctcagctggttgtaagcaatcgatatttaattttctgcaagtcatcattgatgacggagatgaagtgattatcccgcaaccatattgggtatcatatgcagatatggttaagtattctggtggcataccgatcatgttatctacaaactatgaagataatttttctatagacatacataaatttaaatctcttataactgaacgtacaaaactatttatgattaatagtccaaataaccccagcggaaagtactatgatgctgagatgctaaagaaattatctgaagttctcaatgaacataataatgtatttatttcctcagatgatatatacgaacacatacattggggctctgagaaatttcataatatcttaaatgttaacccagagttaaaatctagaacaataatattgaatggagtatcaaaagcttattccatgacaggttgg

SEQ ID NO: 245460 - DNA, 733 bp, Unknown
  Bacterial polypeptide expressing nucleotide sequence isolated from the Sargasso Sea
gcaagcagctataaaagctattaacgatggtgatacaaaatacactgcagtagatggtactccagcattgaaaaaagcgattgtagaaaaatttaaaaaagaaaataatttagattatacaactgatcaaattacagttggtgctggtggtaagcatgtaatttataatgcaatgatggccacattaaacgaaggtgatgaagttatagttcctgctccttattgggtttcttatcccgatatggttttattagctggaggaaaaccagtgataatggaatgtgatgaaaaacaaggttttaaaataaatccaattgatcttgaaaaatttataactccaaaaactaaatggattattcttaattctccttcaaacccaactggagcatgttattcagagcaagatatcaaagcaattgcagcaatcttagaaaaacataatcatgtgtatattttgagcgatgatatttatgagcacgtgacttatgagggttttaaattttttacaattgctcaaattaatagtttaaaagatagggtgcttactatgaatggtgtaagtaaagcttactcaatgacaggctggagaatagggtatgcagctggtccaaaagatattgttaaagctattgctaaaattcaatcacaatcaacaactaatccttcctctattagccaagcagctgcagttgaggcactaagcggaacacaagattttattaaagaaagagca

SEQ ID NO: 245461 - DNA, 761 bp, Unknown
  Bacterial polypeptide expressing nucleotide sequence isolated from the Sargasso Sea
tatgaatttaatagcagacagaataaaacgcatcaagccctcaatgactgtgggaattaatatcaaagccaaagcaatgaaagaagatggaaaggatgtaattgttcttgcagctggagaaccagatttcaatactcctaaaaatatacgagatgcagcgaataaagcaatggaagaggggaaaacaaaatacgtacctggtaaaggcactcccgaattacaaaaagcgatacaaaaaaaattcaaggaagacaataatatcgattatagtttggatgaaataatttgtggcgttggaggaaagcatattatttacaatgctatgatggcaacaattaattcaggagatgaagtaattattacagccccttattgggtcagctatccagatattgttttattagcagagggaaagccagttattgttgagtgcccagaaatacagaattttaaaataaagcctgagcagttagaaaaacatattacaaataaaacaaaatggttaatgcttaatagtccaagtaacccaacaggtgctgtttattcaaaagaagaattacaagatttagctaaagttttaaataaatatcccaatgttctaattatgtgtgatgatatttatgaaaaaattatttatgatggacttgagtttcacaccttagcatctgttgaaccttcacttaagaatagatgcttaactcttaatggtgttttcaaatcttattgtatgactggttggaggcttggctactgtggcgcac

SEQ ID NO: 245462 - DNA, 771 bp, Unknown
  Bacterial polypeptide expressing nucleotide sequence isolated from the Sargasso Sea
atacaggttcaaaatctgttccttatgatttaacagaagataaagatctaaaatttaatcctgataaaatattatctttaatcacagacaagactcgattattaattttaattaatccaaataatccaacaggaagctttgttgagaaaagagatatagattttttagccgatggtttaaaaaaacatcctcatgtaacaatattaagcgatgaaatttatagtagacaaatttttgatggtaaagaaatgccctcatttttccattatccagagttgagagaaagattaattgtattagagggatggagtaaagcttattcaatgacaggatggaggcttggttggagtttttggccacaacatttaatcgaacatgtaaacaaattattaattaatagtgtttcttgtgttaacgctgcagctcaatatgctggcatcgcagcactagatggaccagatgactcaattaatgaaatgatggaaaaatttactcaaagaagagatttaattcataaaggtttaaatgatttaccgggggtagaatgtagtttacccggaggagctttttatgcatttcctaaagtaattggaactggtatgaatggtgcagaattcgcaaagaaagctatgcatgaagctggcgtagcaattgtacctgggtcagcatttggtgaaacatgtcaaaattatgtaagatttagttttgctgcttcaagagataatatttcccaagcactggaaaatataaagaaaatgttaagtaaataag

SEQ ID NO: 245463 - DNA, 909 bp, Unknown
  Bacterial polypeptide expressing nucleotide sequence isolated from the Sargasso Sea
gagataagtgctaaagcaaatcaattatctgcagaaggagtagatatttgcaatttaagtgcaggtgaacctgattttgatgccccaaaagaagttatagaggctacaagtaaagctatatttgatggatttacaaagtacgggcccgcagcggggaatttggatctccgaaaagcaattgcaaataaacttcaaattcaaaacgatttaaattatgaatttgaaaatgtaatggtcacaaatggtgctaagcaagcaatatataatcttttccaagtattgctaaatactggagacgaagttattattccttctccatattggttaagctatccccagatggttagattggcgggtggggagccaatttttacaaattcttctgcagaagatggattcaaaataaatatagaagatttgaagtctaaaatctcttcaaaaactaaatttataattatcaattctcctaataaccctactggaagagttatgtcaaaggaagaattattacaaattgccgatttagctagagaaaatccaaatatcaatattctttctgatgagatttacgaactaatcctgaaaaaagaatttaaacactacagtttatcttcattagcaaatgacttaaaagataggatttttttaataaatgggtttgcgaaaggatgggctatgactggctggaggataggttatttagtaggtcccaaagatgtaatcaaagcatcctcagcattacaaagtcaaagtacaagtaatgtttgctcttttgttcaaaaaggtgctttagaggctttaaaaattaataatgagtttttctcaatgataaatagccattatgatcaaagaagaagacttctctatgagggccttaataatataaatgggatatatattgaagaacct

SEQ ID NO: 245464 - DNA, 388 bp, Unknown
  Bacterial polypeptide expressing nucleotide sequence isolated from the Sargasso Sea
ggagaaccagattttgatactccagataatattaagcaagcagctataaaagctattaatgatggtgatactaaatacacagctgtagatggtactccagcattgaaaaaagcaatcttagaaaaatttaaaaaagaaaataatttaaactattcaactgatcaaattacagttggtgctggtggaaagcatgtaatttataatgcaatgatggccacattaaacgaaggagatgaagttatagtgcctgctccctattgggtctcttatcctgatatagttttattagcaggaggaaaaccagtaataatggaatgtaatgagaaacaaggttttaaaataaatccaaatgatcttgagaaatatataacaccaaaaacaaaatgga

SEQ ID NO: 245465 - DNA, 822 bp, Unknown
  Bacterial polypeptide expressing nucleotide sequence isolated from the Sargasso Sea
tcattacgcaccgtcaatgggtatatatgaatttcgtgaagcaattgcagatgcgactaatacctctaggggttttaaacctaacatagatcaagttcttgtaacgcctggtggaaacccaataatttttttaacaatagcatgtgcaaccaacccaggagatgaggtaatagttccagatcctggatttccatcgtatttcacttctattgagatatgtggtgccaaggcagtatcagttcctttaaaagaggaaaataattttcagttggcgcctgaggatgtctttaaagctgtcacagataaaacaaaattaattattattaattcaccatcgaatccaactggcggaagtatgtctaagagcgaattagaagaaatagcatcatttgcaaataaaaaaggtatatatttattaagtgatgagatatatgcaaggctggtttatggaaaagaaaatttctttagtccatcagttattgatgagtgtaaagaaaatactattatattgaatgggtttagcaaagcatttgcaatgacaggttggagacttggtgttgctgttggaccggaaaaaataattaataaaatgaatttaatgcttaatactattgtttcttgtgtcccgcctttcattcaggtagctggcatagaagcaattaatggaaaccaagatgaattgatagatatgaaaaatagatattttaatagaatgaatatctttgttgatggtttaaattcaattaaaggaattagttgcattaaacctaaaggagcgatgtatgcattccccaatataaaagaaacaggtttgagcagtaa

SEQ ID NO: 245466 - DNA, 619 bp, Unknown
  Bacterial polypeptide expressing nucleotide sequence isolated from the Sargasso Sea
atgaaaaatccattatccgaaagagtcataaaggttaaaccttcggcaactattgctatctcgtccaaagcaatggaaatgagatctgctggcgtagacgtcataagcatgagtgcaggcgagcctgattttgatacgcctgaatacataaaagatgctgcaaaaatggccatggatagcggtatgactaaatacacacaagtggatggcgtcccagatttaaagcaagctattatcaataaatttagtgaagataatgatttaatttatgatcctgaaaatatccttgtttcaacaggagcaaagcaaacactatataatctttttcaggccattttaggtcccggtgatgaggtcattattattagcccatactgggtatcctatccagacatggttctgttggcagatgcaaaacctgtaattgtagacacttttcaagaaaatgacttcgctttagatataagtgcatttgcaaatgccattaatgataaaacaaaacttgtcatcattaactccccatcaaatcctactgggattaccttcagcagatctgactacgaatcaattggtgctatattacagaatcacccgagatgtatatatcgcaacagatgat

SEQ ID NO: 245467 - DNA, 667 bp, Unknown
  Bacterial polypeptide expressing nucleotide sequence isolated from the Sargasso Sea
atgagcataatatcagacagtttaaagagaattaaaccatcaccaacaattgccgtcactcaaaaagcaagagaactcagagcagctggaaaagatgtaattggtctaggtgctggtgaaccagattttgatactccagataatattaaaaatgctgcgattaaagctatcaaaaaaggagacactaaatataccgcagtagatggtactcctgcattaaaaaaagctattattggaaagtttagaagagaaaacaaattaaagtattcaactgatcaaataactgttggaacagggggaaagcaagttctttataatgcttttatggcaactttaaacaaaggtgatgaagttattattcctgcaccattttgggtttcgtatccagatatggttctattggctggaggaaaaccaaaaattgtgaaatgtacagaacaagaaggttttaaaattactgcaaaaaaacttaaaaaaacaatttcaaaaaaaactaaatgggtaattctgaattccccatcaaacccaactggtgcaggttattcaaaaaaagaaatccaagatcttgctaaagttttaattagaaataaaaaagtctttattttaagcgatgatatctatgagcatataagatatgacaattttaactttttcacaattgcacaaa

SEQ ID NO: 245468 - DNA, 625 bp, Unknown
  Bacterial polypeptide expressing nucleotide sequence isolated from the Sargasso Sea
aatgagcataatatctaataatttaaaaagaattaaaccatccccaactattgcagttactcaaaaggcaagagaattaagagctgcaggaaaagatgtagttggacttggggcaggagaaccagattttgatactcctatcaatgttaaaaatgcagctataaaagcaataagagacggagacacaaagtatacagcagttgatggaactccagcattaaaaaaagcaattttaaaaaaatttaaaagagaaaataaactaaattataaactagatgaaatcacagttggaactggaggcaaacaagttctctataacacttttatggcaactttaaataaaggagatgaagttattattcctgctccattctgggtttcatatccggatatggttctcttagcaggtggaaaaccaaaaatagtaaaatgtgatgaaaaagatggatttaaaattacacctgcaaaattaaaagctgcaattacaaaaagaacgaaatggataattcttaattcaccatctaatcctactggatctggatacagtaaattagaaattcaaaaattagctaaggttttaatcaaaaacaaaaaagttcacattttgagtgatgatatctatgag

SEQ ID NO: 245469 - DNA, 847 bp, Unknown
  Bacterial polypeptide expressing nucleotide sequence isolated from the Sargasso Sea
ggtgatgaagtaattattccagcgcctttttgggtttcttatccagatatggttttattggctggaggcaaaccaaaaattataagatgtagtgagtcagataattttaaattaactcctaaaaaattaagaaaagttattactaaaaaaacaaaatggattatatttaattctccatcaaatcctactggagcaagttacacaaagtctgagataaagaaattatctaaagtattagaaaaaaataaaaaaattcatattttaagcgatgatatttatgagcatatcacttataataaagcaaattattttactattgctcaaatacccagtttaaaaaatagaacactcacaatgaatggcgttagcaaatcttatgctatgacagggtggaggataggttatgctggaggtccaaaagaaattattaaagctattcgtaaagttcaatctcaatcaacatcaaacccttcatctgtaagccaagcagctgcagtggaagctttaaacggaactcagaaatttataaatacaagatctaaagaatttaaaaaaagaagagattttgtagttagcagcttaaataaaattaaaggaataaattgtttaacacctaatggagccttctatgtttttccgagttgtaaaaaattattaggaaaaaaaacaaaattgaaaactgatactgaatttgttgaaaaacttcttgaaaaatctaatgtagcagtagttcaaggttctgcatttggattgccaggttattttagaatttcttatgctacatccatgcaaaaattaaaagtagcaatggcaagaataaaatatttttgtgaaagttttagttaaa

SEQ ID NO: 245470 - DNA, 406 bp, Unknown
  Bacterial polypeptide expressing nucleotide sequence isolated from the Sargasso Sea
aatgagcatagtttccaatagtttaaagcgaattaaaccctcaccaacgatagcggttacctcaaaagctagagaaatgagggcagcaggcaaagacgttatcggtctcggtgccggagaacctgattttgacaccccagacaatattaaagaggcagctattcaggctataaaaaaaggggacactaaatatacagctgttgatggaaccccaattttgaaaaaagccattcaaggaaaatttaaaagagaaaataatttatcttacgaacttgatcaaatttctgtgggaactggtggcaaacaagtgctttacaatgtattcatggctacactaaacccaggagacgaagttgtaattcccgcaccttactgggtatcttatcccgatatggttttgttggca

SEQ ID NO: 245471 - DNA, 586 bp, Unknown
  Bacterial polypeptide expressing nucleotide sequence isolated from the Sargasso Sea
caccctcatgtaacaatattaagtgatgaaatttatagtagacaaatttttgatggtaaagaaatgccctctttttttcattatccagaattaagggagaggttaattgtgctagaggggtggagcaaagcttattcaatgacgggatggaggcttggttggagtttttggccacaacacttaatagaacatgttaataaattattaattaacagtgtttcttgtgttaatgctgcagctcaatttgctggtatcgctgctttagatggtccagatgactcaattaatgaaatgatggaaaaattcactcaaagaagagatttaattcacaaaggcttaaatgatttaccaggtgtagaatgtagtttacctggaggtgctttttatgcatttccaaaagtaattggcactggtatgaatggtgcagaatttgcaaggaaagctatgcatgaggctggggtagcgattgtaccaggttcagcttttggtgaaacctgccaaaattatgtaagatttagttttgctgcctcaagagataatatttctcaagcattggaaaatatcaagaaaatgcttagtaattaag

SEQ ID NO: 245472 - DNA, 819 bp, Unknown
  Bacterial polypeptide expressing nucleotide sequence isolated from the Sargasso Sea
taatatacgtcaagcagctttaaaagcaatggagcagggtaaaactaggtatgtgcctggtaaaggaacgcctgaattgcaaaaagcaataattagtaaatttaaaaatgataataatatagattacagtgaagaagaagttatggttggtgttggaggcaaacatataatttataatgcaatgatggctactcttaatccagaagatgaagtaattattcctgctccttactgggttagttatccagatatagttttgttagctgaaggaaagccaattattgttccatgtgaagaaaaaaatagttttaaaataactcctaaaaatttagaaaaaaatattacttctaaaacaaaatggctttttttgaatagtccaagtaatccaacaggttctgtttatacaaaagaagaattgttggctattggtgagatacttaaaaaatatcctaaagtttttattttaactgacgatatttatgaaaaaattatttatgatgaaaataaattttataccattgtttctcttattcctgaattaaaaaacagaactttgacccttaatggcgtttctaaagcatattgcatgactggctggagacttggttattgtggagcttctaaagagattgttaaagcaatgaataagattcaatctcaaagtaattcttcaacttcatcaatttctatggctgcttccgtagaagccctattgggaaatcaagattttatttctttacataatattgaatttaaaaaaagacgagatatggttgtcgataaactaaattctatcgatggtatttcgtgtgcaaaacc

SEQ ID NO: 245473 - DNA, 478 bp, Unknown
  Bacterial polypeptide expressing nucleotide sequence isolated from the Sargasso Sea
atgaaactttcaaagagaatctcaaatacaaaaacgtctgctactatcgctatgagtatgaaagctcgtgaattaaaagcacaaggtaaagatataatatccttaagtgctggtgagccggattttgatacacctaatcatattaaagattctgcaattgagtcaataaataaaggaaacacgaagtatacacctgttgacggaatgcattcattaaaagaatctattgttaaaaaatttaaaaatgaaaataatttagactatgatcatagtcaaatattagtttctactggctgcaaacaaagtatatataacttatgccaagccactttggataaaggagatgaagtattaataccgtcgccttactgggtatcatatcctgaaatagtgaaattatcagacgcatcccctgtttttattgaaacagatagcgataatgattttaaaataactggaaaaatgttattagaaaaca

SEQ ID NO: 245474 - DNA, 897 bp, Unknown
  Bacterial polypeptide expressing nucleotide sequence isolated from the Sargasso Sea
tggcggaaaaccagtttttatataatgcttttgtagcaccattaaataaaggtgatgaagttattattccagccccgtttggggtatcgtatccagatatggttttgctcgctggagggaaaccaaaatttataaaatgtggggaagaagatggttttaaattaactccatcaaaacttaaaaaagcaattactaaaaaaacgaaatggataattttaaattctccttcaaacccaactggtgcagcttactcaaaaaaagaaattattaatttaggaaaggtgctattaaaaaataagaatatactaatcttgagtgatgatatttacgagcatgtaaaatttgataattttaaattttttacaatagcacagataaaaaagcttaaagatagaacacttacaatgaatggtgtaagtaaagcatatgccatgactggttggcgaattggttatgcagctggtcccaaaaatattatagctgctataagaaaaatccagtcacaatcgacttctaatccgtcatctataagtcaggcagctgctgttgaagctttgaatggaactcagagttttattaaaaaaagagctaaatcttttagtgacagaagaaattttgttgtgaattatttaaatagtattccagggattacttgcttgatgccaaaaggggcattttatgtttttccaagttgcaaagggttaattggaaaaaaaacaaaaataaaaaatgatacagattttgtgcaaaaacttcttgaaaaacagaatgtagctgtagttcaaggttctgcatttggacttgatggttattttagaatttcatacgcaacatcaatgaaaaaattaaagattgctatggaacgaattaagcttttttgtgaaagtttaggctaaa

SEQ ID NO: 245475 - DNA, 804 bp, Unknown
  Bacterial polypeptide expressing nucleotide sequence isolated from the Sargasso Sea
aatggcttttgtagcaacattaaataaaggtgatgaagttattattccagctccgttttgggtatcttacccagatatggttttgcttgctgggggaaaaccaaaatttataaaatgtggagaagaagatggatttaaattaacacctaccaaacttaaaaaagctattacaaaaaaaaccaaatggataattttaaattctccttcaaacccaactggtgcggcttatacaaaaaaagaaataattaatttaggaaagatattattaaaaaataagaatattctaattttgagtgacgatatttatgagcatgtaaaatttgataattttaaattttttacaatagcacagttaaagaaacttaaagatagaacacttacaatgaatggggtaagtaaagcatatgcaatgactggttggagaattggttatgcagctggtcctaaaaatatcatagctgcaataagaaaaatccagtcgcaatcgacttctaatccatcatccattagtcaggcagctgccgttgaagccttgaacggaactcagagctttattaaaaaaagagctaaatcctttagcgacagaagaaattttgttgtgaattatttaaatggtattccagggattacttgtttaatgccaaaaggtgcgttttatgttttcccaagttgtaaagggttaattggaaaaaaaacaaaaataaaaaatgacactgattttgtacaaaaacttcttgaaaaacagaatgtagctgtagtccaaggttctgcatttggacttgatggttattttagaatttcata

SEQ ID NO: 245476 - DNA, 773 bp, Unknown
  Bacterial polypeptide expressing nucleotide sequence isolated from the Sargasso Sea
aaagtatacagcagttgatggaactccagcattaaaaaaagcaattttaaaaaaatttaaaagagaaaataaactaaattataaactagatgaaatcacagttggaactggagggaaacaagttctctataacacttttatggcaactttaaataaaggagatgaagttattattcctgcaccattctgggtttcatatccggatatggttctcttagcaggaggaaaaccaaaaatagtaaaatgtgatgaaaaagatggatttaaaattacacctgcaaaattaaaagccgcaattacaaaaagaacgaaatggataatccttaattctccatctaatccaactggatctggatacagcaaatcagaaattcaaaaattagcaaaggttttaatcaaaaacaaaaaagtccacattttgagcgatgatatttatgagcatgttaaatatgataattttaaattttttactattgctcaaatttcaaaattaaaatctcgaacattaacaatgaatggagtgagcaaatcttatgcaatgactggttggagaattggttatgcagctggaccaaaagaaataatttctgcaattagaaaaattcagtctcagtctacttcgaatccatcatcaattagtcaagcagcagctgttgaagctttgaatggaaaacaagactttattaagaaaagagcaaaatcatttaaagaaagaagagattttgtagtaaaaagtctaaataatattgatggtattagctgtttaaaaccca

SEQ ID NO: 245477 - DNA, 895 bp, Unknown
  Bacterial polypeptide expressing nucleotide sequence isolated from the Sargasso Sea
cggaagcatgccgtgtataactgcatgcaagtcctccttgatgcaggagatgaagttctacttccctcaccatattggacaacttatccagagcccatagctctcgccggagcagtaacaaaagttattctcacttcttcagaatctggatttcgtgtatcagtagatcaacttgaggcagcaaaaacagataggacgaaagctttgatcttttgctctccgtctaacccgactggggcagtttacccaaaagatgaaatagaggaaatcgggagatgggctgcagataatggcatttgggttatcaccgatgaaatttatgagcatttggtctacggagatagtgaacacttttcaatgcctactcttgttcctgatatacaggaccgatgtgttgtgcttaacggagtagctaagacctatgctatgacaggttggcgagttggatggattattgcgccttctgatattgctaaagcagcttcaacattgcagtcacaccagacttcaaacgtttcaaatgtttcgcagcgcgctgcgctcgcagcagtttctggccctcttgatgatgtaggaaggatgcgagaagcgttcgataggcgccgccaagtggtgtttagtatgctttctgagactgaaggggtttctcttcttgaacctcaaggggcgttctacgctttccctagttttgaaggcgttctcggtcggtcgttgcggggtcggactcctaagacaactcttgatcttgcagagatacttttggaggaggtgcatgtggctctagttcccggagaagcgtttggcgctccgggctacgcgaggatctcatttgctcttggagatgaggagcttgaggaagggatccaaagagttatggaccttttccaaagctagt

SEQ ID NO: 245478 - DNA, 757 bp, Unknown
  Bacterial polypeptide expressing nucleotide sequence isolated from the Sargasso Sea
ttccttgcattatacacctgatcaggttcaggttggttgtggaggcaaacagaatatatttaatgctattgttgccacaatagaggagggtgatgaggtaatcgtaccagcgccttattgggtttcatatccagatattgtgttgttagcgggaggtaatcctgttgtccttccatgctcaatcgaaaataattttaaaatcaatccagaacagttagatgctgttattactccaaaaaccaagtggttaatattaaattcaccaagcaacccaactggagcagcatatactaaagaagaaattaagggcttggcaaaagttttagttcagcatccgcacgtctggataatgacggatgatatctatgagcatatcttatatgacggttttgaattttctactatagcggaggttgagcctcagttatatgaccgaacactaactttgaatggtctatcaaaggctttttctatgactggttggcgtgtgggatatgccgcggggccagttggtctaattaaagcaatgaataaaatacaatctcaaagtacctcacatactagctcaatttcacaggccgcttctattgctgctttaaatggtccgatggagtttttggtagaacgtaatcaagtatttatggaaaggcgagacttggtagttgaggccttatcgagcataaagggttttaagtgcttaaagcccgaaggcgcattttatgtttatcccgactgtagtggcgttattgggaaaaag

SEQ ID NO: 245479 - DNA, 766 bp, Unknown
  Bacterial polypeptide expressing nucleotide sequence isolated from the Sargasso Sea
ttccatatatgagtcgatgataaattacactggttcaaaatctgtcccttatgatttgacagaagataaagacctaaaatttaacccagataagatattatctttaattactgacaaaactagattgttaatcttaattaatccaaacaatccaacaggaagctttgttgagaaaagggatattgattttttagctgatggtctaaaaaaatacccacatgtaactatattaagtgatgaaatttatagtagacaaatttttgataataaagaaatgccatcatttttttactatccagaattaagagagagattgatagttttagaaggatggagcaaagcatattcaatgacaggttggagacttggatggagtttttggccgcaacatctagttgagcatgtaaataaattattaattaatagtgtttcatgtgttaatgctgcagctcagttcgctggtattgccgctttagatggaccagatgactcaattgatgaaatgatggaaaaatttacccaaagaagagatataatttataaaggtttaaacgatttacccggtgttgaatgtagtttacctggaggagcattttatgcatttccaaaagttattggtactggaatgaatggtgctgaatttgcacggaaagctatgcatgaagcaggagttgcaatagttcctggttcagcttttggtgaaacttgccaaaattatgttagatttagttttgctgcatcaagggataacatttcacaagcgtta

SEQ ID NO: 245480 - DNA, 854 bp, Unknown
  Bacterial polypeptide expressing nucleotide sequence isolated from the Sargasso Sea
aaataaaggagatgaagttataatacctgcaccttactgggtttcttatcttgatattattttattagcaggtggaaatcctaaaattgtaaagtgtgatgagaaagatagttttaaaattactccaattaaacttaaaaaagctatttcaaaaaaaacaaaatggataattataaactccccttcaaacccaactggttcagcgtatacaaaagaagaaattatagaattatcaaaaatattaattaaatacaaaaatatctatattttaagtgatgatatttatgaacatattacttatgataattttaatttcttcacaattgcacaaatagagtctttaaaagaaagaactttaacaatgaacggagtaagcaaatcatattctatgactggttggagaataggatatgctgctggacctaaagaaataattaaagcaatggcaaaaattcaatctcagtccacaagtaatcctacatctattagtcaggcagctgctgtagaagctttaaatggaactcaagattttataaaagagagagcaaattcttttaaagaaagaagagattttgtggttgatagtttaaataaaattaaaggaataaactgtttaaaaccagaaggtgcattttatgtatttccaagttgtaaaaaattattaggaaataaaacaaaattaaaaaccgataaagattttgtcgaaaagttattagaaaaatcagaagtagctgttgtccagggttctgcttttggtttaaatggatattttagaatatcttatgcaacttcaaaggaaaatttgaagaatgccatgcaaagaatcaaaatcttttgtgaaaatcttacttaga

SEQ ID NO: 245481 - DNA, 529 bp, Unknown
  Bacterial polypeptide expressing nucleotide sequence isolated from the Sargasso Sea
aatgagcataatatcagatagtttaaaaagaattaaaccatcgccaactatagctgtatctcaaaaagctagggaattaaaagcagccggaagagacgtaataggattgggtgcaggagagccagattttgatacaccagaaaacataaaagaagcagcaattaaggctattaacgcaggagatactaaatatacagctgtagatggaacggctgagttaaaagaggcgataattaataaatttaagagagaaaacaatctaaattatacaaatgaagaaataacagttggggtaggcggaaaacacgtgatttacaatttaatgatggctactctaaataaaggtgatgaagttttaataccagctccttattgggtttcatatcctgacatagtattgttagctggagcaaatccaattgtaattgagtgtcccgaagaacagggattcaaactaacagctaaagatttagaaagtaaaattacaaataatactaaatggttaatattaaactcaccttctaatcca

SEQ ID NO: 245482 - DNA, 892 bp, Unknown
  Bacterial polypeptide expressing nucleotide sequence isolated from the Sargasso Sea
cacacctgatcatataaaaagaatttgcaatttaaggctattaaaaattggctttacaaaatatacccaagtagatggaaccgatgagttaaaaaatgctatagcaagaaagtttaagagtgaaaataacttaaactacaaaaacgataatataactgttggagttggtggaaagcatgttatttacaatctatttatgtcatcaataaatgaaggcgatgaagttttaattccctctccatactgggtctcttatcctgatattgttaatctatgtaatggtaagcctgttattattgagaccaaatttgaaaatggatttaaggtcaaacctgaggatttggaaaaaagtattacaaataaaaccaagtggtttattattaattctcctggaaatcctacaggttccgtttattcagaaaatgagctaaagaaacttgctgaaataataagaaaacacaaaaatatctttattctttcagatgatatttacgagcacattttatacaaaaatgtaaaatttaataatattttaaatacctctcctgatttgtttgatagaactttcatcgtgaatggagtctctaaagttttttcaatgactgggtggagaataggttatggagctggaaataaagagctggttaaatcaatctctaaaatacaatctcagtgtacaacaaacccgtgttcaataagccaaatggctgcaatgtttgccttggaaaatgagaaaactttcttaaaggattggttggtaaaattcgaagatagaaaaaactttttagtagattttttttcttcagtagagggttttaagccatttatacctgaaggcgcattttatctttatgtatcatgtgaaggatttattggaaaaaaatataatgat

SEQ ID NO: 245483 - DNA, 667 bp, Unknown
  Bacterial polypeptide expressing nucleotide sequence isolated from the Sargasso Sea
aatgagcattatatctgatagcctaaaaagaataaaaccctcaccaaccctagcagttactcaaaaagcaagagaactcaaagctgcaggaaaagatgttattgggcttggcgctggtgaaccagattttgatacacctgataatatcaaagaagcagctattgaagccatcaaaaaaggagacactaaatacacagctgtagatgggacgccagcattaaaagaggcgataattaacaaattcaaaagggaaaataatctaaattataaaagcgatgaaataacagttggtgctggaggaaagcacgtaatctataatttgatgatggcaactcttaacaaaggtgatgaagttttaattccagcaccttattgggtttcttatcctgacattgtcttattggcaggaggtagtccaattgtgattgagtgttcagaagaacaaggttttaaattgacagctaaagatcttgaaagcaaaataaataataatactaaatggctaattttaaattcaccatcaaatccaacaggcgcatgttattctgaacaagagcttaaaaatctgtctcaagttttgaaaagaaaaccacatgtaaatattttaagtgacgatatttatgaacatgtaacttatgatggattaaaattttttactcttgcgcaa

SEQ ID NO: 245484 - DNA, 610 bp, Unknown
  Bacterial polypeptide expressing nucleotide sequence isolated from the Sargasso Sea
ttttttagctgatggtctgaaaaaacatcctcatgtaacaatattaagtgacgaaatttatagtagacaaatttttgatggtaaagaaatgccttcatttttccattatccagaattgagagaaagattaatagtattagagggatggagtaaagcttattcaatgacaggatggagacttggttggagtttttggccacaacatttaatcgaacatgtaaataaattattaattaatagtgtttcttgtgttaatgctgcagctcaatttgctggcatcgcagccctagacggaccagatgactcaattaatgaaatgatggaaaaatttactcaaagaagagacttaatttataaaggtttaaatgatttaccaggggtagaatgtagtttgcctggaggagccttttacgcatttcctaaagttattggaactggcatgaatggttcagaatttgcaaggaaggctatgcataatgctggggtagcaattgtacctggatcagcatttggtgaaacatgccaaaattatgtaagatttagttttgccgcttcaagagataatatttccaaagcactagaaaatataaagaaaatgttaagtaaataa

SEQ ID NO: 245485 - DNA, 841 bp, Unknown
  Bacterial polypeptide expressing nucleotide sequence isolated from the Sargasso Sea
atgaaaagtaattacgatttagcatctagaaattataacctaggaactgagactgcttttacagttttggcaaaagcaaataaattagtttctgaaggaaaaaatattatcaacctagggattggtcaacctgattttaaaacaccagaaaacattgttgaagctggtataaaggctcttaaagatggatatcatggttatacacaatcgactggcattccaagtctaagacaagctgtttcagatgatttaaaaaaaagacataacgcacaagtttctcccgataatattttaattgttccaggaggcaaggtcattatatttttttctgccatgttaatgggtgaaaccaataaagagattttgtatccgaatccaggttttcctatatatgaatcagcaataaattatagcggagcaagatctgtaccctatcaattaagtgaagaaaaaggtttctcattttcagctgaagatataatcagtaaaattaacaaaaacactagtttgataattattaatagtcctgcaaatccaacaggtggcgtagtgcctaaaagtgaacttgaaaagttagttgtgggattagaaaaatatccagatatagttttaatgagtgatgaaatttatgatcaattttgtttcggtgagaataaatttacatcaatgttacaatttcctgagcttagagataggttaataatattaaatggatggtctaagacttatgctatgactggatggcgtttaggctatggtatttttccaaaaaaactatatgaaaaagcagaaaagcatgctgtaaatattcattcatgcgttaatgctagcgctcaatagc

SEQ ID NO: 245486 - DNA, 685 bp, Unknown
  Bacterial polypeptide expressing nucleotide sequence isolated from the Sargasso Sea
atgagcataatatcagacagtttaaagaagattaaaccatcgcctactattgctgttactcaaaaagcaagagaattaaaagctgctggaaaagatgttattggacttggtgcaggagaaccagattttgatactccagataatattaagcaagcagctataaaagctattaatgatggtgatacaaaatacacagctgtagatggcactccagcattgaaaaaagcaattgtagaaaaatttaaaaaagaaaataatttaaattattcaactgatcaaattacagttggtgctggtggaaagcatgtaatttataatgcgatgatggctacattaaacgaaggagatgaagttatagtgcctgctccctattgggtctcttatcctgatatggttttattagcaggaggaaaaccagtaataatgaaatgcaatgagaaacaaggttttaaaataaatccaaatgatcttgagaaatatataacaccaaaaacaaaatggattattctcaattcaccttcaaatccaaccggagcatgttattcagagcaagatataaaagcaattgcagtaattttggaaaaacacaatcatgtgcatattttaagcgatgatatttatgagcatgtgacttatgagggttttaaattttttacaattgctcaaattgaaagtttaaaagata

SEQ ID NO: 245487 - DNA, 887 bp, Unknown
  Bacterial polypeptide expressing nucleotide sequence isolated from the Sargasso Sea
aatgaatcttttagggacagagacggcgtttgaagttcttagcagggcaagaaatttggaagctcaagggaagcaaatagtgcacctggaaattggtgagccagattttgatacaccaagtcatattgtcgatgcaggagtgcaagcccttaaagatggatacactcactacggacctacacctgggctgcctcaattaagagaggctatttcagagaatagccgtcaagtaagagggttaaatactgaccccaatagtattgtggttactccgggagctaagccaataatgttctatgtcatactagctctatctgaaccaggaatggaagtcatatacccaaatcccggatttccaatttatgagtcgatgattaagttttcaggagccaaaccagtccctatgcaattattagaagaatcaggttatcatcctgacttaaatgatttaaaaaacaaggtgaatgataagaccagtttaattattttgaattccccggaaaatccgtgtggctctgctttgtctgcagaagaattgaatactatagccgatatagtgaaacaacatcctaatttatatgtgatggctgatgaaatatacaaagatatactgtatcaaggtgagcattctagtattgctgcgattgaaggtatgcaggacagaacgattatcttagatgggttttcgaagagctatgcgatgactgggtggagattaggatacgggattatgcctcttgaattagttccccatattgtaaagcttgcggttaatagcgtttcctgtgctgcttcattctcgcaaatagcggctattgctgctttggaaggatctcaagaagaagttctaggaatggcacaagaattttcagaaaggaagactctta

SEQ ID NO: 245488 - DNA, 904 bp, Unknown
  Bacterial polypeptide expressing nucleotide sequence isolated from the Sargasso Sea
aatcaacttttctgacagaattaaccaattatcaacttctcaaacgttagctatggcagctttagcaagagagttaaaagcacaaggaaaagatattatcagtttaagtttaggtgaacctgattttaacactcctgattttatcaaagaagctgcaaaaaaagcaattgacgaaaactattctacttattctcctgtagatggttatgcagatttgaaagaagctatttgcagaaaattcaaaagagacaatgatttagaatataaaccagctaatattgttgtttcaacgggtgctaaacaatctttatacaacattgctcaagtaatgattaatgaaggtgatgaagttattttgccagctccttactgggtttcgtatttcgaaattgtaaaaatggctggaggaattcctgttgaagtaccaacaactattgaaagtgattttaaaattacacctgaacaattagaaaaagccgttactccaaaaacaaaaatgatttggtatagttctccttgtaatccaagtggttcagtttataatcgtgaagaattaactgctttagctaaagttttagaaaagcacccaaatatttatgtagtttctgatgaaatttatgaacacatcaacttttcaggaacattttgtagtatcgcttcaattcctggtatgtttgaaaaaacaatcactgtgaatggagttgcaaaagcatttgccatgacaggttggagaattggatacataggtgcaccagaatttattgcaaaagcttgtacaaaaatgcaaggtcaagttacttctggagccaactctattgcacaaagagcaacaattgcagcagttgatgcagatccaaaagtgttaaatgaaatggtttctgcttttaaaacagaagagatttag

SEQ ID NO: 245489 - DNA, 890 bp, Unknown
  Bacterial polypeptide expressing nucleotide sequence isolated from the Sargasso Sea
atcaaaaaagctgctatcaaagctatcaaaagaggagacacaaaatacactgcttttgatggcacacctgaacttaaaaaagctataattaagaaatttaaaagagaaaataaacttaactactctttagatcaaatcactgttggcacaggaggaaaacaagttctttacaatgcttttatggcaactcttaataaaggggacgaagtaattataccagcacctttttgggtatcatacccagatatggttttgttagctggaggaaagccaaaaataatcaaatgtaccgaacaagaagggtttaaacttactccaaaaaaattaaaaaaagcaatatctaaaaaaactaaatggatcattcttaattctccatcaaatccaacaggagcaggttattcaaaaaaagaaattaacgatttagcaaaaattttaatcagaaataaaaaaatttttattctgagtgatgacatttatgaacatgttaggtatgacaactttaatttttttacaattgctcaaatttctaagctaaaagataggacacttacgatgaatggagtaagtaaatcatatgctatgactggttggagaataggttatgctgctggtccaaaggaaataataaaagctattggaaaaatccaatcacaatcaacttcaaatccgtcttcaataagtcaagccgcagctgttgaggcattaaatggaaaacagggattcataaaaactagagctaaagcatttaaagacagaagaaactttgttgtgaaaagcttaaatagtataaaaggtataagttgtttaataccaaatggagcattttacgtatttccaagctgcaaaggattgttaaataaaaaaacaaaattaaaaaccgatactaattt

SEQ ID NO: 245490 - DNA, 712 bp, Unknown
  Bacterial polypeptide expressing nucleotide sequence isolated from the Sargasso Sea
tttgtccccgccaagtccagatgttattcgatttactgtcgggcaacccgattttgctacccctgatgcagtggttgaatcagcaaaatccgcccttgatagaggtgaaaccgcctatactcgcacccaaggcagtcctgagttatgtcaagcggtttctgaccatctaaaaggtcatgaaattgacattgatgcggaaaatatcgtagttgcacccggttgtaaacaagcagtcctctatgccatgatggctactctagaccctggtgatgaggttctactactggctccagcatggccatcttatgacggaatgctgaaattaattggcgcagttccaatccatgttccggtacgaagagacaattatcatccagattttgccgcgctagaaaaagccgtgacctccaataccaaagcaataatgatcaattcgccaaacaaccctactggcgcagtatacactcctgaagaaattgagaagctggtaaaactagcagtaaaacatgatttgtggattattgacgacatgatttatgcaaccttggtgtgggctgattacggctatacttcaccagcgtcaatcgaaggtggaaaagaacgaaccatcactattggaggttggtcaaagggttgggctatgactggatggcgccttggctgggcaggaggcagtaagcaagttgctgatgctattaagaaaattaatgca

SEQ ID NO: 245491 - DNA, 559 bp, Unknown
  Bacterial polypeptide expressing nucleotide sequence isolated from the Sargasso Sea
aatgagcattatatcagacagtttaaaaagaattaagccatctccaactattgcagttactcagaaagctagagaattgagattggcaggaaaagatgtaataggtttgggagctggagagccagattttgatacaccaaaaaatataaaaaatgcagcaatcaaagctattaaaagaggagatacaaaatacacagctgttgatggtacaccagaacttaaaaaggctattattaagaaatttaaaagagaaaacaaactaaattactctctaaatcaaataactgttggcacaggaggcaaacaagttctttataacgctttcatggcaactcttaacaaaggtgatgaagtaattatacccgcacccttttgggtatcatacccagatatggttttgttagctggaggaaaaccaaaaatagttaaatgcactgaacaagaaggttttaaacttaccccaaaaaaattaaaaaaagcaatatctaaaaaaactaaatggattattctgaattctccttcaaatccaacaggagcagggtattcaaaaaagagataa

SEQ ID NO: 245492 - DNA, 697 bp, Unknown
  Bacterial polypeptide expressing nucleotide sequence isolated from the Sargasso Sea
atgagcataatatcagacagtttaaagaagattaaaccatcacctactattgcggttactcaaaaagcaagagaattaaaagctgctggaaaagatgttattggacttggtgcaggagaaccagattttgatactccagataatattaagcaagcagctataaaagctattaatgatggtgatactaaatacactgctgttgatggcactccagcattgaaaaaagcaatcgtagaaaaatttaaaaaagaaaataatttaaattattcaactgatcaaattacagttggcgctggtgggaagcatgtaatttataatgcgatgatggctacattaaacgaaggagatgaagttatagtgcctgctccctattgggtctcttatcctgatatggttttattagcaggaggaaaaccagtaataatggaatgcaacgagaaacaaggttttaaaataaatccaaatgatcttgagaaatatataacaccaaaaacaaaatggattattcttaattcgccttcaaatccaactggagcatgttattcagagcaagatataaaagcaattgcagatattttagaaaaacataatcatgtgtatattttaagcgatgatatttatgagcatgtgacttatgagggttttaaattttttacaattgctcaaattgaaaaattaaaagatagagtgcttacaa

SEQ ID NO: 245493 - DNA, 588 bp, Unknown
  Bacterial polypeptide expressing nucleotide sequence isolated from the Sargasso Sea
attgaaattatcaaatcgtataaaattaatccaaccatcctctactatggcgcttacatcaaaggcgaatgagcttaaaagtcaaggtgaagatataatagtattgaccgttggagagcctgattttgataccccagaatatataaaagaagacgcaaaaaaagccatagatacgggtaagactaaatatactgcagtagatggtactgttgatttaaaaaaagcaataataagaaaatttcaaattgagaataacttggattatagcctcgatgagataatcgtttcagctggttgtaaacaatcgatatttaattttctccaagtcatcattgatgacggagatgaagtgattattccacagccatattgggtatcatatgcggatatggttaagtattctggtggcaaaccgatcatgttatctacgaactatgaagataatttttctatagacatacataaatttgaatctcttataactgaacgcacaaaactatttatgattaatagtccaaataatcccagcggaaagtactatgatagtgagatgctaaagaattatcggaagttcttaaagagcataat

SEQ ID NO: 245494 - DNA, 658 bp, Unknown
  Bacterial polypeptide expressing nucleotide sequence isolated from the Sargasso Sea
agaagaaataaccgttggtacaggtggtaagcaagttctttataatgcgtttatggcaactttaaacaagggagacgaagtaataattccagcacctttttgggtttcttatcctgatatggttcttttagcaggaggaaagccaaaaattgttaaatgtagcgaagcagataattttaaattaactcctacaaaattaagaaaagcaattactaaaaaaacaaaatggataatatttaattcaccatcaaatcctactggagcaagttatacaaagtctgagataaaaaaattatctaaagtattagaaaaaaataaaaaaatttacattttaagtgacgatatttatgagcatatcacttatgataaagcgaaatattttacaattgctcaaatagctagtttaaaaaatagaacactcacaatgaatggagttagcaaatcttacgctatgacaggatggaggataggatatgcgggaggtccaaaagaaatcattaaagcaattcgtaaagttcaatctcaatcaacatcaaacccttcatcggtaagtcaagcagcagcggtagaagctttaaatggaactcaaaattttatcaaagtaagatctaaagaatttaaaaaaagaagagattttgtagttaggagtttaaaataa

SEQ ID NO: 245495 - DNA, 591 bp, Unknown
  Bacterial polypeptide expressing nucleotide sequence isolated from the Sargasso Sea
aatgagcataatatcagacagtttaaagaagattaaaccatcgcctactattgctgttactcaaaaagcaagagaattaaaagctgctggaaaagatgttattggacttggtgcaggagaaccagattttgatactccagataatattaagcaagcagctataaaagctattaatgacggtgatactaaatacacagctgtagatggcactccagcattgaaaaaagcaatcgtagaaaaatttaaaaaagaaaataatttaaattattcaactgatcaaattacagttggtgctggtggaaagcatgtaatttataatgcgatgatggctacattaaacgaaggagatgaagttatagtgcctgctccctattgggtctcttatcctgatatggttttattagcaggaggaaaaccagtaataatggaatgcaatgagaaacaaggttttaaaataaatccaaatgatcttgagaaatatataacaccaaaaacaaaatggattattctcaattcaccttcaaatccaaccggagcatgttattcagagcaagatataaaagcaattgcagatattttggaaaaacacaa

SEQ ID NO: 245496 - DNA, 886 bp, Unknown
  Bacterial polypeptide expressing nucleotide sequence isolated from the Sargasso Sea
ttataatgcttttatggcaacattaaataaaggtgatgaggtgataattccagcacctttttgggtttcttatcctgatatggttctattagccggtggaaaaccaaaaatagtaaaatgtgatgaaaaagatggttttaaattaactgctaaaaaacttaaaaaagtaatctcaaaaaaaacaaagtggttaattttaaattctccatcaaatccaactggagccggttatactaaagaggaaattgaagatttggcaagagtattagttaaaaataaaaaaatttatattttaagcgatgatatttacgaacacataaaatatgataatttcaatttttttacaattgctcaaatttcaaagttaaaaaataggacattaacaatgaatggggtaagtaaatcatatgctatgactggatggaggattggttatgcggctggtccaaaagacattatcaaagcgataggtaaaattcaatctcaatcaacatcaaatccatcatctgtaagtcaggcggcggctgttgaagcactgaatggttcgcaagattttatacaggaaagagctcgagcattcaaagagagacgagattttgtagtacgaagcttaaatgaaataaaaggaataagttgtcttacacctaatggtgcattttatgtatttccaagttgtaaaggtttattaaataaaaaaacaaagcttaaaacagacactgattttgtacaaaaattattagaaaaaaaaaatgttgcagttgttcagggctctgcttttggtttgaatggatatttcagaatttcttatgctacatcaatggaaaatttaaagaaagcaatggaaagaattaaatctttttgtgagagcttaaattttagtttgata

SEQ ID NO: 245497 - DNA, 933 bp, Unknown
  Bacterial polypeptide expressing nucleotide sequence isolated from the Sargasso Sea
aatataaaaaatgctgcgatcaaagctataaaaagaggagacacaaaatacactgctgttgatggcacacctgaacttaaaaaagctataattaagaaatttaaaagagaaaacaaactcaactactctttggatcagatcactgttggcacaggaggaaaacaagttctttacaatgcttttatggcaactcttaataaaggggacgaagtaattataccagcacctttttgggtatcatacccagatatggttttgttagcgggaggaaaaccaaaaataatcaaatgtactgaacaggaagggtttaaacttactccaaaaaaattaaaaaaagcaatatctaaaaaaactaaatggatcattcttaattctccgtcaaatccaacgggagcaggttattcaaaaaaagaaattaatgacttagcaaaaattttaatcagaaataaaaaaatttttattctgagtgatgacatttatgaacatgttatgtatgacaactttaatttttttacaattgcgcaaatttctaagctaaaagataggacacttacaatgaatggagtaagtaaatcatatgctatgactggttggagaataggttatgctgctggtccaaaagaaataataaaagctattggaaaaatccaatcacaatcaacctcaaatccttcctcaataagtcaagctgcagctgttgaggcattaaatggaaaacaaggatttataaaaactagagctaaagcatttaaagacagaagaaactttgttgtaaaaagcctaaatagtataaaaggcataagttgtttaaacccaaatggtgcattttatgtatttccaagctgcaaggggttgttaaataaaaaaacaaaattaaaaactgatactaattttgttcaaagattactcgaaaaagaaaatgtcgctgttgtc

SEQ ID NO: 245498 - DNA, 400 bp, Unknown
  Bacterial polypeptide expressing nucleotide sequence isolated from the Sargasso Sea
caatacgccggaatatataaaagaggcagccattgaagctttaaaagctggggatacaaaatatacacccgtaccaggtagtatgaaattacgtcaggctatctgcgataaatttcaacgggaaaatggtctctcttttacatctgatcaaataacggtggggtgtggcggtaaacagataatttttaatgcttttatggcatctttgaatagtggggatgaagttataattcccgctccatattgggtttcatatccagatatagttgctttggcggacggaacgccggttttcgttactggtcaggaagaatgtggatttaaaattactgctagtcagttagatgcggcgattacccccagaacgaggtgggtcatgcttaactcaccgagtaatcct

SEQ ID NO: 245499 - DNA, 430 bp, Unknown
  Bacterial polypeptide expressing nucleotide sequence isolated from the Sargasso Sea
atgagcataatatcaaacagtttaaaaagaattaaaccttcaccaacgatagcagtcactcagaaagcaagagaattgaaagctgcaggcaaagatgtaattgctttaggcgcaggtgaacctgattttgacacacctaataatataaaaaaggcagcagttaaagcaattagaataggggatactaaatatacgccagttgatggaacacctgcaattaaaaatgcagtaattaaaaagtttaaaagggaaaataacttaacttatacttcagaccagataacagtaggtactggtggaaaacaagttttgtataatgcttttgtagcaacattaaataaaggtgatgaagttattattccagccccgttttgggtatcttacccagaatatggttttgctcgcttggggggaaaccaaaaatttataa

SEQ ID NO: 245500 - DNA, 757 bp, Unknown
  Bacterial polypeptide expressing nucleotide sequence isolated from the Sargasso Sea
ttggagataaatgtggaaatttctaaattaaacaaaaatataacgccatcaggaactatggcaatatcaaataaagcaaggcaattaaaagaacaggggaaaccagtaattggttttggagctggagaaccagattttcctaccccggcacatgtaatagaagatgtaaaaattgcatccgagaatccaacttatcataaatattctgccgttggaggattaaaaatattaagagatgaaatttcaaggacaactgctgaatattcaaattttgaagttgatgctgataatgttgtagtaaccaatggcggaaaacaagccatacttacaacatttatgtctctacttgatcctggtgacgaagtcttaattccatccccctactggactacatatcctgaagcagtaaaaatttctggaggacaacctgtaattgtagataccagttttgaaaatgattttaaagtaactgttgacgaactcgaaaataaattaactaaaaaaacaaaggtacttgtctgggtatcaccatcaaatccaactggtgtagtttactcaaaagaagaagcattagaaatatacaactgggcatttgaaaaagatatttggatactttctgatgaactatatgaacatttagtgtatgaaggtataacatcaccgtcaccagcaactattgataaagattttgaaaagactgtaatagtcaatggagttgcaaaagcatattctatgactggctggagagttggttgga

SEQ ID NO: 245501 - DNA, 728 bp, Unknown
  Bacterial polypeptide expressing nucleotide sequence isolated from the Sargasso Sea
aacaaaatatgtacccggtaaaggaactcctgaattacaaaaagcgatacaaaaaaaatttaaagaagacaataatatcgattacagtttagacgaaatcatttgtggtgttggtggtaaacacattatttacaatgctatgatggcaacaattaattcaggagatgaggtaattattacagctccttattgggtcagctatccagatattgttttattagcagaagggaagccagtaattgttgaatgcccagaaaatcaaaattttaaaataaaacctgaacaattagagaagtatattacaccaaaaacaaaatggttgatgctcaatagccccagtaatccaacaggtgctgtttattctaaggaagaattaaaagatttagccaaggtcttaattaatcatccacatgttcttattatgtgtgatgatatttatgaaaaaattatttatgatggacttaagtttaatactttagcatctgtagaaccttcactaaaaaatagatgtttaacactaaatggtgtttcaaaatcttattgtatgactggctggagacttggttactgtggagcaccaaaagaaattattgctgccatgaacaaaattcaatcacaaagtaccacatcaacatcatcaattactatggcagcttcagttgaagcaattagtggaccacaagattttatattagatcataataaaaaatttataaaaagaagggatt

SEQ ID NO: 245502 - DNA, 613 bp, Unknown
  Bacterial polypeptide expressing nucleotide sequence isolated from the Sargasso Sea
atggctttaatttcaaaaagattatcaagatttaaaccatctttaaccgtgaagatttctcagaaagcaagagaaatgtctaaaggtggagaaaaagtaataagtcttagttctggtgagccagattttgatacacctgatcatattaaaaattatgcgataaaagcaattaatgatggttttacaaaatatacccaggttgatggaattgacgaattaaaaaaagcaattgtaaataaatttttagtagaaaataacatttcttatgattgtgaaaacataacagtaggtgtaggcggaaaacatgtaatatacaatctttttatgtcttcattggatttgaatgatgaggtaatcatcccagcaccttactgggtttcctatcccgacattgtaagtctatgtggtggaaaacctattatagtcgatacgcaaatagaaaatgattttaagatcacaccgaatgaattagaaaaaaaaattactaaaaatactaaatggtttattattaattccccaggaaacccgacaggaacagtttataatgaacaagatttaaaagaattatctgaggtgctaattaaatttccagatggtaaatattctctctgat

SEQ ID NO: 245503 - DNA, 451 bp, Unknown
  Bacterial polypeptide expressing nucleotide sequence isolated from the Sargasso Sea
atgagcataatatcagatagtttaaaaagaattaaaccatcaccaactatagcggttactcaaaaagctagagaattaaaagctgctggaaaagatgttataggattaggcgcaggtgagccagattttgatactcctgataacattaaagaagctgcaataaaagcaattaaggatggtgatactaaatatacagctgtagatggaacaccagcattaaaagatgcaattgtacaaaaatttaaaagagaaaataatttaaattacaaaactgatgaaataaccgttggagcaggtggcaaacatgtaatttttaatttaatgatggcaacattgaataaaggtgacgaagttttaataccagctccttactgggtttcttaccctgatattgttttattggctggagccaacccaattgtaatgaatgttcagaagaacaaggttcaag

SEQ ID NO: 245504 - DNA, 835 bp, Unknown
  Bacterial polypeptide expressing nucleotide sequence isolated from the Sargasso Sea
caattatctgcagaaggagtagatatttgcaatttaagtgcaggggaacctgactttaatgccccaaaagaagttataaaggctacgagtaaagctatatttgatggatttacaaagtatggccctgcagcgggcaatttagatctccgaaaagcaattgcaagtaaacttcaaattaaaaacaatttaaatgttgaatatgaaaatgtaatggtcacaaatggtgctaagcaagcaatatataatcttttccaagttttgttaaatgctggagacgaagttattattccttctccatactggttaagttatccccagatggttagattggcaggtgggaaaccaatctttacaaattcttctgctgaagatggatttaaaataaatataaaagatttgaagtctaaaatatcttcaaaaactaaatttataattatcaattctccaaataatcctacgggaagagtaatgtcaaaggaagaattattacaaattgccgatttagctagagaaaatccaaatatcaatattctttctgatgagatttacgaattaatcctgaaaaaagaatttaaacattacagtttatctacactagcaaatgacttaaaagatagaattttcataataaatggttttgcaaaaggatgggctatgactggatggagggtaggttatttagtaggcccgaaaaatgtaatcagggcatcctcagcattacaaagtcaaagtacaagtaatgtttgctcttttgttcaaaaaggtgctttagaggctttaaaaattaataatgattttttctcaatgataaatagtcattacgaccaaagaagaa

SEQ ID NO: 245505 - DNA, 886 bp, Unknown
  Bacterial polypeptide expressing nucleotide sequence isolated from the Sargasso Sea
tggattaaaaaacgttatagtgttgatgttgattctgaaagaatacttatcatgcctggtggaaaaccaacaatgcattatgcaattcaatgttttggtgagccaggtgcagaaattatacatcctacaccagcttttccaatttatgaatctatgataaattatacaggatcaaaacctgtgccttatgatttaactgaagataaagatctaaagtttaatccagataaaattttgtctttgattacagacaaaactcgattattgattttaattaatcctaataatccaacaggaagttttgttgaaaaaagagatattgattttttagctgacggtctaaaaaaacaccctcatgtaacaatattaagtgatgaaatttatagtagacaaatttttgatggtaaagaaatgccttctttttttcattatccagaattaagggagaggttaattgtgctagagggatggagcaaagcttattcaatgacgggatggaggcttggttggagtttttggccacaacacttaatagaacatgttaataaattattaatcaacagtgtttcttgtgttaatgctgcagcccaatttgctggtatcgctgctttagatggcccagatgactcaattaatgaaatgatggaaaaattcactcaaagaagagatttaattcataaaggcttaaatgatttaccaggtgtagaatgtagtttacctggaggtgctttttatgcattcccaaaagtaatcggcactggtatgaatggcgcagaatttgcaaggaaagctatgcatgaggctggggtagcgattgtaccaggttcagcttttggtgaaacctgccaaaattatgtaagatttagttttgctgcctcaagagata

SEQ ID NO: 245506 - DNA, 748 bp, Unknown
  Bacterial polypeptide expressing nucleotide sequence isolated from the Sargasso Sea
tacaccttattgggtctcttaccctgatatgacattattagctggaggtattcctaagtttttaaattgtgatatagaaaaagattttaaaatagatgcacacaatctaaattcattcataactaataatacaaaatggttgattttaaatagcccatcaaacccctcaggttcatgttacaaaaaaagtgaattggaagatatagcaaaagttttaagaaatcatcctcatgtaaatgtcattacggatgatatatatgaatatataacatatgatgactttaaattttttacattggctcaagtagccccagatttaaaagatagaatcttaacagtaaatggtgtttcaaaaagttactgtatgactggttggagaattggctatgcagctggaagagaagatttaattaaagcaatgattaaaattcaaggccagtctacatcaaatgcttcatcgatttcacaatatgctgctttagctggtatagagggtagcagagactttttaagaccttgtttagaggcttttgataaaagacgaaacttagtagtaaataaattaaatgatatagacggaattaaatgtttgatgccaaagggagcattttatgcatatccaaacgttgagggattacttgggaaaaaaactcaaaatgggaaaattttaaataatgatactgatgtgactgaatggcttcttgaaaacgctaaagttgcagctgttcccggagttgcatttggacta

SEQ ID NO: 245507 - DNA, 847 bp, Unknown
  Bacterial polypeptide expressing nucleotide sequence isolated from the Sargasso Sea
ttgacattttctaaaagaataaatttaattaaaccatcttctacaatgtccctcacatctaaagcaaatgagatgagggctttgggtgaggatattattgtcttgactgttggtgaacctgattttgatactcctcaatatataaaagacgcaggccgaaaagctattgagtctgggaaaaccaaatatacttccgttgatggcgttgctgagcttaaagatgctattataaacaagttcaaaaaagagaatgatttgacattcaattctgatgaagtaattgtatctgccggatgtaaacaatcaatatttaaccttttacaggttatcattgataatgatgatgaggttttaatacctgaaccctactgggtttcctatgcagatatggtgatgtatgcaggtggcagacctattcttattgaatcatcatatgagaataattttgacttaaattttgaacttattgaaaaaaatattaataataaaactaagttatttatgttaaatagtcctaataatcctagtggtaaatattttaatagtgcaatgcttacaaagctagctgagatacttagaaagcacaatcatatttatatttcttctgatgatatttacgagcatatattttggcatcaagaaaaatttcaaaatattttaaatgtagcacctgatttaaaagatagaactattatattcaatggtgtgtctaaagcttattctatgaccgggtggagaattggatatgctgcaggaaataaagagattataaaaaaaatgaaaacacttcagtctcaaagtacctcatgcgctagctcagtatcacaatatgcagcaatatcagcat

SEQ ID NO: 245508 - DNA, 466 bp, Unknown
  Bacterial polypeptide expressing nucleotide sequence isolated from the Sargasso Sea
atgagcataatatcagacagtttaaagagaattaaaccatcaccaactatcgctgtaactcaaaaggctagagaattaagagcagcaggaaatgatgtaattggccttggcgcaggtgaaccagattttgacactccgaataatattaaaaatgcagccattaaagccattaaaaaaggagacactaaatatactgcggtggatggaactccagcattaaaaaaagctgttgtaggaaaattcaaaagagaaaataatcttaattattcaactgatcaaataacagtaggaactgggggaaaacaagttctctacaatgcttttatggcaactctaaataaaggcgatgaagttattattccagcaccattttgggtttcctatccagatatggttttgttagctggaggaaaaccaaaaataattaaatgtacagagcaagaaggttttaaactcacagcaaaaa

SEQ ID NO: 245509 - DNA, 869 bp, Unknown
  Bacterial polypeptide expressing nucleotide sequence isolated from the Sargasso Sea
tgtaaaggctaatgctttgagggctgaaggcaaagatattttagtgctggctgctggtgagccagactttgatacaccttccaatattagaaaagccgcttttgatgctatcgaaagtggacaaacaagatatgtgccaggcaaaggtactcctgcacttcaaaaagcaatccaatcaaaatttttaaaggataataatctaaaatatgcgcttgatgaaatcattgttggagttggtggtaagcacataatttacaatgctatgatggcaacgcttaaccatgatgacgaagttattataccagctcctttttgggtgagttatcctgacatagtattattagcagaaggaaaaccagtcatagttgaatgcccggagagtcaaaattttaaaattacagctaagcaactcgaaaaaaatattactaaaaaaactaaatggttaatgcttaatagtcctagcaatcctactggagaagtttattcaaaaagtgagcttaaagaactagcagaagttttacttaaatacccacaggtgctaataatgtcagatgatatttatgaaaaaattatttatgataatttagaatttagcactcttgcttctatcgaaccaaaattaaaagacaggtgtttaactttaaatggtgtctctaaagcatactgtatgacaggatggagacttggttattgcggtgcttcaaaagaaattattgcagcaatgaataaaatacaatctcagagcaatacgtcaacatcttcaatttccatggcggcagctgttgaagctttggtagggtctcaggaatttatcaaagatcataataatgctttcgttagaagaagagatatggttgtaagtttataaa

SEQ ID NO: 245510 - DNA, 825 bp, Unknown
  Bacterial polypeptide expressing nucleotide sequence isolated from the Sargasso Sea
tattcaaattttgaaatcgacccagataatgttgtagtaactaatggaggaaaacaagcaatactgacaacatttatgtcattacttgatcctggagatgaagttttaataccttcaccttattggacaacatatcctgaagcagtaaaaatttcaggtgggaatccagtagttgtcaatacagattttgaaaatgatttcaaagttacagttgaacaacttgaagagaaatttactgaaaaaaccaaggttcttgtatgggtatctccgtccaatccaaccggagtggtctattctaaagaagaagctgaggaaatatataactgggcatttgataaaaatatatggatactttccgatgagctttacgaacatcttgtttatgaaggagctacttcaccatcaccagcaactattgataaaaatcttgagaagacaattgtagtgaatggtgttgccaaagcgtactcaatgactggatggagagttggttggataatgggtaataatgatgttatcggtttgtctaaaaaaattcagtctcatgctacgtcaaacgtagcaaatatctctcaagttgctgcatattcagcattgaaaaatggattagacagcacaaatgaaatgaagaaagcatttgataaaagaagaaattatgctctcaatttatttcaaaccatagaaaacataagggttccaaatgcaacaggagctttttacgtttttcctgatgtaagtcattacacagatggtcttatagaaggggtgagcacatcaattgagctttgcgattggttattggagaaattctacattgcatttgta

SEQ ID NO: 245511 - DNA, 466 bp, Unknown
  Bacterial polypeptide expressing nucleotide sequence isolated from the Sargasso Sea
aatgagcataatatcggacagtttaaaaaggataaaaccgtcaccaacaatcgctgtaagtcaaaaagccagagaattaagagctgctggcaaagatgtaataggattaggagctggtgaaccagattttgatacgcctaataatattaaaaatgcagcgataaaagctattagaggtggtgatactaaatatactgcagttgatggaaccccagctttaaaaaatgcgataataaaaaaatttaaaaaagaaaataatttaaaatattcagctgaagaaataacagttggaacgggcggcaagcaagttctttacaatgcattcatggcaacacttaacaaaggtgatgaagtaattatcccagcacctttttgggtttcttatccagatatggttctattagcaggaggcaaaccaaaaatagtaaaatgtagcgagactgaaaattttaaattaactccagca

SEQ ID NO: 245512 - DNA, 844 bp, Unknown
  Bacterial polypeptide expressing nucleotide sequence isolated from the Sargasso Sea
acgctataatgtagatatcgattttgaaagaattattatcatgccaggtggtaaacctacaatgagttatgctatccagtgctttggtgaaccaggagcagaaattatacatccaactcctgcttttccaatttatgagtcaatgattaattatacaggatcaacttcagttccatatgatttaacagaaaataaagatctaaaatttgatccagataaaatattatctttaattacagacaaaacacgtttgttagttttaattaatccaaataatccaactggaagctttgtggaaaaaaaagatatagacgttttagctgatggtcttaagaaacatcctcatgtaacaatacttagtgatgaaatttatagcagacaaatttttgatggtaaagaaatgccaacattttttaattatccagagttaagagaaagattaatagtattggaaggatggagcaaagcttattcaatgactggatggagacttggttggagtttttggccacaacacttagttgaacatgttaacaaattgttaattaatagtgtatcgtgcgttaatgctgccgcccaatatgcaggtatagctgcattagatggtccagatgattcaattgatactatgatggaaaaattcactcaaagaagagatataatttataaaggtttgaatgatttaccaggtgttgaatgtagtttacctggtggagctttttatgcatttccaaaagttattggtactggaatgaatggtgcagagtttgcaagaaaagctatgcatgaagcaggagtagcaatagttcctggatcggctttcggtgaaacttgccaaaactat

SEQ ID NO: 245513 - DNA, 931 bp, Unknown
  Bacterial polypeptide expressing nucleotide sequence isolated from the Sargasso Sea
aaagcaattgcaaataaacttcaaaatcaaaacgatttaaattatgaatttgaaaatgtaatggtcacaaatggtgctaagcaagcaatatataatctttttcaagtcttgttaaatactggagacgaagttattattccttctccatattggttaagttatccccaaatggttagattggcgggtgggaagccaatttttacaaattcttccgcagaagatggattcaaaataaatatagaagatttgaaatctaaagtctcttcaaaaactaaatttataattatcaattctcctaataaccctactggaagagttatgtcaaaggaagaattattacaaattgccgatttagctagagaaaatccaaatatcaatattctatctgatgagatttacgaactaatccttaaaaaagaatttgaacactacagtttatcttcattagcaaatgacctaaaagataggatttttataataaatggatttgcgaaaggatgggctatgactggctggaggataggttatttagtagggcccaaagatgtaatcaaagcatcttcagcattacaaagtcaaagtacaagtaatgtttgctcttttgttcaaaaaggtgctttggaggctttaaaaattaataatgattttttttcaatgataaatagccattatgatcaaagaagaagtcttctctatgagggccttaagcgtataaatggtatttatattaaagaacctaatggagcattttacgcatttccaaaattacctaactcttcaattacttccgttgatttctgcagcaaagctcttcaagattatggcttagttgttgtacctggaaaagcttttggggctgacgaatgtataagaatgtcttgtgccgcatcagagattaaaattaaagatggactgcaaaggctgaaaaagc

SEQ ID NO: 245514 - DNA, 839 bp, Unknown
  Bacterial polypeptide expressing nucleotide sequence isolated from the Sargasso Sea
tatggcaactttgaataaaggtgatgaggtaattattccagcacctttttgggtttcttatccagacatggttcttttagcaggaggtaagccaaaaattgttaaatgcaatgaggctgaaaattttaaaataactcctaataaattaaggaaagccatcacaaaaaaaacaaaatggttaatattaaattcaccatctaatcctacaggagcaagttatacaaaagctgagataaaaaaattgtctcaaatattaattaaacacaaaaaaattcatattttaagtgatgatatctacgaacatattacatatgacaaagcaaagttttttactactgctcaaatatcaaatttaaaaaatagaactcttactatgaacggcgtaagtaaatcttatgctatgacaggatggagaataggttacgcgggaggaccaaaagaaataattaaagctattcgtaaagttcaatctcaatcaacttcaaacccatcttcagtaagtcaagcagcggccgttgaagctttaaatggaactcaaaattttataaaagtaagatcaaaagagtttaaaaaaagaagagattttgtagttagtagcttaaataaaataaaaggaattaattgcttaactcctaatggtgctttttatgtttttccaagttgcaaaaaattactaggtaaaaaaacaaaacttaaaacagatagtgaatttgttgaaaaacttttagaaaaggcaaatgtagctgtcgttcaaggatcagcttttggtttacctggttattttagaatttcttatgccacatcaatgcaaaagttaaaaatagcaatggagagaataa

SEQ ID NO: 245515 - DNA, 805 bp, Unknown
  Bacterial polypeptide expressing nucleotide sequence isolated from the Sargasso Sea
agaaaataatttagattatacagctgatcaaattactgttggagcagggggaaagcatgtcatttataatgccatgatggccacattaaatgaaggtgatgaagttatagttccagctccttattgggtttcttacccagatattgttttattagcagggggcaaaccagttgtaatggagtgtgatgaaaaacaaagttttaaaataaacccatcagatctagaaaaatttataactccaaaaacaaaatggattattttaaattctccttctaatccaacaggagcatgttattcagaaaaagatattagagaaatcgcaaaagttctggaaaagcattctcacgtatatattttaagtgatgatatctatgaacatgtaacttatgaaggatttaaattttttactattgctcaaattgaaggtttaaaagaaagagttcttacaatgaatggtgtaagcaaagcttactcaatgactggttggagaataggttatgcggcaggtccaaaagaaattattaaagccattgcaaaaatccagtcacaatcaacaactaatccatcatcaattagtcaagccgcatcagttgaagcattaagtggaacacaagattttattaaaataagagcagattcatttcaagaaagaagagactttgttgttaaagctttaaatgatatcgatggcatcgagtgcttaaatcctgatggtgctttttatgttttccctagctgtaaaggtttaatgggaaaaaaagatactaatagaaaagaaattaaatcagacacagattttgttcaa

SEQ ID NO: 245516 - DNA, 835 bp, Unknown
  Bacterial polypeptide expressing nucleotide sequence isolated from the Sargasso Sea
ttaaataaaggagacgaagtaattatacctgcacctttttgggtttcttacccagacatggttttattagcaggtggaaaacctaagattattaagtgtgatgaaaaggatggctttaaaatatcagcgaagaaattggaaaaagctatatcaaaaaaaacaaaatggattattttaaattctccttctaatccaactggcgcaggttacacaaaaaaagaaatagaggatttatcaaaagtattattaaaaaataaaaaaattttcattttgagcgatgatatttacgagcatataagatatgacaattttgatttttttacgattgctcaaatttcaaaattaaaagatagaactttaactatgaatggagtaagtaaatcttatgctatgacaggttggagaattggttatgccgctggtccaaaggaaataattactgcaatcagaaagatacaatctcaatctacatcaaatccctcttcaattagtcaagcagcagcagttgaagcattaaacggaacgcaaaactttatgaaagaaagagctgaggctttcaagcaaagaagagattttgtagttaacagtttgaatagcataaagggaattagctgcttaaatcctaacggcgcattttatgttttcccaagttgcaaaggactattaaacaataagaccaaacttaagactgatactgaatttgttcaaaagttattagaaaaatctatggttgcagtggttcaaggctcggcttttggattacatggctattttagaatatcttatgcaacgtcaatggaaaatctaaaaacggcaatatcaagaattaaaaatt

SEQ ID NO: 245517 - DNA, 727 bp, Unknown
  Bacterial polypeptide expressing nucleotide sequence isolated from the Sargasso Sea
aatgagcataatatcagatagtttaaaaagaattaaaccttctcccacaatagctgtaacccaaaaagctagagaattaaaagcatctggtaaagatgtaataggattaggagctggcgaaccagattttgatacccctaacaatataaaggaggccgcgattaaagctataaaagatggagataccaaatatacagcagttgatggtacccagattttgaaagaagcaatagttaataaatttaaaagagaaaacaatcttgattacacaactgatcaaattacagttggggcagggggtaaacatgtaatttataatctaatgatggcaacattgaataaaggtgatgaggttttaataccagctccatactgggtatcgtatcccgatatagtattattagcaggagcaacacctgttgcagtagagtgttcagaagaacaagactttaaaattactgcaaaagacttagaaagtaagattaccaataacacaaaatggctaattatcaactctccttctaatccaactgggtcaacttattctgaacaagaaataaaaaatttatcacaagttttaaaaagaaatccacatgtaaatattttgagtgatgatatttatgagcacattacttatggtggttttaaattttttactattgctcaaattccggaattgaaaaatagagttgttacgatgaatggagtaagcaagtcgtacgcaatg

SEQ ID NO: 245518 - DNA, 459 bp, Unknown
  Bacterial polypeptide expressing nucleotide sequence isolated from the Sargasso Sea
aatgagcataatatcagacagtttaaagaagattaaaccttcgcccacaattgctgtaactcaaaaagctagagaattaaaagcagcaggaaaagatgttatcggtttaggggcaggtgaaccagattttgatacaccagaaaatattaagcaggcagctattaaagcaataaatgatggagacactaagtacactgctgttgatggaactgtagctctaaaaaaagcaatagtcgaaaaatttaaaaaagaaaataatctagattatacaatagaccaaattactgttggtgcaggtggaaagcatgttatttacaatgctatgatggctacattaaatgaaggtgatgaagttatagttccagctccttattgggtttcttacccagatattgttttattagcgggaggcaagccagttgtaatggagtgtaatgaaaaacaaggctttaaaataaa

SEQ ID NO: 245519 - DNA, 907 bp, Unknown
  Bacterial polypeptide expressing nucleotide sequence isolated from the Sargasso Sea
cttggacttaaaaaaagcaatttgtaaaaagtttaaaagagataataacttagattataatatagatcagattgtagtttctactggagcaaaacaatcaattgcaaatgtatgtatgtctctaataaataaaggtgatgaagtagtcattcctactccttattgggtaagttatagtgcaatggtttctctagcagatggaatcccagtttttgttcatcctgacgagaatgctaactataaggttactgcagcacagctcgaatcagctatcactgataaaactaaaatggtaatgctcaattctcctaataaccctagtggctctgtgtttacaaaggaggagtatctggaattttcaaaagtgcttatgaagtatcctaaggtaatagttgtttcagatgaaatttatgaacatataaattatggagttgaaagtgtaagctttgcatcactgcctggaatgtatgaaaggacagttacagtaaatgggatatcgaaagcctttgcgatgacgggatggagaataggctatcttggagctccaaagattctagctaaggcatgtaataaaatgcaaggccagattaccagtggtgcaaactgtattgctcaaagagctgctattacagcactagaggagtcaccagagagaataaaatatatggtcgatgaatttaaaattagacgagatttaattatcgatcttgttaatcaaattaatggttttaatgtcaaacagcctccatctggagctttttatatttttccagaagtctcacagctttttggaaaaacctttgatgggcatttagttaataatgctaatgatttatcaatgctaattcttgaaaaagctcatgtagcaactgtccctggagatgcctttggatatcccattgtataa

SEQ ID NO: 245520 - DNA, 955 bp, Unknown
  Bacterial polypeptide expressing nucleotide sequence isolated from the Sargasso Sea
ttcgatacaccgaaacatataaaagaacaagcgataagatctattaataaaggttttacgaaatatactgcagtagacggaataatagaacttaaagaagcaataaaagaaaagtttattaatgaaaataaaattaactatgctattgatcagataactgttggagcaggcggtaaacacgtaatatataatttatttatgtcaactcttaacaatttagatgaggttataattccctctccatattgggtttcatatcctgatattgtttccttgtgtggagggttcccaagaatagttaaaactaatattaaaaataattttaagttaacgccagacaaattagaagagaatattaatgaaaaaactaaatggcttattattaattctccttcaaatccgaccggtgctgtttattccaaggatgaactattagaattatcaaaaattttattaaaatataaacatgtttggattttaactgacgatatttatgaacatttaatttatgataaatatgaatttcttaatattttgaatattgaacctaaattatttgatagaacttttattgttaatggtgtttcaaaagtcttttctatgactggatggagaattggttatggtgcaggtccagaaataatagttaagtcaatttcaaaaattcaatctcaaagcactactaatccgtgttcaataagtcaaatggctgctttaacagcattgaattctaaaaaattatttttaaatgaatggttgagtgagtttattcaaagaagaaattttgttgttgattatctaaataaaattgatggccttaattgtttaatgccgcagggagcattttatgtttttgtatcatgctctgggttaattaataaaaaaactcccaatgggaaaaaaatcatgaatgatattgattttgcagattattcttatagaatatgctggtgtg

SEQ ID NO: 245521 - DNA, 383 bp, Unknown
  Bacterial polypeptide expressing nucleotide sequence isolated from the Sargasso Sea
aatgagcataatttccaacaatttaaaacgtataaaaccgtcgcctaccattgcagttactacaaaagctagggaaatgagggcaagcgggaaggatgttataggattaggtgctggagagccagatttcgataccccagacaatgttaaagaggccgctatagaagctatcaaaaaaggtgataccaagtacacagcagttgatggaactccaggcttaaaaaaagcaattgttgaaaagttcaaaagagagaataatttaaattatacgattgaccaaatcacagtcggaactgggggcaaacaagttatatacaacaccttcatggcaacattaaataaaggagacgaggtaattatacctgcacctttttgggtttctt

SEQ ID NO: 245522 - DNA, 763 bp, Unknown
  Bacterial polypeptide expressing nucleotide sequence isolated from the Sargasso Sea
ttagattacgatttagatgaagtggtcgtctcggcaggttgtaaacaatccatattcaattttcttcaagttatcattgatgatggtgatgaagttattatacctcagccatattgggtctcatatgcagacatggttaaatattctggtgggatacctgttatgttagaaacagaatatgaaaataattttactattgatatcgataaatttaagagtctcataaatgataaaaccaagctttttatgattaatagtccaaataatcctagtggtaaatattatgattcaaagttattaaatgaattggcatcagtgcttatagatcatgaaaacatatttatctcatctgatgatatttatgagcatatacattggtctaacgaaaaatttcataatatactcaacgtttctcctcgccttaaagaacgtacggttattctcaatggggtttcaaaggcatactctatgacaggatggagaattggatatgctgcaggaaataaagaaattattaaaaaaatgaaaacccttcaatcgcaaagcacttcatgtgctagttcaatatcgcaagcggcagcggaagctgctttgagtaacgcctgtcttgagttaccggagatgaatagacaatataaagaaaggcatgattttgttgtatcagaattaaatcaaattaaaggcgtagaatgcaaacctactgatgggacattttatgtttttccctcttttaaagattttattaataaaagtgaaattgttt

SEQ ID NO: 245523 - DNA, 367 bp, Unknown
  Bacterial polypeptide expressing nucleotide sequence isolated from the Sargasso Sea
aatgagcattatatcggatagtttaaaaagaataaaaccttccccaacgattgctgttactcaaaaagccaaggaattgaaagctgctggtaaagatgtaataggtttaggcgcaggagagccagattttgataccccaaataatataaaaaaagcagctatagatgccattcaaaatggtgatacgaaatatacggctgttgacgggacgaaagctttgaaagaggcaatcgttaaaaaatttaaaagggaaaataatcttaattatacaacagatcaaataactgtgggagcagggggcaagcatgtaatttacaatttaatgatggcaacattaaataaaggtgatgaggtaataataccagcc

SEQ ID NO: 245524 - DNA, 583 bp, Unknown
  Bacterial polypeptide expressing nucleotide sequence isolated from the Sargasso Sea
ccgcatgtaacaatacttagtgatgaaatttatagtagacaaattttcgatggaaaagaaatgccaactttttttaattatccagagttaagagaaagattaatagtattagaaggatggagcaaagcttattcaatgactgggtggagacttggttggagtttttggccgcaacacttagttgaacatgttaacaaattattaattaatagcgtttcatgtgttaatgctgcagctcaatttgcaggtatagctgcattagatggtccagatgactcaattgatgttatgatggaaaaattcactcaaagaagagatataatttataaaggtttgaatgatttaccgggtgtggaatgtagtttacctggtggagctttttatgcgtttccaaaagtaattggaacaggaatgaatggagctgagtttgcaaggaaagccatgcatgaagcaggagtagctatagtacccggttctgcttttggcgaaacttgccaaaattacgtaagatttagttttgcggcctctagagataatatttcccaggcattagaaaatatcaagaagatgttagctaaataag

SEQ ID NO: 245525 - DNA, 493 bp, Unknown
  Bacterial polypeptide expressing nucleotide sequence isolated from the Sargasso Sea
atgagcataatatcagatagtttaaaaagaattaaaccatcgcctactatagctgttactcaaaaagctagggaattaagagcggctggtaaagatgtaattggactaggagcaggagaaccagattttgatacaccaaataatattaagaatgcagctataaaagccattaggataggtgatactaaatatactgcagttgatggaactccagctttaaaaaaagcaataatcaaaaaatttaaaaaagaaaacaatttaaagtattcgcatgaagaaataactgtaggaacaggcggtaaacaagttctttataatgcgttcatggcaactttaaatagaggcgatgaagtaattattcctgcacctttttgggtttcctatcctgacatggttcttttagcgggaggaaaaccaaaaattgtaaaatgtagtgaggctaataattttaaaattactccagccaaactaaaaaaagctattcaaaaaaaac

SEQ ID NO: 245526 - DNA, 697 bp, Unknown
  Bacterial polypeptide expressing nucleotide sequence isolated from the Sargasso Sea
aatgagcatagtttccaacaatttaaaacgcataaaaccctctccaacaatagctgtttctacaaaagctagggaaatgcgtgctgctgggatggacgttattggtctaggggccggagaacccgattttgacaccccagacaatataaaagaagccgctatggaggctataaaaaatggtgatacaaagtataccgcagttgatggaacgcccgcacttaaaaaagcaatagtagacaaatttaaaagggagaataatttaagctacacaaccgaccaaattactgtcggcacaggaggtaagcaagttatttataatacctttatggcaacattaaacaaaggggatgaagtaattatcccagcacctttttgggtttcctatccagatatggtcttattagcgggaggtactcccaaaatagttaagtgtgatgagaaagatagtttcaaactttctgcgaagaaattagaaaaagcaatatcaaaaaaaactaaatggcttattttaaattcaccttctaatccaactggagcaggttatacaaaaaaagaaatagaagatttatcaaaagttttattaaaaaataaaaaaattttcattctaagtgacgatatttatgagcatataagatacgataattttaatttttttactattgcccaaatttcacaattaatagaaagaactttgacc

SEQ ID NO: 245527 - DNA, 844 bp, Unknown
  Bacterial polypeptide expressing nucleotide sequence isolated from the Sargasso Sea
gacgaagtgcttatccctgcaccttattgggtatcttatcctgatatggttttattagctggtggaaaacctaaaatagtaaaatgttctgaaaaaaatgaatttaaaataactccagaagaattaaaaaatgcaattggaaaaaaaacaaaatggttaattataaattcgccatctaatccaactggatcttgttatacaaaaaaagagatagaagacttatcaaaaatattaataaaaaataaaaatgtttatattcttagtgacgatatctatgagcatattacttacgatgattttaaatttttcactattgctcaaatcaaagctttaaaaaatagaactttaacaatgaatggcgtaagtaaatcttactcaatgactggatggagaataggatacggtgccggaccgaaagagataattaaagctgtggcaaaaattcaatctcaatctacaacaaatccatcttcaattagtcaggcagcagctgtggaagctttaaatggtactcaagattttattcaaactagagcaaattctttcaaagatagaagggattatgttgttgaaactttaaatagtattaatggtttgagctgtttaaagccaagcggagctttttatgtgtttcctaactgtaaaaaattgttaggtaaaaagacaaaattaaaaacagacaaagaatttgtcgaaaaattacttgagaaggcagaagtggctgtagttcaaggatctgcatttggattggaaggatacttcagaatttcttacgcaacttctatggataatcttaaaaaagctttagatagaataaaattgttttgtgagagtttaggctaat

SEQ ID NO: 245528 - DNA, 892 bp, Unknown
  Bacterial polypeptide expressing nucleotide sequence isolated from the Sargasso Sea
tttaggtgcaggtgaacctgattttgacacaccagataatattaaaaaagctgctgtaaaagctataagaaaaggtgatactaaatacacttcagtggacggaacgcctgcaatcaaaaatgcagttataaaaaagtttaaaagagaaaataaacttaactatacttcagaacagataactgtaggaactggaggaaaacaagttttatacaatgcttttgttgcaacattaaataaaggagatgaagttttaatacctgctcctttttgggtatcttacccagatatggttttgctcgctggagggaaaccaaaatttataaaatgtggagaagaagatggattcaaattaacacctaccaagctcaaaaatgccattacaaaaaaaactaaatggataattttaaattctccatctaatcctactggtgcagcttattctaaaaaagaaattataagtttagggaaggtattacttaaaaataaaaatgtttttattttgagcgatgatatttatgagcacgtaaaatttgataattttaaattttttacaatcgcacaaatcaaaaaactcaaagacagaacattaactatgaatggtgtaagtaaggcatatgctatgactgggtggaggattggttatgctgctggaccaaaaaatattatagctgcaataagaaaaattcagtcacaatcgacctctaatccatcatctataagtcaggcagctgctgtagaggctttgaatggaacccaaagctttatcaaaaaaagagctaaatcttttagtgacagaagaaaattcgttgttaattatttaaacagcataacagggattacttgtttaatgccaaaaggtgcgttttatgttttccctagttgtaaaggtcta

SEQ ID NO: 245529 - DNA, 881 bp, Unknown
  Bacterial polypeptide expressing nucleotide sequence isolated from the Sargasso Sea
agcataatatcaaacagtttaaaaagaattaaaccttctccaacaatagctgttacgcaaaaagcgagagaattaaaagctgctggaaaagatgtaatagctttaggtgcaggcgaaccagattttgatacaccagataatattaaaaaagctgctgttaatgccataagaaaaggcgatactaaatacactccagtagatggaacccctgcaattaaagatgcagttataaaaaagtttaaaagagaaaataaacttaattatacttcagaacagataactgtaggtacaggaggtaagcaagttttatataatgcttttgtagctactttaaataaaggagatgaagttcttatacctgctccattttgggtatcttatccagatatggttttgcttgctggtggtaaaccaaaatttataaaatgtggagaggaagacggttttaaattaactccaacaaaacttaaaaaagcaataacaaaaaaaacaaaatggataattttaaattctccttcaaacccaactggtgcggcttatacaaaaaaagaaattgttagcttaggaaaggtgttacttaaaaataaaaatgttttaattttgagcgatgatatttatgagcatgtaaaatttgataattttaaatttttttcaattgcacaaatcaaaaaactaaaagacagaacattaactatgaatggtgtaagtaaggcttatgctatgacggggtggaggattggttatgctgctggaccaaaaaatattatagctgccataagaaaaattcagtcacaatcgacctctaatccatcatctataagtcaggcagctgctgtagaggctttgaatggaactcaaagctttatcaaaaaaaagagcta

SEQ ID NO: 245530 - DNA, 628 bp, Unknown
  Bacterial polypeptide expressing nucleotide sequence isolated from the Sargasso Sea
attgtctgatcgcgttcaactgatcaagccatccccgaccctggcggtgaccaaccgtgcagcagagttacgagcggaaggcaaagacattatcgggctcggtgctggcgaaccggattttgatactccggaccacatcaaagcagcggctgcagaagctatcgataagggcttcaccaagtacacagccgttgacggtacccccggtctcaagtctgccattatcgacaagctgaaagcagacaatggcctcagttacgaaccgaaccaaattctggtttcctgtggtggtaagcagagcttcttcaacatggctctcgcgctgatcaacccaggtgacgaagtcgtgattccagcgccgtactgggtatcttacccggatatggtcaaaatcgcggaaggcgaacctgtcatcatcgagaccgatgaatcgactcgttttaaaatcaccccagagcagctggacgcagccatcacagacaaaacccgtctggtggtactgaacagcccgtcaaacccatctggcgtggcatacaccaaagatgaatttattgctcttggcgacgttctgcgtaaatacccagacgtactgatcgcaaccgacgacatgtacgagtacatctggtgg

SEQ ID NO: 245531 - DNA, 364 bp, Unknown
  Bacterial polypeptide expressing nucleotide sequence isolated from the Sargasso Sea
catgtccattctctctgcgacactttcccgcgtgaagccttctccgaccattgccgtcaccaacaaagcgcgcgaattgaaggcggcggggcgtgatgtgatcggccttggcgcgggtgaacccgattttgacacaccgcaatcgatcaaagacgcagcggtgcgggccatcgcagaggggaaaaccaagtacacagccgtcgacggcatcccggaattaaagcaagccatctgcgagaagttcaagcgtgacaatggtctcgagtatcaccccgagcaagtcaccgtgaactcgggtggtaagcagacgctctataatgcattgatggcgacacttaatccgggggatgaggtcatcatcccc

SEQ ID NO: 245532 - DNA, 642 bp, Unknown
  Bacterial polypeptide expressing nucleotide sequence isolated from the Sargasso Sea
aatgaaaaacccaatatccgaaagagttagaaaggtcaaaccttcggcaactattgctatctcatccaaagcaatggaaatgagatctgctggtgtagacgtcataagcatgagtgcaggcgagcctgattttgatacgcctgaatacataaaggatgctgcaaaaatggctatggataacggtatgactaaatacacacaagtggacggcgtcccagatttaaagcaagccattatcaataaattcagtgaagataatgatttagtttatgatcctgaaagtatccttgtttcaacaggagcaaagcaaacactatataatctttttcaggccattttaggtcccggtgatgaggtcattattattagcccatactgggtatcgtatccagacatggttcttttggcagatgcaaaacctgtaattgtagatacttttcaagaaaatgacttcgcgttagatataagtgcatttgcagatgccattaatgataaaacaaaacttgtcatcattaactccccatcaaaccctactggaattaccttcagcagagatgactacgaatcaattggcgctgtattacagaatcaccccgatatttacgtcgcaaccgatgatatgtatgaatatatttattgggg

SEQ ID NO: 245533 - DNA, 913 bp, Unknown
  Bacterial polypeptide expressing nucleotide sequence isolated from the Sargasso Sea
attgacattttctaaaagaataaatttaattaaaccgtcatctacaatgtcccttacatctaaagcaaatgaaatgagggcagcaggtgaagatataatagttctcactgttggcgaacctgattttgacacaccaaaatatataaaagacgcaggtcgagaagctattgagtctggaaaaacaaaatatacatcagtcgatggtgtttcagagctaaaagaagccatagttaataaattcaaaaaagaaaatggtttagtatttgataccgatgaagtgatagtatctgctggatgtaaacagtctatattcaatcttctacaggtaattattgatgatggcgatgaagttctaatacctgagccctattgggtttcgtatgcagatatggtcatatatgctggcggcaaaccaattctaattaaatcttcatatgaaaataattttgatttagatctaaagcttattgaaaaaaatattacagatagaacaaagttatttatgttaaatagtcctaataatcctagcggtaaatattttgacagtgacatacttaaaaagctatctgatttgcttagaaagcatgataaaatttatatctcgtctgatgatatttatgaacatattttttggcatcaagaaaagtttcataacattttaaatgtggctcccgatttgaaagagagaactattatatttaatggtgtctctaaagcttactctatgactggatggagaattggttatgctgcaggaaatagagatattataaaaaaaatgaaaacacttcagtctcaaagcacttcgtgtgctagctctgtatcacaatatgcagcaataacagcattgacgcagcaatgtgatgaactccctcaaatgaataatgaatataaaaaaagacacgattatgtt

SEQ ID NO: 245534 - DNA, 397 bp, Unknown
  Bacterial polypeptide expressing nucleotide sequence isolated from the Sargasso Sea
atggccctaatttcagatcgattatctaggtttaaaccttccttgactgtgaaaatttctcagattgcaagagaaatgacactttctggtcaaaaggtcataagtctgagctcaggagaaccagattttgacactcctattcacattaaagagagtgcaattgaagctatcaatagtggttttacaaaatatacccaggttgatggcatgccagatttaaaaaaagcaattataagtaaatttaaaaatgaaaatagaataaattataatgctgatcaaataactgtcggtgttggaggaaaacatgtaatttacaatttattgatgtccacgttgaataaacatgatgaagttataataccagctccttactgggtttcttatccagatatgaata

SEQ ID NO: 245535 - DNA, 754 bp, Unknown
  Bacterial polypeptide expressing nucleotide sequence isolated from the Sargasso Sea
acttgctgaacgcgtgcatgcaatcaaaccctctgcaaccttgaccatcgctgccaaagccaaggccatgagcctggcgggtgagaatgtgctcaatttatcggctggcgaacccgatttcaatacaccttcacacatcattcaagcggccaccatcgccatgcaagaaggccacacacgctacacccctgtgggtggttctgcagcactcaaagaagccatcattcacaagttccaaacagacaaccaactgagctaccaagccgatgaaatcatcatctctacgggagccaagcaatcactgagccatgccatgctggctttactgaaccccggcgatgaggtcttgatccctgcaccctattgggtctcctatcctgatatggctaggctggcaggtgccacaccaaccatcatgcccaccaccgaatctcaaggctttaaaatcaccccggaacaactccaagccgccatcactccgaaaaccaggatgctgttgatcaacagccccagcaaccccagtggcagcgtgtatagccaccaagaactccaagccttggggacggtcttggaacagcatccccaggttttggtggtcagcgatgatatttacgagcacattctctttgatgatcaaaaattttacaatttagtgaacacatgccccaacttaaaagatcaatgcgtggtggtcaatggcatgtccaaatcctttgccatgactggctggcgcattggctttgcagccgccccc

SEQ ID NO: 245536 - DNA, 652 bp, Unknown
  Bacterial polypeptide expressing nucleotide sequence isolated from the Sargasso Sea
aatgagcataatatctgacagtttaaaaaggataaaaccatcacctacaatcgccgtaagtcaaaaagctagagaattaagagctgctggcaaagatgtaataggattaggagcgggtgagccagattttgatacacctaataatattaaaaatgcagcgataaaagctattaaaggtggtgatactaaatataccgccgtagatggaactccggctttaaaaaatgcgataataaaaaaatttaaaaaagaaaatagcttaaagtactcaacagaagaaataacggttggaactggtggaaagcaagttctttataatgctttcatggcaactttaaataaaggtgatgaagtaattattccagcgcctttttgggtttcttatcctgatatggttcttttagcaggaggtaaaccaaaaattattaaatgtggtgaagcagataattttaaaattactcctacaaaattaaaaaaagcaataactaaaaaaacaaaatggttgatactaaattcaccttcaaatcctacaggagtgagctatactaaaactgagatttttaaactatctaaagtattagccaagtataaaagaattcatattttaagtgatgatatttatgaacatattacttatgacaaagctaaatat

SEQ ID NO: 245537 - DNA, 876 bp, Unknown
  Bacterial polypeptide expressing nucleotide sequence isolated from the Sargasso Sea
tgaaagaattttaattatgccaggtggaaaaccaaccatgcattatgcaatacaatgttttggcgaacctggagcagaaataattcatcctactcctgcattcccaatttatgagtctatgatacattttacagggtccacttcagtaccctatgatttaacagaagataaagatttaaaatttaatccagataaaatattatctttaattacagataaaactcgattgttgatcttaattaacccaaataacccaacaggaagttttgtagagaaatcagatattgatgttctggctgatggtcttaagaaacatccacatgtaacaatacttagtgatgaaatttatagtagacaaatttttgatggaaaagaaatgccaacattttttaattatccagaattaagagaaagattaatagtattagaaggatggagcaaagcttattcaatgactggatggagacttggctggagtttttggccacaacatttagttgaacatgttaacaaattattaattaacagtgtttcatgtgttaatgctgctgcacagtttgcaggaattgctgcgttagatggaccagatgattcaattaatgaaatgatggaaaaatttactcaaagaagggatttaatttataaaggtttaaatgaacttccaggagtagaatgcagtctacccggaggagctttttatgctttccccaaagttattggtactggaatgaatggggcagagtttgcaagaaaagccatgcatgaagctggagtagcaatagtgccaggttctgcatttggtgaaacttgccaaaattatgttagatttagttttgctgcttctagagataatatttcacaagctttagaaaatat

SEQ ID NO: 245538 - DNA, 1198 bp, Unknown
  Bacterial polypeptide expressing nucleotide sequence isolated from the Sargasso Sea
ttggagacaaatgtggaaatttcaaaattaaataacaatattacgccctcaggaacaatggcaatatcaaacaaggctagaattctaaaggaacaaggaaagcctgtaattggttttggtgcaggtgaacctgattttccaacaccttcacatgttatagaggaagtaaaaattgcatccgaaaatcctgcttatcataaatacacagcagttggtggcttaccgattttaagagatgaaatttctagaacaacaaaagaatattcaaattttgaaatcgacccagataatgtagtagtaactaatggaggaaaacaagcaatactgacaacatttatgtcattacttgatcctggagatgaagttttaataccttcaccttattggacaacatatcctgaagcagtaaaaatttcaggtggggagccagtaattgttgatacagattttgaaaatgatttcaaagttacagttgaacaacttgatgagaaatttactgaaaaaacaaaggttcttgtatgggtatctccgtccaatccaaccggagtggtctattctaaagaagaagctgaggaaatatataactgggcatttgataaaaatatatggatactttccgatgagctttacgaacatcttgtttatgaaggagttacttcaccatcaccagcaactattgataaaaatcttgagaaaacaattgtagtgaatggtgttgccaaagcgtactcaatgactggatggagagttggttggataatgggtaataatgatgttatcggtttgtctaaaaaaattcagtctcatgctacgtcaaacgtagcaaatatttctcaagttgctgcttattcagcattaaaaaatggattagacagcacaaatgaaatgaagaaagcatttgataaaagaagaaattatgctctcaatttatttcaaaccatagaaaacataagggttccaaatgcaacaggagctttttacgtttttcctgatgtaagtcattacacaaatagtcttatagaaggggtgagcacatcaattgagctttgcgattggttattggagaaattctacattgcatttgtacctggcgaggtatttggaaaagaaggatttttacgttgttcttatgctctaagcgatcaagatctagaggaaggcctcacgagatttaaagacgctctagaatcaatttaat

SEQ ID NO: 245539 - DNA, 1030 bp, Unknown
  Bacterial polypeptide expressing nucleotide sequence isolated from the Sargasso Sea
aagtgctggagaaccagactttgatgctcccaatgaaatattaaaagcaacaagtgaggctatatttgatggatatacaaaatatggtcctgcctcaggagatttagaacttagaaaagccattgctgaaaaacttcaaacccaaaacaatttaaatgttgaatatgaaaatgtaatggtaacaaatggagcaaaacaggcaatttataatttgttccaggttttattgaatgatggcgacgaagttattatacctgctccttattggttaagctatcctcagatggttagattggcagggggaaagcctgtattcctaaattcttctgctgaagatggattcaaaataaatatacaagatttaaaatctaagatatctccaaaaactaaatttataattattaattctcccaacaatccaactggtagagtaatgccaaaagaagatttgttacaaattgcagaattagtaagagaaaataaaaatattaatattctttcagatgagatttacgaattaattcttaaaaaagaatttaagcatttaagtttagcttcactagcaactgatctaaaagaaagaatttttataattaatggttttgcaaagggttgggcaatgactgggtggagagttggttatttagtaggacaaaaagatgttattaaagcatcatcagccttacaaagccaaagtacaagtaatgtttgttctttcgttcaaagaggtgctttagaggctttaaaaataaaccgagaatttttcttagaaatcaatagccattatgatctaagaagagaagtcctttataaagggctaaaaaatatcgaaggactatttatatatccacctaatggagctttttatgcatttcctagattacctaataaatccatgacttctgtagagttttgcaaaagaattcttaatgattatggtttagtggtggtgcctggaaaaccttttggtgatgatcaatgtattaggatatcttgtgcctctcaaaagaaaagattcttgatggcttaa

SEQ ID NO: 245540 - DNA, 1038 bp, Unknown
  Bacterial polypeptide expressing nucleotide sequence isolated from the Sargasso Sea
cagcgatcaaagctatcaaaagaggggacacaaagtacactgctgttgatggtacgcctgaacttaaaaaggctatcatcaaaaaattcaaaagagaaaataaactgaactactctttagatcaaataactgttggcacaggtggtaaacaagttctttataatgcttttatggcaactctaaataaaggagacgaagtaattataccagcacctttttgggtatcatatcctgatatggttttattagcaggcggaaaaccaaaaatagtaaaatgtacagcagctgagggttttaaattaaccccaaaaaaattaaaaaaagcaatatctaaaaaaactaaatggataattcttaattctccatctaatccaacaggagcagggtattcaaaaaaagaaatttatgatttagctaagattttaattcgaaataagaaaatttttattttaagtgacgatatttatgagcatgttagatatgacaactttaattttttcacgatagctcaagtttcaaaattgaaagataggacacttaccatgaatggagtaagtaaatcatacgcaatgacgggatggagaataggttatgctgctggtcctaaagaaataattaaagcaattggaaaaattcaatctcaatctacttcaaatccatcttcaataagtcaggcagcagcagttgaggcattaaatggaaagcagggttttataaaaactagagcaaaagcatttaaagagaggagaaattttgttgttaaaagtcttaataatataaaaggaattaattgtttgactcctaatggtgcattttatgtcttcccaagttgtaaaggattattaaataaaaaaacaaaattaaaaacagactctcattttgttcaaaaattacttgaaaaagagaatgttgctgtcgttcaaggatcagcttttggcttagatggttattttagaatttcatatgctacgtcaatgaataatttaaaaaaagctatgttgagaattaaatctttctgtgaaggattaaataaataat

SEQ ID NO: 245541 - DNA, 721 bp, Unknown
  Bacterial polypeptide expressing nucleotide sequence isolated from the Sargasso Sea
atgagcataatatctgacagtttaaagagaataaaaccctctcctactatagctgtttcacaaaaagccagagagttaaaagcctcgggaaaggatattattggattaggtgctggtgagccagattttgatactccagataatattaaagaagctgctattaaagctattaaagatggtgaaacaaaatataccgctgttgatggaaccccaaacctaaaaaaagcaatagtagaaaaatttaaaagagaaaataatttaaattactcaatagatcaaattacagttggcacaggtggaaaacaggttctttataatgcgtttatggcaactttaaataaaggagatgaagttataattcccgcacctttttgggtatcctatcctgatatggttttacttgctggaggtaaaccaaaaattattaaatgtgaggaaaaagatagttttaaactaactcctaaaaaacttaaaaaagcaatatcaaaaaaaactaaatggttaattttaaattcaccttcaaacccaactggagcaggttactcaaaagatgaaatagaaggcctggcaagagttttaacaaaaaataaaaaaatacatatattaagtgatgatatttatgaacatattaaatatgataattttaatttttttactattgctcaaattccaaagcttaaagatagaacactcacaatgaatggtgttagtaaatcctatg

SEQ ID NO: 245542 - DNA, 1013 bp, Unknown
  Bacterial polypeptide expressing nucleotide sequence isolated from the Sargasso Sea
tatgaaagtttcaaaaaaaataattaatttagagacggaatcagcatttgcaatacttgccaaagccacaaagctagcatcggaagggaaaaatataatcaaccttggaattggccagccagattttcctactccaacaaatattcaagaagcggccattaaggctattaaagacggtcatcatgggtacactccatcaaatggaattttacctcttagagaagctgtatcagaacaaatctataatgattacaaagtaaatataaatcctgatcaaatactaattactcctggtggtaaaccaactattttttattccagtctcatacttggaggtgagaaaaatgaaataatatatccagatcctggctttcctatttatagatctatgattaagtttagtggcgctaaagggattcctttagaacttagtgaagaagataactttgagattaatataaaaaaacttgaaaaacttataacaaaaaaaactagcttgataattatcaacaatccaaataaccctaccgggtcattcatgaataaaaaaaaaatagataaaatagtaaaaatgttagaaaaatatccagatgtattcataatgtctgatgagatatatagtaaaataatttttaatcaccaatcaatgccatcttttataaattatgaaacaatcagagataggttgatagttttagagggttggagcaaaacattttgtatgacaggatggagattgggttggagtatgtggccaaaaaaactttatgaacacgcaaataaattatgtgttaacgatcactcttgcccaaatataatatcacaatatgcaggtctggaggcattaaaagggcctaaagatgaaattaaaaaaataaaacaagagtttcaaaatagaaaaaactttgttcataaaaaattaaacaaacttaaaaatataagttgttttgagccaggatggagcattttatgcatttccaaaatatttctttatctggttatagtgggcaaaa

SEQ ID NO: 245543 - DNA, 760 bp, Unknown
  Bacterial polypeptide expressing nucleotide sequence isolated from the Sargasso Sea
tatgaatttattagctgatagattaggccgaattaaaccttcaatgactgtttcaattaatattaaagctaatgctttaagagcccagggtaaggatgtgcttgttttggctgctggcgaacctgattttgatacaccattgaatataagagaggcagcaaaaaaagccatggatgaaggagaaacaagatatgttcctggccgaggcactcctaatttacaaacagctataataaataaatttaagaaagataataatatttcttatagtaaagaagaaatcatggttggagttggtggcaagcatattatttataatgctatgatggcaactcttaatccaaaagatgaagttataattccctctcctttttgggttagttatcctgatattgttcttcttgctgatggaattccagttattgttaagtgtggatctgaaaaaaactttaaaatcacaccttcacaacttgaagaaaatataactaataaaacaaaatggctgatgctaaatagtccaagcaatccaactggagcagtatattctaaagatgaactaaaaaatcttagcaaagtcttattaaaatatcctgaaatatatattctaaccgatgatatttatgaaaaaataatttatgagaatattgaatttcatacattagcttctgttgaacctaaattaaaaaatcgcattttaacattaaatggagtttcaaaaacttattgtatgactggttggagattaggatattgtggtgga

SEQ ID NO: 245544 - DNA, 997 bp, Unknown
  Bacterial polypeptide expressing nucleotide sequence isolated from the Sargasso Sea
tttcaaaacgccagaacacatcgttgaggctgctgttaaggcacttcacgatggacatcatggttacacgccagctaacggtatccctcgtttgagagaagcggtttctgcagatctgcataaacgttacgcgataaatataccagagcaacagatcctcatagttccaggaggaaaagttacaatgttcttggcaatgatgatatatggcgagccaggttgtgaaattctttatccgaatccaggttttcccatctacgaatctaccatccgattttctggagccactccgattccaatagcgctacgtgaggaaaatggatttgctttctccgcagaggaggttttatctcagattaatgataatacgcgattgataattttaaacagccctgcaaatccaacgggaggagctgttcctaaaaaagaatttgatacacttgttcaaggcctatccaattggccaaacgtggcagtgatgagcgatgagatatatggccagatgctttacgatggacgagagcatgtaagtctccttcagtatcctgaattgcacgatcgtctaattttgctagatgggtggtctaaaacatatgccatgactggttggcgattggggtacagtatttggcccaaaaccgttgtcaatcaggctgaaaaactttgtgttaacattcattcatgcgtcaacgctcccgcacagtttgcgggaatagcggctctagaaggtaatcaagacccagtaaaatttatggtctctgagtttgatgccagaagaaagataatagttgatgagcttaaccaaatccctggatttagctgcattgagccgggcggagctttttatgcgtttccaaatattacaaaaaacgggtatgagttctcaaaagcttcaggaaaagattttggaagaagcgggagtagccgttatagctggaacaagctttggtgttcacggagagggttttttgcggttttcatacgccaattcgattga

SEQ ID NO: 245545 - DNA, 853 bp, Unknown
  Bacterial polypeptide expressing nucleotide sequence isolated from the Sargasso Sea
tatgaattttttagcaaaaagagttttgaatataaaaccatctccaaccatagctgctacagcaaaggctgctgaacttaaagcttccgggttagatgtgataggcttaggagctggtgagcctgattttgacacaccagtgcacataaaaaatgctgcgataaatgcaattaattctggaaaaacgaaatatacttcggttgatggaataagtgaattaaaaagtgaaattattaataaatttaaaaaagataataatattgattataatctaaaagaaatttctgtgggcactggtggtaagcaaatactttataatgctctaatggcaacaattaataaaaatgatgaagtaattattccagcacccttttgggtttcatatccagacatggttgtgctagcagatggtattcctgtaattgctaaatgtgaagaaagagataactttaaaatcacacctgaaattttagagagtaatatttcagataaaacaaaatggttaatattaaacagtccatcaaatccaaccggaattggctatgaggaaaatgagctcatagaaatttcaagaactttagaaaagtatccaaatattttaataatggtagatgatatgtacgaatacctaacttatgacggatttgattttaagacacttgttgaagtcaataaaaatttaaaagatagagtgttgacctgtaatggagtttcaaagtcattttgtatgacagggtggagaattgggtatgctggtggaccagaatggttaattaaagctatggcaaaaattcaatcccaatctacatcaaatcctaattccatagctcaatgggcatcaactgaggcttgt

SEQ ID NO: 245546 - DNA, 846 bp, Unknown
  Bacterial polypeptide expressing nucleotide sequence isolated from the Sargasso Sea
aggtgctgctgaatcctggcgatgaggtgttgctacccgctccttactggttgagctacccggagatggcggcactggcctgtgccaaggtcaagctcattcccacccaggccgaggagggattccgtctcgatctgacagatgtaaaggcagcgatcacccctcgcagtcgccttctggtgctgaactcccccggcaaccccacagggcgggttatgaagcgccaggagctggaggacgtggcggagctggtgcgccgtcatccccagttgctggttatgagtgatgagatctacgagttcctgctggcggagggggaacagcaccacagcttcgcggcgatcgcgccggatctcgccgatcgctgtttcaccgtcaatggcttcgccaaaggctgggcgatgacgggctggcggctgggctacctcgccggacaccaggacgtgatcaaggctgccgctgcgctgcagagccagagcaccagcaatgtctgcagctttgctcaacgaggggcccttgcggccattcagggcccacgtggttgcgtttcagcgatggcggagagctacaaccgccgccggcagctgctcacggaggggttgcaggtgattgaagggatcaccctcgttgaaccaaggggtgctttctatgcgttcccgcagttgccggaatcggctggtggttcgatggacttctgcagtcgcgccctcaagcaggcgggcctcgccgttgtccccggtctggccttcggaaacgaccgctgcattcgtctgtcctgcgctgtgtcacgtgagacgatcagggatggtctgtcacggctgacgcaactgctggacgagacctgag

SEQ ID NO: 245547 - DNA, 850 bp, Unknown
  Bacterial polypeptide expressing nucleotide sequence isolated from the Sargasso Sea
aaaggcgatgaagtaattattccagcaccgttttgggtttcttatcctgatatggttcttttagcaggaggcaaaccaaaaattattaaatgtggtgaagcagatgattttaaaataactcctacaaaattaagaaaagcaattactaaaaaaacaaaatggttgatactaaattcaccttcaaatccaacaggcgtgagctataccaaaactgagatttttaaactatctaaagtattagccaagtataaaagaattcatattttaagtgatgatatttatgaacatattacttatgacaaagctaaatattttactattgctcaaattcctaatctaaaaaatagaacacttactatgaatggtgtaagtaaatcttatgcaatgacaggatggagaatagggtatgctggaggccctaaagaaataattaaagcaattcgtaaagtacaatcccaatcaacttcaaatccatcatctgtaagtcaagcagcagcagttgaagccttgaatggaactcagaatttcataaaaaccagatctaaggaatttaaaaaaagaagagattttgtagttaaaagcttaaatatgattaagggaattaattgtttaacaccaaatggtgctttttacgtatttccaagctgtaaagatcttttaaataaaaaaacaaaattaaaaacagactcagattttgttcaaaagttgctagaaaaatctaatgttgctgtagtccaaggctcagcatttggattggagggatactttagaatttcttatgcaacttcaatgaaaaatttaaaaaaagccatggaaagaataaaaactttctgtgaaagtttaaattaat

SEQ ID NO: 245548 - DNA, 391 bp, Unknown
  Bacterial polypeptide expressing nucleotide sequence isolated from the Sargasso Sea
aatgagcataatatctgacagtttaaagagaataaaaccctctccaactattgcggtgacccaaaaagcaagagaattaagagctgctggcaaagatgtcattggattgggagcgggagagcctgatttcgatacaccagaaaatataaaagatgcagctattaaagccataaaagatggtgatacaaaatatacagctgtagatgggactccagcactaaaaaaggcaatagtagaaaaatttaaaagagaaaataacttagactatacaactgatcaaatcacagttgggacaggtggaaaacaagttctttataatacatttatggcaaccttaaataaaggtgacgaagttataattccagcacctttttgggtttcttatcccgat

SEQ ID NO: 245549 - DNA, 544 bp, Unknown
  Bacterial polypeptide expressing nucleotide sequence isolated from the Sargasso Sea
atgagcataatatctaacagtcttaaaagaattaaaccatctcctaccatcgcagttacgcagaaagcaagagaattgaaagctgctggcaaagatgtaattgctctaggcgcaggcgaacctgattttgacacacctaataatataaaaaaggctgctgttaaagcgattagaataggggatactaaatacacaccagttgatggaacacccgcaattaaaaatgcagtaattaaaaagtttaaaagggaaaataacttaacttatacctctgaccagataacagtaggtactggcggaaaacaagttttgtataatgcttttgtagcaacattaaataaaggtgatgaagttattattcctgctccattttgggtatcgtatccagatatggttttgcttgctggtggtaaaccaaaatttattaaatgtggagaggaacatggttttaaattaacacctacaaaacttaaaaaagcaataacgaaaaaaacaaaatggataatttttaattctccttcaaatccaactgggtgcagcatat

SEQ ID NO: 245550 - DNA, 376 bp, Unknown
  Bacterial polypeptide expressing nucleotide sequence isolated from the Sargasso Sea
atgagcataatatcagatagtctaaaaagaattaagccatccccaacaattgccgttactcagaaagcaagagaattaagagcagccggaaaagatgtaattggtcttggtgctggggagccggattttgatactccagtaaatataaaaaatgcagcgatcaaagccatcaaaagaggggacacaaagtacactgctgttgatggcacgcctgaacttaaaaaggctatcatcaaaaaattcaaaagagaaaataaactgaactactctttagatcaaataactgttggcacaggtggtaaacaagttctttataatgcttttatggcaactctaaataaaggtgacgaagtaattataccagcacctttttggg

SEQ ID NO: 245551 - DNA, 597 bp, Unknown
  Bacterial polypeptide expressing nucleotide sequence isolated from the Sargasso Sea
aatgagcataatatcagacagtttaaagagaattaaaccatcaccaactatcgctgtaactcaaaaggctagagaattacgagcagcaggaaatgacgtaattggccttggtgcaggtgaaccagattttgatactccaaataatattaaaaatgcagccattaaagctattaaaaaaggagacactaaatatactgcagtagacggaactccagctttaaaaaaagctgttattggaaaattcaaaagagaaaataatcttaattattcaactgatcaaataactgtagggactggaggaaaacaagttctctacaatacttttatggcaactttaaataaaggcgatgaagttattattccagcaccattttgggtttcctatccagacatggttcttttagctggaggaaaaccaaaaattgtaaaatgcaccgaacaagaaggttttaaacttactgcaaaaaaacttaaaaaagcaatttcaaaaaaaacaaaatgggtaatcttaaactcgccatcaaaccctaccggagcaggatatacaaaaaaagaaattcaaagcttagctaaagttttaattagaaataaaaaagt

SEQ ID NO: 245552 - DNA, 667 bp, Unknown
  Bacterial polypeptide expressing nucleotide sequence isolated from the Sargasso Sea
aatgagcataatatcagatagtttaaaaaggattaaaccatcaccaactatcgctgttactcaaaaagctagagaacttaaagcagttggaaaagatgtaattggtcttggagcaggagagcctgattttgatactccagacaatattaagaaagctgcaattaaagcgattagaaatggagatacaaagtatacagctgttgatggaactccagctttaaaaaaagcaatagtaaataaatttaaaagagaaaataaattaaattattcaactgatcagatcacagtgggcactggtggcaagcaggttatttacaatgcttttatggcaacgctaaacaaaggtgatgaggtaattattccagcaccattttgggtatcatatcccgacatggttttattagcaggaggcaaaccaaaaatagtcaagtgcactgagcaagaaggatttaaactaacttcaaaaaaattaaaaaaagctattacaaaaaaaacaaaatgggtaattcttaactcgccctcaaatcctactggtgctggatatacaaaaagagaaattaaagatttggctaaagttttgataagaaataaaaaagttcatattttaagcgatgatatttatgaacatatcaaatatgataattttaacttttttactattgctcag

SEQ ID NO: 245553 - DNA, 1189 bp, Unknown
  Bacterial polypeptide expressing nucleotide sequence isolated from the Sargasso Sea
atgagcataatatcaaacagtttaaaaagaattaaaccttctccaacaatagctgttacccaaaaagcgagagaattaaaagccgctggaaaagatgtaatagctttaggtgcaggtgaacccgattttgatacaccagataatattaaaaaagctgctgtaaaagccataagaaatggtgatactaaatacactccagttgatggaactcttgcaattaaaaatgcagttataaaaaagtttaaaagagaaaataaacttaattatacttcagaccagataactgtaggtacaggaggtaaacaagttttatacaatgcatttgtagcaacattaaataaaggagatgaagttctaataccagctccgttttgggtatcttatccagatatggttttacttgctggtggtaaaccaaaatttataaaatgtggagaagaagatggatttaaattaactcctgccaaattaaaaaaagcaatcacaaaaaaaacgaaatggataattttaaattctccatctaatcctacaggcgcagcttatacaaaaaaagaaattattagtttaggaaaggttttacttaaaaataaaaatgtttttatattaagtgatgatatttatgagcatgtaaaatttgataattttaaattttttacaattgcacaaatcaaaaaacttaaagatagaacattaactatgaatggtgtaagtaaagcttatgctatgaccggatggagaattggttatgccgctggaccaaaaaatataattgccgcaataagaaaaattcaatctcaatcaacatcaaatccatcatcaataagtcaagcagcagccgtagaagctttaaatggatcacaaagttttataaaaaaaagagcaaaatcttttagcaacagaagaaactttgttgttaattatttaaacagtatcccaggaataacttgtttattaccaaaaggtgctttttatgttttccctagttgcaaaggattgattggaaaaaaaacaaaaatcaaagatgatacagattttgttcaaaagctccttgaaaaacaaaatgtagctgtggtacaaggctctgcatttggtctagacggttattttagaatatcttacgcaacttcaatgcaaaaattaaaggttgcaatgacaaggatcaagcttttttgtgagagtttaggctaat

SEQ ID NO: 245554 - DNA, 562 bp, Unknown
  Bacterial polypeptide expressing nucleotide sequence isolated from the Sargasso Sea
atgcaattaagcaaaaagatgttgaagatttcaccatcaggaactgtaattttagcacaaaaagcaaggcaattaaaggctgaaggtaaagatattattgaacttggggaaggagaaccagattttaatactccagaatttatcattaaatacgcctatcaatctgcaaaaaatggtgctacaaaatacacttcagtatcgggtaccccagaattaaaaaataaaattactgaaaaactaagaaaagaaaataatattaattataatgataaccaaattgtggttggtgcaggagcaaagcaacttatttttaatgcactttattgctccattaatacgggtgatgaggtaattattcctagcccgtactgggtaagttaccctgaaatggtcaaaattgctgatggaatacccattattttaaattgtgacctaaaaaacaattttaagatttctttagaaaagttagttgaggtaattaatccaaaaactaagtggttaatactaaattcaccaggcaatccgtctggggctgtttacacttgggatgaacttttagccc

SEQ ID NO: 245555 - DNA, 499 bp, Unknown
  Bacterial polypeptide expressing nucleotide sequence isolated from the Sargasso Sea
atgagcataatatcagatactttaaaaagaattaagccatcagctacaattgctgttagccaaaaggcaagggaattaaaagcagcaggtgtagatgtgataggcctaggtcaaggagagcctgattttgatacaccagacaacattaaagacgctggcattaaagcaataaaagatggagatactaaatatacagcagtagatggaactccagccttaaagaaagcaattgttgataagtttaagagagaaaataatttggtttattcaactgagcaagtaacagttggaacaggagcaaaacaagttctttttaatgcctttgtggctacactgaacaaaggtgatgaagtaataataccagctccattttgggtttcttatcctgatatggttttactagctggaggaaaacctaaaataattaaatgcaatgagagtgatggttttaaaattactcctaaaaaattaaaaaaagctatttcaaaaaaaactaaat

SEQ ID NO: 245556 - DNA, 580 bp, Unknown
  Bacterial polypeptide expressing nucleotide sequence isolated from the Sargasso Sea
atgagcataatatcagacagtttaaagagaattaaaccatccccaactatagcagttactcaaaaggctagagaactaaaggcggctggaaaagatgtaattggtttaggagcaggagagccagattttgatactcctgataatattaaagatgcagctattcaggctattaaagatggtgatacaaaatatactgcagttgatggaactcccgctttaaaaaaagcaatagttgaaaaatttaaaagagaaaacaatttagattttaatgttgatcaaattacagttggaaccggtggtaagcaagttctatacaatacttttatggcaactttaaataaaggagatgaagtaataattcctgcacctttttgggtttcatatcctgatatggttttgttggctggtggaaaaccaaaaatagtaaaatgtgatgaaaaagatggtttcaaattaactgcaaaaaaacttcaaaaagcaatttcaaaaaaaacaaaatggttaattttaaattctccatcaaacccaaccggagctggttatacaagagaggaaattgaagatttagcaagagtaataa

SEQ ID NO: 245557 - DNA, 1183 bp, Unknown
  Bacterial polypeptide expressing nucleotide sequence isolated from the Sargasso Sea
aatgttatcagataaaattaattctttgccaatctctcaaacagttgcaatgacagctaaagctcatgatctaaaaaatcaaggtattgatgttattactttaagtgctggagaacctgattttgatattccagattatattaaagatgcagctgtggacgctattaacgaaaactaccataaatattctccagttgatggattcctagatctcaaaaaagcaatatgtaaaaagtttaaaagagataataatttagattatgatacagatcaaattgtagtttctacaggggccaaacaatccattgccaatgtttgtatgtctctaattaataagggtgatgaggttgtaataccaactccatactgggtaagttacagtgcaatggtttctcttgctgatggaattcctgtctttgtaaaccccaataaaaactccaattataaggtgactgctaaacagcttgaatctgtaattacagataaaacaaaaatgattatgttaaactctcctaataaccccagtggatcagtttttacaaaagaagagtatcttgagctttccaaagtgttaattaaatacccaaaagttatagttgtttcagatgaaatttatgagcatataaattatggagttgaaagtgtaagttttgcatctttacccggaatgtatgatagaactgtcacagtaaatggtatttcaaaagcatttgcaatgacaggttggagaattggttacttaggagctcctaagattttagctaaagcatgcaataaaatgcaaggtcaaataacaagtggtgcaaattgtattgctcaaagagctgctataaccgcattagaggagtcacctgaaagaataaaatatatggttgacgaatttaaaataaggcgtgatttgatcatagatcttgtaagtcaaattaacggttttaaagttagccagccaccatctggcgccttttatatttttccagaggtttctgaactatttggtaagacatttggaggccaattaataaataatgcaaatgatttgtcaatgttaattcttgaaaaagctcatgttgcgactgtcccaggagatgcctttggatatcctgaatgtataaggatttcatattctgcttcaagagaacagataaaagaagcaatcatcaggattaaagatttattatcttga

SEQ ID NO: 245558 - DNA, 634 bp, Unknown
  Bacterial polypeptide expressing nucleotide sequence isolated from the Sargasso Sea
ttggttgaaaaaaaagatatagattttttagctgatggtctgaaaaaatatcctcatgttacaatattaagtgacgaaatttatagtagacaaatttttgatggcaaagaaatgccttcatttttctattatccagaattgagagaaaggttaatagtattagagggatggagcaaagcctattcaatgacaggatggagacttggttggagtttttggccacaacatttaattgaacatgtaaataaattattaattaatagtgtttcttgtgttaatgctgctgctcaatttgctggtatagcagcactagacggaccagatgactcaattaacgaaatgatggaaaaatttactcaaagaagagacttaattcacaaaggtttaaatgatttaccaggagtagaatgtagtttgcctggaggagccttttacgcatttcctaaagttattggaactggaatgaatggtgcagaatttgcaaggaaggctatgcatgaagctggggtagcaattgtgcctggatcagcatttggtgaaacatgccaaaattatgtaagatttagttttgctgcttcaagagataatatttcccaagcactggaaaatataaagaaaatgttaaccaaataag

SEQ ID NO: 245559 - DNA, 1198 bp, Unknown
  Bacterial polypeptide expressing nucleotide sequence isolated from the Sargasso Sea
atgaaactaaacaaaaaattaaatcaattagggacagaaacagcatttgctgtatctgcagaggcaaaatcttggagtgaaaagggtcataaggtttttccttttcatctaggtgacatcaatataatgacacctgaaaatattcgtgaagcaactataaaatatctaaatgataaaaaaaatggatattgtgattccaaaggggtgccagaattacgtgatgtactttctcatgatgtgggttcaaaaagaggggtcaggtatgatattgataatgtggtaattcaacctggtggtaaaccgactatttggaaatttcttgcaacgaccatgaatgagggggatgaagtattatatcctaaccctggctatccaatttatgaatcacagattcgatatcaaggaggaattcctataccatattcctatgatgagacagaaacagggtttgccattgatattgaaaaattaaggtcatctataacaaatagaacaactgcctttatttataataattatcagaatccattgagtgcttcatctagtattgatgagatggaagcattagcagaacttgcaattgaaaatgacctttgggtcttaagcgatgatgcttattatgaaatacgatataatgatgaatctcctttatcaattgttaacattcctggaatgaaagaaaggacgataattttatatacattttcaaagagatttgcaatgactggctggcgtattggagcatccataggtccaaaaaagatcattgagcaaattgcaaggtttaatgtcaatgacgagtcctgtacaaatcattttattcaacatgctttggcagaaacacttgaagattcaagtccgtattcagaaaaaatattaagtgagctaaaagataggagggattcgtgtatagcaagtcttaattctattgagggaataaatgttccaaaaccagatagtactttttacctgtttcccaatataactagcgtaatggaaagcaaagattgcaatgatttagatgcttttagaattaaagcattgaaagctactggggtttcattctgcactagaaatcattttggaaaacctaagaataatgaaacagaccaatatatacgcctagcatattctggaattaataatagtgatattaaagaaggccttgctctgttgaaggcatggatagaggaataat

SEQ ID NO: 245560 - DNA, 916 bp, Unknown
  Bacterial polypeptide expressing nucleotide sequence isolated from the Sargasso Sea
cgtgttagcgacgtgcgggccgggcgacgaggtgattgttccggcgccgtactgggtgagttatccggagatggtgcgattatccggcgcggacagcgtcgtcgtgcgcacgacggcggacgagggattcctgatgacgccggaaaagctgcgagcggtcatcacggagcgatcgaggttgttgattttgtgctcgccgagcaacccgagcggggcggtgtatcccaaggagacgttggaggaattggcgaaaattgtcgtcgagcacccgagattgatggtgctgagcgatgaaatatacgagcacatcatctacgcgcccgcggagcatcactccatcgcggcgatggagggcatgtgggagcgcacgatggtggtaaatgggttttccaaatccttcgccatgaccggttggcgtctggggtatgttgcggcgccgaaacacttcgcgcgcgcgatgaacatgcttcaatcgcaaatcacgagcggtccgaactccatctcgcaagaggctgcgctcgcggcgctagaactgggattcaagggtggcgaggacgtcgccgaaatggtcaaggcgttcagacagcgtcgcgattttgtctccgagcgcctgaatgccatcccgggcgtcaaacttccgagcgtcgacggtgcgttttacgtgttccccgacgtgagcgctttcttcggcggcgacgcctcggctgaaggattcggtccggtgacggatgtcgacgaactgtgccgctacatcttagaaaaaggtcaagtcgcgctcgttccgggcagcgcgttcggcgttccggagtgcttgcgaatctcgtacgcggcctccgaagccaccctggaagacgcgttgacccgcatcgaggcgtgcctggatcccaaagtcttcactcaaaactcgagcgcgtga

SEQ ID NO: 245561 - DNA, 1132 bp, Unknown
  Bacterial polypeptide expressing nucleotide sequence isolated from the Sargasso Sea
aatgagtcaagttaatttatctgatcgggcactttcaattgagccttctcttacattgcagataagtgctaaagcaaatcaattatctgcagaaggagtagatatttgcaatttaagtgcaggtgaacctgattttgatgccccaaaagaagttatagaggctacaagtaaagctatatttgatggatttacaaagtacgggcccgcagcggggaatttagatctccgaaaagcaattgcaaataaacttcaaattcaaaacgatttaaattatgaatttgaaaatgtaatggtcacaaatggtgctaagcaagcaatatataatcttttccaagtcttgttaaatactggagacgaagttattattccttctccatattggttaagttatccccagatggttagattggcgggtgggaagccaatttttacaaattcttctgcagaagatggattcaaaataaatataaaagatttgaagtctaaaatctcttcaaaaactaaatttataattatcaattctcctaataaccctactggaagagttatgtcaaaggaagaattattacaaattgccgatttagctagagaaaatccaaatatcaatattctttctgatgagatttacgaactaatccttaaaaaagaatttaaacactacagtttatcttcattagcaaatgacttaaaagataggatttttataataaatgggtttgcgaaaggatgggctatgactggctggaggataggttatttagtaggtcccaaagatgtaatcaaagcatcctcagcattacaaagtcaaagtacaagtaatgtttgctcttttgttcaaaaaggtgctttagaggctttaaaaattaataatgagtttttctcaataataaatagccattatgatcaaagaagaagacttctctatgagggccttaataatataaatgggatttatattgaagaacctaatggagcattttacgcatttccaagattacctaactcctcaattacttctgttgatttctgcaataaagctcttcaagatttcggattagttgtcgtacctggaaaagcttttgggctgatcaatgcattagaatatcttgcgcgacttcagaagttaaaataa

SEQ ID NO: 245562 - DNA, 962 bp, Unknown
  Bacterial polypeptide expressing nucleotide sequence isolated from the Sargasso Sea
tattcctgaatgtcgtcaagcagtaacaaggtggataaaaagacgttacaatgttgatattgattttaacagaattctcatcatgccgggtggaaaacctactatgagctatgctatccaatgttttggtgaaccaggagcagaaataatacatcctacacctgctttcccaatatatgagtcgatgataaattatactggctcaacatctgtaccttatgatttaacagaggataaagatttaaaattcaaccctgataaaatattatctttaattactgataagactagattgctagtcttaataaatccaaacaatccaacaggaagctttgttgaaaaaaaagatattgatttcttggctgatggtttaaaaaaatatcctcatgtaacaatattaagtgacgaaatttatagcaggcaaatttttgataataaagaaatgccatcttttttccattatccagaattaagagaaagattaattgttttagagggatggagcaaagcttattcaatgacaggttggaggcttggttggagtttttggcctcaacacttaattgagcacgttaataaattattaatcaatagcgtttcatgtgttaatgctgcagctcagtttgcaggtattgccgcattagatggaccagatgactcaatcaatgcaatgatggaaaaatttactcaaaggagagatttaatttataaagggttaaatgatttaccaggtgtcgaatgtagcttaccaggtggagcattttatgcatttccaaaagtaattggaactggcatgaacggtgctgaatttgcgaggaaggctatgcatgaagcaggagtagcaatagttcctggatcagcttttggcgaaacttgccaaaattatgttagattcagttttgctgcatcgagagataatatttctcaagcattagaaaatatcaaaaaaatgctgaaatagt

SEQ ID NO: 245563 - DNA, 1168 bp, Unknown
  Bacterial polypeptide expressing nucleotide sequence isolated from the Sargasso Sea
atgaaattagcaaaaagtttagaaagattaggcactgagtctgcatttactgttcttgcagaggctaaaaaattagaagctcagggaaaaccaatgatccatttaggattaggacaaccagattttaaaacccctaaacatgttgttgaggcggctaagaaagcactcgatgatggtcatcatggatatgttatgtcaaacggcatcccagaatgtcgtcagtcagtaactaggtggataaaaaaacgttacaacgtagatattgattttgaaagaataataattatgccaggtggaaaacctacaatgagttatgctatacaatgttttggtgaaccaggagcagagattatacatccaacacctgcttttccaatttatgagtcaatgataaattatacaggttcaacttctgttccatatgacttaacagaaaataaagatttaaaattcgatccagataaaattttatctttgataacagataaaactcgattgttaattcttataaatccaaataatccaactggaagctttgttgataaaaaagacgtagatgttttagctgacggtttgaagaagcatccacatgtaacaatacttagcgatgaaatttatagcagacaaatttttgatggaaaagaaatgccaacattttttaattatccagagttaagagaaagattaattgtattggagggatggagcaaagcttactcaatgactgggtggagacttggttggagtttttggccagaacatttagttgaacatgttaataaattattaattaatagtgtttcatgtgttaatgctgctgctcaatttgcaggtattgctgcattggatggaccagatgattcaattgatgcaatgatggaaaaatttactcaaaggagagatctaatttataaagggttaaatgatttaccaggtgtagaatgtagtttacctggtggagctttttatgcatttcctaaagtaattggtaccggcatgaatggtgcagaatttgcaagaaaagctatgcacgaagcaggagtagcaatagttcctggatcagcttttggtgaaacttgccaaaattatgttagatttagttttgctgcatcaagagataatatttcagaagcattggaaaatataaagaaaatgctatctaaataag

SEQ ID NO: 245564 - DNA, 1000 bp, Unknown
  Bacterial polypeptide expressing nucleotide sequence isolated from the Sargasso Sea
agatgatggacatcatggatatgtaatgtcgaatggaattcctgaatgtcgacaagctgttacgaggtggataaaaaaacgttacaatgttgacattaattttgaaagaattttaatcatgccaggtggtaagccaacaatgagttatgctattcaatgctttggtgaacctggagcagagattatacacccaacacctgcttttccaatttatgagtcaatgattaattatacaggctcaacttcagtcccatatgacttaacagaaaataaagatttgaaattcgatccagacaaaatattatctatgataacagataaaactcgtttgttaattttgataaatcccaataatccaacagggagctttgttgagaaaaaagacgtagatgttttagctgatggtctgaaaaagcaccctcatgtaacaatattaagcgatgaaatttatagcagacaaatttttgatggaaaagaaatgccaacattttttaattatcctgagttgagagaaagattaattgtattagagggatggagcaaagcttactcaatgactgggtggagacttggttggagtttttggccagagcatttagttgaacatgttaataaattattaattaatagtgtttcatgtgttaatgctgcagctcaatttgctggtatcgcagcattggatggaccagatgattcaattgatgcaatgatggaaaaatttactcaaagaagagacctaatttataaaggtttaaatgatttaccaggtgtagaatgtagtttacctggaggagctttttatgcatttcctaaagtaatcggtacaggtatgaatggtgcagagtttgcaagaaaggctatgcatgaagcaggagtagcaatagttcctggatcagcttttggtgaaacttgccaaaattatgttagatttagttttgctgcatcaagagataatatttcacaagcattggaaaatataaagaaaatgctatctaaataa

SEQ ID NO: 245565 - DNA, 499 bp, Unknown
  Bacterial polypeptide expressing nucleotide sequence isolated from the Sargasso Sea
atgagcataatatcagacagtttaaaaagaattaaaccatcaccaacaatcgctgttactcaaaaagcaagagaattaagagctgccggtaaagatgtgattggtcttggtgcgggtgagcctgattttgatactccggataacgtaaagaacgcagcaatcaaagctattaaaagtggtgacaccaaatatacagcagtggatggaacccctgctttgaaaaaagcaattattgcgaagtttaaaagagaaaataaattaagttattcaaccgatcaaataacagttggaactggaggtaagcaagttctctacaacgctttcatggcaacattgaacaaaggtgatgaagtaataattccagcacctttttgggtatcttatcctgatatggttttacttgcaggaggaaaaccaaaaataattaaatgtacagagcaagaaggattcaaacttactgcatcaaagttaaaaaaagcgattacaaaaaaaacaaaat

SEQ ID NO: 245566 - DNA, 1168 bp, Unknown
  Bacterial polypeptide expressing nucleotide sequence isolated from the Sargasso Sea
tatgaaattagcaaaaagtttagaaagattaggaactgagtctgcatttactgtgctagcggaagcaaaaaaattagaagctcaaggtaagcctatgatccatttaggattgggacaaccagattttaaaactccaaaacatgttgttgatgcagccaagaaagcgttagatgatggacatcatggatatgttatgtcaaatggtattcccgaatgccgacaggctgtaacaaggtgggtaaaaaaacgttacaaagttgatattgattttgaaagaattttaattatgccaggtggaaaaccgacaatgcattacgctattcaatgttttggtgaaccaggcgcagaaattatacaccccacaccagcttttccaatttatgaatcaatgataaattatacagggtctacttcggttccctatgatttaacagaagataaagatttaaaatttaatccagataaaatattatctttaataacagacaaaactcgattgttaattttaattaatccgaataacccgactggaagttttgttgagaaatcggagattgatgttttggctgatggtcttaagaagtatcctcatgtaacaatactaagtgatgaaatttatagcagacaaatttttgatggaaaagaaatgccttcattttttaattatccagagttgagagaaagattaatagtattagaaggatggagcaaagcttattcgatgacaggatggagacttggttggagttattggcctcaacacttagttggtcatgttaataaattattgatcaacagtgtttcgtgtgttaacgctgctgcacaatttgctggaattgctgctttagacggaccagatgattcaattaatgaaatgatggtgaagttcactcaaagaagagatttaatttataaaggtctaaatgatttaccaggtgtagaatgtagtttacctggaggagctttttatgcatttcctaaggtaattggtactggcatgaatggtgctgaatttgctagaaaagctatgcatgaagctggggtagcaatagtaccgggctctgcttttggtgaaacttgccaaaattatgttagatttagttttgctgcatctcgagacaatatttcccaagctttagaaaacataaagaaaatgctaactaaataa

SEQ ID NO: 245567 - DNA, 372 bp, Unknown
  Bacterial polypeptide expressing nucleotide sequence isolated from the Sargasso Sea
aatgagcatagtttccaataatttaaagagaattaaaccatcaccaaccatcgctgttacctcaaaagctagagaaatgagggcagctggcaaagatgttattggcctaggagctggagaacctgattttgacactccagataacattaaagatgctgctatcgaagcaattaaaagaggagaaacaaagtatacagctgtggatggtacaccaaaacttaaaaaggcgatccaagggaaatttacaagagaaaataatttgtcttacgaattagatcaaatttcagttggtacgggaggaaaacaagttttatataacgtttatatggcaaccctgaatccaggagacgaagtcattatcccagcacctta

SEQ ID NO: 245568 - DNA, 1165 bp, Unknown
  Bacterial polypeptide expressing nucleotide sequence isolated from the Sargasso Sea
atgaaattagcacatagtttaagtagacttggtacggaaacagcttttagtgttttagctgaagcaaaaaaattagaggcacaaggtaagccaatgatacacttaggtcttggacagccagattttaaaactcctaaacacgtagttgaagctgctaaaaaagctcttgatgatggacatcatggatatgtaatgtccaatggtattcctgaatgcagacaagcagttacaagatggataaaaaaaagatacaatgttgatgtgagccatgaaagaatacttatcatgcctggaggtaagccaactatgacatatgcaattcaatgttttggtgagccaggagcagaaattattcatccaacacctgcttttccaatatatgagtccatgattaattacacaggctcaacttcagtgccgtatgatttaactgaagacaaagatttaaaatttaatccagatagaattttgtctctaataacagataaaactagacttttaattttaatcaacccaaataatcctaccggaagttttgttgatagatctgatattgattatttagcagatggtctcaaaagacatccgcatgtaacgatactaagtgatgaaatttatagtagacagatatttgataataaagagatgcctactttttttaattatccagaattgagagagaggctaattgttttagagggatggagcaaagcttattcaatgaccggatggagattgggctggagtttctggccagaacatttggttgaacatgtaaataaacttttaattaatagtgtttcatgcgtaaatgcagctgcgcagtacgcaggtatagccgcacttgatggcccagatgactcaattaatgagatgatggaaaaatttactgcaagaagaaaacttattcatgatggattaaatagcctgccaggtgttgaatgcagcttaccgggtggagctttttatgcgtttccaaaagtaataggtacagggatgaatggtgcagaattttctagaaaagctatgcatgaagcaggagtagctatagtacctggttcagcttttggtgagacctgtcaaaattacgttagatttagtttcgcggcttctagagataatatttctcaagcactagaaaacattaaaaaaatgctaggttaaa

SEQ ID NO: 245569 - DNA, 789 bp, Unknown
  Bacterial polypeptide expressing nucleotide sequence isolated from the Sargasso Sea
atgagtcaatgataaattacaccggatcaaccgcagtaccatatgatttaacagaagataaagatttaaaatttaatccagataaaatattatctttaattaccgataaaactcgattgttaattttaattaatccaaataacccgactggaagttttgttgagaaatcagatatagatgtattagctgatggtctgaagaaacatcctcatgtaacaatacttagtgacgaaatttatagtaggcaaatttttgacggaaaagaaatgccgtcgtttttcaactaccctgaactaagagaaagattaatagtactggaaggatggagtaaagcttattcaatgacagggtggagacttggttggagtttttggcctcaacacttgattgaacatgttaacaaattattaatcaatagtgtttcgtgtgttaatgcggcagcacagtttgctggcatcgctgcattagatggaccagatgattcaattaatgcaatgatggaaaagtttacacaaagacgagatttaattcataaaggcttaaatgaactcgatggggtagaatgcagtctacctggaggtgctttttatgcatttccaaaagttattggcactggaatgaatggggctgaatttgcgaggaaggctatgcatgaagctggtgtagcaatagtaccgggctctgcttttggtgaaacttgccaaaattatgtaagatttagctttgctgcttcaagagataatatttctcaagctttagaaaacataaagaaaatgctaactaaataag

SEQ ID NO: 245570 - DNA, 876 bp, Unknown
  Bacterial polypeptide expressing nucleotide sequence isolated from the Sargasso Sea
gcggcaaaccaacaatgagttacgctattcagtgctttggtgaaccaggagcagaaattatacatccaacacctgcttttccgatttatgagtcaatgattaattatacaggatcaacttcagttccatatgatttaacagaaaataaagatctaaaatttgatccagacaaaatattatcattaataacagacaaaacacggttgttaattctaatcaatccaaataatccaaccggaagttttgtagaaagaaaagacattgatgttttagctgatggtcttaagaaacaccctcatgtaacaatacttagtgatgaaatttacagtagacaaatttttgatggaaaagaaatgccaacattttttaattatccagaattaagagaaagattaatagtgttagagggatggagcaaagcttattcaatgactggatggagacttggttggagtttctggccacaacatttagttgaacatgttaacaaattgttaattaacagtgtttcatgcgttaatgctgcagctcaatttgcaggtattgctgcattggatggtcccgacgattcaattgatgccatgatggaaaaatttacccaaagaagagatataatttacaaaggtttaaatgatttaccaggagtagaatgtagtttacccggcggagctttctatgcatttcctaaagtaattggaacagggatgaacggagcagagtttgctagaaaggccatgcatgaagcaggagtagcaatagtgccagggtcagcttttggtgaaacctgccaaaattacgtaagatttagttttgcagcttcaagagataatatttcacaggctttagaaaacataaagaaaatgctaactaaataag

SEQ ID NO: 245571 - DNA, 1021 bp, Unknown
  Bacterial polypeptide expressing nucleotide sequence isolated from the Sargasso Sea
atgagcataatatcaaacagtttaaaaagaattaaaccctctccaacaatagctgcgacccaaaaagcgagagaattaaaagctgctggaaaagatgtaatagctttaggtgcaggtgaacccgactttgatactccagataatattaaaaaagctgcagtaaaagccataagaaaaggcgatactaaatacaccccagttgatggaactcctgcaattaaaaatgcagttataaaaaagtttaaaagagaaaataaacttaattatactacagaccagataactgtaggtacaggaggtaaacaagtattatataatgcttttgtagcaacattaaataaaggagatgaagttcttataccagctccattttgggtatcttatccagacatggtattgcttgctggtggaaaaccaaaatttataaaatgtggagaagaagacggttttaaattaacaccagctaaacttaaaaaagcaatcacaaaaaaaacaaaatggataattttaaattctccatctaatcctacaggggcagcttatacaaaaaaagaaattattagcttaggtaatgtactacttaaaaataaaaatatttttatcttgagtgatgatatttatgagcatgtaaaatttgataattttaaattttttacaattgcacaaatcaaaaaacttaaagatagaacattaactatgaatggcgtaagtaaagcttatgctatgaccgggtggagaattggttatgcggctggaccaaaaaatataattgctgcaataagaaaaattcaatctcaatcaacatcaaatccatcatcaataagtcaagcagcagctgtagaagctctaaatggaacacaaagtttcataaaaaaaagagccaaatcttttagcgatagaagaaactttgttgtaaattatctaaatagtatacctgggataacctgcttaatgccaaagggtgccttttatgttttccctagttgtaaaggattaattggaaaaaaaacaaaaattaaaa

SEQ ID NO: 245572 - DNA, 1096 bp, Unknown
  Bacterial polypeptide expressing nucleotide sequence isolated from the Sargasso Sea
atgttatcagaaaaaataaagtctttgccgatatctcagactgttgcaatgacagctaaagcacatgatttaaaaaaccaaggaatagatgttataactctaagtgcaggtgagcctgactttaatattccagattacataaaagaagcagcagttgaggctattaatgataattatcataaatattctccggttgatggttatcttgatttgaaaaaatcaatttgtaaaaaattcaaaagagataacaacttagattatgatgtagaccaaatagttgtttcaacaggagcgaaacaatcaattgcaaatgtgtgtatgtcacttataaataaaggggatgaagttttaatccctacaccatattgggtaagttacagtgccatggttgcactagccgaaggagtacctgtatttataaatccagatgaagactcaaattataaaattactgctcaacaacttgaatctgcaataacagataaaacaaaaatgttaatgcttaactcacctaataacccaagtggatcagtttttactgaacaagaatatcttgaattttcaaaagttcttgagaagtatccaaatataattattgtatcagatgaaatttatgaacacataaattatggagtaaaatctgtaagttttgcaagcctacccggaatgtatgatagaacagttactgtaaatgggatctcaaaagcttatgcaatgactggatggagaataggttatttgggagcaccaaaagtaatagctaaagcttgtaataaaatgcaaggtcaaataactagtggtgcaaattgcattgctcaaagagctacaattaaagcattagaagagtcacctgaaaaaattcaatatatggttgatgaatttaaaattagaagagattttataatcgatcttgtaacacaaatcaatggttttataataaaagaaccacctatgggggcattttatattttcccagatatctcagaattatttggtaaaacgtttaaaggtgtaactgttaatgatgcaaatgatttatcaatgcttattcttgaaaaagctcatgtagcaactgttcctggggatgcatttggtt

SEQ ID NO: 245573 - DNA, 1204 bp, Unknown
  Bacterial polypeptide expressing nucleotide sequence isolated from the Sargasso Sea
attggtaactctatctaaaagcatcaaacgaataaagccttcagctactatgacagttactcagaaagcccgggagttaaaggcagaaggcaaagatataattggtttaggagcaggagaacctgatttcgatactcctgataacattaagaaagcggctattgatgcaatcaaagagggcgatacaaaatatacagcagttgatggaacacctgcactaaaagaagctattcagtcaaaattcaaaagagaaaataatttggactacggactaaatgaaatttctgtgggaacaggaggtaagcaaattatttttaatgcaatggcggtgactctagactcattagatgaagttattattcctgcgccttattgggtaacctatcctgatgtcgtaaattattttgatgcaaagcctataatcattacatgcggcgaagagacaggctttaaaattactcctgatcaacttgaaaaagcgattaataaatcaacaaagtggtttattttgaattcaccttctaatcctacgggttcatgttacacaggagatgagcttatcgccttatcgaaagttctcgagaatcatccccacgttaatattatgactgacgatttatacgaacatctaatctatgatgatgttcagtttcatactcttgtaagtgttgccccttttctaaaggatcgtactctaactctaaatggcgtgagcaaggcttatgccatgacgggatggagaataggttatgctggaggaaatcaggatttgattaaagcaatgggcaaattacaatcccagtcaaccagtaaccccacttcaataagtcaggcagctgcagtggaggccttaaatggcgataattcttttatagctgagagatcacaggtatttaagaaaagaagagacaacctaatctctgaattgaacagcatgaatggaatttcatgcagaaaacctgaaggtgccttttatgtatttccttcatgccagggtgttattggtaagactgatgattctggtaaaataattagtaacgatcaagaatttacaacttcgttactagagcaagcaggagtcgctgtagtgcaagggtctgcgtttggacttgagggatattttagaatttcttatgctacttcagatgaaaatttagaagaagcatgttctcgcatgcgggtttatttagaaaatttgaaataa

SEQ ID NO: 245574 - DNA, 393 bp, Unknown
  Bacterial polypeptide expressing nucleotide sequence isolated from the Sargasso Sea
aatgagcattatatcagacagtcttaagagaattaaaccatcacccacacttgcagtaactcaaaaagctagagaattgaaagcagctgggaaagatgtaattgctcttggagcgggagaacccgattttgatactccagataacgtaaaggatgccgctattaaagcaataaaagatggtgacacaaaatatactgctgttgatggaacaccagcattaaaaaaagctatttcagaaaagtttaagagagaaaataatataaactataatactgatgaaattacagtaggtgctggtggtaagcatgtaatatataatctgatgatggcaacattgaataaagatgatgaggttataattccagcgccctattgggtgtcctatcctgatat

SEQ ID NO: 245575 - DNA, 475 bp, Unknown
  Bacterial polypeptide expressing nucleotide sequence isolated from the Sargasso Sea
aatgagcataatatctaacagtttaaataggataaaaccttcgcctacaatagccgtttcacaaaaagctagagaattaaaagcggcaggaaaggatgttattggtttaggagcaggtgaaccagattttgatacacctaacaatattaaaaatgcagctataaaagctattagagcgggagatacaaaatatacagcagttgatggaactccagctttaaaaaatgcaataataaaaaaatataaaaaagaaaataacttaaaatattctttagaagaaataactgttggaacaggtggaaagcaagttctttataatgcttttatggcaactttgaataaaggtgatgaagtaattattcctgcacctttttgggtatcttatcctgatatggttttattggctggtggaaaaccaaaaattataaaatgtagtgaaggcgataattttaagttaactccatcaaaactaaaa

SEQ ID NO: 245576 - DNA, 898 bp, Unknown
  Bacterial polypeptide expressing nucleotide sequence isolated from the Sargasso Sea
atgacttttattgctgatagattaaagagaataaaaccttcaatgactgtaggtattaacgttaaggctaatgctttaagggcagaaggtaaagatattttagtattagctgctggtgagcctgactttgatacaccacataatataagaaaagcagcttctgacgcaatggatgctggtaaaacaagatatgtgccggggaaaggaactccagaactgcaaaaagctattcaatctaaatttttaaaagataataatataaattatgatttagacgaaataattgtgggtgttggaggaaaacatataatttacaatgctatgatggctacaattaatccaaatgatgaggtaattatcccagctccattttgggttagctatcctgatatagttttattggcagaaggaaaaccagttattgttcaatgtcctgaaaatcaaagttttaagataacttcagaccaactggaaaaaaacattactgataaaacaaaatggttaatgctcaatagtccaagcaatccaacgggaagtctttattctaagaaggaactaaaagaattagcagaagttttattaaagtatccgcaagttttaattatgtctgatgatatttatgaaaaagttatttatgataacttagaatttacaacaattgcttcagttgaaccaaaattaaaagacagatgcttgactttaaatggagtatcaaaagcatattgcatgactggctggagattaggttactgtggagcttcaaaagaaattattgcagctatgaataaaatccaatctcaaagcactacttctacatcttcaatttcaatggctgctgctgtagaagcattaaatggacctcaagaatttataaaagatcataatgaggcattgtaag

SEQ ID NO: 245577 - DNA, 1204 bp, Unknown
  Bacterial polypeptide expressing nucleotide sequence isolated from the Sargasso Sea
atgaactttgtagcagacagaataaaccgaattaagccatcgatgactgttggtattaatatcaaagcaaaagctatgaaggaagagggtaaggatgttatcgttcttgcagcaggagaaccagattttaatactcctaaaaatatacgagatgcagcaaataaagcaatggatgagggtaaaacaaaatatgttcccggtaaaggaactcctgaattacaaaaagctatacaaaaaaaatttaaggaggacaataatatcgattatagtttagatgaaatcatttgtggtgttggtggtaaacacattatttacaatgctatgatggcaacaattaattcaggagatgaagtaataattacagctccttattgggttagctatccagatattgttttattagcagaagggaagccagtaattgttgaatgcccagaaagtcaaaattttaaaataaaacctgaacaattagaaaagtgtatcacaccaaaaacaaaatggttgatgcttaatagccccagtaatccaacaggtactgtgtattcaaaggaagaattaaaagatttagcgaaggtcttaattaatcatcctcatgttctgattatgtgtgatgatatttatgaaaaaattatttatgatggacttgagtttcatactttagcatctgtagaaccttcacttaaaaatagatgtttaacactaaatggtgtttcaaaatcttattgtatgactggctggagacttggttactgtggagcaccaaaagaaattattggtgccatgaacaaaattcaatcacaaagtacaacatcaacatcatcaattactatggcagcttcagttgaagcaattagtggaccacaagattttatattagatcataataaaaaatttataaaaagaagggatttagtagtaagcaaattaaatgaaattgatggtataacttgctcaaaacctgatggagcattctatgtttatccaaactgccaagatattttaggtaaaataactccaaatggaaaaaaaatatcaagcgatgaagattttatgacttatttgcttgaagatcagggcgtagctggtgttcatggctcagcatttggcctatctccttattttagattatcttatgcaacaagtgatcatattttagaagatgcctgtaatagaattcaatttgcgtgtagtaagcttaagtaag

SEQ ID NO: 245578 - DNA, 1072 bp, Unknown
  Bacterial polypeptide expressing nucleotide sequence isolated from the Sargasso Sea
atgacttttattgctgatagattaaagagaataaaaccttctatgactgtaggtattaacgttaaggctaatgctttaagggcagaaggtaaagatgttttagtattagctgctggtgagcctgattttgatacacctcataatataagaaaagcagcttcagacgcaatggatgcaggtaaaacaagatatgtgcctggtaaaggaactcccgaactgcaaaaagctattcaatctaaatttttaaaagataataatctgaattatgatttagatgaaataattgtgggtgttggaggaaagcatataatttacaatgctatgatggctacaattaatccaaatgatgaagtaattattccagctccattttgggttagctatcctgatatagttttattggcagaaggaaaaccaattattgttcaatgtcctgaaaatcaaaattttaagttaactgcagataaactggaaaaaagtattactgataaaacaaaatggttaatgcttaatagtccaagtaatccaacaggaagtctttattctaagcaagaactaaaagaattagcaaaagttttattaaagtatcctcaagttttaattatgtctgatgatatttatgaaaaagttatttatgacaacttagaatttacaacaattgcttcggttgaaccaaaattaaaagacagatgcatgactttaaatggagtgtcaaaagcctattgcatgactggctggagattaggttattgtggggcttcaaaagaaattatttcagctatgaataaaattcaatctcaaagcactacttctacatcttcaatttcaatggctgctgctgtagaagcattaaatggacctcaagaatttataaaagatcataatgaggcatttgtaaggaggagagatttagttgttaatttattaaataatatagatggattaagctgtttaaagcctgaaggagcattttatgtatatccttcttgtaagggtgtaattggcaaagaaacgccagaaggaatgaaaatttccaatgatgaggattttatgacttatttattagaaagtg

SEQ ID NO: 245579 - DNA, 976 bp, Unknown
  Bacterial polypeptide expressing nucleotide sequence isolated from the Sargasso Sea
atgaaactacaggcaaatagacttcaacggattaagccttcgatgacagttgcaattaatgttaaggctaatgctttgcgcgctcaaggaaaagatgttttagttttagcggcaggcgaacctgattttaatactcccactaacattataaatgcagcaaaaaaagcgatggatgatggtaaaacacggtatgtgccaggcaaaggtactccagaattgcaacaagcaataataaataaatttgcgagtgataataatataaaatacttacctgaagagattatggttggagtaggtggaaagcatattattttcaatgctttaatggcgacacttaaccctaatgacgaagtaattataccagcaccctattgggttagttatcctgatatagtgatgttggctgaaggaaagccaatttttgttaaatgcgatatttcacaagacttcaaattaactgccagtcaacttgaaaaatatataacaaaaaaaactaaatggttaatcctaaatagcccaagtaatccaactggatcagtttatacctatgatgaattaaaatctttaagtcaagtattgcttaagtatccaaatgttttagttttgactgatgatatatatgaaaaaattatttatgatgagattaagtttaataccattgcatctgttgaaccaaaattaaaaaatagggtccttacattaaatggagtttctaaagcttattgtatgacaggttggagactaggttattgtgctggaccaaaagatattattgcaggaatgaataaaatacaatctcaaagtactacctctacttcttcaattacaatggcagcttcagttgaagctctaaatggaagtcaggaatttttaaaaaaacataatatggaattcagaaagagaagaaatttagttgttgaaaaaataaataatatacacggcctctcctgtaatatgccaagtaggggcattttat

SEQ ID NO: 245580 - DNA, 592 bp, Unknown
  Bacterial polypeptide expressing nucleotide sequence isolated from the Sargasso Sea
atgagcataatatcagacagtttaaagaagattaaaccatcgcccactattgctgttactcaaaaagcaagagaattaaaagctgccggaaaagatgttattggattaggtgcgggggaaccagattttgatactccagataatattaagcaagcagctataaaagctattaaagatggtgataccaaatacactgcagtagatggtactccagcattgaaaaaagcaatcgtagaaaaatttaaaaaagaaaataatttagattatacaactgatcaaattacagttggtgctggtggtaagcatgtaatttataatgctatgatggccacattaaacgaaggtgatgaagtaatagttcctgctccttattgggtttcttatcccgatatggttttattagctggaggaaaaccagtgataatggaatgtgatgaaaaacaaggttttaaaataaatccaaatgatcttgagaaatttataactccaaaaacaaaatggattattcttaattctccttctaaacccaactggagcatgttattcagagcaaaatataaaagcaattgcagatattttagaaagatataat

SEQ ID NO: 245581 - DNA, 1168 bp, Unknown
  Bacterial polypeptide expressing nucleotide sequence isolated from the Sargasso Sea
atgaaattagctaaaagtttagaaagattaggaactgagtcagcatttactgtgcttgctgaagctaaaaaattagaagctcaaggaaagccaatgattcatttaggattaggacaaccagactttaaaactcctaaacatgttgttgaagcagctaagaaagcgttagatgatggacatcatggatatgtaatgtcaaatggtattcctgaatgtcgtcaagctgtaacaagatggataaaaaaacgttacaatgttgatatcaattttgaaagaatcctaatcatgccaggtggaaagccgacaatgagttatgctatacaatgttttggcgaaccaggggcagagattatacacccaacacctgcttttccaatttatgagtcaatgattaattatacaggctcaacttcagtcccatatgacttaacagaaaataaagatttaaaatttgatccagataaaatattatccatgataacagataaaactcgtttgctaattttaataaatcctaataatccaacaggtagctttgtagagaaaaaagatgttgatgttttagctgatggtctcaagaagcatcctcatgtaacaatacttagtgatgaaatttatagtagacaaatctttgatggaaaagaaatgccaacattttttaattatccagagttaagagaaagattaattgtattggaaggatggagtaaagcttattcaatgactggttggagacttggttggagtttttggccagaacatttggttgaacatgttaataaattattaattaatagtgtttcatgtgttaatgctgcagctcaatttgctggtattgctgctttagatggaccagacgattcgattgatgcgatgatggaaaaatttactcaaagaagagatttgatttataaagggttaaatgatttaccaggtgtagaatgcagtttacctggaggagcattttatgcatttcctaaagtaattggcactggcatgaatggtgcagagtttgctcgaaaggcaatgcatgaagcaggagtagcaatagttcctggatctgcttttggtgaaacttgccaaaattatgttagatttagttttgctgcatccagagataatatttcacaagcattggaaaatataaagaaaatgctatctaaataag

SEQ ID NO: 245582 - DNA, 1174 bp, Unknown
  Bacterial polypeptide expressing nucleotide sequence isolated from the Sargasso Sea
atgaatttagtaagcagcattggaattagacaggatattgaggaactccctttttctcccattcgggaaattgtccggtcagcagaagatcttaaagatgtgatcccattctggtttggtgaacccgatgtgagtacaccagaatttataagaaacatagcaaagaaatctttggatcgtggtgaaacattttatgcgcccaattcaggtcaaaggctattgcgtcagacaattgcagattacatgaacggactttacggatcaaaaatctcgaccgaacagatcacggtaaccctttcaggaatgaatgcagtaatgttatgcgcacaagctttggtaccaaaaggggcaaaggtagtggttttgttgcccagttggccaaatattcctgcagtacaaaggataatgggcgcaaaagttcagggggttccaataaacatgaaggatgggaaatggaatctggatatagaacaagtatttgatgcatgtgattctaacacttccgcaattgtaatcaattctcctaataatccttcgggctggaccatgtccaatcaagaacaaaagacccttctggaatttgcccgagaaaaaggtctatggattgtaagtgatgaggtctatgcacgaatcagttttaaaaataatcatgccccctctttttgtgaggtgatggaaaaagatgatcgagttatcattgtaaacagtttttcaaaatcatgggcaatgactggttggaggttgggttggatcactgcaccagctcaacttggagtccagtttgaaaaacttaacgaatacaacgttgcaggcccccccccttttattcaacaggctggtatagctgcacttaaagaaggtgaagcttttattcatgaaagtaacaatcgctatcttcatgcactttcttatttcactgaatgggcaaaagctcaaaaacgtattgaatttgaccctccaactgcagctttctatgcgttttttaaaattcgagatgcaaatgacagtttggaaatggcaaaagatcttcttaaaaagggggttgggcttgccccaggccgtgcatttggacctcagtttgattcctatctccgtctgtgtttcgcgtcgtccattccaaaattggaaaaaggccttaatcgattggaggattggctgaaggattttgtgtgaa

SEQ ID NO: 245583 - DNA, 636 bp, Unknown
  Bacterial polypeptide expressing nucleotide sequence isolated from the Sargasso Sea
agctttttgtcgaaaaaaaagatattgattttttagctgatggcttaaaaaaatatcctcacgtaacaatattaagtgacgaaatttatagtagacaaatttttgataataaagaaatgccatcttttttccattatccagaattaagagaaagattgattgttttagagggatggagtaaagcttattcaatgacaggttggaggcttggttggagtttttggcctcaacacttaatcgagcatgttaataagttgttaatcaatagcgtttcatgtgttaatgctgcagctcagtttgcaggcattgctgcattagatggaccagatgactcaatcaatgcaatgatggaaaaatttgctcaaagaagagatctaatttataaagggttaaatgatttaccaggtgtcgaatgcagcttaccaggtggagcattttatgcatttccaaaggtaattggaactggcatgaacggtgctgaatttgcgaggaaggctatgcatgaggcaggagtagcaatagttcctggatcagcttttggcgaaacttgccagaattatgttagattcagttttgccgcatcaagagataatatttctcaagcattagaaaatatcaaaaaaatgctgaaatagt

SEQ ID NO: 245584 - DNA, 1078 bp, Unknown
  Bacterial polypeptide expressing nucleotide sequence isolated from the Sargasso Sea
tgcaggtgaacccgattttgatacaccagataatattaaaaaagctgctgtaaaagccataagaaatggtgatactaaatacactccagttgatggaactcttgcaattaaaaatgcagttataaaaaagtttaaaagagaaaataaacttaattatacttcagagcagataactgtaggtacgggaggtaaacaagttttatataatacttttgtagctactttaaacaagggagatgaagttcttataccagctccattttgggtatcttatccagatatggttttgcttgctggtggaaaaccaaaatttataaaatgtggagaagaagacggatttaaattaacgccagctaaacttaaaaaagcaatcacaaaaaaaacaaaatggataattttaaattctccatctaatcccactggtgcagcttatacaaaaaaagaaattattagcttaggaaaggtattaattaaaaataaaaatgtttttattttgagtgatgatatttatgagcatgtaaaatttgataattttaaattttttacaatcgcacaaatcaaaaaacttaaagacagaacattaactatgaatggtgtaagtaaagcttatgctatgacggggtggagaattggttatgcggctggaccaaaaaatataattgctgcaataagaaagattcaatctcaatcaacatcaaatccatcatcaataagtcaagcggctgctgtagaagctctaaatggatcacaaagttttataaaaaaaagagcaaaatcttttagtgacagaagaaactttgttgttaattatttaaacagtatacaaggaataacttgtttaatgccaaagggtgccttttatgttttccctagttgtaaaggattgattggaaaaaaaacaaaaattaaagatgatacagattttgttaaaaagctccttgaaaaacaaaatgtagctgtggtacaaggctctgcatttggtctagacggttattttagaatatcttacgcaacttcaatgcaaaaattaaaagttgcaatggcaaggatcaagcttttttgtgatagtttaggctaa

SEQ ID NO: 245585 - DNA, 943 bp, Unknown
  Bacterial polypeptide expressing nucleotide sequence isolated from the Sargasso Sea
gaaaataaattaaactattctttagatcaaatcactgttggcacaggaggaaaacaagttctttataatacttttatggcaactcttaataaaggggacgaagtaattataccagcacctttttgggtatcatacccagatatggttttgttagctggtggaaaaccaaaaataatcaaatgtaccgaacaggaggggtttaaacttactccaaaaaaattaaaaaaagcaatttctaaaaaaactaaatggatcattcttaactctccatcaaatccaacaggagcaggttattcaaaaaaagaaattaacgatttagcaaaaattttaaccagaaacaaaaaaatttttattctgagtgatgatatttatgaacatgtcaggtatgacaactttaatttttttacaattgctcaaattcctaagttaaaagataggacacttacaatgaatggagtaagtaaatcatatgctatgactggttggagaataggttatgctgctggtccaaaggaaataataaaagctattggaaaaatccaatcacaatcaacttcaaatccttcttcaataagtcaagctgcagctgttgaggcattaaatggaaaacaaggatttataaaaactagagctaaagcatttaaagacagaagaaactttgttgtaaaaagcctcaatagtataaaaggcataagttgtttgaccccaaatggagcattttacgtatttccaagctgtaaaggattgttaaataaaaaaacaaaattaaaaactgacactaattttgttcaaagattgcttgaaaaagaaaatgttgctgttgtccaaggttctgcttttggcttagatggctattttagaatttcttatgctacatccatgaagaatttaaaaaaagcaatgtcgagaattaaatctttttgtgaagctctaaacaaataat

SEQ ID NO: 245586 - DNA, 823 bp, Unknown
  Bacterial polypeptide expressing nucleotide sequence isolated from the Sargasso Sea
cccatattgggtttcttatcctgatataattttattagctggtggaaaacctaaaattataaagtgtagtgaaaaaaataatttcaagctaacaccaaaagaattgaaaaaagcaatatcaaaaaaaaccaaatggataatattaaactcgccatctaaccctacaggttcagcttacacaaaagatgaaataattgctctatctaaaattttattaaaatataaaaaaacatacattttaagcgatgatatatatgagcatattacttatgataattttaaattttacactatagctcaagtagaaaaacttaaaagcagaactcttacaatgaatggggtaagtaaatcttactctatgacaggatggagaataggatatgcagctgggcctaaagaaattattaaagcaatggcaaaaattcaatctcaatctacaagtaacccaacctcaattagtcaagcagctgcagtagaagctttaaatggcactcaagattttataaaagttaggtcagactcttttaaatccagaagagattttgttgttcaaagtctaaacaatattaaaggtttaagttgtttaaaacctgaaggggctttttatgtttttccgaactgtaaaaaactattaggaaataagtctaaattaagaactgacagagatttcgtcgaaaaacttttggaaaaagcagaagttgccgttgttcaaggctctgcatttggtttagagggttattttagaatatcctatgctacttctatggaaaatttagaaaaagcaatgaaaagaattaaaattttttgtgagtctctatattaa

SEQ ID NO: 245587 - DNA, 517 bp, Unknown
  Bacterial polypeptide expressing nucleotide sequence isolated from the Sargasso Sea
atgaacattcttgcttctcgtctcaacagaatacaaccatcgccaacaattgcaatgagcatcaaagcccgcgaacttaaggctgaaggaaaagatattatagaattagctgctggcgaaccggattttccaacaccttctcatataatagaggcggctgaagaagctatgagccgtggcgaaacgaaatatactgacccagacggaacacctgccctcaagcaagcggtatgcgataagtttaagcgtgataataatttggaatatgtcaccagccaagttacgatcggaactggaggcaaacaagttctttacaacgcgttgatggcgacattgaatgaaggtgatgaggtaataattcctgcaccttattgggtttcttatccagacatggtcttgctagccgaaggaatacccaagattgtagaatgccccttagacaaaaattttatccttcaacccgaggatttagaaagagcaataaccccaaaaacaaaatggatttccttaacagccc

SEQ ID NO: 245588 - DNA, 1198 bp, Unknown
  Bacterial polypeptide expressing nucleotide sequence isolated from the Sargasso Sea
aatgaagtatgcaaatcaattacaaaacttaggcaccgaaacagcgtttgccgtatcagcgcaagctaaggagtgggctgataaaggcaacaaagtatatccttttcacttgggagatattaatctcccaacacctgaaaatatagtacaggcaacaataaagagtattaatgatggccttacaggctattgcccttcagaaggtattttacctttaagagaagctttggctcatgatgttggatcgaagagaggtgtgaattacaatccagacaatgtagcaatacagcctggaggcaagccaaccattggaaaatttatttcctcaattatggatcctggcgatgaaatactatacccaaatcctggctacccgatttatgaatctcagattgaatatcaaggcggtaaagctgttccctattcttttgtgcaaacagatatgggttttgatattgatattcagaagctgaatgattctattaccgatagaactgttgcgctcatttataataattatcaaaatccaatatctgctgaatcatcaaaaaaagaaatggaagctatagcaaaaatagcgattgagaatgatctttgggtgctttccgacgaagcctattttgagattgtttatgatggagatgcaacttcaattgtatctcttccaggaatgaaggagagaacagtaatactctatactttttctaaaaagtttgctatgaccggctggagagtaggaggttcaattggccctagagaaattattaaaagaattgccaagttaaatgttaatgccgagtcatgtactactcattttattcaaaatgcgatggttgaagccctgaatggagatcaaactggatcacaaaaaattttagaaaagctaaaagtccgtagagatgctacagttaaaggccttaacgctatagatggtattgatatagttgcaccccgtactactttttatctttttcctaatgttactaaagtgatggaaagaaaagggctccataaaattgaagatcttcaaaatggcgctcttaccaatgcgaacgtatctttttgtactcgcgaacattttggaagagctcaagcagatgagagcgactattatattagactagcatattctgggatatctgttgaagatatcaatgagggcttaattaagcttaaagatttttttgaatctcaatga

SEQ ID NO: 245589 - DNA, 1010 bp, Unknown
  Bacterial polypeptide expressing nucleotide sequence isolated from the Sargasso Sea
tacagcagctagtggtattgatgaactaaagaatgcaataatttcaagaatcaaagaagactacaatgttgaatatgaaaaaaaagaaatattcgttggctctggagcaaaacatgttttatacaatctattccaagtacttcttgatttaaatgatgaggttataattcctgcaccctactgggtttcctatccagaacaagttcgtatagcaggcggaaaaccagtaattctaacaactgaacaaagtaacggttttaaagttaaaccttctgaaatacaaaatataattactgacaaaacaaaaatacttgtgctaaattacccatcaaatcctacaggtgtaactttcacaaaagaagagttggtagagattgctgatttagcagaaaaaaatgatctaataataatatctgatgaaatttacgacaaaacactgtattctgagaccaaacatacatcttttgttcaaataaatgattcaattaaaaatagaacaatcttagtaaatggagtttctaaaacatactcaatgactgggtggagaattggttatgcagcaggaaataaaaaagtactagctgctatgaataaccttgcgggacaatcaacctcaaatccaacttcaattgcacaaaaagcatctgtagaggctttttcgggtcctcaagataaagttaatgaaatggttgtagaatttaagaaacgaagggattttatatgcaaagaattaaacaacattaatggaatatcctgccttatcccagatggtgccttttatgtatttccagatatttcttattatttcggtaaagaatacaaaaacggaaaaatagaaaactcggtagacttcgctgcctttctattaaatgaagccaaagtagctgtagtcccaggtattgaatttggttcagataaaaatataagaatatcatatgcgacttctatgcatgacattaaagagggagttaagagaatcaaggaaaagttagaagaattcttttcttaat

SEQ ID NO: 245590 - DNA, 745 bp, Unknown
  Bacterial polypeptide expressing nucleotide sequence isolated from the Sargasso Sea
ttcttctgcagaagatggattcaaaataaatataggagatttgaagtctaaaatttcttcaaaaactaaatttataattatcaattctcctaataatcctactggaagagttatgtcaaaggaagaattattacaaattgccgatttagctagagaaaatccaaatataaatattctttctgatgagatttacgaactaatccttaaaaaagaatttaaacactacagtttatcttcattagcaaatgacttaaaagatagaatttttataataaatgggtttgcgaaaggatgggccatgactggctggaggataggttatttagtaggtcccaaagatgtaatcaaagcatcctcagcattacaaagtcaaagtacaagtaatgtctgctcttttgttcaaaaaggggctttagaggctttaaaaattaataatgagtttttctctatgataaatagccattatgatcaaaggagaagtcttctctatgagggccttaataatataaatgggatttatattgaagaacctaacggagcattttacgcatttccaaaattacccaactcctcaattacttctgttgatttctgcaataaagctcttcaagattacggattagttgttgtacctgggaaagcttttggagctgatcaatgtataagaatatcatgtgcagcttcagaaattaagataaaagatggactacagaggattgaaaaagcaatctctgaatactattaa

SEQ ID NO: 245591 - DNA, 583 bp, Unknown
  Bacterial polypeptide expressing nucleotide sequence isolated from the Sargasso Sea
ccctcatgtaacaatacttagcgatgaaatttatagcagacaaatttttgatggaaaagaaatgccaacattttttaattatccagagttaagagaaagattaattgtattagaaggatggagtaaggcttattcaatgactggatggagacttggttggagtttttggccggaacacttagttgaacatgttaataaattattaattaacagtgtttcatgtgttaatgctgctgctcaatttgctggtattgctgcattggatggaccagacgattcaattgatgcaatgatggaaaaatttactcaaaggagagatctgattcacaaaggattaaatgatttaccaggtgtagaatgtagtttacctggaggagccttttatgcatttcctaaagtaattggtactggcatgaatggtgcagagtttgcaagaaaggctatgcacgaagcaggagtagcaatagttcctggatcggcttttggtgaaacttgccaaaattatgttagatttagttttgctgcatctagagataatatttcacaagcattggaaaatataaagaaaatgctttctaaataa

SEQ ID NO: 245592 - DNA, 863 bp, Unknown
  Bacterial polypeptide expressing nucleotide sequence isolated from the Sargasso Sea
agatgttattggattaggggcaggggaacctgactttgatacacctgataatattaaagaggcagctatacaggctattaaaagaggtgaaacaaaatacacagctgtagatgggacaccaaaacttaaaaaagcaattcaggagaagttttccagagaaaataatttatcttatgagttggatcaaatttcagtgggaacaggaggaaagcaggttctttataacgtgtttatggcaacaataaatcctggtgacgaagtagttattccggcgccatactgggtatcttatcccgatatggttttattggctggcggaaaacccaaaatagtaaaatgctcagaaaaaaatcaatttaaaataactccaaaagagttaataaaagcaattggaaaaaaaactaaatggttgattataaattcaccatcaaatcccactggatcttgttatacaaaaaaagaaatagaggaactatcaaaagtattaataaaaaataaaaatgtttttatacttagcgatgatatttatgaacatattacttatgatgatttcaaattttttaccatcgctcagattaaggccttaaaagaaagaacgctaaccatgaatggtgtgagcaaatcttattcaatgacaggatggagaattggatatggcgcaggaccaaaagacataattaaagctgtagcaaaaattcaatctcaatctaccacaaatccctcctcaataagccaagctgctgcagtcgaggcattaaatggtacacaagattttattcaaacaagagcaaattctttcaaaaaaagaagagattttgttgttgaaaaaataaataacataaatggattaagttgcttaaaac

SEQ ID NO: 245593 - DNA, 764 bp, Unknown
  Bacterial polypeptide expressing nucleotide sequence isolated from the Sargasso Sea
aatgagcataatatctaataatttaaaaagaattaaaccatctccaactattgcagttactcaaaaggcaagagaattaagagctgcaggaaaagatgtagttggacttggggcaggggaaccagattttgatactcctatcaatgttaaaaatgcagctattaaagcaataagagacggagatacaaagtatacagcagttgatggaactccagcattaaaaaaagcaattttaaaaaaatttaaaagagaaaacaaactaaattataaactagatgaaatcacagttggaactggagggaagcaagttctctataacacttttatggcaactttaaataaaggagacgaagttattattcctgctccattctgggtttcatatccggatatggttctcctagcaggaggaaaaccaaaaatagtaaaatgtgatgaaaaagatggatttaaaattacccctgcaaaattaaaagctgcaattacaaaaagaacgaaatggataatccttaattctccatctaatccaactggatctggatacagcaaatcagaaattcaaaaattagcaaaggttttaataaaaaacaaaaaagtccacattttgagcgatgatatttatgagcatgttaaatatgataattttaaattttttactattgctcaaatttcaaaattaaaatctcgaacattaacaatgaatggagtgagcaaatcttatgcaatgactgggtggagaattggttatgcagctggaccaaaga

SEQ ID NO: 245594 - DNA, 892 bp, Unknown
  Bacterial polypeptide expressing nucleotide sequence isolated from the Sargasso Sea
caaacttaaaaaggcgatccaaggtaaatttacgagagaaaataatttgtcatacgaattagatcaaatttcggttggtacaggtggaaaacaagttttatataatgtttttatggcaactctaaatccaggcgatgaggttatcatcccagctccttattgggtgtcttatcctgatatggttttattagctggcggtaaacccaaaatagtaaagtgctcagaaaaaaatgaattcaaaataacaccagatgaattaaaaaaagctattggaaaaaaaactaaatggttaattataaactcaccttcaaatccaactggatcttgttacacaaggaatgagatagaagaattatcgaaaatattaataaaaaataaaaatgtttatatacttagtgacgatatctatgagcatattacatatgatgattttaaatttttcactattgctcaaattaaagctttaaaagacagaacattaacaatgaacggtgtgagtaaatcttactctatgactggatggagaatagggtatggagctggcccgaaagacataattaaagctgtagcaaaaattcaatctcaatctacaacaaatccatcatcgattagtcaggcagcagctgttgaagctttaaatggaactcaagattttataaaaacaagatctgactcctttaaggagagaagggattacgttgttgatactttaaatagtattaatggtttaagttgtttgaaaccaagcggagctttttatgttttcccaaattgcaaaaagttgttaggcaaaaagacaaaattaaaaacagataaagaatttgttgaaaagctacttgaaaaagctgaagtggcggtagtccaaggatctgcatttggtttagatggatat

SEQ ID NO: 245595 - DNA, 847 bp, Unknown
  Bacterial polypeptide expressing nucleotide sequence isolated from the Sargasso Sea
atgagcatagtttccaacaatttaaaacgtataaaaccgtcgccaacaatagctgttactcaaaaagccaaagaattgaaggcatctggcaaagatataatcggtcttggagctggagaacccgattttgatactcccgataacattaaagaagcagctataaaagcgattaaaaatggagatacaaaatatacagccgttgatggaactcctgctttaaaagaggctatagttaaaaaatttaaaagagagaataatttagtctatcaaattgatcaaattacagttggcactggaggaaagcaggtaatttataacgctatgatggcaacgataaacgaaggtgacgaagttataattccagctccttactgggtatcctatcctgatatagttttattagctggaggaacgcctgttattttaaagtgtgatgagaaacaaggatttaaaattaatccaagagaattagaaaaatcaataactaaaaaaacaaaatggataatattaaactcaccatcaaatccaactggcgcttgctactctgaagaagaagtaagggaaattggcaaaatactagaaaatcacccaaatgttttcattctaagtgatgatatctacgaacatgttatttatggcaattttaaattttttactattgctcaaatcgatagcttgaaagatagggtgttaacgatgaatggagttagtaaagcttactctatgacaggttggagaatagggtatgctgcaggtcctgaagaaattattaaagcaattgctaaaattcaatctcagtcaacgactaatccttcttcaattagtcaggcagctgccgtcgaggctc

SEQ ID NO: 245596 - DNA, 739 bp, Unknown
  Bacterial polypeptide expressing nucleotide sequence isolated from the Sargasso Sea
aaagattaaaccttcgcccactattgctgtaacccaaaaagctagagaattaaaagcagcaggaaaagatgttatcggattaggagcaggtgaaccagattttgatacaccagaaaatattaagcaagcagctataaaggcaataaacgatggagataccaagtacactgctgttgatggaactcaagcattgaagaaagcaattgtagaaaaatttaaaaaagaaaataacctagactatacaacggaccaaattacagttggggcaggtggaaagcatgtaatttataatgcaatgatggctacactcaacgacggtgacgaggttattatcccagctccttattgggtttcttacccagatattgttttattagctgggggtaagccagttgtaatggagtgtaatgaaaaacaaggctttaaaataaactcagcagatttagaaaaatttataactccgaaaacaaaatggattattctcaactctccgtctaatcctactggagcgtgttatacagaaaaagaaattagagaaattgcaaaagttctggaaaaacatactcaggtatatattttaagtgatgatatctatgaacatgtaacctatgaagggtttaaattttttactgttgctcaaattcaaaatttaaaagaaagagtgcttactatgaatggtgtaagtaaagcttactcaatgactggttggagaataggttatgcggcaggtccaaaagaa

SEQ ID NO: 245597 - DNA, 466 bp, Unknown
  Bacterial polypeptide expressing nucleotide sequence isolated from the Sargasso Sea
atgagcataatatcagatagtttaaagagaattaaaccatctccaaccattgctgttacacaaaaagcaagagaattacgagctgcaggaagagatgtaattggtttgggagcaggagagccagattttgatactccagacaatattaaagaagcagcaattaaagcaattaaagatggagatactaaatacactgcagtggatggaactccaactttaaaacaagcaattgtggataaatttaaaagagaaaataatttaaactacacaactgatcaaatcacagttggagctggtggaaagcacgtaatttataatttgatgatggctacacttaacaaaggagatgaagttattattccagctccttattgggtttcatatccagatatagttttactgacaggagccactccagtagttatcgagtgttctgaagaacaaggttttaaactgacagcaaaag

SEQ ID NO: 245598 - DNA, 522 bp, Unknown
  Bacterial polypeptide expressing nucleotide sequence isolated from the Sargasso Sea
aatgagcataatatcagatagtttaaagcgaattaaaccatcccccaccattgctgtaactcaaaaggccagagaattaagagctgcaggaaaagatgttattggccttggagcgggagagcctgattttgatactccagacaatatcaaggaagcggcaataaaagcaatcagggacggtgacaccaaatatacagcagttgatggcacttcagatttaaaaaaagcaatagtagataaatttaaaagagaaaataatttaaattacacaaccgaccaaattacagtaggagcgggtggcaaacatgtaatttataatttaatgatggccaccttaaataagggagacgaggtaattattcccgcgccttattgggtatcttatccagatatagtattattggcaggagcaaatcccatagttatagaatgttcagaggaacaaggttttaaattaactgcaaaagatttagagaactcaattacgaataatacaaaatggataatattaaattcaccttc

SEQ ID NO: 245599 - DNA, 917 bp, Unknown
  Bacterial polypeptide expressing nucleotide sequence isolated from the Sargasso Sea
aagagaactaaaagccgcaggcaaagacgtaattggtttaggtgcgggagaacccgactttgatactcctcaaaatattaaggaagccgcaattgaagcaattaacaaggggcacacgaaatatacagctgttgatggaactccagaattaaaaaaagcaatagtcaataaatttaaaagagaaaataatttagagtattctactaatgagatcacagttggaacaggcggaaaacaagtaatctataatgctcttatggccacattaaataaaggcgatgaagtaattatacctgcaccatattgggtgtcttatccagacatggttttattagcaggaggaaatccaaaaattgtaaaatgcaatgagagtgatggttttaaactaactccaaaaaatttaaaaaaagctattacaaaaaaaacaaaatggttaatacttaattctccatcaaatccaaccggagtctcatactcgaaaagcgagatcgaatctttatctgaagttttgattaaaaataaaaatgttcatattttaagcgatgatatttatgaacacattacctatgataactttaatttttttaccattgcgcaaatttctaaattaaaaaatagaacacttacaatgaacggtgtaagtaaatcatatgcgatgacagggtggagaattggttatgcggccggatcaagagaaatcataaaagcaattagcaaaattcaatctcaatcaacttctaacccttcatcaattagccaagctgcagctgttgaagctttaaatggaactcaagattttattaaagaaagatcagacgcatttagagaaagaagagattttgtagtcaatagtttgaataatattaaagacataagttgtttaaaacctaatggagctttttatgtttttccttagt

SEQ ID NO: 245600 - DNA, 891 bp, Unknown
  Bacterial polypeptide expressing nucleotide sequence isolated from the Sargasso Sea
aatagttaataagtttaaaagagaaaataatttggattatttgccagaggaaatttctgtagggtcaggtggtaaacaaataatttttaatgcaattttggctacggtaaaccctggagatgaagttattatacctgcaccatattgggtttcttatccagacatagttcttttggcaggaggaactccaagaataattaaatgtttagaaaaaaataattttaaattaacccctaacgagctagaaaaaaatattaataaaaaaactaaatggataataattaattctccatcaaatcctacgggttctggttatactcaaaaagaacttgaagctttaggagaagtgcttaaaaaaaataaaaatgtttttattttaagtgatgatatttatgagcatattacttatgacgattttaaattttttacaattgctcaaatcaaagaacttaaagaaagaactcttacaatgaatggtgtcagtaaatcatatgctatgactggctggaggataggatatggagctggaccaaaggatataattaaagctatagcaaaactgcaatctcaatcaacaacaaacccgtcttctattagtcaagcagcagcagtcgaggcattaaatggaactcaagattttattaaaactaggtccgattcttttaaagaaagaagagacttcgttgtaaaatatctaaacagcattaaaggattaagttgtttaaaaccaaatggcgcattttatgtgtttccaaattgtaaagaatttttaggaaaaaaatcaaaattaaaaactgataaagattttgttgaaaaattactcgaggaatctctagtagccgtagtccaaggatcagcatttgggttggatggatattttagaatttcata

SEQ ID NO: 245601 - DNA, 819 bp, Unknown
  Bacterial polypeptide expressing nucleotide sequence isolated from the Sargasso Sea
gattggactaggtgcaggagagccagattttgacacgcctgataatattaaagatgcagcaattaaggccattaaggatggagatactaaatatacagctgttgacggtaccaaagctttaaaagaagcaatagtcaaaaaatttaaaagagagaataacttaagctacaccatagaccaggtaacggttggagcagggggaaaacatgtaatatataatttaatgatggcaactttgaataaaggagatgaggtaattattccagccccatattgggtatcatatcctgatatagttttgctagcgggagctaatcctgtagttatagaatgttcagagcaacaaagtttcaaacttagtgcaaaagatttagagtctaaaataaatactaacactaagtggctcatattaaattcaccttcaaatccaacaggagcttgttattcagaacaagaaataagaaatttatcacaagttttaaaaagaaatcctcatgttaatatattaagtgatgatatctatgaacatattacctatgaggggtttaaatttttttcaattgctcaaataccagaaattaaaagtaaagtatttaccatgaatggtgtaagtaaatcttacgccatgacaggttggagaataggatatgctgcaggagatagagaaataataaaagcaatagctaaaattcagtctcaatcaacaacaaatccatcatccataagtcaagcagctgcagtcgaagctctgaatggaaaacaagactttattcaaattagatcaaaggcatttcaggaacgaagagattttgttgttaa

SEQ ID NO: 245602 - DNA, 502 bp, Unknown
  Bacterial polypeptide expressing nucleotide sequence isolated from the Sargasso Sea
atgacttatatagctgaaagattaaaacgaattaaaccttctatgacagtgggtattaatgttaaggctaatgcactaagagctgcagggaaagatgttttggttttagcagctggtgaacctgattttgacactcctgaaaacataagaaaagctgcaaacaaagctattgagtctggagaaactagatatgttcctggtaaaggaactcctttgttacaaaatgcaattcaaaaaaaattttttcgtgataatgatttgcactatgaattagatgagatcatggttggagttggtggtaaacacataatttataacgcaatgatggccactttgaatcccggggatgaagttattattccagctccttattgggttagctatcctgatattgttttgctagctgaaggtaagccgataattgttgagtgttctgaattacaaggatttaaactcacaccatctctactagaagaaaatattacctcaaatactaaatggc

SEQ ID NO: 245603 - DNA, 877 bp, Unknown
  Bacterial polypeptide expressing nucleotide sequence isolated from the Sargasso Sea
aatagattatttaggtttcatctttctctgacagtaaaaatttctcaaaaggctagagaaatgactagagatgaaaaaaaagttataagtcttagttcaggagaaccagattttgatacgcctgatcatataaagttatttgcaattgaagctattaaaaacgggtttacaaaatacactcaagtagatggcactgatcagttaaaagattccatagtaaaaaagtttaagtatgaaaataacttaaactataaaaacgaaaatataactgttggtgttggtggaaagcacgttatttacaacctttttatgtcatcaatagatgaaggtgatgaggtattaattccctctccctattgggtttcatatcctgatattgttaatttatgtaatgggaaacctataattgtagagacaaaatttgaaaatggctttaaggtaaaacctgaggacttagaaaaaaatattacaaataaaactaagtgggttattataaactcccccggaaatccaacaggttctgtttattcagaagaagaactcaggaaaattgcagatgttataagaaagtataaaaatgtttttatcctttccgatgatatttacgagcatattctctataaaaatacaaaatttactaatattttaaatatctctcctgacttatatgatagaacttttattgtaaatggggtctctaaagttttttcaatgactggatggagaataggatacggagcagggcataaagagcttattaaatcaatttcaaaaatacaatcgcagagtacaacaaacccatgctcaattagtcaaatggcggctatgtttgcgctagaaaatgaaaaaactttcttaaaggattggctagtgaaat

SEQ ID NO: 245604 - DNA, 852 bp, Unknown
  Bacterial polypeptide expressing nucleotide sequence isolated from the Sargasso Sea
aatttaaaacgtataaaaccgtcgcctactatagcggttaccacaaaagcaagagaaatgcgcgccgctggcaaagatgtaataggtttaggagctggagaaccagattttgatacccctgataacattaaaacagctgctattgaggccataaaaaaaggggacacaaagtatactgcagtggacggaactcctgccttaaaaaaagcgattgtggaaaaatttcaaagagagaataatctaagctatacaaccgatcaaattactgtgggcacaggaggcaaacaagttttatataatacatttatggcaactttaaataaaggggacgaagtaattatcccagcgcctttttgggtctcatatccagacatggttttgttagcaggtggaacaccaaagatagttaaatgtgatgaaaaagatggattcaaaatctcagcaaaaaaattaaaaaaagttatatcaaaaaaaacaaagtggctaattttaaattcaccttctaatcctacaggtgcaggatacacaaaaaaagaaattgaagaattaggagaagttttacttaaaaataaaaacgtgtttatcttgagtgatgatatttacgaacatataagatatgataattttaatttttatactatcgctcaaattccaaaacttaaagaaagaactttaacgatgaatggcgtaagcaaatcttatgcaatgacaggttggagaattggttatgctgcaggaccaaaagagattatcaccgcaattagaaagatacagtctcagtctacatcaaatccttcatctattagccaggcagctgcagtagaggcattaaatggacaacaagattttatt

SEQ ID NO: 245605 - DNA, 739 bp, Unknown
  Bacterial polypeptide expressing nucleotide sequence isolated from the Sargasso Sea
atgagcataatatcagacagtttaaaaagaattaaaccatcaccaacaattgctgttactcaaaaggctagagaattaagagctgctggtaaagatgtaattggacttggtgcaggtgaaccagattttgataccccaaataatattaaaaatgcagccataaaagctattagaggtggtgacactaaatatacagcagttgatggaactccagctttaaaaaaagcaataattaaaaaatttaaaaaagaaaataatttaaaatactcaaatgaagaaataactgtaggaacaggtggcaaacaagttctttataatacatttatagcaactctaaataaaggagatgaagtaattattccggcacctttctgggtttcttatcctgatatggttttgttagctggtggtaaacctaaaattataaaatgtagtgagatagataattttaaattaactccaaaaaaactaagaagagctatttctaaaaaaacaaaatggttgatattaaattcgccatcaaatccaacaggtgtaagttatacaaaggcagagataaaaaaattatcgcaaatattaattaaacacaaaagaattcatattttaagtgatgatatttatgagcatattacatatgataaagaaaagttttttactattgctcaagtaaccagtttaaaaaatagaacaattactatgaacggtgtaagcaaatcttatgctatgacaggctggagaa

SEQ ID NO: 245606 - DNA, 784 bp, Unknown
  Bacterial polypeptide expressing nucleotide sequence isolated from the Sargasso Sea
atgagcataatatcagatagtttaaagagaattaaaccatctccaaccattgccgttacacaaaaagcgagagaattaagagctgctggtaaagatgtaattggcctaggtgcaggagagccagattttgataccccagataatataaaagaggcagctattaaagcaattaaaaaaggagataccaaatatacagctgttgatggaactccaattttaaaacaagcaattgtagataaattcaaaagagaaaataatttaaattatactcctgatcaaatcactgttggtgcagggggaaaacacgtaatttataatttaatgatggccactttaaacaaaggtgacgaagtcattattccagcaccttactgggtttcttatcctgatatagttttgcttgctggagcaactccaatagttgttgaatgctctgaggaacagggttttaaattaacagcaaaagatctagaggctgcaattaccaataatactaaatgggttatattaaattctccttcaaaccctacaggagcatgttactcagaacaagaaattaaaaacttagcacatgtattaaaaagaaaacctcatgtaaatgtattaagcgatgatatttatgagcatattatatatgaaggatttaaattttttacaattgcacaaataccagaattaaaaaataaagttgttacaatgaacggagttagcaaatcttacgctatgactggttggaggataggttacgccgcaggagataaagaagtaattaaagctatgcgaa

SEQ ID NO: 245607 - DNA, 745 bp, Unknown
  Bacterial polypeptide expressing nucleotide sequence isolated from the Sargasso Sea
caggaggaccccgactttgatactccagataatattaaagatgcagcaattaaagccattagagatggtgatacaaaatatacagcagttgatggaactccagcattaaaaaaagcaattgtagataaatttaaaagagaaaataatttaaattattccacggaacaaataacagttggaactggtggaaaacaagttctttataatgctttcatggcaactttaaacaaaggagacgaagtaataatcccagcaccttattgggtatcctatcctgatatggttttactggcaggaggaaaaccgaaaatagttaaatgtaaacaagaagatggatttaaacttacacctaaaaaactaaataaagctatatctaaaaaaacaaaatggttaattttaaactctccatccaatcctactggagccggatattcaaaagatgaaatagaaggtctggcaaaagtattaataaaaaataaaaagatacatattctaagtgatgatatttatgaacatattaaatatgataattttaatttctttacaattgcacagatttctaaacttaaagatagaacacttacaatgaatggagttagtaaatcatacgccatgactggttggagaataggttatgcagcaggtccaaaagatataattaaatctataggaaaaattcaatctcaatcaacatcgaatccatcatcggttagtcaagctgcagctgttgaagctttaaatggaa

SEQ ID NO: 245608 - DNA, 766 bp, Unknown
  Bacterial polypeptide expressing nucleotide sequence isolated from the Sargasso Sea
aatgagcattatatctgatagcctaaaaagaataaaaccctcaccaaccttagctgttacccaaaaagctagagaacttaaagctgcgggtaaagacgtgataggactaggtgctggagagccagatttcgatactccagataatataaaagaagcagctatagaggccattaaaaaaggtgacactaaatacactgctgtggatgggacccctgctttgaaaaatgccatagttaataagtttaaaagagagaataatctaaattataaagtagatgaaattacagttggagctggtggcaaacatgtgatttataatttgatgatggcaactcttaataaaggtgatgaagttattataccagcaccttattgggtttcatatccagatatcgttttattagctggaggaaccccaatagttattgaatgttcagaggaacaagaatttaaattaactgctaaagatcttgaaagcaaaataaacaataatacgaaatgggtaattttgaattcaccatcaaatcctactggagcatgttattctgaacaagaattgaaaaatctatcccaagttttaaaaagaaaaccacatgtaaatattttgagcgacgatatatatgagcatgtgacttatgatggaataaaatttttcacaatggcgcaagttcctgaattaaaaagtagagttgtgaccatgaatggagtaagtaaatcatatgcaatgacagggtggagaataggatatgctggaggtcctaaagat

SEQ ID NO: 245609 - DNA, 896 bp, Unknown
  Bacterial polypeptide expressing nucleotide sequence isolated from the Sargasso Sea
aagagaaaacaatttggattatactcaagatcaagtaactgtaggaactggaggaaaacaagttttatataatactttcatggcaacactaaataaaggtgacgaggtaattattccggcaccttattgggtatcctatccggatatggttttattagcggggggaaaaccgaaaatagtaaagtgtgaagaaaaagatgggtttaaactaactgctagtaaacttaaaaaagtaatctcaaaaaaaacaaaatggttaattttaaattcgccatcaaatccaactggcgcaggttactctaaagatgaaatagaaaatttagcaaaaattttggttaaaaataaaaaggtttatatactaagtgatgatatttacgagcatatcaaatatgataactttaatttttttactattgcgcaaatttcaaaactaaaagacaggacactcacaatgaacggggtaagtaagtcttacgctatgactggttggagaattggttatgcagctggtcctaaagacatcattaaagctattggaaaaattcaatctcaatcgacatcaaacccttcatctgtaagtcaagctgctgcagttgaggcattaaatggagcgcaagattttattcaagaaaggtctaatgcattcaaagaaagaagagattttgttgttaaaagtttaaataatattaagggaataacctgtttaacacctaatggtgcattttatgtttttccaagctgtaaaggcttattgaataagaaaacaaaattaaagacagatacagattttgttcaaaagttattagagaaatctaatgttgcggtagtacagggttcagcttttggattagatggttattttagaatttcatacgcaacttcgatggaaaattaaa

SEQ ID NO: 245610 - DNA, 616 bp, Unknown
  Bacterial polypeptide expressing nucleotide sequence isolated from the Sargasso Sea
atgagcataatatcagacagtttaaaaaagattaaaccatctcccactattgctgttactcaaaaagcaagagaattaaaagctgctggaaaagatgtaattggtcttggtgctggagaaccagattttgatactccagataatattaaagaagcagcaataaaagcaattaatgaaggtgataccaaatacacggcagttgatggtacaccagcattaaaaaaagcaattgtagaaaaatttaaaaaagaaaataatttagattataccactgatcaaattacagttggtgcaggaggaaagcacgttatctataatgctatgatggcaacactaaacgagggagacgaggtaataattccagctccttattgggtatcttatccagatatagttttattggctggtggaaaaccagttgttatggaatgtgacgagaaacaaggcttcaaaataaatccatcagatttagaaaaatttatcactccaaaaacaaaatggataatattaaattcaccatctaatccaactggagcttgttattctgaaaaagatataaaagcaattgctgctgttttagaaaatcacaagcatatttatatcttaagtgatgata

SEQ ID NO: 245611 - DNA, 846 bp, Unknown
  Bacterial polypeptide expressing nucleotide sequence isolated from the Sargasso Sea
taggtgctggagaacccgattttgacacaccagaaaacattaaacaagctggtattgatgcaattaataggggtgacacaaaatatacagctgttgatggaaccccagatttaaaaaaggcaatagtaaataaatttaaaagagaaaataatttagaatattctaccaatgagatcacagttggaaccggaggaaagcaggtaatctataatgctcttatggctacattaaacaaaggtgatgaagtaatcatacctgctccgtattgggtatcttacccagacatggttttgttagctggaggaaatccaaaaattataaagtgcaaagagaatgatggttttaaactaaccccaaaaaatctaaaaaaagctattacaaaaaaaacaaaatggttaatacttaattctccatcaaatcctactggagcttcatacacaaaagaagagatcgtagcattatctgaagttttaattaaaaataaaaatgttcatattttaagtgatgatatttatgaacatattacttatgataattttaatttttttacgattgcgcaagtctcaaaattaaaaaacagaacacttacgatgaatggggtaagtaaatcctatgcgatgacaggctggagaattggttatgcggctggtcctaaagaaataataaaggcaattaataaaattcaatctcaatcaacttctaatccttcttctattagccaggcagctgcagtcgaagccttgaatggtactcaagattttatccaagaaagatcaaatgcttttaaagaaagaagagactttgtggttaatagcttaaataacattaaaggtattagctgttgaa

SEQ ID NO: 245612 - DNA, 773 bp, Unknown
  Bacterial polypeptide expressing nucleotide sequence isolated from the Sargasso Sea
aatgagcataatatctaataatttaaaaagaattaaaccatcaccaactattgcagttactcaaaaggcaagagaattaagagctgcaggaaaagatgtagttggacttggtgcaggggaaccagattttgatactcctgtaaatgttaaaaaagcagctattaaagcaataagagacggagatactaagtatactgcagttgatggaacaccagcattaaaaaaagcaattctaaaaaaatttaaaagagaaaataaactaaattataaactagacgaaatcacagttggaactggagggaaacaagttctctataacacttttatggcaactttaaataaaggagatgaagttattattcctgcaccattctgggtttcatatccggatatggttctcctagcaggaggaaaaccaaaaatcgtaaaatgtgatgaaaaagatggatttaaaattacacctgcaaaattaaaaactgcaattacaaaaagaacgaaatggataatccttaattctccatctaatccaactggatctggatacagcaaatcagaaattcaaaaattagcaaaggttttaataaaaaacaaaaaagttcatattttaagcgatgatatttatgagcatgttaaatatgataattttaaattttttacaattgctcaaatttcaaaattaaaatctcgaactttaacaatgaatggagtgagcaaatcttatgcaatgactggttggagaattggttatgccgctggaccaaaagaaataattt

SEQ ID NO: 245613 - DNA, 886 bp, Unknown
  Bacterial polypeptide expressing nucleotide sequence isolated from the Sargasso Sea
gctttttctgcgactattaatagtggagatgaagtcattattcctgcaccttattgggtgagttacccagatattgtaattttaaatgatggaaaacctgtgatagttgaatgtggtgagcaaaatggtttcaaaattacacctgaagatttagaaaagcatattaatcccaaaacaaaatggttaatgcttaatagcccaagcaaccccactggatctatgtactctaaagacgaattaacagctttaggtgatgttcttaagaaacatgaaaatatttttattctatctgatgatatttatgaaaaaattgtatacgacactaatgaatttaaaacaatagcggaggtttgtccttttttgaaagagagaactttaactatgaatggattatctaagtcttattgcatgacgggttggagagtgggttatgctgcaggtccaacaaatctcataaatgctatgaacaaagtgcaatcccaaaacgtatcctcaactgcatccatttcaatggctgcatctgttgaggctcttaatggtgaccaaagttttattctgtctaataacgagtcctttttaaggagacgtaatttagttgttaaacatttaaacgaaactcctgggttatcttgtagaacacctgagggtgctttttatgtttttgcctcttgtaagggagttttaggaaagacaacgcagtcaggtaagaaactttccaaagatggcgactttatggattatcttcttgaagaggtaggagttgcgggagttcagggctcagcttttggtttagaaggtttttttagaatttcttatgctacctctgattcaatattagaggatgcttgccagagaattaaagaagcatgtgctaaattaagttaat

SEQ ID NO: 245614 - DNA, 883 bp, Unknown
  Bacterial polypeptide expressing nucleotide sequence isolated from the Sargasso Sea
gttctttataatgttttcatggctacattaaatccaggagacgaggttattattccagcaccttattgggtatcttatcctgatatggttttattagctgggggaacacctaaaatagttaaatgttctgaagaaaatgaatttaaaataactccagatgaactaaaaaaagcaattggaaaaaaaacgaagtggttagttataaattcaccctcaaatccaactggctcttgttatacaaaaaaagaaattgaagatttgtcgaaaatattaatagataataaacaagtttttattctaagcgatgatatttacgaacatattacttatgacaattttaaattttttaccacggcacagatagactctttaaaagatagaaccttaacaatgaatggtgtcagtaaatcttattctatgactggttggagaataggttatggagctgggccaaaagagataattaaagctgtagcaaaaattcaatcccaatctaccacaaacccttcttcaattagtcaagctgcagccgtagaagctttaaatggaacacaagattttattaaaattagagcagattcttttaaagagagaagagattatgtagttaaaactctaaatagtatcaatggtttgagttgtttaaaaccaagtggagctttttacgtatttcctaattgcaaaaaattaattggtgagaaaactaaattaaaaacagacaaggaatttgttgaaaagttacttgagaaggcagaagtagcggttgtccaaggatctgcatttgggttagatggatactttagaatttcttacgcaacctctatggataatttaaaaaaagctcttgaaagaattaaatctttttgtgaaagtttaaactaat

SEQ ID NO: 245615 - DNA, 879 bp, Unknown
  Bacterial polypeptide expressing nucleotide sequence isolated from the Sargasso Sea
attgggctatactaaatataccaatgtagagggtatacctgagttaaaacaagcaatagtaaataaatttaaaaatgacaacgagatagattataatatagatcaagttatagttggagttggtggaaaacagattttatttaatgctttgtttgcttcattaaattcaggagatgaagtaattatccctacaccatattgggtttcatatccagacatgacaatattagctggtggtacaccgaagttcttaaattgtaatgaagaaaatgattttaaaattaacccttcagaattagataatattatatcaaaaaaaacaaaatggataattttaaatagcccttctaatccatcaggttcatgctatacaaaacaagagttaaataatattgcagatgttttgcgacaacataaagatgtaaatgtcataacagatgatatatatgaatatataatatatgatgattttaaattttatacattagctcaaattgctccagatttgaaagatagaatacttacagtcaacggtgtttcaaaaagctattgcatgactggttggagaattggttatgcagctgggagaaaagatttgattctagctatgatgaaaatacaaggtcaatcaacctctaatccaacttcaatatcacaatatgcagccttagctggattgaatggtgatagaaaatttttagaaccatgtttaaaagcatttaatgaaagaaaaaatcttgtggttgaaggtttaaattccattgatggtataagctgtttaatgccaaaaggagctttttacgcttacccaaatgtttccggattgattggtaaaaaaactaagaatggaaaatttttaagcaatgacaaaagaagttg

SEQ ID NO: 245616 - DNA, 909 bp, Unknown
  Bacterial polypeptide expressing nucleotide sequence isolated from the Sargasso Sea
tttaaaaagaattaaaccatctccaactatagctgttactcaaaaagccagagaattaagagcggcaggaaaagatgtaataggtctaggtgcaggtgagccagattttgatacaccaaataatattaagaatgcagccataaaagcaattagaggaggcgataccaaatatacagcagttgatggaacgccagctttaaaaaaagcaataattaaaaagtttaaaaaagaaaataatttaaagtattctaacgaagaaataactgtaggaacaggcggcaaacaagttctttataatgctttcatggcaactttaaatagaggggatgaagtgattattccagcacctttttgggtttcttatcctgacatggttctgttggcaggaggcaaaccaaaaattattaaatgtaatgaatcagataattttaaattaacaccacaaaaattaaggaaagcaatttctaaaaaaacaaaatggttaatattaaattcaccgtcaaatcctacaggtgcaagttatacaaaagctgagataaaaaaattatctcaggttttaattaaatacaaaaaaattcaaattttaagcgatgatatctatgaacatattacttatgacaaagttaaatttttcactattgctcaaatttccagtttaaaaaatagaactcttactatgaacggcgtaagcaaatcttatgctatgacgggatggagaataggctatgcaggtgggccaaaagaaataattaaagctattcgtaaagttcaatctcaatcaacatcaaacccttcttctgtaagtcaagcagctgctgttgaagctttaaatggaactcagaattttataaaaataagatctaaggaatttaaaaaaagaagagattttgttgttaagagcttaaacaa

SEQ ID NO: 245617 - DNA, 763 bp, Unknown
  Bacterial polypeptide expressing nucleotide sequence isolated from the Sargasso Sea
atcggtctgggcgccggggaacctgatttcgacaccccggacaacattaaggcggccggaaagcaggccatcgatgaagggctgaccaagtacacacctattccgggaacccaggcgctgcgagaagccatctgtgcaaagttcaaacgcgacaacgatctggagtacaagccggaccaggtgattgtcagttgcggcggcaagcaggtcatttacaacgctttcatggcgacgctagatcccggcgacgaggtcatcgtgccggcgccctattgggtgtcctatccggatatggtgctgctggcggagggtacgcccgtcttcgtcgacggggtggaggccaacaactttaagatcacggccgaaggcctggaggccgcgatcacgccgaagaccaagtgggtgctgctgaattctcccagcaacccgactggcgcggcctactcgcgggatgaactgaaggcgctgaccgatgttctgatgcgtcacgatcatgtctgggtgatgaccgacgacatgtacgaacacgtcgtctatgacggtttcgaattttccacaccggcacagatcgaacccggcctgttcgaccggacgctgaccctgaacggcgtgtcaaaagcctattcgatgacaggttggcggctaggatacggtgctgggccggtggacctgatcaaggcgatgattgtggtgcagtcgcaatcgtcgacgcatacgtcgtcgatttcccaggttgcggcggtcgaagcgctgaacggcacac

SEQ ID NO: 245618 - DNA, 682 bp, Unknown
  Bacterial polypeptide expressing nucleotide sequence isolated from the Sargasso Sea
tcatttatcatacgagattgatcaaatttctgttggaactggtggaaagcaagttttatataatgcttttatggcaaccataaataaaggtgatgaggtcattattccagcgccttactgggtttcttatcctgacattgttttgttagctgggggaaaacctaaaataataaagtgtgatgaaaaaaataattttaaattaacaccagaaaaattaaaaaaagcagtttcaaagaaaacaaagtggataattataaactctccgtctaaccctacaggctctggttataccaaagatgagataatagctttatcgaagattttaatgaaatataaaaatttatatattttaagcgatgatatttacgaacatattacttatgacagttttaaattttttacaattgcgcaaattgaaaaattaaaaagtagaactttaactatgaatggagtgagtaaatcttactcaatgactggctggagaataggttatgctgcaggtccaaaggaaataattaaagcgatggctaaaattcaatcccaatcaactagtaatcctacatccataagtcaagcagctgcagtcgaggctttaaacggaacacaagattttatttcagaaagatcaaattcttttaaagagagaagaaattttgttgttgatagtttaaataatataaaa

SEQ ID NO: 245619 - DNA, 446 bp, Unknown
  Bacterial polypeptide expressing nucleotide sequence isolated from the Sargasso Sea
aatgaatattgtagcagatagactttctagaattaaaccatctatgactgttggtattaataccaaagcaaatgcattacgggctgaaggaaaagacattttagttttagcagcaggagagccagattttgatacacctgtaaatatcagagaggctgcaattaaagcgatgaatgaaggattaactaggtatgtaccaggaaagggtacgcctgcattgcaaaatgcaattataaataaatttaaaaaagaaaataatctagaatattcaaatgacgaaataatggtaggtgttggaggtaaacatattatttataatgctatgatggcaactcttaatccaggtgacgaggttataattcctgcaccatattgggtaagttatccagatatagttttattagctgaaggaaaaccagttattgtaaagtgcagtgaaaaaaatg

SEQ ID NO: 245620 - DNA, 544 bp, Unknown
  Bacterial polypeptide expressing nucleotide sequence isolated from the Sargasso Sea
catgccaataaaactatcacataatatagaaaatattccgccttcagcgacaatgctaatgacacaattagctagagatttaaaagcagaaggtaaaaatataataagtatgagtgctggagagcctgattttgatacaccccaaaatattaaagaagcagcaataaatgccatcaataaaggtgaaactaaatatacagcagttgatggaattgatgaccttaaacaagcaataatcgataaatttaaaaatgataataatctagattatgaaaaaagtaacatttctgttgccccaggaggaaaatcaataatttttaatgcaattttgtcttcaataaatccaggagatgaagtaattattcctgctccatattgggttagctatcctgatatagtaaaacttgctggaggtaatccggttataatagaaacatcaccagataataattttaaaaaaagtcctgataatcttgaaaaaaatataactgaaaaaacaaaagggctttttattaattcaccatcaaatccaactggccaagtt

SEQ ID NO: 245621 - DNA, 805 bp, Unknown
  Bacterial polypeptide expressing nucleotide sequence isolated from the Sargasso Sea
aacctcaaaagccagggaaatgagagcagcgggtaaagatattatagggttaggggcaggagaacctgattttgacacaccagacaatattaaagaggcagctatagaagcaattaaaaagggtgatactaaatatacagcggttgatggaactccagctttaaaaaaagcagtacaaaataaattctcacgtgagaacggactatcctatgatctggatcagataacggttggtactggtggaaagcaagttttatacaatgctttcatggcaacagttaacaaaggagacgaagttattataccagctccatattgggtttcttatcctgatataattctattagccggtggaaaaccaaaaattgtaaaatgtgaagaaaaggacaattttaaattaacacctaaaaaattagagaaagctatatcaaaaaaaactaaatgggtaattttaaattccccatctaatccaactggttcagcttatacaaaaaaagagatagaaggcttatcaaaaattttaattaaatataaaaaaatttatattttgagtgatgatatctacgaacatattatttatgataattttaaattttttacgattgctcagattaaaacattaaaagatagaacattaactatgaatggggtaagcaaatcttattccatgactggttggagaataggatatgcagcaggtccaaaagaaataattaaagcgatagcaaagattcagtctcaatctactagcaatcccacttcaattagtcaggctgctgcggtggaggctcttaatgaaaacaag

SEQ ID NO: 245622 - DNA, 712 bp, Unknown
  Bacterial polypeptide expressing nucleotide sequence isolated from the Sargasso Sea
aatgagcatagtttccaatagtttaaagcgcataaaaccttcgcctaccatagctgtgacatcaaaagctagggaaatgaaggctgccgggaaggatgttataggattgggagccggagagccagattttgatactcctgaaaatattaaacaagctgcaattgccgcaattaataacggagaaactaaatatacagccgttgacggaacaccaaaattaaaaaaagcaattcaaggtaaatttttaagagagaacaatcttcaatatgacctagaccaaattactgtaggaacaggaggaaagcaggttttatataatgcatttatggcaacaattaataaaggcgatgaagtaattataccggcaccctactgggtttcttatcctgatattattttgttagcaggggggaaaccgaaaattgttaaatgtgaagaaaaagacggttttaaactaactgcaaaaaatctaaaaaaagcaataaataaaaaaactaaatggctaattttaaattctccatcgaatcctactggagtcggatattcaaaagaagaaattatacaattatcaaaaattttagaaaaaaataagaaaatttttattttgagtgatgatatatatgaacacatcacttatgataattttaaattttttactattgcacagatagacaaactaaaaaaaagaacactaactatgaatggtgtaagc

SEQ ID NO: 245623 - DNA, 525 bp, Unknown
  Bacterial polypeptide expressing nucleotide sequence isolated from the Sargasso Sea
aatgagcatagtttccaatagtttaaaacgtataaaaccgtcgcctacaatagcagttacttcaaaagcaagggaaatgagagccgctgggaaggatgttataggtttaggggctggagagcctgattttgatactccagacaatattaaagaagcagcaatagaagcgatcagaaaaggagatacaaaatatactgcagtggacggaaccccagctttaaaaaaagctatccaagcaaaattttctagagaaaatgatttatcatacgagcttgatcaaatttcagttggaactggcggaaagcaagttttatataatgcttttatggcaaccataaataaaggtgatgaggtaattattccagcgccttattgggtttcttaccccgatattgttttgttagcaggaggaaaacccaaaataataaagtgcgatgaaaaaaataattttaaattaacaccagaaaaattaataaaagcagtttcaaagaaaacaaagtggataattataaactcgccatctaa

SEQ ID NO: 245624 - DNA, 655 bp, Unknown
  Bacterial polypeptide expressing nucleotide sequence isolated from the Sargasso Sea
gattaaagctattaaagacggtgacacaaaatacactgcagtagatggcactccgtcacttaaaaaagccataataaaaaaatttaaaagagaaaacaatttagattaccaaattgatcaaataaccgtcggcactgggggaaaacaagtaatttataatgctatgatggctactttaaatgatggagatgaagttattattccagctccttactgggtttcttatcccgatatagttttattagctggagggacacctattattttagagtgtaatgagaaacaagggtttaaggtagatcctgctgctcttgaaaaatctataacaaaaaaaacaaaatggataatattaaattcaccatccaatcctactggtgcttgttattctgaaaaagatataaaagagattggtaaaatattagaaaaacatcctcatgttttcatcttaagcgatgatatttacgagcatgttatttatggaaactttaaattttttactatagcccaaatcgacaatttaaaagatagagttttaacaatgaacggtgtcagcaaagcttattctatgactggttggaggatagggtatgctgcgggtccaaaagatataattaaggctattgctaaaatacaatctcaatcaactaccaatcaa

SEQ ID NO: 245625 - DNA, 904 bp, Unknown
  Bacterial polypeptide expressing nucleotide sequence isolated from the Sargasso Sea
ttgtcatatgagcttgatcaaatttcagttggaactggcgggaagcaagttttatataatgcttttatggcaaccataaataaaggtgatgaggtaattattccagccccttattgggtttcttaccccgacattgttttgttagctgggggaaaacccaaaattataaagtgcaatgaaaaaaataattttaaattaacaccagaaaaattaacaaaagcagtttcaaacaaaacaaagtggataattataaactcgccatctaatcctacaggctctggttatacaaaagatgagataatagctttatcgaaaattttaacaaaatataaaaatttatatattttaagcgatgatatttacgaacacattacttatgacggttttaaattttttacaattgcgcaaattgaaaaattaaaaagcagaactttaaccatgaatggagtgagcaaatcttactcaatgactggctggagaataggttatgctgcaggtccaaaagaaataattaaagcgatggctaaaattcaatcccaatcaactagtaatcctacatccataagtcaagcagctgcagttgaggctttaaacgggacacaagactttatttcagaaagatcaaactcttttaaagaaagaagaaattttgtggttgatagtttaaatgatataaaaggtataagctgtttaagtcctgagggagctttttatgtttttccaaactgtaaaaaattattaaacaagaaaacaaaacttaaaactgataaagattttgtagaaaaaatgttagaaaaagcagaggtagctgtggttcaaggttctgcctttggtttagacggctactttaggatatcttacgctacttcaatggaaaatttaaaaaaagcgagaaaagaataaa

SEQ ID NO: 245626 - DNA, 499 bp, Unknown
  Bacterial polypeptide expressing nucleotide sequence isolated from the Sargasso Sea
aatgagcatagtttccaatagtttaaagagaattaaaccctccccaactatagcggttacctcaaaagctagggaaatgagggcagccggcaaagacgttattggcctaggagctggagaacctgattttgacactcctgataatattaaagaagcagctatagaagctataaaaagaggtgacaccaaatatacggctgttgatggaaccccaacattaaaaaaagctattcaaggaaaatttaaaagagaaaataatttatcttacgaacttgaccaaatttctgtaggaactggtggcaaacaagttctttacaatgtattcatggccacattaaatcctggagacgaagttattattccagcaccttactgggtatcttatcccgatatggttttattagctggtggtaaacccaaaatagtaaagtgctcagaaaaaaatgaattcaaaataacaccagatgaattaaaaaaagctattggaaaaaaaaactaa

SEQ ID NO: 245627 - DNA, 792 bp, Unknown
  Bacterial polypeptide expressing nucleotide sequence isolated from the Sargasso Sea
aaaagctatccaagcaaaattttcaagagaaaatgatttatcatatgagcttgatcaaatttcagttggaactggtggaaaacaagttttatacaacgcctttatggcaaccataaataaaggtgacgaggtaattattccagctccttattgggtttcttatcctgacattgttttgttagctgggggaaaacccaaaataattaaatgtgatgaaaaaaataattttaaattaacaccggaaaaattaaaaaaggcagtttcaaagaaaacaaagtggataattataaattccccttctaaccctacaggctctggctatactaaagatgagataatagctttatcaaagattctaataaaatataaaaatctatacattttaagcgatgatatttacgaacatattacttatgacggttttaaattttttacaattgcccaaattgaaaaattaaaaagcagaactttaactatgaatggagtgagtaaatcttactcaatgactggttggaggataggttatgctgcgggcccaaaagaaattattcaagctatggctaaaattcaatcccagtctactagtaaccccacatctataagtcaagcagctgcagtagaagctttaaacggaacacaagactttattttagaaagatcaaattcttttaaagaaagaagaaattttgttgttgatagtttaaataacataaaaggtataagttgtttaagtcctgaaggagctttttatgtttttcctaattgcaaaaaattattgaacaacaaaactaa

SEQ ID NO: 245628 - DNA, 579 bp, Unknown
  Bacterial polypeptide expressing nucleotide sequence isolated from the Sargasso Sea
aatgagcataatatcagatattttaaaaaggattaaaccatcacctactattgccgttacccaaaaagctagggaattaaaagctgctggcaaagatgtgattggcttaggagcaggggagcctgattttgatactccagataatgttaaagatgctgcaattaaagcgatcaaagaaggtgatacaaaatatacagcagtagatggaacacctgaattaaaaaaagcaatttcagaaaaatttaaaagagaaaataatttagtttattctactgaccaaattacagttggggcaggaggaaagcatgtaatttacaacttaatgatggccactcttaataaaggtgatgaagtaattatcccagctccatattgggtatcttatcctgatatagtaatgctagcaggtgcaaatcctattgtagtagagtgttcagaggaacaaggttttaaattaaccgcaaaagatcttgagagcgtaataacaaataacacaaagtgggttattttgaattctccatcaaatcctacaggagcatgttataccgagcaagaaattagaaatttagctcaagtttt

SEQ ID NO: 245629 - DNA, 538 bp, Unknown
  Bacterial polypeptide expressing nucleotide sequence isolated from the Sargasso Sea
aatgagcataatatcagatagtttaaagagaattaaaccatcccccacaatcgctgtaacacaaaaagcgagagaattaagagctgctggcaaagatgtaattggtttaggtgctggggagcctgattttgataccccagataatattaaagaagccgctatcaaagcaatcaaagatggggatactaaatatacagctattgatggaactccagttttaaaacaagctattgtagataaattcaaaagagaaaataatttgacttatagccctgaccaaatcactgtaggagctggaggtaaacacgtaatttataatttaatgatggcaactttgaacaaaggtgacgaagtaattatacctgcaccttattgggtttcttatcctgatatagtattgcttgcaggagctaatcctatagttgttgaatgttcagaggaacaaggttttaaattgtctgcaaaagatttggaatcagtaattacaaataatacaaaatggggtaatattaaattcaccatcaaatccaacaggagc

SEQ ID NO: 245630 - DNA, 879 bp, Unknown
  Bacterial polypeptide expressing nucleotide sequence isolated from the Sargasso Sea
aatgagcatagtttccaatagtttaaaacgtataaaaccgtcgcctacaatagcagttacctcaaaagctagagaaatgagagctgctggaaaggatgttattggtttaggggctggagagcctgattttgatactccagacaatattaaagaagcagcaataaaagcaattagaaaaggagatacaaaatatactgcagtggatggaaccccagctttaaaaaaagctatccaagcaaaatttgtcagagaaaataatttatcatacgagcttgatcaaatttcagttggaactggtggaaagcaagttttatacaatgcttttatggcaaccataaataaaggtgatgaggtaattattccagctccttattgggtttcttatcccgacattgttttgttagctgggggaaaacccaaaataataaagtgcgatgaaaaaaataattttaagttaacaccagaaacactaacaaaagcagtttcaaaaaaaacaaagtggataattataaactctccatctaaccctacaggatcaagttatactaaagatgagatagtagctttatccaagattttaataaaatataaaaatttatatattttaagtgatgatatttacgaacatataacttatgacggttttaaattttttacaattgcgcaaattgaaaaattaaaaagcagaactttaactatgaatggagtgagtaagtcttactcgatgactggttggagaataggttatgctgcaggtccaaaagaaattattaaagcgatggctaaaattcaatctcaatcaactagcaatcctacatctataagtcaagcagctgcagtagaggctttgaatggaacacaagactttatattagaaag

SEQ ID NO: 245631 - DNA, 853 bp, Unknown
  Bacterial polypeptide expressing nucleotide sequence isolated from the Sargasso Sea
ccatctttgacaatagccaccaatatgaaggcccaggaacttaaaagagctggtaaggatgtgattgttttagcagctggagaaccagattttgatacacctgatcacattaaaagtgcagcaatagatgctataaataagggttttacaaagtatgtaccaggtaaaggaactccagacttgcaggttgcaattcaaaaaaaatttcaaagagataataacttagattatgaacttggtaatattacagttggagttggtggaaagcatataatttataatgctttctctgcaacaattaatcagggtgatgaagtaattatccctgctccatattgggttagttaccctgacattgtaattttaaatgatggaaaacctataattgtagagtgtggtgagcaaaacggttttaaaattacacctgaggatttggaaaaaaatatatcttcaaaaacaaaatggttgatgctaaatagcccaagtaacccaactggatctatgtataccaaagaagaattggtagctataggagatgttcttaaaagttatgaaaatatttttattttatcagatgatatttatgaaaagatcgtttacgacacaaatgagttcaaaacaatagctgaagtttgcccatttttaaaagaaagaacgttgacgatgaacggattatccaagtcttattgcatgacaggctggagagtaggctatgcagcaggtccaattagtctcattaatgcaatgaacaaagttcaatcacaaaacgtatcttcaacagcatcaatatcaatggcagcctctgttgaagcattaaatggagatcaaagttttatcttgtcaaaccaatgag

SEQ ID NO: 245632 - DNA, 460 bp, Unknown
  Bacterial polypeptide expressing nucleotide sequence isolated from the Sargasso Sea
aggggcaggggaacctgattttgatactccagataatattaaagaggcagctattcaggctattaaaagaggcgacaccaagtacacagctgtagatggaactccagcacttaaaaaagctatcaaagaaaaattttctagagagaacaatttgacctatgaattagatcagatttcagttggaactggaggaaagcaagtactttataatgcattcatggcaacacttaatccaggtgacgaagtaattatccccgcaccttattgggtatcttatccagatatggttttgttggctggtggaaaacctaaagtagtaaagtgttctgaaaaaaatgaatttaaaataactccggtagaacttaaaaaagcaattagtaaaaaaactaaatggttaattattaattctccatcaaatcctacgggatcttgctacacaaaaaaggaaatagaagaactg

SEQ ID NO: 245633 - DNA, 438 bp, Unknown
  Bacterial polypeptide expressing nucleotide sequence isolated from the Sargasso Sea
aatgagcatagtttccaatagtttaaagcgaattaaaccctcaccaaccatagcggttacctcaaaagccagggaaatgagggcagctggcaaagatgtaattggtcttggtgccggggaacctgattttgatactcctgacaatattaaggaggcagctatacaggctataaaaaaaggggacacaaaatatactgctgttgatggaacaccaattttgaaaaaagctatccagggaaaattcaaaagagaaaacaacatatcttatgaagtagaccaaatttctgtaggaactggtggtaaacaagtattgtacaacgtattcatggctacattaaatccaggtgacgaagttattattccagcgccttactgggtatcctatcctgatatggttttattagctggtggaacacctaaaatagttaaatgttctga

SEQ ID NO: 245634 - DNA, 874 bp, Unknown
  Bacterial polypeptide expressing nucleotide sequence isolated from the Sargasso Sea
atgagtctcttctccgccgtcgaaatggctccgcgcgatcccatcctgggcctcaacgaagcattcaacgcagacacccgcaccaccaaggtcaaccttggcgtaggcgtctactacaacgaggaggggcgaattccgctgctgcgcgccgtcgcagaagccgaaaaggcgcgcatcgaggcccacgccccgcgtggctacctgccgatcgaaggcatcgcagcctacgacaaggcggtacaggaactgctgttcggcaagggcgcagccctgatcgaggacggccgcgtcatcaccacccaggccctgggcggcaccggcgcactgaagatcggcgccgacttcctcaagcgtctgctgccggacgccaccgtcgccatcagcgatccgagctgggaaaaccaccgcgcgctgttcgagtccgccggtttcccggtgcagaactaccgctactacgatccgttcagcaatggcgtgaaccgtggcggcatgctcgaagacctgcgcaacctgccggcccgctccatcgtcgtactgcacgcctgctgccacaacccgaccggcgtcgacctgcagctggaagactggaaagccgtgctggacgtactgcgcgagcgcgagcacgtacccttcctcgatatcgcctaccagggcttcggtgacggcatcgagcaggacgccgaggccgtgcgcctgttcgccgagtcgggcctggagttcttcgtctccagctccttctccaagtcgttctcgctgtatggcgagcgcgtcggcgccctgtcgctggtcaccagcagccgtgaagagtcgactcgcgtgctgtcgcagctcaagcgcgtgatccgcaccaactactccaacccgccgacccacg

SEQ ID NO: 245635 - DNA, 438 bp, Unknown
  Bacterial polypeptide expressing nucleotide sequence isolated from the Sargasso Sea
aatgagcataatatcagacagtttaaaaaagattaaaccatcacctactattgctgtaactcaaaaagcaagagaattaaaagccgctggaaaagatattattggtcttggtgcaggggaaccagattttgatactccagataatattaaagacgctgcaatcaaagccatcaatgaaggtgacaccaaatacacagcagttgatggaacaccagcattaaaaaaagcaattgtagaaaaatttaaaaaagaaaataatttagattatactactgatcaaattacagttggtgcaggaggaaagcacgttatctataacgctatgatggcaacgcttaacagtggggacgaggtaataattccagccccttattgggtgtcttatcctgatatagttttattagctggtggaaaaccagttataatggaatgtggcga

SEQ ID NO: 245636 - DNA, 801 bp, Unknown
  Bacterial polypeptide expressing nucleotide sequence isolated from the Sargasso Sea
aatgatttcaaatagagtaaataacataaaaccttctttgacaatagccacaaacatgaaggcacaggagttaaagagggcaggaaaagatgtaattgttttagcggctggagagccggactttgacactccagaacatataaaaagtgctgctatcaaggcaattaataatggttttacaaaatatgttccaggcaaaggtaccccagacttacagcttgcaattcaaaaaaaatttcaaagagataataatttagattatgaacttggtaatattacagttggagtagggggtaagcatataatttataacgctttttcagcaactattaatagtggtgatgaagttattattcctgcaccgtattgggtgagttatccagatattgttattttaaatgatggaaagcctgtaattgttgaatgtggtgagcaaaatgattttaaaattacacctgaagatttagaaaagcatataaacccaaaaacaaaatggttaatgcttaatagcccaagtaaccctactggatcgatgtactccaaagaggaattaatagcccttggtgatgttcttcagaaacatgaaaatgttttcattctatctgacgatatttatgaaaaaattgtttacgacactaatgaatttaaaacaatagccgaggtttgtccttttttaaaagagagaactttaactatgaacggattatctaagtcttattgtatgacagggtggagagtaggttatgcagcaggtccaacaaatctcatcaatgcaatgaataaagttcaatcccaaaatgt

SEQ ID NO: 245637 - DNA, 574 bp, Unknown
  Bacterial polypeptide expressing nucleotide sequence isolated from the Sargasso Sea
aatgagcataatatcagacagtttaaagagaattaaaccatccccaactatcgcagtttctcaaaaagcaagagaattgaaagctgctggaaaagacattattggtttaggggctggggaaccagattttgatacgcctgataacattaaacaggcagcaataaaagctataaaagatggtgacaccaaatacaccgccgttgatggaacgcttcaacttaaaaaagctatagttgaaaaatttaaacgagaaaataatttaaatttttcaattgatgaaattacggtgggtgtaggtggtaagcatgtaatttacaatttaatgatgaccacactcaacaaaggagatgaagtaattattcctgcgccttattgggtgtcatatccagatattgtattattagcaggagcaaaccctgttgtagttgagtgtccagaagaacaaggatttaaattaagtgcaaaagatttagaagcaaaaattaataacaatacaaagtgggttatattaaattccccatctaatccaactggtgcatgttatacagaacaagaaataaaaaatttatcgcat

SEQ ID NO: 245638 - DNA, 924 bp, Unknown
  Bacterial polypeptide expressing nucleotide sequence isolated from the Sargasso Sea
aggcaagatgttataggtttaggagcaggagagccagatttcgatactccaaataatataaaagaggctgctatagaggccataaaaagaggtgaaacaaaatataccgcagtagacggtacccccgtattaaaaaaagccattcaacaaaaatttttaagagaaaacaatttgtcttatgatttggatcaaatcacagttggaaccggaggaaaacaagttctgtataatgcttttatggcgacagtaaataatggggatgaagttattatacccgcaccttattgggtatcttacccagatataattttactagcaggcggaaaaccaaaaattgtaaaatgcgatgaagcagatcaatttaagcttactccaaaaaaattgagcaaagctatttctaaaaaaacaaaatgggtgattataaattctccatcaaatcctacaggttctgcttatacaaaaaaagaaatagaagcattgtcaaaaattttattaaaacacaaaaaaatttttatattaagtgatgatatatatgaacatatcacatacgacaattttaacttttttactattgctcaaataaaagatttaaaacatagaacactaacaatgaatggtgtcagcaaatcttattcaatgaccggatggagaataggatatgctgctgggccaaaagaaataattaaagcaatagcgaagatacagtctcaatctacaagtaacccaacatcaatcagtcaagcagctgcagttgaagctttaaacggcacacaagattttatagaaacgcgagccagttcttttaaagagagaagaaattttgtagtagacagtttaaataatataaatggaattagctgtttgaaaccccaaggagctttttatgtatttccaaattgtaaaaaattattaggaaaaaaaaca

SEQ ID NO: 245639 - DNA, 885 bp, Unknown
  Bacterial polypeptide expressing nucleotide sequence isolated from the Sargasso Sea
tttaaaagggaaaataatcttaattatacaacagatcaaataactgttggggtagggggcaagcatgtaatttacaatttaatgatggcaacattaaacaaaggcgatgaggtaataattcctgcaccatattgggtgtcatacccagatattgttttattggcaggagctaatccgatagtcatagagtgttctgaagatcagggtttcaaattaagtgcaaaagatttagaggcgaaaatcactaataatactaaatggcttattctaaattcaccgtctaatccaacaggtgcttgttattcagagcaagaaatcaaaaatttatctcaggtcttaaaaagaaatccgcatgtgaatatacttagtgatgacatatatgaacatatttcttacgatgatttcaaattttttacaattgctcaaatacctgaaattaagaataaagttattactatgaatggtgttagcaaatcatatgcaatgactggttggagaataggttatgcagctggtgataaagatataattaaagccatagctaagatacagtctcaatctacaactaatccttcatctataagccaagcagcagccgttgaagccctaaatggaaaacaagattttatcccagtgagagcaaaagctttccaggaaagaagagattttgttgtaaactctttaaatgctattgaaggaataagttgcctgaaaccagaaggagctttttatgtttttccaaactgcaaaagattaataggtaaaaaagataaaagtggaaaaaaaattacaaatgactcagactttgttcagtcattattagaaaataatgatgtagcggttgtccaaggatcagcttttgggctagagggtttttttagaatt

SEQ ID NO: 245640 - DNA, 562 bp, Unknown
  Bacterial polypeptide expressing nucleotide sequence isolated from the Sargasso Sea
atgagcatagtttccaatagtttaaagagaataaaaccgtctccaaccatagcggtgacctcaaaagctagagaaatgaaggcagcaggtagggacgtgattggattaggggcaggcgaacctgattttgatacaccggataatattaaagaggcggccatagaagctataaaaagaggggacaccaaatataccgctgtggacggaactccaaaacttaaaaaagcaattcaaggtaaattctctagagaaaataatttatcttacgatttagatcaaatttcagtgggaactggaggaaagcaagttctttacaatgtatttatggccacaataaatccgggtgacgaagttattattccagcaccttattgggtgtcttatcctgatatggttttattagcaggcggtaaaccaaaaatagttaaatgttcagaaaaaaatgaatttaaaataacaccagaagaattaaaaaaagcaataggaaataaaactaagtggttagtgattaactctccatcaaaccaaactggatcttgttatacaaaaaaagatatagagg

SEQ ID NO: 245641 - DNA, 749 bp, Unknown
  Bacterial polypeptide expressing nucleotide sequence isolated from the Sargasso Sea
aatgagcattatatctgatagccttaaaagaataaaaccctcaccaaccttggctgttacccaaaaagccagagaacttaaagctgcgggtaaagacgtgataggtctaggtgctggagagccagatttcgatacaccagataatataaaagaagccgctatagaagctattaaaaaaggtgatactaaatacacagctgtagacgggacacctgctttgaaagatgccatagttaataagtttaaaagggagaataatctaaattataaagtagatgaaattactgttggagctggcggcaaacatgtgatttataatttgatgatggcaactcttaacaagggtgacgaagttataataccagcaccttattgggtttcatatccagacattgttttgttagcgggaggaactccaatagtgattgaatgttcagaggaacaagaatttaaattaactgctaaagatcttgaaagcaaaataaataataatacgaaatgggtaattttgaattcaccatcaaatcctactggcgcatgttattctgaacaagaattgaaaaatttatcccaagttttaaaaagaaaaccacatgttaatattttgagcgacgatatatatgagcacgtgacttatgatggattaaaatttttcacaatggcgcaagttcctgaactaaaaagtagagttgtgaccatgaatggggtaagtaaatcctatgcaatgacagggtggagaataggatatg

SEQ ID NO: 245642 - DNA, 934 bp, Unknown
  Bacterial polypeptide expressing nucleotide sequence isolated from the Sargasso Sea
ccaaaatatacagctgttgatggaactccaactttaaaaaaagcaatagttaataaatttaaaaaagaaaacaatcttgaatattctatagatgaaataacagtcggaactggcggaaaacaagtaatctataatgcattcatggctacacttaacaaaggagacgaagtgattatacctgcaccatattgggtttcgtatccagatatggttttgttagccggaggaaatccaaaaattgttaagtgcaatgaggaggacagatttaaactaactacaaaaaatttaaaaaaagctattacaaaaaaaacaaaatggttaatacttaattctccatcaaaccctactggagctacatactcaaaagaagaaatagaagctctatctgaaattttaataaaaaataaaaatgtttatattttaagcgatgatatttatgagcacattacttatgataattttaatttttttacgatagcacaaatttctaaattaaaaaaaagaacacttacaatgaacggagtaagcaaatcatatgcaatgacaggctggagaattggttatgcaggcgggccaaaagaaattataaaggcaattagtaaaattcaatctcaatcaacttcaaatccttcatctattagtcaggctgctgcggttgaagcattaaatggtactcaagattttattcaagaaagagcggaagcttttaaagaaagaagagattttgtagttgatagtttaaataatattaagggaataagttgtttaaaacctagcggagctttttatgtatttccgagctgcaaaaaattattaggtaaaaaaacaaaactaaaaacagatacagaatttgtagaaaaacttcttgaaaaagctaatgttgctgttgttcaaggatccgcatttggtttagatggatattttagaatttctt

SEQ ID NO: 245643 - DNA, 529 bp, Unknown
  Bacterial polypeptide expressing nucleotide sequence isolated from the Sargasso Sea
gatgctgagggtattagaatacttctctaaaaatttagacgatttgtttatatgttcgagttattcaaaaaattttggtttatatagcgaacgagtaggatgccttatttatacaaaccgcaggaatagaaatacagataatctacttagccagcttaagaaaacagcaagaacaatatactctaatcctcctgcccatggatcggatatagttagagaaatattacaagatgataatctaagagttatgtgggaatcagagttaaaaatacttagagaaagaattcagactatgcgcatatcattagattcaaatttaaaagaacttaaatgtagtaaagatttttcatatattgttaatcaaaaaggaatgtttagttttacaggcctaagtgagaaagatgttgaaaaattaaaaaaagattactctatatatatagttaattcagggagagttaatattgctggtataaccacgaataatgtaaagtacatagcagaaagtattaacaaagttacaagttactaa

SEQ ID NO: 245644 - DNA, 757 bp, Unknown
  Bacterial polypeptide expressing nucleotide sequence isolated from the Sargasso Sea
atgagcataatatcgaacagtttaaaaagaattaaaccatcgccaactattgctgtcactcaaaaagctagagaactgagagcaactggaaaagatgtaataggtcttggagctggagaaccagattttgatactcctgacaatattaaaaaagccgctattaaagcaattaaaagtggagacacaaaatatacagctgtagatggcacgcctgctttaaaaaaagcaattgtagataaatttaaaagagaaaataaattaaattattcaatagaccagataacagtaggaactggcggtaagcaggttctttataatacttttatggcaactttgaataaaggtgatgaggttataattccagcacctttttgggtttcatatccagatatggttttgttagctggaggaaaaccaaaaatagtcaagtgcactgagcaagagggttttaaacttacagctgaaaaattaaaaaaggctatcacaaaaaaaactaaatggttaattcttaattccccttctaatcctactggagcaggatattcaaaaaaagaaattcaagatttagctaaagtcttagtaagaaaaaagaaaatatttattttaagtgatgatatttatgaacatgttagatatgataattttaaattttttacaatcgcacaacttccaaaattaaaaaaaagaactcttacaatgaacggggtgagtaaatcttatgcaatgacaggatggagaataggatatgcggctggtc

SEQ ID NO: 245645 - DNA, 916 bp, Unknown
  Bacterial polypeptide expressing nucleotide sequence isolated from the Sargasso Sea
tcagacagtttaaaaagaattaagccatcgccaactatcgcagttactcagaaagctagagaattaagaacagctggtaaagatgtaattggtttaggagctggagagccagattttgacactccagaaaatattaaaaaagctgcgatcaaagctataaaaagaggagacacaaaatacactgctgttgatggcacacctgaacttaaaaaagctataattaagaaatttaaaagagaaaataaactcaactactctttggatcagatcactgttggcacaggaggaaaacaagttctttacaatgcttttatggcaactcttaataaaggggacgaagtaattataccagcacctttttgggtatcatacccagatatggttttgttagctggaggaaaaccaaaaataatcaaatgtactgaaaaggaagggtttaaacttactccaaaaaaattaaaaaaagcaatatctaaaaaaaccaaatggatcattcttaattctccatcaaatccaacgggagcaggttattcaaaaaaagaaattaatgacttagcaaaaattttaatcagaaataaaaaaatttttattctgagtgatgacatttatgaacatgttaggtatgacaactttaatttttttacaattgctcaaatttctaagcttaaagataggacacttacaatgaatggagtaagtaaatcatatgccatgactggttggagaataggttatgctgctggtccaaaggaaataataaaagctattggaaaaatccaatcacaatcaacttcaaatccgtcttcaataagtcaagctgcagctgttgaggcattaaatggaaaacaaggatttataaaaactagagctaaagcatttaaagacagaagaaactttgtttgtaaaagctcatagc

SEQ ID NO: 245646 - DNA, 808 bp, Unknown
  Bacterial polypeptide expressing nucleotide sequence isolated from the Sargasso Sea
aacaagggtgacgaagtaataataccagcgccttactgggtttcatatccagacattgttttattagcaggaggaacaccaatagtgattgaatgttcagaggagcaggcattcaaattaacagctaaagatcttgaaagcaaaattaataataatactaagtgggtagttttgaactcaccatcaaatcctactggagcatgttattctgaacaagaattaaaaaacttgtcgcaagttttaaaaagaaaaccacatgtaaatattttgagcgatgatatttatgagcatgtaacttatgatggattaaaatttttcacaatggcacaagttccagaacttaaaagcagagttgtgaccatgaatggagtaagcaaatcatatgctatgacgggatggagaattggatatgctggaggtcctaaagatataattaaagcaatagcaaaaattcagtctcaatctacaacaaatccttcctcaataagccaagcggcagcggtagaggcactaactggaaaacaagattttatctcaataagatctaaagcatttcaagaaagaagggattttgtagtaaactctttaaactcaatgaatggaattaattgtttaaaaccagaaggagctttttatgtatttccaaattgcaaagaattaataggaaaaaaagataaatcaggtaaaaaaattgagaatgatacggattttgttcaatcacttttagaaaattatggtattgcagtggtccaaggttctgcatttggattagaaggtttttttaggatttcttatgccacttcaatga

SEQ ID NO: 245647 - DNA, 461 bp, Unknown
  Bacterial polypeptide expressing nucleotide sequence isolated from the Sargasso Sea
aatgagcatagtttccaacaatttaaaacgtataaaaccgtcacctactatggctgttacccaaaaagccaaggaattgaaggcatccggtaaggatataattggattaggggctggtgagccagattttgacacgccagacaatataaaacaagccgcaataaaagctattaaagatggagacaccaagtacacaacagtagatggaactccaacacttaaaaaagcgataataaacaaatttaaaagagaaaataatttagattatttaaccgaccaaataaccgtaggaactggcgggaagcaagtaatttataatgcgatgatggctacccttaatgaaggagatgaagttattatccctgcgccttattgggtttcttatcctgacatagttttattagctggaggtttgcctatcattttagaatgcaatgaaaaacaaggatttaaaattaatc

SEQ ID NO: 245648 - DNA, 843 bp, Unknown
  Bacterial polypeptide expressing nucleotide sequence isolated from the Sargasso Sea
attaatgttaaagcaaatgcattaagagcagaaggaaaagacgtattagttttggcggcaggagaaccagattttaatacgcctgaaaatattagaaaagctgcatataaagctatagaaaatggacaaaccagatatgttccaggtaaaggaacaccagacttacaaaaagcaattcagaaaaaatttattcgcgataataatttacattatgagctagacgaaattatggttggtgtaggaggaaaacatataatttataatgctatgatggccactataaattctggcgatgaagttattataccggctccttattgggtaagttatcctgatatagtattattagcagaaggaaaacctataattgtccaatgccctgagtcacaagattttaaaattacagcagctcaacttgaagaaaatataacatcaaaaacaaaatggttaatgctaaatagtcctagcaatccaacaggggcagtttattccagtgaagagctggaatctatagctaatgtattattaaaatatcctcatgttttaattatgctggatgatatttatgaaaaaataatttatgaagatacaaagtttactaccctaggctctttagaaccaaagttaaaagaacgatgtttaacacttaatggagtttcaaagtcttattgtatgacagggtggagattaggttattgtggagctcctaaaaatattatttcagcaatgaataaaattcaatctcaaagtaattcttcaacatcttcaatttcaatggcagcagctgttgaagctttaaatggtccacaagattttattaaggaacataatataaaattttta

SEQ ID NO: 245649 - DNA, 912 bp, Unknown
  Bacterial polypeptide expressing nucleotide sequence isolated from the Sargasso Sea
tcaatgagcataatatcagatagtttaaagagaattaaaccatctccaaccattgccgttacacaaaaagcgagagaattaagagctgctggtaaagatgtaattggcctaggtgcaggagagccagattttgataccccagacaatataaaagaggcagctattaaagcaattaaaaaaggagataccaaatatacagctgttgatggaactccaattttaaaacaagcaattgtagataaattcaaaagagaaaataatttaaattatactcctgatcaaatcactgttggtgcagggggaaaacacgtaatttataatttaatgatggccactttaaacaaaggtgacgaagtcattattccagcaccttactgggtttcttatcctgatatagttttgcttgctggagcaactccaatagttgttgaatgctctgaggaacagggttttaaattaacagcaaaagatctagaggctgcaattaccaataatactaaatgggttatattaaattctccttcaaaccctacaggagcatgttactcagaacaagaaattaaaaacttagcacatgtattaaaaagaaaacctcatgtaaatgtattaagcgatgatatttatgagcatattatatatgaaggatttaaattttttacaattgcacaaataccagaattaaaaaataaagttgttacaatgaacggagttagcaaatcttacgctatgactggttggaggataggttacgccgcaggagataaagaagtaattaaagctattgcgaaaattcaatctcagtcaactacaaatccatcttcaattagtcaggcagctgcagtagaagctttaaatggaaaacaagaatttattcctattagatctttagcttttcaagaaagaagagatttc

SEQ ID NO: 245650 - DNA, 900 bp, Unknown
  Bacterial polypeptide expressing nucleotide sequence isolated from the Sargasso Sea
aatataaaaaatgcagcaattaaagcaatcaaaagaggggacacaaagtatactgctgttgatggcacacctgatctaaaaaaagctatcatcaaaaaatttaaaagagaaaataaattgaactttacctcagatcaaataactgttggcacaggcggtaaacaagttctttataatgcttttatggcaactctaaataaaggtgacgaggtaattataccagcaccttattgggtatcataccccgatatggttttattagctggcggaaaaccaaaaatagtaaaatgtacagcagcagagggttttaaattaactccaaaaaaattaaaaaaagcaatatctaaaaaaactaaatggataattcttaattctccatctaatccaacaggagcagggtattcaaaaaaagaaatttatgatttagctaagattttaattcgaaataagaaaatttttattttaagtgatgatatttatgagcacgttagatatgacaactttaattttttcacgatagctcaagtttcaaaattgaaagatagaacacttaccatgaatggagtaagtaaatcatacgcaatgacgggatggagaataggttatgccgctggtcctaaagaaataattaaagcaattggaaaaattcaatctcaatctacttcaaatccatcttcaataagtcaggcagcagcagttgaggcattaaatggaaagcagggttttataaaaactagagcaaaagcatttaaagagaggagagattttgttgttaaaagtcttaataatattaaaggaattaattgtttaactcctaatggtgcattttatgtgttcccaagttgtaaaggattattaaataaaaaaacaaaattaaaaacagactctcattttgttcaa

SEQ ID NO: 245651 - DNA, 771 bp, Unknown
  Bacterial polypeptide expressing nucleotide sequence isolated from the Sargasso Sea
aatgagcataatatcagtcaatctaaaaagaattaaaccatcaccgactattgctgtgacccaaaaggcaagagaattaagagcagctggaaaagatgtaattggtcttggggccggggaaccggattttgataccccagataacattaaacatgcagctattcaagcaatcaaagatggtgatactaaatatactgcagttgatggaactccagctttgaaaaaagcaatagttgaaaaatttaaaagagaaaataatttaattttttctactgatcaaataacagttggaacaggtggaaagcaagttctttacaatgcttttatggcaacattaaataaaggcgatgaagtaattatccctgcaccttattgggtatcatatccagacatggttttattagcgggaggaaaaccaaaaatagtaaaatgtgatgaaaaagatagcttcaaattgacccctcaaaaactaaaaaaagttattacaaaaaaaactaaatggttaattttgaactcaccttcaaacccgacaggcgcaggttacacaaaaaaagaaatagaagacttgtcaaaaattttaatcaaaaataaaagggttcacattctgagtgatgatatatatgagcatataagatatgataattttgatttctttactattgctcaaatttcaaaattaaaagatagaactctcacaatgaatggagttagtaaatcttatgccatgactggctggagaattggttatgcagcaggccctaaagatatcat

SEQ ID NO: 245652 - DNA, 871 bp, Unknown
  Bacterial polypeptide expressing nucleotide sequence isolated from the Sargasso Sea
atgccaataaaactatcacataatatagaaaatattccaccttcagcgacaatgctaatgacacaacttgctagagatttaaaagcagagggtaaaaatataataagcatgagtgctggtgaacctgattttgatacacccaaaactatcaaagaagcagctgtagatgccattaataggggtgaaactaaatatacagcagttgacggaattgatgaacttaaacaagcggtaatagataaatttaagaacgataataatctagattatgaaaaaggtaatatttctgttgccccaggtggaaaatcaataatttttaatgcaattttgtctacaataaatccaggagatgaagtaattattcctgctccatattgggttagttatcctgatatagtaaaacttgccggaggtaatccagtaataatagaaacatcaccagataataattttaaaatatcacctgatgatcttgaaaaaaatataactgaaaaaactaaatggctttttattaattcaccttcaaatccaactggccaagtttattctaaagctgagctaattaacttaactgaagttattaagaaacataaaaatttatacattttatcagatgatatatatgaatatattcgataccaaaacaatgagcgtttttatacaatcgctgagctagatgaagaaatcttttcaagaacattaacaatgaacggtgtttcaaaagcttattcaatgacaggatggcgtattggctattgcgggggtccaattgaaattattaatgccatgcgaaaattaatgggccaatctacatccaacccatcttcaatatctcaatgggcaactgtagaggcattaaatggttcaaaag

SEQ ID NO: 245653 - DNA, 912 bp, Unknown
  Bacterial polypeptide expressing nucleotide sequence isolated from the Sargasso Sea
acctcaaaagccagggaaatgaaagctgccggaaaggatgttataggtttaggggctggagagcctgattttgatactccagataatattaaagaagcagcaattgaagcgattagaaaaggagatacaaaatatactgcggtggatggaaccccagcgttaaaaaaagctatccaagcaaaattttctagagaaaatgatttatcatatgagcttgatcaaatttcagttggaactggcggaaagcaagttttatacaatgcttttatggcaaccataaataaaggtgatgaggtaattattccagccccttactgggtttcttatcctgacattgttttgttagctgggggaaagcccaaaataattaaatgttatgaaaaaaataatttcaaattaacgccagaaaaattagcaaaagcagtttcaaagaaaacaaagtggataatcataaactctccatctaaccctacaggatctggatatactaaagatgagattatagctttatcaaagattttaataaaatataaaaatttatatattttgagtgatgatatttacgaacatattacttatgacggttttaaattttttacaatcgcgcaaattgaaaaactaaaaagtagaactttaacaatgaatggagtgagtaaatcttactcaatgactggctggaggataggttatgctgccggcccaaaagaaattattaaagcgatggctaaaattcaatcgcaatcaactagtaatcctacatctataagtcaagcagctgcagtagaagctttgaacggaacgcaagactttattttagaaagatcaaattcttttaaagaaagaagaaattttgttgttgatagtttaaataatataaaaggtgttagttgtttaagtcctgaaggagcattt

SEQ ID NO: 245654 - DNA, 685 bp, Unknown
  Bacterial polypeptide expressing nucleotide sequence isolated from the Sargasso Sea
atgagcataatatcagacagtttaaataagattaaaccatcacctactattgctgttactcaaaaagcaagagaattaaaagctgctggaaaagatgttattggacttggtgcaggagaacctgattttgatactccagataatattaagcaggcagctataaaagctattaatgatggtgatactaaatacactgcagtagatggaaccccagcattgaaaaaagcaattgtagaaaaatttaaaaaagaaaataatttagattatacaactgatcaaattacagttggagctggtggaaagcacgttatctataacgctatgatggcaacactaaacgatggagacgaggtaataattccagctccttattgggtgtcttatccagatatagttttattggctggtggaaaaccggttgtaatggaatgtgatgaaaaacaaggctttaaaataaatccttcagatttagaaaaatttatcactccaaaaacaaaatggattattttaaattcaccatctaatccaactggagcttgttattctgaaaatgatataaaagcaattgctgctgttttagaaaaacataatcatgtttacattttaagtgatgatatttatgaacacgtcacttacgaaaagtttaaattttttactattgcacaaatagaaagcttaaaagaca

SEQ ID NO: 245655 - DNA, 753 bp, Unknown
  Bacterial polypeptide expressing nucleotide sequence isolated from the Sargasso Sea
atccaataatcttgcaagggtaaaaccatccccaacaattactatttcaagcttggcaacacacatgaaatcagagggacgcgatattatttcactttctgcaggtgaacctgattttgacactcccgaccatataaagaatgctgcaatcgaagcaataaagtccggacaaactaagtatacagatccagatggtatgagaactttaaaggaagcagtttgtgaaaaatttgagcttgaaaatgacttaacctataacccaaatcagatttctattggtactggcggaaagcaaattttgtataatgctctaatggcgactttaaatccgggggacgaagtgataataccggcaccatattgggtgtcctatccagatatggttttactcgcgggcggccaaccagtttttatcgaggcctctgccaaaaataattataaaatttctcctgcgcaacttgagggagtaatcaccgataaaacgaaatggtttatattcaattcaccttcaaacccaacaggtgctggctactcaaaaaatgagctaaaaaaacttacagaagttttaatgaaattcccaaatgtgttgattatgacagatgacatgtatgagcacttggcatacgacgactttgttttcaacacaccggctcaagtagagccccgtctttttgatagaacattaacttgcaatggagtatcaaaagcctacgcgatgacaggctggaggatcggctttgcaggtggaccaaa

SEQ ID NO: 245656 - DNA, 817 bp, Unknown
  Bacterial polypeptide expressing nucleotide sequence isolated from the Sargasso Sea
catgccaataaaactatcacataatatagaaaatattccaccttcagcgacaatgctaatgacacaacttgctagagatttaaaagcagaaggtaaaaatataataagcatgagtgctggggaacctgattttgatacacccaaaactatcaaagaagcagctatagatgccattaataggggtgaaactaaatatacagcagttgatggaattgatgaccttaaacaagcagtaatagataaatttaaaaacgataataatctagattatgaaaaaggtaatatttctgttgccccaggaggaaaatcaataatttttaatgcaattttgtctacaataaatccaggagatgaagtaattattcctgctccatattgggttagttatcctgatatagtaaaacttgccggaggtaatccagtaataatagaaacatcaccagataataattttaaaatatcacctgatgatcttgaaaaaaatataactgaaaaaactaaatggctttttattaattcaccttcaaatccaactggccaagtttattctaaagctgagctaattaacttaactgaagttattaagaaacataaaaatttatacattttatcagatgatatatatgaatatattcgataccaaaataatgagcgtttttatacaatcgctgagctagatgaagaaatcttttcaagaacattaacaatgaatggtgtttcaaaagcttattcaatgacaggatggcgtattggctattgtggaggtccaattgaaattattaatgccatgcgaaaattaatgggccaatctacatcc

SEQ ID NO: 245657 - DNA, 508 bp, Unknown
  Bacterial polypeptide expressing nucleotide sequence isolated from the Sargasso Sea
atgagcataatatcagacagtttaaaaagaattaaaccatcaccaacaattgctgtgacacaaaaagctagagaattaagagcggctgggaaagatgttataggtcttggtgctggagaacctgatttcgatacaccagaaaacataaaagatgctgcaatacaagctataaaagatggagacactaaatacactgcagttgatggaaccccagctttgaaaaaagcaattgttgaaaaatttaagagagaaaataatttagattttaccgaagaccaaataaccgttgggactggtggaaaacaagttttatataacgctttcatggcaacacttaacaaaggtgatgaggtaataatcccagcaccatattgggtgtcttatccagatatggttctactagcaggaggaaaaccaaagatagttaaatgtgatgaaaaagaaggatttaaattaactgcaaaaaaacttcaaaaagttatttccaaaagaaccaaatggttaattt

SEQ ID NO: 245658 - DNA, 838 bp, Unknown
  Bacterial polypeptide expressing nucleotide sequence isolated from the Sargasso Sea
aatgagcataatatcagacagtttaaaaagaattaagccatccccaacaattgccgttactcagaaagcaagagaattaagagcagctggaaaagatgttattggtcttggtgctggggagccggattttgatactccagtaaatattaaaaatgcagcgatcaaagctatcaaaagaggggacacaaaatacactgctgttgatggtacgcctgaacttaaaaaagctatcatcaaaaaatttaaaagagaaaataaattgaacttcaccttagatcaaataactgttggcacaggcggtaaacaagttctttataatgcttttatggcaactcttaataaaggtgacgaggtaattataccagcacctttttgggtatcataccctgatatggttttattagctggcggaaaaccaaaaatagtaaaatgtacagcagcagagggttttaaattaactccaaaaaaattaaaaaaagcaatatctaaaaaaactaaatggataattcttaattctccatctaatccaacaggagcagggtattcaaaaaaagaaatttatgatttagctaagattttaattcgaaataagaaaatttttattttaagtgacgatatttatgagcatgttagatatgacaactttaattttttcacgatagctcaagtttcaaaattgaaagacaggacacttaccatgaatggagtaagtaaatcatacgcaatgactggatggagaataggttatgccgctggtcctaaagaaataattaaagcaattggaaaaattcaatcccaatctacttcaaatccatcttcaataagtcaggcagcagca

SEQ ID NO: 245659 - DNA, 820 bp, Unknown
  Bacterial polypeptide expressing nucleotide sequence isolated from the Sargasso Sea
atgagcatagtttccaatagtttaaaacgaataaaaccctctccaactatagctgttacctcaaaagctagagaaatgagagcagtaggtaaagatgtaattggattaggggcaggggaacctgattttgataccccagataatattaaagaggcggctattcaggcaattaaaagaggcgacaccaagtacacagcagtagacggaactcccactcttaaaaaggccatcaaagaaaagttttctagagagaataatctaacatatggattagatcaaatttcagttggaactggaggaaagcaaatactctataatgctttcatggcaactttaaatccaggcgatgaagtaattatcccagcaccttattgggtatcgtatccagacatggttttgttagctggaggcaaacctaaaatagtaaaatgttctgaaaaaaatgaatttaaaataacttcagctgaacttaaaaaagctatcaataaaaaaactaaatggctaattattaattctccatcaaacccaacaggatcttgctatacaaaaaaggaaatagaagatctgtcaaaaattttaataaaaaataaaaaaatttttattcttagcgatgatatttatgaacatataacttacgatggatttaatttttttactattgcccaaataaaagctttgaaagatagaattttaaccatgaacggagttagcaaatcttattctatgactgggtggcgaattggctatggggcaggacctaaagaattaataaaagcaatggctaaaattcagtctcaatcaaccagcaacccttcatcta

SEQ ID NO: 245660 - DNA, 907 bp, Unknown
  Bacterial polypeptide expressing nucleotide sequence isolated from the Sargasso Sea
aaaaggtgaaaccaaatatacagctgtagatgggacgcctgtgttgaaagaggccatagttaataagtttaaaagagagaataatctcatttataaagcagatgaaattacagtcggagctggtggtaaacatgtgatttataatttgatgatggcaactctaaacaagggtgacgaagttataataccagcaccttattgggtttcatatccagacattgttttattagcaggaggaactccagtagtaattgaatgttcagaggaacaggaattcaaattaactgctaaagatcttgaaagcaaaataaataataatactaaatgggtaatattaaactcaccatcaaatcctacaggatcatgttattcagaacaggaactgaaaaatttatcccaagttttaaaaagaaaaccgcatgtaaatattttgagcgacgatatatatgagcatgtgacttatgatggattaaaatttttcacaatggcgcaagttcctgatttaaaaagtagagttgtgaccatgaatggggtaagtaaatcctatgcaatgacagggtggagaataggatatgctggtggccctaaagatataattaaagctatatcaaaaattcaatctcaatccacaacaaacccatcttcaataagccaagcggcagcagttgaagcacttaatggtaaacaagattttatctcaattagatctaaagcatttcaagaaagaagagattttgtagtaaactctttaaactcaataaatggaattaattgtttaaaaccagagggagcattttacgtatttccaaattgtaaagaattaatcggaaaaaaagataaatcaggtaaaaaaattgaaaatgatactgactttgttcagtcattattagaaaacatatggtattgc

SEQ ID NO: 245661 - DNA, 476 bp, Unknown
  Bacterial polypeptide expressing nucleotide sequence isolated from the Sargasso Sea
aatgagcataatatctaatagtttaaagagaattataccctccccaacaatcgcagttactcaaaaagctagggaactaagagctgctggaaaagatgtaattggtttaggtgctggagagcctgattttgataccccagttaacattaagagtgccgcaataaaagcgataaagtcaggcgatacaaaatataccgctgttgatggaacacccgcacttaaaaaagcaattattaaaaaatttaaaaaagaaaataatctttcgtataatacaaatcaaataaccgttggaactggtggaaaacaagttttatacaatgcattcatggcaactcttaacaagggagatgaagtaattattccagctccatactgggtttcatatccagacatggttctactagcaggtggaaagcctaaatttgtaaaatgcgatgaaagagatagctttaagctcacaccacaaaaattaaaaa

SEQ ID NO: 245662 - DNA, 718 bp, Unknown
  Bacterial polypeptide expressing nucleotide sequence isolated from the Sargasso Sea
cataattttatatctgaaagagttaatagcataaaaccatctccaactatagccgtaacttcaaaggctagggagttaaaagcactaggaaaagatgttataggattaggagcgggcgagccagactttgatacaccaattcatatcaagaatgcggctattgaagctataaaagaaggtaaaactaaatatacagcggttgatggtattccggagttaaaacaagctatttgtaaaaagtttttaagagataataacgtaggttatgatattgatgagattactgtaggtactggaggaaaacaggtcttatttaatgcattgttagcaacaatagataaaggtgatgaagtaattataccagctccctattgggtatcatatcctgatatggttgttatagctgaaggtaacccaataattttagaaactagtaaagaaagtaacttcaaagtaacttatgcacaactcaataagaaaataacaagtaagactaaatggatagttatcaactctccttcaaatcctactggaagttgctattcaataaatgagttgagagaaattggtaaaatattagatgagcatcctcatataggtataatatcagacgatatttacgaaaaaattgtttatgataactttcaattttctacaatagcctcgatatttccaaaacataaaaatagaattataactgtcaatggagtttctaaag

SEQ ID NO: 245663 - DNA, 457 bp, Unknown
  Bacterial polypeptide expressing nucleotide sequence isolated from the Sargasso Sea
aatgagcatagtttccaatagtttaaagcgtataaaaccatctccaaccatagcggttacctcaaaagctagagaaatgagggctgcaggaaaggatgttatcgggctgggagcaggtgagcctgatttcgatactcctgataacatcaaagaggcagctatacaggcaattaaaaaaggagaaacaaaatatactgctgttgatggtactccaaaactaaaaaaggcaattcaagtaaagtttaaaagagaaaataatttatcatatgaactagatcaaatttcagtaggaactggcggtaagcaagttctttataacgtgtttatggccacactaaatccaggagatgaagtcattataccagcgccctactgggtatcatatcctgacatggttttattagctggaggcactcccaaaatagtagaatgctctgaaaaagacgaatttaaaata

SEQ ID NO: 245664 - DNA, 469 bp, Unknown
  Bacterial polypeptide expressing nucleotide sequence isolated from the Sargasso Sea
atgaatattgtagcagacagactttctagaattaaaccatctatgactgttggtattaataccaaagcaaatgcattacgggctgagggaaaagatattttagttttagcagcaggagaaccagattttgatacacctgtaaatatcagagaggctgcaattaaagcgatgaatggaggattaactaggtatgtaccaggaaagggtacgcctgcattgcaaaatgcaattataaataaatttaaaaaagaaaataatctagaatattcaaatgacgaaataatggtaggtgttggaggaaaacatattatttataatgctatgatggcaacgcttaatccaggtgacgaagttataattcctgcaccatattgggtaagttatccagatatagttttattagctgaaggaaaaccagttattgtaaagtgtagtgaaaaaaattattttaaattaacgccactatgat

SEQ ID NO: 245665 - DNA, 805 bp, Unknown
  Bacterial polypeptide expressing nucleotide sequence isolated from the Sargasso Sea
gattatgttgtagatgcggcaataaaagctgcggctgatcctaaaaatcacaagtactctgctgcagcaggtcttgaatcgctaagacaaataattgcaaaaacaacaaaaaattactcaggatttgaaattaattcagataatgtaattgtttctaatggtggaaagcaatcaatactcactgcatttttatctacattagaccctggggatgaagtcatcatacctgctccttattggacaacttatccagaagcagtaaaaattgctggaggaactcctgtctttattgaaactgaaaagagcaataattttaaagtcactgttgaacaattagaaaaaagtaaaactgaaaaaacaaaaatgttagtttggtgttccccatcaaatcctactggagtagtttatacaaaaggagaggctgaagaaatttatgaatggatattcaaaaacgatttatggattttatctgacgaactttacgaacacttagtttatgaaggagaaacatctccttcaccggcaatatatgatcctgaattaaaaaatacaattatcgtaaatggtgtttcaaagtcatactcaatgacaggatggagagtcggttggttaattgggaataaaagtgtaatagggcttggaaaaaaaattcaatctcaggcaacctcaaatgtttctaacgtgtctcaattagctgcagaagcggcactacttaatgggcttgaggtaactaatgaaatgaaaaaagcttttaatagaaggaggctatttgcaaccgagaaaattaaaagtattccaaatctta

SEQ ID NO: 245666 - DNA, 471 bp, Unknown
  Bacterial polypeptide expressing nucleotide sequence isolated from the Sargasso Sea
aatgagcatagtttccaatagtttaaaacgtataaaaccgtcgcctaccatggcagtaacctcaaaagctagggaaatgcgtgcagccggtaaagatattatagggcttggggcaggagaaccagattttgatacaccagataatataaaagaggctgctatagaggcaattagagcaggtgatactaagtatacagcagttgacggaacgcctgctctaaaaaaagcaattcaaaataagttctcaagagagaacggcttatcttatgaactagatcagataacggttggaacaggcggtaagcaagttttatataatactttcatggcaacagttaataaaggagatgaagttattatacctgcaccatactgggtgtcttatcctgacattattttattagctggcggtaacccaaaaatagttaaatgtgatgaaaaagataattttaaattaacacctaaaaaatt

SEQ ID NO: 245667 - DNA, 569 bp, Unknown
  Bacterial polypeptide expressing nucleotide sequence isolated from the Sargasso Sea
aatgagcatagtttccaatacattaaaacgtataaaaccgtcgcctacaatagctgttacctcaaaagctagggaaatgagggcagctgggagagatgttataggtcttggggcaggagaaccagattttgatactccagagaatattaaagaggcagcaatccaagcaattaaaaaaggagacactaagtacactgccgtagacggaacccccgcattaaaaaaagctattcaagaaaaatttcagagagaaaataatttaagttacaatttagatcaaatcagcgttggaactggaggtaaacaagttctctacaatgcttttatggctacgattaataagggtgacgaggtaattataccagctccttactgggtttcttatccagatattattttattagctggtggaaaaccaaaaattatcaagtgtgaggaaaaagaaaattttaagcttacgccaaaaaaacttcaaaaagctctttcaaaaaaaacaaaatggataatattgaattctccctctaacccaactggtgctgcatacacaaagaaagagatagaggatttag

SEQ ID NO: 245668 - DNA, 601 bp, Unknown
  Bacterial polypeptide expressing nucleotide sequence isolated from the Sargasso Sea
atgagcatagtttccaatagtttaaagcgaataaaaccttcaccaaccatcgcggttacctcaaaagctagggaaatgagggcagctggtaaagatgttataggtttaggagcaggtgagcctgattttgacactccagataacatcaaagatgctgctatcgaagcaattaaaagaggagaaacaaagtacacagccgtagatggtacaccaaaacttaaaaaggcgatccaagggaaatttacaagagaaaataatttgtcttacgaattagatcaaatttctgttggtacaggaggaaaacaagttttatataacgtttttatggcaaccctaaatccaggagacgaagtcattatcccagcaccttattgggtatcttatcctgatatggttttattagctggcggtaaacccaaaatagtaaagtgctcagaaaaaaatgaattcaaaataacaccagatgaattaaaaaaagctattggaaaaaaaactaaatggttaattataaactcaccgtctaatccaactggatcttgttacacaaggagtgagatagaagaattatcaaaaatattaataaaaaataaaaatgttcata

SEQ ID NO: 245669 - DNA, 923 bp, Unknown
  Bacterial polypeptide expressing nucleotide sequence isolated from the Sargasso Sea
cctttaaagaataaaacctttccccaaccttgggctgtcactcaaaaagcaagagaacttaaggctgcgggtaaagacgtaattggcctaggtgctggagagccagattttgatacaccagataatataaaagaagcagctatagaggccattaaaaaaggtgacactaaatacacagctgtagacggcacacctgctttgaaagatgccatagttaataagtttaaaagagagaataatttaaattataaagtagatgaaattacagttggagctggtggcaaacatgtgatttataatttgatgatggcaacccttaacaagggtgatgaagtaattataccagcaccttattgggtttcatatccagatattgttttattagcgggaggaaccccaatagtgattgaatgttcagaggaacaagaatttaaattaactgctaaagatcttgaaggcaaaataaataataatacgaaatgggtaattttgaattcaccatcaaatcctactggagcatgttattctgaacaagaattgaaaaatttatctcaagttttaaaaagaaaaccacatgtaaatattttgagtgacgatatatatgagcatgtgacttatgatggattaaaattcttcacaatggcgcaagttcctgaattaaaaagtagagttgtgactatgaatggggtaagtaaatcctatgcaatgacagggtggagaataggatatgctggaggtcctaaagatataattaaggctatagcaaaaattcaatctcaatccacaacaaatccttcttcaataagccaagcagcagcagtagaagcacttaatggcaaacaagattttatctcaattagatctaaagcatttcaagaaagaagagattttgtagtaaactcttttaactcaataaatggaat

SEQ ID NO: 245670 - DNA, 633 bp, Unknown
  Bacterial polypeptide expressing nucleotide sequence isolated from the Sargasso Sea
aatgagcataatatcagacagtttaaagagaattaaaccatctcctactattgccgttactcaaaaagcaagagaattaaaagcctccggaaaagacgtaattggtctaggagcaggagagccagattttgatactccaaacaatattaaagaggcagcaattaaagctattaaggatggagacacaaaatatactgcagtagatggaacacctgctttaaaaaaagctatttctgaaaaatttaaaagagaaaataatttagattactcaactgacgaaattacagttggagcaggcggcaagcatgtaatttataatttgatgatggcaactttaaataaaggagacgaagtaataatacccgcaccttattgggtatcttatccagacatagttttgttagcaggcgctaccccaattgttgttgaatgttctgaggatcaaggtttcaaattaacagctaaagatcttgaaagcaacataactaataatacaaaatggataattttaaactcaccttcaaatccaacaggtgtctgttattcagagcaagaaattaaaaatttagctcaagttttaaaaagaaatcctcatgtaaatattttaagtgacgatatttatgaacatattat

SEQ ID NO: 245671 - DNA, 711 bp, Unknown
  Bacterial polypeptide expressing nucleotide sequence isolated from the Sargasso Sea
aatgagcattatatctgatagccttaaaagaataaaaccctcaccaaccttggctgttacccaaaaagctagagaacttaaagctgcgggtaaagacgtgataggtctaggtgctggagagccagatttcgatacaccagataatataaaagaagcagctatagaggccattaaaaaaggtgacactaaatacacagctgtagacgggacacctgctttgaaagatgccatagttagtaagtttaaaagagagaataatttaaattataaagtagatgaaattacagttggagctggtggcaaacatgtgatttataatttgatgatggcaactcttaacaaaggtgatgaagttataataccagcaccttattgggtttcatatccagatattgttttattagcgggaggaactccaatagtgattgaatgttcagaggaacaagaatttaaattaactgcaaaagatcttgaaggcaaaataaataataatacgaaatgggtaattttgaattcaccatcaaatcctactggggcatgctattctgaacaagaattgaaaaatttatcccaagttttaaaaagaaaaccacatgtaaatattttgagcgatgatatatatgagcatgtgacttatgatggattaaaatttttcacaatggcgcaagttcccgaactaaaaagtagagttgtgaccatgaatggggtaag

SEQ ID NO: 245672 - DNA, 587 bp, Unknown
  Bacterial polypeptide expressing nucleotide sequence isolated from the Sargasso Sea
aatgagcataatatctaatagtttaaagagaattaaaccctccccaacaatcgcagttacccaaaaagctagggaactaagagcggctggaaaagatgtaataggtttaggtgctggagagcctgattttgacaccccagataacattaagagtgctgcaataaaagcgataaagtcaggagatacaaaatataccgctgttgatggaacgcccgcacttaaaaaagcaattattaaaaaatttaaaaaagaaaataatctttcatataatacaaatcaaataacagttggaactggtgggaaacaagttttatacaatgcattcatggcgactctcaacaagggagatgaagtaattattccagctccatactgggtttcatatccagacatggttctactagcaggtggaaaacctaaatttgtaaaatgtgatgaaaaagatggatttaagctcacaccacaaaaattaaaaaaggctatttcgaaaaagactaaatggctaattattaattcaccttcaaatccaactggttctgggtatacgaaaaacgaaatattaaaattatcaaaaattcttttacgaa

SEQ ID NO: 245673 - DNA, 766 bp, Unknown
  Bacterial polypeptide expressing nucleotide sequence isolated from the Sargasso Sea
attaaaccttcaccaacgatagcagtcactcagaaagcaagagagttgaaagctgcgggcaaagatgtaattgctttaggcgcaggtgaacctgattttgacacacctaataatataaaaaaggcagcagttaaagcgattagaataggggatactaaatacacgccagttgatggaacacctgcaattaaaaatgcagtaattaaaaagtttaaaagggaaaataatttaacttatacctcagaccagataacagtaggtactggtggaaaacaagttttgtataatgcttttgtagcaacattaaataaaggtgatgaagttattattccagctccgttttgggtatcttacccagatatggttttgcttgctggggggaaaccaaaatttataaaatgtggagaagaagatggatttaaattaacacctaccaaacttaaaaaagctattacaaaaaaaaccaaatggataattttaaattctccttcaaacccaactggtgcggcttatacaaaaaaagaaataattaatttaggaaagatattattaaaaaataagaatattctaattttgagtgacgatatttatgagcatgtaaaatttgataattttaaattttttacaattgcacagttaaagaaacttaaagatagaacacttacaatgaatggggtaagcaaagcatatgcaatgactggttggagaattggttatgcagctggtcctaaaaatatcatagctgcgataagaaaaatccagtcgc

SEQ ID NO: 245674 - DNA, 1189 bp, Unknown
  Bacterial polypeptide expressing nucleotide sequence isolated from the Sargasso Sea
atgagcataatatcagacagtttaaaacgaattaaaccatcaccaactattgcagttacccaaaaagcaagagaacttagagctgctggaaaagatgttattggacttggagctggggagccagattttgatacaccagacaatattaagaatgctgcaattaaagctatcaaaagtggagacaccaaatacacagctgtagatggaacacctgctttaaaaaaagcaatcgtagataagtttaaaagagaaaacaaaattagctattctacagatcaaatcacagttggtactggcggaaaacaagttctttataatgcttttatggcaactttaaataaaggcgacgaagtaattattcctgcacctttctgggtttcttatcctgatatggttttattagctggtggaaaaccaaagatagttaagtgtacagaagaagaaggatttaaacttactgcaaaaaagttaaaaaaagtaattaccaaaaaaactaaatgggtgattttaaattcaccttctaatccaactggagcaggttattcaaaaaaagaaattgaagatttagcaaaagttttaattagaaataaaaaagtacatatcttaagtgatgatatttatgagcatattaaatatgataattttaatttttatacgatagctcaaaattcaaagttaaaagatagaaccttaaccatgaatggggttagtaaatcttatgcaatgacaggttggagaataggatatgccgcaggaccaaaagatatcattaaagcaattggtaaaattcaatctcaatctacatcaaacccttcatcaattagtcaagctgctgctgttgaagctttaaatggtaatcaaggttttataaaaaagagatcaaaagcatttaaagaaagaagagattttgtcgttaaaagtttaaatgatattaaaggaataaattgtttaactcctaatggtgcattttatgtatttccaagttgtaaaggattattaaataaaaaaactaaattgaaaactgatactgagtttgttcaaaaactacttgaacaatctaatgttgcagtagtgcaaggttctgcatttggtttagatggatactttagaatttcttatgctacatcaatgcaaaatttgaagaaagcaatggcgagaataaaatctttttgtgaaagcctttcttaag

SEQ ID NO: 245675 - DNA, 1090 bp, Unknown
  Bacterial polypeptide expressing nucleotide sequence isolated from the Sargasso Sea
aatgagcataatatcagacagtttaaagaagattaaaccttcacctacaattgctgtaacccaaaaagcaagagaattaaaggcagcaggaaaagatgttattggtttaggtgcaggtgaaccagattttgatacaccagataatattaagcaagcagctattaaagcaataaatgatggagataccaaatacactgctgttgatggaactccagcactaaaaaaagcaatagtcgaaaaatttaaaaaagaaaataacttagattatgcaacagaccaaattaccgtcggagcaggtggaaaacatgtcatttataatgccatgatggctacattaaatgaagatgacgaagttattgttccagctccttattgggtttcttacccagatattgttttattagcagggggtaagccagttgtaatggagtgtaatgaaaaacaaggctttaaaataaacccatcagatttagaaaaatttataactctaaaaacaaaatggattattcttaactctccgtctaatccaactggagcatgttatacagaaaaagatataagagaaattgcaaaagttttggaaaatcatcctcacgtatatattttaagtgatgatatctatgaacatgtaacttatgaaggatttaaattttttactattgctcaaatcgaaagtttaaaagaaagagtgcttactatgaatggtgtaagcaaagcttattcaatgactggttggagaataggttatgcggcaggtccaaaagaaattattaaagccattgcaaaaatccagtcacaatcaacgactaatccttcatcaattagtcaagccgcatcagtagaggcattaaatggaacacaagattttattaaaaaaagagcagattcatttcaagaaagaagagattttgtcgttaaagccttaaatgatattgatggaattgattgcttaaatcctgatggtgctttttatgtcttccctagttgcaaaggtttaatgggaaaaaaagatacaaatggaaaagaaattaagtcggacacagattttgttcaatctcttttagagaatagtggtatcgctgttgttcaa

SEQ ID NO: 245676 - DNA, 1201 bp, Unknown
  Bacterial polypeptide expressing nucleotide sequence isolated from the Sargasso Sea
aatgagcataatatcagatagtttaaaaagaattaaaccttccccgacaattgcagtcacccaaaaagctagggaattaaaagctgcaggcaaagatgttataggtttaggtgcaggtgagcctgattttgatacgcccgataatattaaagcagcagctataaaagctataaataacggagataccaaatacactgccgtagatggaacggtagaattgaaaaaagcaattgtagagaaatttaagagagaaaacaatctaagctataaaactgacgagataacagtaggcgcaggtggaaaacacgtaatttataacctaatgatggcaactttgaataaaggagacgaagttttaatacccgctccttattgggtttcatatccagatatagttttattagcaggagcctaccctatagtaatagaatgttcagaggagcaaaattttaaattaactgcaaaagatttagagagtaaaattacaaataatactaaatggttgatattaaattcaccatcaaatcccacaggggcttgttattcagagcaagaaattaaaaatttatctcaagttttaaaaagaaatcctcatgtaaatattttgagcgatgatatctatgaacatgttacttataataattttaagtttttcacgatcgcccaagttcctgaattaaagagtagagtggtaactatgaatggtgtaagtaaatcttatgcaatgacaggttggcgaattggttatgcggctgggcccaaagagataatcaaggcaattgcaaaaattcaatcacaatcaacaacgaacccgtcttctataagtcaagcagctgcagtggaggcacttaatggagttcaagattttatatcaataagatctaaagcatttgaagagagacgtgactttgttgttaattcgttaaactctataaatggaataaattgtttaaaaccagatggcgcattctacgtctttccaaattgcaaaggtttaattggtaaaaaagataaaaatggaaaaaaaattgaaaatgatactgattttgttcaatcccttcttgaaaacaacggaattgcagttgttcaaggatctgcctttggtttggaaggtttttttagaatatcttatgcaacgtcaatgaataatcttgaaaaagcaatgaagagaataaaagatttttgcgaaagtctttcttaa

SEQ ID NO: 245677 - DNA, 1201 bp, Unknown
  Bacterial polypeptide expressing nucleotide sequence isolated from the Sargasso Sea
aatgagcataatatcagacagtttaaaaaagattaaaccatcacccactattgctgtaactcaaaaagcaagagaattaaaagctgctggaaaagatgttatcggtcttggtgcaggggaaccagattttgatactccagataatattaaagaagctgcaatcaaagccatcaatgaaggtgacaccaaatacacagcagttgatggaacaccggcattaaaaaaagcaattgtagaaaaatttaaaaaagaaaataatttggattataccactgatcaaattactgttggagcaggaggaaagcacgttatttataatgctatgatggcaacacttaacgatggagacgaggtaataattccggctccttattgggtgtcttatcctgatatagttttattggctggtggaaaaccagttataatggaatgtggtgaaaaacaaggctttaaaataaatccttcagatttagaaaaatttataacaccaaaaacgaaatggattattttaaattcaccatctaatccaaccggagcttgttattctgaaaaagatataaaagcaattgccaatgttttagaaaaacataatcatgtttacattttaagtgatgatatttatgaacacgtaacgtatgaaggttttaaattttttactattgctcaaatagaaagcttaaaagacagagttcttacaatgaatggcgtaagtaaagcttattcaatgacaggttggaggatagggtatgcagctggtccaaaagatattgttaaagctattgcaaaaatccaatcacaatcaacaacaaatccctcttctatcagtcaagcagcatcagttgaagcactaagtgggacacaagattttattaaaaaaagagctgactcttttcaagaaagacgagattttgtagtaaaagcattaaatgatattgatggtatcaattgtttaaatcctgatggtgcattttatgtttttcctagttgtaaagagttaatgggaaaaaaagattctagtggcaaagaaattaaatcagacactgattttgttcaatctcttttagagaatagtggtgttgctgttgttcaggggtccgcatttggtttagaaggattttttagaatttcatatgcaacttcaatggaaaatctaaaaaaagctttagaaaaaatttcctctttttgtaaaaatttaagttaa

SEQ ID NO: 245678 - DNA, 1201 bp, Unknown
  Bacterial polypeptide expressing nucleotide sequence isolated from the Sargasso Sea
aatgagcattatatcggatagcttaaaaagaataaaaccttctccaactatcgccgttactcaaaaagccaaggaattaaaagctgcaggaaaagatgtaataggtttaggcgctggagaaccagattttgacaccccagataatattaaaaaagcggcaatagatgccattcaatctggtgatacaaaatatacggctgtagatggaaccaaagatttaaaagaggcaattgttaaaaaatttaaaagggaaaataatcttaattatacaatagatcaaataactgttggagcagggggcaagcatgtaatttacaatttaatgatggcaacgttaaacaaaggtgatgaggtaatcattcccgcaccatattgggtgtcatacccagatattgttttattggcaggagctaatccgatagtcatagagtgttctgaagatcagggtttcaaattaagtgcaaaagatttagaggcgaaaatcactaataatactaaatggcttattctaaattcaccgtctaacccaacaggagcttgttattcagagcgagagatcaaaaatttatcgcaggtcttaaaaaggaatccgcatgtgaatatacttagtgatgacatatatgaacatatcacttacgatgatttcaaattttttacgattgctcaaatacctgaaattaaaaataaagttattactatgaatggtgttagcaaatcatacgcaatgactggttggagaataggttatgcggctggcgacaaagatataattaaagctatagccaagattcaatctcaatcaacaactaatccttcatctataagtcaagcagcagccgttgaggccctaaatggaaaacaagactttatctcagtaagagcaaaagctttccaggaaagaagagattttgttgtaaactctttaaatgctattaaaggaataagttgcctgaaaccagaaggagctttttatgtttttccaaactgcaaaggattaatgggtaaaaaagataaaagtggaaaaaaaattacaaatgacacagactttgttcagtcattattagaaaataatgatgtagcggttgtccaaggatcagcttttgggctagagggtttttttagaatttcatatgcaacttcaatggagaagcttgagatagcaatgaaaagaataaaatctttttgtgagagtttaaaataa

SEQ ID NO: 245679 - DNA, 820 bp, Unknown
  Bacterial polypeptide expressing nucleotide sequence isolated from the Sargasso Sea
atgagcataatatcagatagtttaaaaagaattaaaccatcacctactatagctgttacacaaaaagccagagaattaagagctgctgggaaggatgtaattggccttggtgctggagagcctgattttgatactcctgataatattaaaaatgcagcgatcagagctattaaaggtggggatactaaatatactgccgttgatgggacacctgctttaaaaaaagctattgcaaagaagtttaaaagagaaaataaattaaattattcaaccgctcaaataacagttggaactggtggtaaacaagttctttataatacattcatggcaaccttaaataaaggtgatgaagtaattattccagctcctttttgggtatcatatccagacatggttttattagcaggaggaaaaccaaaaatagttaaatgcacagaacaagaaggatttaagcttactgcaaaaaaattaaaaaaagccattacaaaaaaaacaaaatgggtaatttttaattcaccctcaaatccaacaggagcaggatatacaaaaaaagaaattcaagatttagctaaaattttaataagaaataaaaaagttcacattttaagtgatgatatttatgaacatatcaaatatgataattttaaatttttcacaattgctcaaatttcaaaattaaaagatagaactcttacaatgaatggtgttagtaagtcgtatgcaatgacaggatggagaataggttatgcagctggtcctaaagatataattaaagctataggtaaaatacaatcacagtctacttcaaacccatcctcaa

SEQ ID NO: 245680 - DNA, 1216 bp, Unknown
  Bacterial polypeptide expressing nucleotide sequence isolated from the Sargasso Sea
atgagtaaacaaaatactttaattgctaaaaggatgtcgcttataaaaccatcgcctactatggcggttactaagatggcagcagaaatgaaagctgcaggacaggatattataggtttgggggcaggtgaacctgattttgatactccggatcatataaagaatgcagctatagaagctattaaaaatggagaaactaaatatacggctgtagatggaacgcctgctttaaaaaaagcaattgcaaaaaagttttataaagataacagtattaaatataatatagatgaaattattgtttcagttggaggtaaacaagtattatataatgctttaatgtcttcaattaatcctggtgatgaagtaattattccttcacctttttgggtctcttatcccgatatggtttcactagctggtggagtgccaattatagtagaaggaaaagaaaaaaataattttaaaatacagccagaggatattagagataaaatttctacaaaaacaaaatggattataattaattctccttctaatcctacaggttcttcttattctgaagaagagctcagagatataggtaatttattattggagtatgaaaatatattcgtaatgtctgatgatatttatgaaaaaattatttatgatgattttaagtttttttcattagccgaggtggttccggaacttaaagatagaattttaaccgttaatggagtttctaaagcttatgctatgacaggttggcgaataggatatgctggaggcccaaaacatttaattacagcaatgtcaaaattacaatctcaatcaacatctaatccttgttctattagtcaagcggcggctttagcagcattagaagggccagaagaatttttacttgaaagaaataatagattcaaaactaggcgggatatggttgttaaaatgttaaatgaatgtaatggattaagctgtatcaagccttctggagcattttatgtttatccttcttgctcaggaatcataggaaaatctactaaggaaggaaaattaattgaaaattcaatagatttttcatcttatttacttgagtctgtaggtgttgcagtagtcccaggcagtgcatttggagcagaccctttttttaggatatcttacgctacatctgactctattttagaagaagcttgcaatagaattaaaaaagcctgtgaacaattaagttaat

SEQ ID NO: 245681 - DNA, 961 bp, Unknown
  Bacterial polypeptide expressing nucleotide sequence isolated from the Sargasso Sea
tatgacttttatttctgacagtttgaatagaataaaaccttctgcaacaatggtcataacagccaaggcagtgcaactaaaaagagaaggaaaaaaagttattggattatcgtctggtgaacctgactttgatacaccaaaccatgtaaaggtagctgctatagatgcaattcacaaaggatatacaaagtacacgaacgttgaaggtataccagaacttaggcaagccataatcgataagtttaaaagggataatgatttgaattattcaataaatgacgtgattgtaggtgctggtggaaaacaaattttatacaatgcacttgttagttctataaataaagatgatgaggtaataattccggctccatattgggtgtcatatcctgatatgactttgttagctggaggcaagcctgttattgtatgttgttcacaggaaacagattttaaacttacagccaaagaattagaacaagttataactaaaagaagtaagtggttaatattaaatagcccgtctaatccaactggatcctgttattctagaaaagagcttgaagaaattgctgacgttgttagaaaacataaaaatttatatgttatgacagatgatatatatgaatatattgtttacgacaattttgaattttttacatttgctcaagttgctcctgatttaaaagatagagtgttaacagtaaatggagtttcaaaaagtcattgtatgactggttggcgaattggctatgcagctggtcctgaaatattaatcaaagcgatgattaaaattcaagggcagtcaacttccaatgcttcatctatttcacagtatgccgctctggccggaataagtggaagtaatgactttttaaaaccttgtttaaaagcttttgatgatagaagatgttatgttgtcagtaaactcaataacattcaaggtataagttgtctgttacct

SEQ ID NO: 245682 - DNA, 1201 bp, Unknown
  Bacterial polypeptide expressing nucleotide sequence isolated from the Sargasso Sea
aatgagcattatatctgatagccttaaaagaataaaaccctctccaaccttagctgtaactcaaaaagcaagagaactcaaagctgcaggtaaagacgttataggtctaggcgctggtgagccagattttgatacaccagataatattaaagaagctgctattgaggctattaaaaaaggtgatactaaatatacagctgtagatggcacacctgcattgaaagaggctatagttaataagtttaaaagagaaaataatctcaattataaagtagatgaaattacagttggagctggcggaaaacatgtgatttataatttgatgatggcaactcttaacaagggtgacgaagtaataataccagcaccttactgggtttcatatccagacattgttttattagcaggaggaacaccaatagtgattgaatgttcagaggagcaggaatttaaattaacagctaaagatcttgaaagtaaaattaataataatactaagtgggtaattttgaactcaccatcaaatcctactggagcatgttattctgaacaagaattaaaaaatttgtcacaagttttaaaaagaaaaccacatgtaaatattttgagcgatgatatttatgagcatgtaacttatgatggattaaaatttttcacaatggcacaagttccagaacttaaaagcagagttgtgaccatgaatggagtaagtaaatcatatgctatgacgggatggagaattggatatgctggaggccctaaagatataattaaagcaatagcgaaaattcaatctcaatctacaacaaacccctcttcaataagccaagcggcagcagtagaagcacttaatggtaaacaagattttatctcaattagatctaaagcatttcaagaaagaagagattttgtagtaaactctttaaactcaataaatggaattaattgtttaaaaccagaaggagcattttatgtatttccaaattgtaaagaattaattggaaaaaaagataaatcaggtaaaaaaattgaaaatgacactgattttgttcagtcattattagaaaactatggtattgcagttgttcaaggttctgcatttggattagaaggcttttttagaatatcttatgctacatcaatggaaaatttggaaaaagcaatgaagaaaattaaagaattttgcgaaagtttaaactaa

SEQ ID NO: 245683 - DNA, 879 bp, Unknown
  Bacterial polypeptide expressing nucleotide sequence isolated from the Sargasso Sea
aatgagcataatatctaacagtcttaaaagaattaaaccatctcctaccattgcagttactcagaaagcaagagaattaaaagctgcgggcaaagatgtaattgctctcggcgcaggtgaacctgattttgatacacctaataatattaaaaaagcagcagtaaaagcgattagaataggggatactaaatatacgccagttgatggaacacccacaattaaaaatgcagtaattaaaaagtttaaaagggaaaataacttaacttatacctcagaccagataacagtaggtactggtggaaaacaagttttgtataatgcttttgtagcaacattaaataaaggtgatgaagttattattccagctccgttttgggtatcgtatccagatatggttttacttgctggaggtaaaccaaaatttattaaatgtggggaagaagatggttttaaattaactccatcaaaacttaagaaagcaattactaaaaaaacaaaatggataattttaaattctccttcaaatccaactggcgcagcttacacaaaaaaagaaattattaatttaggaaagatattattaaaaaataagaatatgtttatcttaagtgacgatatttatgagcatgtaaaatttgataattttaaattttttacaatagcacaaataaaaaagcttaaagatagaacacttaccatgaatggggtaagcaaggcatatgccatgactggttggagaattggttatgcagctggtcccaaaaatatcatagccgcgataagaaaaatccagtcgcaatcaacttctaatccatcatctataagtcaggcagctgcagttgaggctttaaatggaactcagagttttataaaaaaaga

SEQ ID NO: 245684 - DNA, 1189 bp, Unknown
  Bacterial polypeptide expressing nucleotide sequence isolated from the Sargasso Sea
aatgagcatagtttccaatagtttaaaacgtataaaaccgtcacctacaatggccgtaacctcaaaagctagggaaatgagagctgctggtaaagatattatagggttaggggcgggagagcctgattttgacactccagataatatcaaagaggcagcaatagaagctattagaaagggtgatactaagtacaccgccgtagatggaactccagctctaaaaaaggcaataaaaaacaagttctcaagagagaatggattatcttatgaactggatcagataactgtgggaaccggaggaaaacaagttttatataatactttcatggcaacagttaataaaggggatgaagttattatccccgctccttattgggtgtcttatcctgacattattttattagctggaggcaaaccaaaaatagttaaatgtgaagaaaaagacaattttaaattaacccctaaaaaattagagaaagctatatcaaaaaaaactaagtggataattttaaactctccttctaacccaacaggctcagcttatacaaaaaaagaaatagaagaattatcaaaagttctaataaaaaataaaaaaatttatattttgagcgacgatatctatgaacatattacttatgataattttaaattttttacaattgctcagattaaagatttaaaagatagaacactaactatgaacggagtaagtaaatcttattctatgactggatggagaataggatatgctgcaggtccaaaagaaataattaaagccatagcaaagatccagtctcagtctacaagcaatcctacttcaatcagtcaagcagctgcagtagaggctctaaatggaacacaagattttatagaagatcgtgctaattcttttaaagaaagaagagattttgtggttaatagtttaaataatattaacggcattagttgtttaaaacctgaaggagcattttacgtttttccaaattgtaaaaaattgttaggaaaaaaaacaaaattaaaaacagataaagattttgttcagaaattattagaaaaatcagaagttgctgttgttcaaggttctgcttttggtttggatgggtattttagaatatcttatgctacttcaatggaaaatttaaaaaaagcaatggagagaataagatctttttgtaatagccttacttag

SEQ ID NO: 245685 - DNA, 778 bp, Unknown
  Bacterial polypeptide expressing nucleotide sequence isolated from the Sargasso Sea
atgagcataatatcagacagtttaaagagaattaaaccttcaccaactattgccgtaactcaaaaagcaagagagctaagagcagcaggaaaagatgttattggccttggtgcgggagagccagattttgatactccagacaatataaaagaagctgctatcaaagcaattagagatggggatactaaatatacagctgttgatggaacaccaaaattaaaaaaagctattgtagaaaagtttaaaagagaaaataatttaaattattctgttgaccaaataacagttggaactggaggaaaacaagttctttataacactttcatggcgacgttaaataaaggtgatgaagtgatcatacccgcgcctttttgggtatcttatccagatatggttttattggctggggggaagccaaaaattgtaaaatgcactgaaaaagataattttaaacttaccgctaagaaattaaaaaaagcaatctcaaaaaaaacaaaatggttaatattaaattcaccatcaaacccaacaggtgcaggatattctgaaaatgaaataaaagaattatctaaagttttagttaagaataaaaaagttaatattttaagtgacgatatttatgaacatgtcagatatgataattttagtttttttacgattgcacaaattccaaaacttaaagataggacattgaccatgaatggtgttagcaaatcttatgcaatgacaggctggagaattggttatgctgctggtccaaaagatataataaaagcta

SEQ ID NO: 245686 - DNA, 1183 bp, Unknown
  Bacterial polypeptide expressing nucleotide sequence isolated from the Sargasso Sea
aatgaaaaacccattatccgaaagagtcataaaggtcaaaccttcggcaactattgctatctcatccaaagcaatggaaatgagatctgctggtgtagacgtcataagcatgagtgcaggcgagcctgattttgatacgcctgaatatataaaagatgctgcaaaaatggctatggatagcggtatgactaaatatacacaagtggacggtgtcccagatttaaagcaagctattatcaataaatttagtgaagataatgatttaatttatgatcctgaaaatatccttgtttcaaccggagcaaagcaaacgctatataatctttttcaggcaattttaggtcccggtgatgaggtcattattattagtccatactgggtatcgtatccagacatggttctgttggcagatgcaaaacctgtaattgtagacacttttcaagaaaatgacttcgctttagatataagtgcatttgcagatgccattaatgataagacaaaacttgtcatcattaactccccatcaaatcctactgggattactttcagcagatctgactacgaatcaattggtgctatattacagaatcaccccgatgtattcgtcgcaacagatgatatgtatgaatatatctattggggtgatgaaccgtttatttcgtttgctcaagcttgcccatcattatttgatcgaaccataacaatcaatggcgtctccaaatcatatgcaatgacaggctggagaattggttattgtggtggtccctctgatgtaattggtggaatgaaaaaagttcagagtcaaagcacttcaaacgcatcatcaatttctcaggcagcagctattgcagctctcaatggctctaaagatgaaattgattcaatggttaaacagtataagttgagacatgattatctttgttcagcactcaatgatattgatggctttaaaactactccaggaactggtgcattttatttatttcctgatgtgacgaatgttattgagcaaaaaggtttctctgatgatgttgaactgtctcaatatctaattgaaaaggctaatgttgctgttgttcctgggagtgcttttggttctcctggatacatcagattatcctatgcaacgagccttgaattgataaaagaagctgttaatagaatctccaattcattggattaa

SEQ ID NO: 245687 - DNA, 1201 bp, Unknown
  Bacterial polypeptide expressing nucleotide sequence isolated from the Sargasso Sea
atgagcataatatcagacagtttaaaaaagattaaaccttcgcccactattgctgtaacccaaaaagctagagaattaaaagcagcaggaaaagatgttatcggcttaggagcaggtgaaccagattttgatacaccagaaaatattaagcaagcagccataaaagcaataaatgatggagatactaagtacactgctgttgatggaactccagctttaaaaaaagcaatagtcgaaaaatttaaaaaagaaaataatttagattatacagctgatcaaattactgttggagcaggcggaaagcatgtgatttataatgccatgatggccacattaaatgaaggtgatgaagttatagttccagctccttattgggtctcttacccagatatcgttttattagcagggggcaaaccagttgtaatggagtgtgatgaaaaacaaagttttaaaattaatccatcagatttagaaaaatttataactccaaaaacaaaatggattattttaaactctccttctaatccaacaggagcatgttattcagaaaaagatattagagaaatcgcaaaagttctggaaaagcatcctcacgtatatattttaagtgatgatatctatgaacatgtaacttatgaaggatttaaattttttactattgctcaaattgaaggtttaaaagaaagagttcttacaatgaatggtgtaagcaaagcttactcaatgactggttggagaataggttatgcggcaggtccaaaagaaattattaaagccattgcaaaaatccagtcacaatcaacaactaatccttcatcaattagtcaagccgcatcagttgaagcattaagtggaacgcaagattttattaaaaaaagagcagactcatttcaagaaagaagagattttgttgttaaagccttaaatgatatcgagggcattgagtgcttaaatcctgatggtgctttttatgttttccctagttgtaaaggtttaatgggaaaaaaagataccaatggaaaagaaattaaatcagacacagattttgttcaatctcttttagagaatagcggtattgctgttgttcagggttctgcatttggacttgagggatttttcagaatttcttatgcaacttcaatggataatctaaagaaagcattagaaaaaatatcttctttttgtaaaagtttaagttaat

SEQ ID NO: 245688 - DNA, 886 bp, Unknown
  Bacterial polypeptide expressing nucleotide sequence isolated from the Sargasso Sea
atgagcatagtttccaatagtttaaaacgcataaaaccctctccgactatggctgttacttcaaaagctagagaaatgaaggctgctggaagggatgtaataggtttaggtgctggggaaccagattttgatactccggataacataaaagacgcagcaattcaggctattaaaagaggggacacgaaatatacggctgtagatggcactccagctttaaaaaaagcaatacaagcaaaattcttaagagaaaacaatttatcctatgatttagatcagataactgtaggaacaggtggaaagcaggttttatacaatgctttcatggcaacaataaacaaaggagatgaagtaataataccagccccatactgggtgtcctaccccgatattattttattagctggtggtaagcctaaaataataaaatgtgaagaaaaagacaattttaagctaacaccacaaaaattgaaaaaagctatttcaaaaaaaacaaaatggattattttaaattctccatcaaatcccactggttctgcatacacaaaaaaagaaatagaaaatttgtccaaagttttattaaaatttaaaaagatttatattttaagtgacgatatttatgaacatattacttacgatgattttaattttttcacaattgcccaaataaaatctttaaaagaaagaacattaactatgaatggagtaagcaaatcttattctatgactggctggagaataggatatgcagctggtccaaaagagataattaaagctatagcaaaaattcaatctcaatcaacaagcaacccaacatcaattagtcaagcagcggcagtagaagctttaaatggagtacaagattttataaaaaacacgtgctgac

SEQ ID NO: 245689 - DNA, 674 bp, Unknown
  Bacterial polypeptide expressing nucleotide sequence isolated from the Sargasso Sea
gatgccaataaaactatcacataatatagaaaatattccaccttcagcgacaatgctaatgacacagcttgctagagatttaaaagcagaaggtaaaaatataataagcatgagtgctggggaacctgattttgatacacccaaaactatcaaagaagcagctatagatgccattaataggggcgaaactaaatatacagcagttgacggaattgatgaccttaaacaagcggtaatagataaatttaagaacgataataatctagattatgaaaaaggtaatatttctattgccccaggtggaaaatcaataatttttaatgcaattttgtctacaataaatccaggagatgaagtaattattcctgctccatattgggttagttatcctgatatagtaaaacttgctggaggtaatccagtgataatagaaacatcaccagataataattttaaaatatcacctgatgatcttgaaaaaaatataactgaaaaaactaaatggctttttattaattcaccttcaaatccaactggccaagtttattctaaagctgagctaattaacctagctgaaattattaagaaacataaaaatttatacattttatcagatgatatttatgaatatattcgataccaaaataatgagcgtttttatacaatcgctgagc

SEQ ID NO: 245690 - DNA, 1198 bp, Unknown
  Bacterial polypeptide expressing nucleotide sequence isolated from the Sargasso Sea
ttgtttgaaaaattatcattaatttcgccagatccgattttaaaaataatttctgaatataacgaagatgttcgttcaaataaaattgatctcggcgtgggtgtataccgagacagttttggagaaacacctattatgtcggttgttaagtcagcagagtcacatattttatccacacaaaaatctaaagcatatatcggtctggctggagatacgatttacaataagaacatacaaaaattaattcttggcgacattaaaatagctgaagacagaatctttaccatacagactgctggaggaacgacctcacttcgagtggcttccgaattattaaaagaaacatcaaaaaatatcaatatttgggtgagcaatcctacatggagtaatcacattcctgtattagaaagcaccaatataaacttcagggaatacccttactatgatatggaaactaacacacttctgtttgacagaatgatcgcgtgtttagagactattccgaagggcgatgcagtcttattgcatgcatgttgccataatccgacaggcatggatccaactttagaacaatggaaaaaaattattcaggtaatgaaaagtcgtgaattgttgccatttattgacaatgcttatcaaggcttagcaaatggtctggatgaggatgcgagtgcattgagactgatggcatcagaatttaatgaactcataatttccagctcatgctctaaaaattttggattgtatcgcgatcgtgtgggagcgttgactgttatcacaaagaatgaagactcaaataaaaaaacgaaaagtaatgtactaaaaatagtcagaacaatgggttctgtcccgccggatcacggggctgcatgcgtaggatatatcctctctgatgaatcacttacaaaaaaatggaaaagtgaactggatgatgtaaaggtccgattaaaaaatatgagaatagaacttgctggttcactcaaaaataaaacaaattctcatgatttcagtcacattgtaagagcgaatggaatgttttcattcttaggtataaccactgaacaggttcaagcattaaaatctcagtatggtatttacatggaggaatcagggcgaataaatgttgccggtattaccatggaaaatgtatcgtatctcacagattcaataacaaaagtgttagaatctcaccaataaa

SEQ ID NO: 245691 - DNA, 643 bp, Unknown
  Bacterial polypeptide expressing nucleotide sequence isolated from the Sargasso Sea
atgctttccaataatcttacaagggtaaaaccctccccaacaattgctatgtcaagcttggcaacacagatgaaattggagggacgcgatgttatttcactttccgcaggtgagcctgattttgacactcctgaccatataaagaatgctgcaatcgaagcaataaagtccggacaaactaagtatacggatccagatggtatgaaaactttaaaggaagccgtttgtgaaaaatttgagcttgaaaatggcttaacctataacccaaatcagatttccattggtactggcggaaaacaaattttgtataatgctcttatggcgaccttaaatccaggggatgaagtgataataccggcaccgtactgggtgtcctatccagatatggttttactcgcgggcggccaaccagtttttattgaagcctctgccaaaaataattataaaatttcgcctgcgcaactcgagagagcagtcaacgataaaacaaaatggtttatattcaattcgccttcaaacccaacaggtgccggctattcaaaaaatgagcttaaaaaactcacagaagttttaatgaaattcccagatgtgttaattatgacagatgacatgtatgagcacttggcctacgatgactttgttt

SEQ ID NO: 245692 - DNA, 398 bp, Unknown
  Bacterial polypeptide expressing nucleotide sequence isolated from the Sargasso Sea
aatggaactttcaaaattagccaaagaattaaagccgtcagcaactttagcaataactgctaaggcaaaagaaatgaaagctgaaggaatagatgttataggttttggtgcaggtgagcctgatttcgatacacccgagaacattaaaaattatgcaaaaagattcatagataatggatttactaaatatactgctgctgggggaattttagagttaaaagaatctattattaaaagaatttcagaagactatggagtaatttataattctaaagaaatatttgttgggtcgggagctaagcacgttctatacaacttgtttcaagttttaattgatgaaggagatgaagtaataattccttcgccttattgggtctcatatcctgagcagggagaat

SEQ ID NO: 245693 - DNA, 1198 bp, Unknown
  Bacterial polypeptide expressing nucleotide sequence isolated from the Sargasso Sea
atgatttcaaatagagtaaataacataaaaccctctttgacaatagccacaaacatgaaggcacaggagttaaaaagggcaggaaaagatgtaattgttttagcggctggagagccagactttgacactccagaacatataaaaagtgctgctatcgaggcaattaataatggttttacaaaatatgttccaggcaaaggtaccccagacttacagcttgcaattcaaaaaaaatttcaaagagataataatttagattatgaacttggtaatattacagttggagtagggggtaagcatataatttataacgctttttcagcaactattaatagtggtgatgaagttattattcctgcaccgtattgggtgagttatccagatattgttattttaaatgatggaaagcctgtaattgttgaatgtggtgagcaaaatgattttaaaattacacctgaagatttagaaaagcatataaacccaaaaacaaaatggttaatgcttaatagcccaagtaaccctactggatcgatgtactccaaagaggaattaatagcccttggtgatgttcttcagaaacatgaaaatgtttacattctatctgatgatatttatgaaaaaattgtttacgacactaatgaatttaaaacaatagctgaggtttgtccttttttaaaagagagaactttaactatgaacggattatctaagtcttattgcatgacaggctggagagtaggttatgcagcaggtccaacaaatctcatcaatgcaatgaacaaagttcaatcccaaaacatttcctcaacagcatctatttcaatggcggcatcagtggaagcactgaatggagatcaaagttttatcatatcaaacaatgagtcatttttaaggagacgcaacttagtggtgaagcatttaaatgaaacaccaggattatcttgcagaacacctgaaggtgctttttatgtttttgcttcttgtaaaggagttttaggaaagacaacgcagtcaggtaagaaactttccaaagatggtgactttatggattatcttcttgaaaaggttggggttgctggagttcagggctcggcttttggtttagaaggtttttttagaatttcttatgcaacctctgattcaatattagaggatgcttgccagagaattaaagaagcttgtgctaaattaagttaat

SEQ ID NO: 245694 - DNA, 1189 bp, Unknown
  Bacterial polypeptide expressing nucleotide sequence isolated from the Sargasso Sea
aatgagcataatatcagacagtttaaagagaattaaaccatctccaactatagctgtcacacaaaaagcaagagaactaagggcagcaggaaaagatgtaattggtttgggagctggagagccagattttgatacccctgacaatattaaggatgcagctattaaagcaataaaagatggagatacaaaatacactgcagttgatggaactcctgatttaaaaaaagcaattgttgataaatttaaaagagaaaataatctagatttcaatactgatcaaataacagttggaactggtggtaaacaagttctttacaatacttttatggcaacattaaataaaggtgatgaagtgataatacccgcgcctttttgggtttcatatcctgatatggttttattagctggtggaaaaccaaaaattgttaaatgtgatgaaaaagatggttttaaacttactgcaaaaaaacttcaaaaggcaatttcaaagaaaacaaaatggttaattttaaactcaccgtctaaccctactggagccggttacactaaagatgaaattcaaaatttagcagatgtgttaataaaaaataaaagggttcatattttaagtgatgatatctatgagcacattaagtatgacaactttaatttttttacgatagcacaaatatctaaacttaaggatagaacattgacaatgaatggagtgagcaaatcctatgcaatgacaggttggcgtataggttatgctgctggtcctaaagatataattaaggctataggaaaaattcaatcacaatcgacctctaacccatcttctgttagccaggccgcagctgttgaagctttaaatggaatacagaattttattcaagaaagatcggatgcttttaagaaaagaagagattttgttgtaaaaagtttaaatgacattaaagggataagttgtttgaggcccaatggtgccttctatgtttttccaagttgcaaaggattgttaaataaaaaaacaaaattaaaaactgatactgattttgttcaaaagttacttgaaaaagaaaatgttgctgttgtgcaaggatcagcttttggtttagaaggatattttagaatttcctatgcaacttcaatggaaaatttaagaaaagcgatggacagaattagatctttttgtgaaaactttaattag

SEQ ID NO: 245695 - DNA, 1198 bp, Unknown
  Bacterial polypeptide expressing nucleotide sequence isolated from the Sargasso Sea
atgatttcaaatagatttaataacataaaaccatctttgacaatagccaccaatatgaaggcacaggaactaaaaagggctggaaaagatgtcatcgttttagcagctggagagccagattttgatacacctgatcatattaaaagcgcagctatagatgcaataaataggggttttacgaagtacgtaccaggtaaaggtacccctgatttgcagcttgcaattcaaaaaaaatttcaaagagacaacaatttagattatgagcttggaaatattacagttggagttggtggtaagcatataatttataatgccttttcggcaactattaatgagggtgatgaagttattattccagcaccatattgggtgagttaccctgatattgtgattttaaatgatggaaaacccatcatagttgagtgtggtgagcaaaatggttttaaaatcacacctgaggatttggagaaaaatatatcttcaaaaacaaaatggttgatgttaaatagcccaagtaacccaactgggtctatgtacaccaaagatgaattgatggctataggagatgttcttaaaagttatgaaaatatttttattttatcagatgatatttatgaaaagatcgtttacgacaccaatgatttcaaaaccatagctgaagtttgcccttatttaaaagagagaactttaactatgaatggattatccaagtcttattgcatgacaggctggagagtaggttatgctgcaggtccagtcagtctcatcaatgcaatgaacaaagttcaatcacaaaacgtatcttcaacagcatctatatcaatggctgcttccgttgaagcactgaatggagaccaaagttttatcttaagtaataatgagtcttttcttagaaggcgtaatttagtcgttaaacatttaaatgaaacacctggattgtcatgtagaacaccagagggagctttttatgtttttgcttcttgcaaaggagttttaggaatgacaacagagtctggtaaaaaactcctaactgatggtgactttatggattatcttcttgaagaagtgggggttgcaggtgttcagggctctgcatttggattagagggtttctttagaatttcttatgcaacttctgactcaatattagaggatgcctgccaaagaattaaaactgcttgttctaaattaagttaat

SEQ ID NO: 245696 - DNA, 1189 bp, Unknown
  Bacterial polypeptide expressing nucleotide sequence isolated from the Sargasso Sea
atgagcatagtttccaatagtttaaaacgtataaaaccgtcacctacgatagcagttacctcaaaagccagggaaatgagagctgccggaaaggatgttataggtttaggggctggagagcctgattttgataccccagataatattaaagaagcagcaatagaagcaattagaaaaggcgatacaaaatatactgcggtggatggaaccccagcgttaaaaaaagctattcaagcaaaattttctagagaaaatgatttatcatacggtcttgatcaaatttctgtcggaactggcggcaaacaagttttatataatgcttttatggcaaccataaacaaaggtgatgaggtaattattccagctccttattgggtttcttatcctgacattgttttgttagctgggggaaagcccaaaataattaaatgtgatgaaaaaaataattttaaattaacgccggaaaaattaacaaaagcagtttcaaaaaaaacaaagtggataattataaactctccatctaaccctacaggctctggttatactaaagatgagattatagctttatcaaagattttaataaaatataaaaatttatatattttaagcgatgatatttacgaacatattacttatgacggttttaaattttttacaattgcgcaaattgaaaaattaaaaagtagaactttaaccatgaatggagtgagtaaatcttactcaatgactggctggagaataggttatgctgcaggtccaaaagaaataattaaagcgatggctaaaattcaatcccaatcaactagtaatcctacatctataagtcaagcagctgcagtagaagctttgaatggaacgcaagactttattttagaaagatcaaattcttttagagaaagaagaaattttgttgttgaaagtttaaataatatcaaaggtttaagttgtttaagtcctgaaggagctttttatgtttttccaaactgtaaaaaattacttaataagaaaacaaaactaaaaactgataaagactttgtagaaaaattgttagaaaaagctgaagtagctgtagttcaaggctctgcttttggtttagacggttactttagaatatcttatgctacctcaatggaaaatttgaaaaaagcaatggacaggatcaaagctttttgcgaaagccttagttaat

SEQ ID NO: 245697 - DNA, 901 bp, Unknown
  Bacterial polypeptide expressing nucleotide sequence isolated from the Sargasso Sea
aatgagcataatatctgaaagtttaaagagaataaaaccttctccaactattgctgtttcccaaaaagctagagaattaagagctgctggaaaagatgtaattggattaggagcaggagagccagattttgatacaccaaataatatcaaaaatgcagcaataaaagctattaaaggtggtgatactaaatatactgcagttgatggaaccccagctttaaaaaatgcgataataaaaaaatttaaaaaagaaaataatttaaagtactccgcagatgaaataacagttggaactggcggtaaacaagttctttataacgctttcatggcaacacttaacaaaggtgatgaagtaattataccagcacccttttgggtttcttatccagatatggttttattagcagggggcaaaccaaaaatagttaaatgcaatgagtatgaaaattttaagttaacaccagcaaaattaaaaaaggttatttctaaaaaaacaaaatggttaatactaaattcaccttcaaaccccacaggagcaagttatacaaaagcggagattgtaaaattatctaaagtattaactaattataaaagaattcatattttaagcgatgatatttacgaacatatatcttatgaaaaatctaaatattttactatcgctcaaatatctaatttaaaaaatagaacattaaccatgaatggtgttagcaagtcttatgctatgacaggttggcgaataggttacgcaggaggaccaaaagaaattattaaagcaattcgaaaaatacaatctcaatctacatcaaatccttcatctgttagtcaggctgcggcagttgaagctttgaatggaactcagaaattcataaaaaccagatctaaggaattaaaaaaagaa

SEQ ID NO: 245698 - DNA, 949 bp, Unknown
  Bacterial polypeptide expressing nucleotide sequence isolated from the Sargasso Sea
tatgccaattaaactatcacataacatagaaaatatccccccttcagcaacaatgttaatgacacaattagcgcgcgatctaaagtcagaaggtaagagcattattagcatgagcgctggggaaccggactttgatacgccgcaaaatatcaaagaagcagccataaatgcaattaaacgaggtgaaactaaatatactgcagttgacggaattgatgaccttaaagaggcagttataaataaatttaaacttgataataatctagactacacaagagataatatttctgtagctccaggtggaaaatcaataatctttaatgctattttgtcgactataaaccctggagatgaagtacttattcctgctccatactgggttagttatcctgatatagttaagcttgcaggaggaacgccggtaataataaaaacatcatcagataataattttaagatatctcctgatgatcttgaaaaaaatattacaaacaaaactaagtggctttttttaaattcaccttcgaatccaactgggcaagtttattctgaagatgaacttaaagatcttgcagtaattatcaaaaaacataaaaatttatatgttttgtcagatgatatatatgaatatatccgataccaaagtgatgagcgcttttatactattgctgaattagatgaagagattttttcaagaacaattacaatgaacggtgtatcaaaagcttactcgatgacaggatggcgaattggttattgtggaggtccaatagaaattatcaattctatgagaaaattgatgggccaatctacttccaacccatcttcaatctctcaatgggctactgtggaagcattaaatgggtcaaagaaattccttgatgaatggataaattcttttaaagaaagaagagacttcatagttaattatttaaataattgtaaaggt

SEQ ID NO: 245699 - DNA, 1168 bp, Unknown
  Bacterial polypeptide expressing nucleotide sequence isolated from the Sargasso Sea
atgagcattatatcggatagcttaaaaagaataaaaccttctccaactatcgccgttactcaaaaagccaaggaattaaaagctgcaggaaaagatgtaataggtttaggcgctggagagccagattttgataccccagacaatattaaaaaagctgcaattgatgctattcaagctggcgatacaaaatatacagctgtggatggaactaaagatttaaaagaggcaattgttaaaaaatttaaaagagaaaataatcttaattatacaatagatcaaattactgtcggagcagggggtaagcacgtaatttacaatttaatgatggcgaccttaaacaaaggtgatgaggtaattattcctgcaccatattgggtgtcgtacccagatattgttttattggcaggagctaatcccattgttatagagtgttccgaggaacagggttttaagttaagtgcaaaagatttagaggcgaaaattaacaataatactaaatggcttattctcaattcaccatctaatccaacaggagcttgttattcagagcaagagattaaaaatttatcgcaggtcttaaaaagaaatcctcatgtaaatatacttagtgatgatatatacgaacatatcacttacgataattttaaattttttacaattgctcaaatacctgaaattaaaaataaggttattaccatgaatggtgttagcaaatcatacgcaatgacgggttggagaataggttatgcagctggtgataaagatattattaaagctatagccaagatacaatctcagtctacaacaaatccttcatctataagtcaagcagcagccgttgaggccctaaatggaaaacaagactttatcccagttagagcaaaagctttccaggaaagaagagattttgttgtaaactctttaaatgctattgaaggaataagttgtttgaaaccagaaggtgctttttacgtttttccaaactgcaaaggattgataggcaaaaaagataaaagtggaaaaaaaataactaacgacactgattttgttcagtcattattagaaaataatgatgtagcagttgtccaaggatcagcttttgggctagagggtttttttagaatttcgtatgcaacatcaatggagaagcttgagatagcaagaaaag

SEQ ID NO: 245700 - DNA, 1192 bp, Unknown
  Bacterial polypeptide expressing nucleotide sequence isolated from the Sargasso Sea
atgagcataatttccaacaatttaaaacgtataaaaccgtcgcctaccattgcagttactacaaaagccagagaaatgcgggcaagcgggaaggatgttataggattaggtgctggagagccagattttgacaccccagacaacattaaagaggccgctatagaagctatcaaaaacggtgaaaccaagtatacggcagttgatggaactctagacctaaaaaaagcaattgttgaaaagtttaaaagagagaataatttagattatacaactgaccaagttacagtcggaactgggggcaaacaagttatatacaacaccttcatggcaacattgaataaaggagatgaggtaattataccagcaccttattgggtttcttaccctgacatggttttgttagctggcggcactcctaagattataaagtgtgaggaaaaagatggctttaaactttcagcaaaaaaattagaaaaagcaatatctaaaaaaacaaaatggcttattttaaactctccatctaatccgacaggagcaggatatacaaaaaaagaaatagaggatttatcaaaagtattacttaaacataaaaaaatttttattttaagcgacgatatttatgaacatattagatacgaaggttttaatttttttacaattgctcaaatttcaaaacttaaagagagaactttgaccatgaacggagtaagcaagtcttacgcgatgacaggttggagaataggttatgcggcaggtcctaaagaaataattaatgcaattagaaagatacaatctcagtctacctcaaatccttcatctataagccaggcagcagcagtggaggcattaaatgggcaacaaaattttattaaagagagagcagaagccttcaaagagagaagagattttgtagtgagtagtttaaataatataaaaggaattaattgtttaacaccaaacggagctttttatgtttttccaagctgtaaagggcttttaaataagaaaactaaacttaaaaccgatactgaatttgttcaaaaattattagaaaaatctatggttgctgtagttcaaggatcggcctttggcttagatggttattttagaatttcatatgcaacctcaatggaaaatttaaaaaaagccataacaagaattgaagatttttgtaatagcttaaataactaat

SEQ ID NO: 245701 - DNA, 1189 bp, Unknown
  Bacterial polypeptide expressing nucleotide sequence isolated from the Sargasso Sea
aatgagcataatatctaatagtttaaagagaattaaaccctccccaacaattgcagttactcaaaaagctagggaactaagagctgctggaaaggatgtaataggtttaggtgctggagagcctgattttgatactccaaataacattaagagtgctgcaataaaagcgataaagtcaggagatacaaaatataccgctgttgatggaacgcccgcacttaaaaaagcaattattaaaaaatttaaaaaagaaaataatctttcatataatacaaatcaaataaccgttggaactggtggaaaacaagttttatacaatgcattcatggcaactctcaacaagggagatgaagtaattattccagctccatactgggtttcatatccagacatggttctactagcaggtggaaaacctaaatttgtaaaatgcgatgaaaaagatggatttaagctcacaccacaaaaattaaaaaaggctatttcgaaaaagactaaatggctaattcttaactcaccttcaaatccaactggctctgggtatactaaaaacgaaatattaaaattatcaaaaattcttttacgaaataaaaaaatttttattttaagtgatgatatatacgagcatgttcgatatgataattttaaattttttacaattgctcaaattcctaaacttaaaaatagggttttaacaatgaacggtgttagcaaatcatacgctatgacaggttggagaattggatatgcagcgggcccagtagaaataattaatgctattagaaaaattcaatcgcaatcaacctcaaatccatcctcaataagtcaggccgcatctgttgaagcactaaatggaactcaaaaatttataagaactagggcaaaatcttttaaagagcgaagagattttgttgtaaaatctttaaattccataaaaggtataaattgcttaaaaccaaatggtgcgttttatgtatttccaaattgtaaaaaactattaggaaaaaaaaataatttaaaaaaagatagtgattttgttaaaaaattattggaaaaagcaaatgttgctgttgttcaaggatcagcgtttggtttagacggatattttagaatttcatatgccacatcaatgaaaaatttaaaagttgctttaaaaagaattaaagacttttgtgaaaaattaaattaa

SEQ ID NO: 245702 - DNA, 1144 bp, Unknown
  Bacterial polypeptide expressing nucleotide sequence isolated from the Sargasso Sea
atgaataatccaatatctgaaagagttagaaaggttaaaccttcagcaactattgcaatttcatctaaagcaatggaaatgagatctgctggaataaatgtaatcagcatgagtgctggtgaaccagattttgatacacctcaacatatcaaggatgccgcaaaggcagcaatggataatgggatgacaaaatatacccaggtggatggtgtcccagacttaaaagaagccattattaaaaaattcagtaatgacaacgaactgagttataaacctgaaaacattcttgtttcttcaggagccaaacaaactctatataatctttttcaagccatcctaggagatggtgatgaggtaatcataatcagcccatactgggtctcatatcctgatatggttcttttggctgatgctaagccagtatttgtagatacatttcaagaaaataacttctcgttagatttaaatgcattttcaaatgcaatcaatgagaaaacaaagctagtgatcataaactctccatcaaatccaactggaataactttcactaggtctgactatgaatccattggtgctatattagaaaattaccccaacgtatatgttgcaactgatgatatgtatgaatatatctattggggagacgaaccatttgtttcttttgctcaagcatgtcctgcattatttgatagaaccataacgatcaatggtgtgtcaaaatcatatgcaatgaccggttggagaattggctattgtggtggacctactgatgttattggcgcaatgaaaaaagttcaaagccaaagtacttcaaatccatcttccgtctcacaagctgcagctattgctgcactcaatggtccaaaagatgaggtctttgagatggttgagcagtataagattcggcatgactatttttgctcagcactcaatgctattgaaggttttaaaacaactccgggaacaggtgcattttatttatttccagatgttaaaaatgtcattgagaaaaaaggcttttcaggtgatgtggaattatccgaatatttaattgaaactgcgaatgttgccgtagttcctggaagtgcttttggttcaattggttacattcgattatcttatgcaactggtctgagcagataaa

SEQ ID NO: 245703 - DNA, 1189 bp, Unknown
  Bacterial polypeptide expressing nucleotide sequence isolated from the Sargasso Sea
aatgagcataatatcagatagtttaaaaaggattaaaccatcacctactattgctgttactcaaaaagctagagaattaagagcagcaggcaaagatgtaatagggctaggtgcaggtgagccagattttgacacaccaaataatattaagaatgctgctataaaagctattagtagaggtgataccaaatatacagcagttgacggaactccagctttaaaaaaagcaataattaaaaagtttaaaaaagaaaataatttaaagtattcaaatgaggaaataactgtaggaacaggcggtaaacaagttctttacaatgcattcatggcaacattaaacagaggagacgaagtaattattccagcacctttttgggtttcttatcctgatatggttctattagctggtggtaaaccaaaaattgttaaatgtaatgaatcagaaaattttaaattaacaccacaaaaattaaagaaagcaatttctaaaaaaacaaaatggttaatattaaactcaccatcaaatcctacaggtgtaagttatacaaaagcagagataaaaaaattgtctcaagtattaattaaatataagaaaattcaaattttaagtgatgatatctatgagcatattacatatgataaagctaagtttttcaccatcgctcaaatatctaatttgaaaaatagaactcttaccatgaacggtgtaagtaaatcttatgctatgacaggatggagaataggttatgcaggaggaccaaaagatataattaaagctattcgtaaagtccaatctcaatcaacatcgaatccttcttctgtaagccaagcagctgcagttgaagctttaaatggaactcagaaatttataaaaactagatctaaggaatttaaaaaaagaagagactttgttgttaatagcttaaataaaattaaagggattaattgcttaacacctaatggagcattttatgtatttccaagttgcaaaggtcttttgaataaaaaaactaaattaaaaaaagatactgattttgttcaaaagttactcgaaaaagcaaatgtagcagttgtgcaaggctcagcttttggattagaaggttactttagaatttcatatgcaacctcaatgaaaaatttaaaaaaagctatggaaagaattaaatctttttgtgaaagcttaagttaa

SEQ ID NO: 245704 - DNA, 1189 bp, Unknown
  Bacterial polypeptide expressing nucleotide sequence isolated from the Sargasso Sea
aatgagcatagtttccaatagtttaaaacgtataaaaccgtcgcctacaatagcagttacctcaaaagctagggaaatgagagctgctggaaaggatgttattggtttaggggctggggagcccgattttgatactccagacaatattaaagaagcggcaatagaggcgattaaaaaaggggatacaaaatatacagcagtggatggaactccagctttaaaaaaagctatccaagcaaaattttctagagaaaatcatttatcatatgagcttgatcaaatttctgttggaactggtggaaagcaagttttatataatgcttttatggcaaccattaataaaggcgatgaggtcattattccagcaccttattgggtttcttaccctgacattgttttgttagctgggggaaaacctaaaataataaagtgtgatgaaaaaagtaattttaaattaacaccagaaaaattaaaaaaagtagtttcaaagaaaacaaagtggataattataaactcgccatcaaaccctacaggctcaggttataccaaagatgagattatagctttatcgaagattttaatgaaatataaaaatttatatattttaagcgacgatatttatgaacatattacttatgatggttttaaattttttacaattgcgcaaattgaaaaattaaaaagcagaactttaactatgaatggagtgagtaaatcttactcaatgactggttggagaataggttatgctgcaggtccaaaggaaataattaaagcgatggctaaaattcaatcccaatcaacaagtaatcctacatccataagccaagcagctgcagtcgaggctttaaatggaacacaagactttatttcagaaagatcgaattcttttaaagaaagaagaaattttgttgttgatagtttaaataatataaaaggtataagctgtttaagtcctgaaggggctttttatgtttttccaaactgtaaaaagctacttaacaaaaaaacaaaacttaaaactgataaagattttgtagaaaaactgttagaaaaagctgaggtagctgtggttcaaggttctgcctttggtttagatggttactttaggatatcttatgctacttcaatggaaaatttgaaaaaagcaatgaagagaattaaaactttttgcgatagccttaactag

SEQ ID NO: 245705 - DNA, 1183 bp, Unknown
  Bacterial polypeptide expressing nucleotide sequence isolated from the Sargasso Sea
atgaataatccaatatctgaaagagttagaaaggtcaaaccttcagcaactattgcaatctcatcgaaagcaatggaaatgagatctgctggaataaatgtcatcagcatgagtgctggtgagccagattttgatacacctcaacatatcaaggatgccgcaaaggcagcaatggataatgggatgacaaaatatacccaggtggatggtactccagaattgaaaaaagccatcatcaaaaaattcagcgatgacaatgatctgagttatcagcctgaaaatattcttgtttcgacaggagccaagcaaactctatacaatctttttcaagccatcttaggtgatggagatgaagtcatcataatcagtccatattgggtctcatatcctgacatggttcttttagcagatgcaaaaccagtatttgtagatacttttcaagaaaataacttctcgttagatttaaatgcattttccaatgcaatcaatgagaaaacaaaacttgtgatcattaactctccatctaacccaactggaataactttcactagatcagactacgagtctattggtgctgtattagataattatcccaacgcatatgttgcaactgatgatatgtatgaatatatctattggggtgaagaaccatttgtttcttttgcacaagcatgtcctgcattatttgaccgaaccataacaatcaatggtgtctcaaaatcatatgcaatgaccggttggagaattggctattgtggtggacctactgatgttattggcgcaatgaaaaaagttcaaagtcaaagtacatctaacccttcatctatttcacaggctgcgaccattgcagctctaaatggctctaaggatgaaatttatacaatggttgaacagtataagattcgacatgactatttgtgctcagcactcaatgcaattgaaggttttaaaacttcaccaggaacaggtgcattttatttatttccagacgttaaaaatgtcattgagaaaaaaggcttctctgatgatgtggaattatctgagtatttaattgaaagtgctaatgtagctgtcgttcctggaagcgcttttggttcaaaaggatacattcgactatcttatgcaactagtcttgataacattaaggaagctgtggaaaggatatctaaatcattgtcttaat

SEQ ID NO: 245706 - DNA, 1066 bp, Unknown
  Bacterial polypeptide expressing nucleotide sequence isolated from the Sargasso Sea
atgaaaaatccaatatctgaaagagtcagaaaggtcaaaccttcggcaactattgctatctcatcaaaagcaatggaaatgagatcagctggagtagacgtcataagcatgagtgcaggtgaacctgatttcgatacacctgaatacataaaggatgctgcaaaaatggctatggatagcgggatgactaaatatacacaagtagatggcctaccagatttaaaacaagccattattaataaattcagtgaagataatcaattaatttatgaccctgaaaatatccttgtttcaactggagcaaagcaaacactatataatctttttcaagccattttagggccgggtgatgaggtcatcattattagcccatactgggtatcctatccagatatggttctgttagcagatgcaaaacctgtaattgtagacacttttcaagaaaataacttcgcgatggatataggtgcatttgcagatgctatcaatgataaaaccaaacttgtcatcattaattccccatcaaatcctactgggattaccttcagcagagctgattatgaatcaattggcgctatattggagaatcatccaaatgtatatgtggcaacagacgacatgtatgaatacatctattggggcgatgaaccttttgtttcgtttgctcaagcttgcccatcactgtttgatcgaactataacgataaatggcgtctctaaatcttatgcaatgactggatggagaatcggttattgtggaggacctgctgatgtgattggtggtatgaaaaaagttcaaagtcaaagcacttcgaacgcatcatcaatttcccaagtagcaactatcgcagctctaagtggtcccagagatgaaattaatgccatggttgagcaatataagttaaggcacgattatctgtgcaaagctctcaacaatataaatggctttaaaacctctccaggaacaggcgctttttatttatttcctgatgtaaaggatgtaattgaaaaaaaaggattctcagatgatgttgacctgtctcaataccttatcgaagaagctaatg

SEQ ID NO: 245707 - DNA, 1143 bp, Unknown
  Bacterial polypeptide expressing nucleotide sequence isolated from the Sargasso Sea
aatgagcataatatcggacaatttaaaaaggattaaaccatcaccaactttagctgttactcaaaaagctagagaattgagagcagcagggaaagatgtgattggactaggagcaggagagccagatttcgatacaccaaataatattaagaatgcagccataaaagcaattagggcaggtgataccaaatatacagcagttgatggaacgccagccttaaaaaaagcaataattagaaaatttaaaaaagaaaataatttgaggtactcaaacgaggaaataaccgtaggaacaggtggtaagcaagttctttataatgcattcatggcaaccctaaatagaggagatgaagtaattattccagcacctttttgggtttcatatcctgatatggttttgctcgcaggtggtaaaccaaaaattgttaaatgtaatgagtcagataattttaaattaacaccacaaaaattaaggagagcaatttctaaaaaaacaaaatggctaatattaaattcaccatcaaatcctacaggtgcaagttatacaaaaacagagataaaaaaattatctcaagtattaattaaatataaaaaaattcaaattttaagtgatgatatttatgagcatatcacatatgataaagataagtttttcacaatcgctcaaatacccagtttaaaaaacagaactcttaccatgaatggcgtgagtaaatcttatgctatgacaggatggagaataggttatgcgggaggaccaaaagaaataattaaagcaattcgtaaagttcaatctcaatcaacttcaaatccatcttcagtaagtcaagcagcagccgttgaagctttaaatggaactcaaaattttataaaagtaagatcaaaagagtttaaaaaaagaagagattttgtagtaagtagtttaaacaaaataaaaggaattaattgcttaactcctaatggtgctttttatgtctttccaagttgcaaaaaattattaggtaaaaaaacaaaaataaaaacagatagtgaatttgttgaaaagcttttagaaaaggcaaatgtagctgtcgttcaaggatcagcttttggtttaactggttattttagaatttcttatgccacatcaatgcaaaaagtaaa

SEQ ID NO: 245708 - DNA, 1204 bp, Unknown
  Bacterial polypeptide expressing nucleotide sequence isolated from the Sargasso Sea
atgaaataccaagctgatagattgaaaagaataaatccttctatgacggttgcaattaatgttaaagccaacgcgctaagatctgctggaaaagatgttttggtacttgcagcaggagaacctgattttgatacacctgaaaatattaggaatgcagcaaaaaaatcattagatgatggaaaaactagatatgtaccaggaaaaggaactaaggatttacaagaagctataattaacaaatttaaaagagataataacatttcttattctagtgaagagatcatggttggagtaggaggtaagcatataatttacaatgcaatgatggcttcactcaatcctggtgatgaagttattattccagcacctttttgggtaagctatcctgacatagtattattagctgaagggaaaccagtaattgttgaatgtaatatagatcaaaattttaaaattaccccatctcaacttgagaataatataacaaataaaactaagtggttaatgctaaatagccctagtaatccaacaggttctatttattcaagacaagaacttaaattattgagtgaagttttacttagatttccaaatgtattagttcttaccgatgatatttatgaaaaaattatttatgaaaaagatagtttttccactttggctgaaattgaacccaaactaaaaaatagaattttgactcttaacggagtttcaaaagcttattgtatgacaggatggagattggggtattgtggaggacctaaggaaataatttcaggaatgaataaaattcaatctcaaagcactacttcaacatcttctataactatggctgcgtctgtcgaagcattaaatggaaatcaagattttatagaaaaaaacaatattgagtttaaaaaaagaagagatcttgtcattgaaaaactaaataatatagatggaatttcatgcgagattcctgcaggagctttttatgtttatccaagttgtaaaggtataattggaaaaaaaaatcctaatggaggtctaattaatactgatgaagatttaatgaattatttgttagaaaaagagggtgttgctggagtacatggagcagcttttggtttatctcctttttttagattatcatacgcaacagatgaaaaaactttgattgatgcatgtgaaagaattaaaagagcttgtttagaacttaagtaag

SEQ ID NO: 245709 - DNA, 1123 bp, Unknown
  Bacterial polypeptide expressing nucleotide sequence isolated from the Sargasso Sea
gctagagaattaagagcggctggtaaagatgtaatagggctaggagcgggtgagccagattttgatacaccaaacaatattaagaatgcagctataaaagcaattaggggtggcgataccaaatatacagcggtagatggaactccagctttaaaaaaagcaataattgaaaagtttaaaaaagaaaataatttaaagtattcaaatgaagaaataactgtaggaacaggtggtaaacaagttctttacaatgcatttatggcaaccttaaatagaggagatgaagtaattattcctgctcctttttgggtttcttatcctgatatggttctattagcaggcggtaaaccaaaaattgttaaatgcaatgaaatggataattttaaattaactccagaaaaattaagaaaagctatttctaaaaaaacaaaatggttaatattaaattcaccatctaatcctacaggagcaagttatacaaaagtggagataaaaaaattatctcaagtattaattaagcataagaaaattcaaattttaagcgatgatatttatgagcatatcacatatgacaaggctaagtttttcactattgctcaaatatctagtttgaaaaatagaactcttactatgaacggtgtaagtaaatcttatgcaatgacaggatggagaataggttatgcgggaggaccaaaagaaataattaaagctattcgtaaagtccaatctcaatcaacatcaaatccttcttctgtaagccaagcagctgcagtcgaagccttaaatggaaatcagaaatttataaaaactagatctaaggaatttaaaaaaagaagagattttgttgttaagagcttaaataaaattaaaggaataagttgtttaacacctaatggagcgttttatgtatttccaagttgcaaagatcttttgaataaaaaaactaaattaaaaaaagatactgactttgttcaaaagctacttgagaaagcaaatgtagcagttgtacaaggctcagcttttggattagagggttactttagaatttcatatgcaacctcaatgaaaaatttaaaaaaagctatggaaagaattaaatctttctgtgaaagcttaaattaat

SEQ ID NO: 245710 - DNA, 1177 bp, Unknown
  Bacterial polypeptide expressing nucleotide sequence isolated from the Sargasso Sea
atggaactctcaaaaagaatttcaaatactaagttgtcagctaccatagctatgagcatgaaggcacgagaacttaaagcaaaaggtgcgcctataataactcttacggctggtgaacctgattttgatacacctgagcatatcaaaaatgctgccattattgcaatgaaagaaggtaatacaaaatacacacccgttgacggtatgccggcattaaaagatgcaataatttcaaaactaaaaaatgacaataatttagagtattcaagagatcagattattgtttccacaggttgtaagcagagtatatataatttatgtcaatcggttttaaatgagagtgatgaagttatagtacctgcgccatattgggtttcttatccagaaattataaaacttgctggtggtgtcccagttattttggagacagataaaacaaaaaactttaaattagattccgataagcttgaagaatctataaataatagaacaaagatgataattattaatagtccttctaatccttccggtgtagtttacgagaaatctgatttagaaagtatcgggaacatattaaaaaaatatccaaatattttagtggcatcagatgatatctacgaacatataattcttgaaaataaaaaattcattaatattcttgaagttcatccagatctttacgaaagaactgtcattcttaatggggtatcaaaagcatatgctatgactggttggagaattggttatacagcaggtagtcgtgaaattacaaatgcaatgaaaaagattcaatcacaaagtacatcttgtacatgctctatttctcaatctgctgcaattgctgcactatcacataaaactgatgaccttgcaaatatggttaaggaatataagaaacgctctaatttcttaattgatgcatttaaagatatcaatggatttgaatttaatagttgtgaaggttcattttatgcttttgtagacgtaagcaaagctattgagaaaactgataatataaaaaatgatattgatctatgtaactttcttttagaccgatgtaatgttgctgtagttcctgggagtgcatttggtatcgaaaactatattagaatatcttttgcgacaagtatgagtaatttagagaaggctgtagaaaatatcaaaaaagaattttaaa

SEQ ID NO: 245711 - DNA, 580 bp, Unknown
  Bacterial polypeptide expressing nucleotide sequence isolated from the Sargasso Sea
aatgagcatagtttccaatagtttaaagcgaattaaaccctcaccaaccatagctgttacctcaaaagcaagagaaatgagggcagccggcaaagacgttattggtcttggtgccggagaacctgattttgatacccccgacaacattaaagaggcagctatagaggctataaaaaaaggtgataccaaatatacagctgttgatggaactccaaaattaaaaaaagctatccagggaaagtttaaaagagaaaacaatttatcttacgaacttgatcaaatttctgttggaactggaggtaaacaagttctttataatgtgttcatggcaacactcaatccgggagatgaagtcataatcccagcaccttactgggtatcttatcctgatatggttttattagctggcggaacacccaaaatagttaagtgttcagaagaaaatgaatttaaaataaccccaacagaattaaaaaaagcaattggaaaaaaaacgaagtggctgattataaattcaccttcaaatcctaccggctcatgttacacaaaaaaagaaattgaagaattatcaaaaatataa

SEQ ID NO: 245712 - DNA, 886 bp, Unknown
  Bacterial polypeptide expressing nucleotide sequence isolated from the Sargasso Sea
aatgagcatagtttccaactctttaaaaagaattaaaccatcacctactatagcggtgagccaaaaagctagagaattaaaggccgcaggtaaagatgttatagggctaggagcaggagagccagattttgatacaccagaaaatatcaaacaagctgcagttggtgcaattaataggggcgacacaaaatatacagctgttgacggaactccagatttaaaaaaggcgatagtaaataaatttaaaagagaaaatagtttagaatattctactaaagagatcacagttgggaccggaggaaaacaggtaatctataatgcctttatggctacattaaacaaaggtgatgaagtaattatacctgcgccgtattgggtgtcttacccagatatggttttgttagctggaggaaatccaaaaattgtaaagtgcaatgagaatgatggttttaaactaaatccaaaaaatctaaaaaaagctattacaaaaaaaacaaaatggttaatacttaattctccatcaaatcctactggagcttcatacacaaaagaagagattgaagcattatctgaagttttaattaaaaataaaaatgttcatattttaagtgatgatatttacgaacacattacttatgataattttaacttttttacaattgcgcaagtctcaaaattaaaaaacagaacacttacgatgaatggagtaagtaaatcttatgcgatgacaggctggagaattggttatgcggctggtcctaaagaaataataaaggcaattagtaaaattcaatctcaatcaacttctaacccttcgtctattagccaggccgctgcagtagaagccttaaatggtactcaagattttatcaaagaaagagcaaat

SEQ ID NO: 245713 - DNA, 1189 bp, Unknown
  Bacterial polypeptide expressing nucleotide sequence isolated from the Sargasso Sea
aatgagcatagtttccaactctttaaaaagaattaaaccatcacctacaatagcggtgagccaaaaagctagagaattaaaggccgcaggtaaagacgtaattggtttaggtgctggagaacccgattttgacacaccagaaaatattaaacaagctgcaattgatgcaattaataggggcgacacaaaatatacagctgttgatggaactccagatttaaaaaaggcaatagtaaataaatttaaaagagaaaataatttagaatattctaccaatgagatcacagttggaactggaggaaagcaggtaatctataatgcccttatggctacattaaacaaaggtgatgaagtaatcatacctgccccgtattgggtatcttacccggatatggttttgttagctggaggaaatccaaaaattgttaagtgcaatgaaaatgatggttttaaactaactccaaaaaatctaaaaaaagctattacaaaaaaaacaaaatggttaatacttaactctccatcaaatcctacaggagcttcatacacaaaagaagagatcgaagcattgtctgaagttttaattaaaaataaaaatgttcatattttaagtgatgatatttatgaacacattacttatgataattttaatttttttacgattgcgcaagtgtcaaaattaaaaaacagaacacttacgatgaatggggtaagtaaatcctatgcgatgacaggttggagaattggttatgcggctggtcctaaagaaataataaaggcaattagtaaaattcaatctcaatcaacatctaacccttcgtctattagccaagccgctgcagttgaagccttgaatggtactcaagattttatccaagaaagatcaaatgcttttaaagaaagaagagactttgtagttaacagcttaaataatattaaaggtattagctgtttgaaaccaagcggagccttttatgtatttccaagctgcaaaaaattattaggaaaaaagacaaaactaaaaacagacaaagactttgtagagaaattacttgaggaagctttagtagccgtagttcaaggatcagcatttggtctaaatggatattttagaatttcttatgccacttcaatggataatcttaaaaaagctttagaaagaataaaatctttttgtgaaagtttaaactaa

SEQ ID NO: 245714 - DNA, 743 bp, Unknown
  Bacterial polypeptide expressing nucleotide sequence isolated from the Sargasso Sea
aatgagcatagtttccaatagtttaaagcgaattaaaccctccccaaccatagcggttacctcaaaagctagagaaatgagggcagctggcaaagatgttattggcctaggagctggagaacctgattttgacactccagataacattaaagatgctgctatcgaagcaataaaaagaggagaaacaaagtacacagctgtcgatggtacacctaaacttaaaaaggctattcaagggaaatttacaagagaaaataatttatcttacgaattagatcaaatttcggttggtacgggaggaaaacaagttttatataacgtatttatggcaaccctaaatccaggagacgaagtcattatcccagcaccttattgggtatcttatcctgatatggttttattagctggtggtaaacccaaaatagtaaagtgctcagaaaaaaatgaattcaaaataacaccggatgaattaaaaaaagctattggaaaaaaaactaaatggttaattataaactcaccgtctaatccaacaggatcttgttacacaaggaatgagatagaagaattatcaaaaatattaataaaaaataaaaatgtttatatacttagtgacgatatctatgagcatattacatatgatgattttaaatttttcaccattgcccaaattaaagctttaaaagacagaacattgacaatgaacggtgtaagtaaatcttactctatgactggatggagaatag

SEQ ID NO: 245715 - DNA, 1012 bp, Unknown
  Bacterial polypeptide expressing nucleotide sequence isolated from the Sargasso Sea
gtacctggaaagggtacgcctgcattgcaaaatgcaattataaataaatttaaaaaagaaaataatctagaatattcaaatgatgaaataatggtaggtgttggtggaaaacatattatttataatgctatgatggcaacacttaatctaggggatgaggtgataattcctgcaccatattgggtaagttatccagatatagttttattagctgaaggaaaaccagttattgtaaagtgtagtgaaaaaaatgattttaagttaactccctatgatcttgaaaaatatataacgccaaaaactaaatggctttttttaaatagtcccagtaacccaactggttcagtatattctaaagaagaacttatgaatttaggacaagtacttcttaaacatcctcatatctatattttaactgatgatatttatgaaaaaattatttatgacaaacaaaaatttaatacaattgctgaaactgtccctgagctcaagaatcgaactttaactttaaatggtgtctcaaaagcttattgtatgactggttggagattgggttattgtggtgctccaaaagaaataatatcaggaatgaataagattcaatctcaaagtaattcttcaacttcgtctattagcatggctgcatctgtagaagctcttcaaggcaatcaagattttatagaaaaacataacattgcttttaaaaaaagaagagacttagttgttgaaaaattaaattctattgatggcatctcttgtggaattcctcccggtgcattttatgtatatccaaattgtgaaggtattattggcagaaaaacacctgatggaataatattagattctgatgaaaaatttatgaactatcttcttgaaagtaggggagttgctggagtgcaaggagaagcttttggcttatcaccatactttcgtctttcatatgctacgagtgagaaaattttaatagaagcttgccacagaattgatgaagcttgtaaacttcttaagtaag

SEQ ID NO: 245716 - DNA, 1060 bp, Unknown
  Bacterial polypeptide expressing nucleotide sequence isolated from the Sargasso Sea
atagggttaggtgctggagagccagattttgacaccccagataatattaaagaggccgctatagaagctatcaaaaaaggtgataccaagtatacggcagttgatggaactccagaattaaaaaaagcaattgttgaaaagtttaaaagagagaataatttaatttatacaactgaccaaattacagtcggaaccgggggcaaacaagttatatacaacaccttcatggcaacgttgaataaaggagacgaagtaattatacctgcacctttttgggtttcttaccctgatatggttttgttagctggtggtacacctaagattataaagtgtgaggaaaaagatggctttaaactttcagcaaaaaaattagaaaaagcaatatctaaaaaaacaaaatggcttattttgaactctccatctaatccgactggagcaggatatacaaaaaaagaaatagaagatttatcaaaagtattacttaaacataaaaaaatttttattttaagtgacgacatttatgaacatattagatacgaaggttttaatttttttacaattgctcaaatttcgaaactcaaagagagaactttgaccatgaatggagtaagcaagtcttacgccatgacaggttggagaattggttatgcggcaggccctaaagaaataattaatgcaattagaaagatacaatctcaatctacttcaaatccttcatctattagccaggcagcagcagttgaggcattaaatgggcaacaaaattttattaaagaaagagcagaagcctttaaagagagaagagattttgttgtaagtagtttaaataatataaaagggatcaattgtttaattccaaacggagctttttatgtttttccaagttgtaaggcgctcttaaataaaaaaactaaacttaaaactgacactgaatttgttcaaaaattattagaaaaatctatggtcgctgtagttcaaggatcagcctttggattagatggctattttagaatatcatatgcaacctctatggagaatttaaaaaaagctataacaagaa

SEQ ID NO: 245717 - DNA, 1189 bp, Unknown
  Bacterial polypeptide expressing nucleotide sequence isolated from the Sargasso Sea
atgagcataatatctaataatttaaaaagaattaaaccatctccaactattgcagttactcaaaaggcaagagaattaagagctgcaggaaaagatgtagttggacttggggcaggggaaccagatttcgatactcctatcaatgttaaaaatgcagccataagagcaataagagacggagatacaaagtatactgcagttgatggaactccagcattaaaaaaagcaattttaaaaaaatttaaaagagaaaacaaattaaattataaactagacgaaatcacagttggaactggcgggaagcaagttctctataacacttttatggcaactttaaataaaggagacgaagttattattcctgcgccattctgggtttcatatccagatatggttctcctatcaggaggaaaaccaaaaatagtaaaatgtgatgaaaaagatggatttaaaattacacctgcaaaattaaaagccgcaattacaaaaagaacgaaatggataatccttaattctccatctaatccaactggatctggatacagcaaatcagaaattcaaaaattagcaaaggttttaataaaaaacaaaaaagttcacattttgagcgatgatatttatgagcatgttaaatatgataattttaaattttttactattgctcaaatttcaaaattaaaatctcgaacattaacaatgaatggagtgagcaaatcttatgcaatgactggttggagaattggttatgcagctggaccaaaagaaataatttctgcaattagaaaaattcaatctcagtctacttcgaatccatcatcaattagtcaagcagcagctgttgaagctttgaatggaaaacaagactttattaagaaaagagcaaaatcatttaaggaaagaagagattttgttgtaaaaagtttaaataatattgatggtattagctgtttaaaacctaatggtgcattttacgtatttccgaattgtaaaaaacttttaaataaaagaactaaacttaaaaaagatactgattttgtccaaaagcttttagaaaaacaaaatgttgccgctgttcagggctcagcatttggtttagatggatattttagaatttcatatgcaacttcaatggcaaaacttaaaatagcaatgtctagaattaaaaagttttgtgaggatttaggataaa

SEQ ID NO: 245718 - DNA, 1189 bp, Unknown
  Bacterial polypeptide expressing nucleotide sequence isolated from the Sargasso Sea
aatgagcataatatctgacagtttaaagagaataaaaccctcaccaactatagctgtttctcaaaaagccagagaattaaaagctgctggaaaagatgtgataggattaggagctggcgagccagattttgatacacctaataatatcaaaaatgcagccataaaagctattaggggaggcgatacaaaatatactgcggttgatggaactcctgcattaaaaaaagcgataattaaaaaatttaaaaaagaaaataacttaaagtactcagtagaagaaataacagttggaacaggtggtaagcaggttctgtataatgcttttatggccacattaaacaaaggcgatgaagtaattataccagcgcctttttgggtttcatatccagatatggtgcttttagcaggaggcaaaccaaaaatagtaaaatgcagcgagggtgagaattttaaattaactccagcaaaattaaaaaaagcaatttcaaaaaaaacaaaatggttaatactgaattcaccttcaaatcctacaggtgcaagttatacaaaaaaagagatagtaaaattatctaaaatattagctaaacataaaagaattcatattttaagcgatgatatttatgagcatatttcttatgaaaaatctaaatattttactattgcccaagtatctaatttaaaaaatagaacacttactatgaatggtgttagcaaatcttatgcaatgacaggatggagaataggatatgcaggtggtcctaaagaaattattaaagcaattagaaaagttcaatctcaatcaacctcaaacccttcatcaattagtcaagctgcggctgttgaagctttaaatggaacacaaagtttcataaaaactagatcaaaagaatttaaaaaaagaagagattttgtagttaagagtctaaataatataaaaggggtgaattgcttaactcctgatggcgctttttatgtatttccaagttgcaaaaaactattaaataaaaaaacaaaactaaaaacagactctgaatttgttgaaaagttgttagaaaaagcaaatgtagcagttgttcaaggatctgcatttggtttaccaggatactttagaatttcttatgctacatcaatgcaaaaattaaaagtagcaatggagagaataaaatccttttgtaataatttaaactaa

SEQ ID NO: 245719 - DNA, 1189 bp, Unknown
  Bacterial polypeptide expressing nucleotide sequence isolated from the Sargasso Sea
atgagcataatatcagatagtttaaaaaggattaaaccgtcacctactatagctgttactcaaaaagctagagaattaagagcggcaggaaaagatgtaattggactaggggcgggggaaccagattttgatacaccaaataatattaagaatgctgctataaaagccattagaggtggcgataccaaatatacaacagttgatggaacgccggctttgaaaaaagcaataatcaaaaaatttaaaaaagaaaataatttaaagtactcaaatgaggaaataactgtaggaacaggcggcaaacaagttctttacaatgcatttatggcaaccttaaatagaggagacgaagtaattattccagcacctttttgggtttcttatcctgatatggttttattggcaggcggtaaaccaaaaattgttaaatgcagcgagtcagataattttaaattaacaccaaaaaaattaaagaaagctatttctaaaaaaacaaagtggttaatattaaattcgccatcaaatcctactggtgcaagctacacaaaagcagagataaaaaaattatctcaagtgttaattaaaaataaaaaaattcaaattttaagtgatgatatctatgagcatatcacatacgacaaagataagtttttcactattgctcaaatatccagtttaaaaaatagaactcttactatgaatggtgtaagtaaatcttatgccatgactgggtggagaataggttatgctgggggaccaaaagaagtaattaaagctattcgtaaagttcaatctcaatcaacatcaaacccttcatctgtaagtcaagctgctgcggttgaagctttaaatggaactcaaaaatttataaaaataagatcaaaggaatttaaaaaaagaagagattttgttgttaagagcctgaacaaaattaaaggaattaaatgtttaatacctaatggagcattttacgtatttccaagttgcaaaggtcttttgaataaaaaaacgaaattaaaaaaagatactgattttgttcaaaagttacttgaaaaagcaaatgtagctgtagtacaaggctcagcttttggattggaaggctactttagaatttcttacgcaacctcaatgaaaaatttaaaaaaagctatggaaagaataaaatctttttgtgagagcttgagctaac

SEQ ID NO: 245720 - DNA, 772 bp, Unknown
  Bacterial polypeptide expressing nucleotide sequence isolated from the Sargasso Sea
aatgagcatagtttccaataatttaaagcgaattaaaccctcaccaaccatagcggttacctcaaaagcaagggaaatgagggcagctggtaaagatgtaataggtttaggagcaggtgagcctgattttgacactccagataacatcaaagatgctgctatcgaagcaattaaaagaggagaaacgaagtatacagctgtggatggtacacctaaacttaaaaaggcgatccaagggaaatttacaagagaaaacaatttgtcatacgaactagatcaaatttcggttggtacgggaggaaaacaagttttatataacgtttttatggcaaccctcaatccaggagacgaagtcattatcccagcaccttattgggtatcttatcctgatatggttttattagctggcggcaaacccaaaatagtaaagtgctcagaaaaaaatgaattcaaaataactccagatgaattaaaaaaagctattggaaaaaaaactaaatggttaattataaactcaccttcaaatccaactggatcttgttacacaaagaatgagatagaagaattatcaaaaatattaataaaaaataaaaatgtttatatacttagtgacgatatctatgagcatattacatatgatgattttaaatttttcactattgcccaaattaaagctttaaaagacagaacattaacaatgaatggtgtaagtaaatcgtactctatgactggatggagaatagggtatggagctggtccgaaagacataatt

SEQ ID NO: 245721 - DNA, 850 bp, Unknown
  Bacterial polypeptide expressing nucleotide sequence isolated from the Sargasso Sea
aatgagcataatatcagacagtttaaagaagattaaaccatcacctactattgctgttactcaaaaagcaagagaattaaaagctgctggaaaagatgttattggacttggtgcaggagaaccagattttgatactccagataatattaagcaagcagctataaaagctattaatgacggtgatactaaatacacagctgtagatggcactccagcattgaaaaaagcaatcgtagaaaaatttaaaaaagaaaataatttaaattattcaactgatcaaattacagttggtgctggtggaaagcatgtaatttataatgcgatgatggctacattaaacgaaggagatgaagttatagtacctgctccctattgggtctcttatcctgatatggttttattagcaggaggaaaaccagtaataatggaatgcaatgagaaacaaggttttaaaataaatccaaatgatcttgagaaatatataacaccaaaaacaaaatggattattcttaattcaccttcaaatccaaccggagcatgttattcagagcaagatataaaagcaattgcagatattttggaaaaacacaatgatgtgtatattttaagcgatgatatttatgagcatgtgacttatgagggttttaaattttttacaattgctcaaattgaaagtttaaaagatagagtgcttacaatgaatggtgtaagcaaagcttattcaatgacaggctggagaatagggtatgcagctggtccaaaagatatcgttaaagctattgctaaaattcaatcacaatcaacaaccaatccttcttctataagccaagccgctgcagttgaggcactt

SEQ ID NO: 245722 - DNA, 1189 bp, Unknown
  Bacterial polypeptide expressing nucleotide sequence isolated from the Sargasso Sea
aatgagcataatatcaaatagtttaaacaaaattaagccatccccgaccatcgctgtatctcaaaaggcaagggaattaagggctgctggcaaagatgttattggattgggtgctggagaaccagattttgatactcctaataatattaaaaatgctgcagttagagcaataagagcaggagagaccaaatatacagcagttgatggtactctagctcttaaaaaagcaatagtaaaaaaatttaaaaaagaaaataatttaaagtattcaatagatcaaattacagttggagcaggaggtaaacaagttctttataatgcttttatggcaactttaaataaaggtgatgaagttataatcccggcccctttttgggtttcatatccagatatggttttacttgcaggaggcaaacctaaaattgtaaaatgtgatgaaaaagatggatttaaaattaatgctaaaaatttaagaaaagctattacgaaaaaaactaaatggttaattttgaattctccttctaatcccactggcgcaggttatacaaaaaatgaaattaaaaaactttcaaaagttttaatcaaacataaaaaaattcatattttaagtgatgacatttatgagcatgtaaaatatgataattttaaattttatactattgctcaaataccaaaattaaaaaatagaacactgacaatgaatggtgtaagcaaatcctatgcaatgactggttggagaataggatatgctgcaggaccagagaatattattaaagcaataagaaaaattcaatctcaatctacttctaatccttcatcaattagtcaagctgcagcagttgaagcattaaatggaacccaaaagtttattaaaaaaagagctaactcatttaaagtaaggagaaactttgttgtaaatagtttaaatagcattgagggaattagttgtttaaagccaaatggagcattttatgtatttccaaattgtaagaaattactgggaaacaaaacaaaattaaaaactgatactgattttgttaaaaagcttttagaaaaatcaaatgttgcagtagtacaaggatcagcttttggtttggatggttattttagaatttcttacgcaacgtcaatgcaaaaacttaaaattgcaatgagtagaataaaatcattttgtgaaagtttaaactaa

SEQ ID NO: 245723 - DNA, 1189 bp, Unknown
  Bacterial polypeptide expressing nucleotide sequence isolated from the Sargasso Sea
aatgagcataatatcagacagtttaaagagaattaaaccatctcccacaatagctgtaactcaaaaggcaagagaattaaaagcagcaggaaaagacgtaattggtcttggtgcgggagagccagattttgatactccagataatattaaaaatgcagcgattaaagctattaaaaaaggagacactaaatatactgctgtagatggtaccccagcattaaaaaaagctgttattaaaaaattcaaaagagagaataaactgaatttttcaactgatcaaataacagtaggtactgggggcaagcaagttctctacaatgcttttatggcaactttaaataaaggtgatgaagttatcattccagcacctttttgggtttcttatccagatatggttttgttagctggaggaaaaccaaaaataattaaatgtacagagcaagagggttttaaacttacagcaaaaaaacttaaaaaagcaatttcaaaaaaaacaaaatgggtaatcttaaactcaccatctaatccgacaggagcaggatatactaaaaaagaaattcaagatttagcaaaggttctaattagatataaaaaagtatatatcttaagtgatgatatttatgaacatgttagatatgataattttaattttttcacaatagctcaactttcaaaacttaaagatagaacattaacaatgaacggtgttagtaaatcttatgcaatgacagggtggagaataggttatgcagcaggtccaaaagatataattaaagcaattggaaaaattcaatcacaatcaacctcaaacccctcttccataagtcaagcagctgctgttgaagcattaaatggaaaacaggattttattaaaaagagatctgacgcatttaaacaaagaagagattttgttgtaaaaagtttaaacaatatcaaaggaattagttgcctaaaaccaaatggagcattttacgtttttccaagctgtaaaggtctattaaataaaaaaacaaaattaaaaactgatacagattttgttcaaaagttgcttgaaaagtctaatgttgcagttgttcagggatcggcatttggcctagatggatattttagaatttcttatgcaacttcaatgaaaaacttaaaaaaagctatgaatagaattaaacttttttgtgaaagtttagaataa

SEQ ID NO: 245724 - DNA, 1000 bp, Unknown
  Bacterial polypeptide expressing nucleotide sequence isolated from the Sargasso Sea
aatgagcataatatcagacagtttaaaaagaattaaaccatcaccaactattgctgttactcaaaaagcaagagaacttagggcagctgggaaagatgtgattggtttgggagctggtgagccagatttcgacaccccagacaatattaaagatgcagctattcaagctatcaaaaatggagatacaaagtatacagcagttgatggaacccctgccttaaagaaagctattgttgaaaaatttaaaagagagaaccaattagatttcaatactgaccaaatcactgttggcactggtggaaagcaagttctttataatgctctcatggcaactttaaataaaggtgatgaagtaataattcctgcacctttttgggtctcatatcctgacatggttttattagctggaggtaaaccaaaaattgtaaaatgtgatgaaaaagatagttttaaacttacagctaaaaaacttcaaaaagcaatctcaaaaaaaaccaaatggttaattttgaactcaccatcaaatccaactggagcaggttatacaaaaaatgaaattgaagacttggccaaagtattaatgaaaaacaaaaaagtctatattttaagtgatgatatctatgaacatatcaaatatgataattttaatttttttacaattgctcaaatatccaaattaaaagatagaacattaacaatgaatggagtaagtaaatcatatgcaatgacagggtggagaattggttatgcagctggtccaaaagatataattaaagctattggtaaaattcaatctcaatcaacttcaaatccttcttctgtaagtcaagcagcagctgttgaagctctaaatggatcacaagattttattcaagaaagatctgatgcatttaaacggagaagagatttcgttgtaaaaagtttaaataatattaaaggaataaattgcttaatgccccaatggagctttttatgtattcccaagctgcaaaggcttgta

SEQ ID NO: 245725 - DNA, 1189 bp, Unknown
  Bacterial polypeptide expressing nucleotide sequence isolated from the Sargasso Sea
atgagcatagtttccaactctttaaaaagaattaaaccatcacctacaatagcggtgagccaaaaagctagggaattaaaggccgcaggcaaagatgtaatagggctaggggcgggagagccagattttgacactcctgacaatattaaaaaagctgctatcgaagcaattaatagaggagaaacgaaatatacagctgtagatggaactccggctttaaaaaaagcaatagttaacaaatttaaaagagaaaataatcttgaatattctgcagaggaaatcacagttggaactgggggaaaacaagtaatttataatgcatttatggccaccctaaacaaaggtgacgaagtaattataccagctcctttttgggtgtcttatccagatatggttttgttagctgggggaaatccaaaaatcgttaagtgtaatgagaacgatggtttcaaactaacaccaaaaaatttaaaaaaagctattacaaaaaaaacaaaatggttaatacttaattctccatcaaatcctactggagctgcatacacaaaagaagagatagaagcattatctgaagttttaattaaaaataaaaatgttcatattttaagtgatgatatttacgaacacattacttatgataattttaatttttttacgattgcgcaagtctcaaaattaaaaaacagaacacttacgatgaatggggtaagtaaatcctatgcgatgacaggctggagaattggttatgcggctggccctaaagaaataataaaggcaattagtaaaattcaatctcaatcaacttctaacccttcgtctattagtcaggccgctgcagttgaagccttgaatggtactcaagattttatcaaagaaagagcaaatgcttttaaagaaagaagagactttgtagttaatagcttaaataatattaaaggtattagctgcttgaaaccaagcggagccttttatgtatttccaagttgcaaaaaattattaggaaaaaagacaaaactaaaaacagataaagactttgtggagaaattacttgaggaagccttagtagccgtagtccaaggatcagcatttggtctagatggatattttagaatttcctatgccacttcaatggataatcttaaaaaagctttagagagaataaaatctttttgtgaaagtttaaactaat

SEQ ID NO: 245726 - DNA, 1114 bp, Unknown
  Bacterial polypeptide expressing nucleotide sequence isolated from the Sargasso Sea
taagagctgcaggaaaagatgtatttgtttaggagctggagaaccagattttgatactcctgataatattaaaagcgctgcaataaaagctataaaaaaaggagatacaaagtataccgccgtagatggaactccagctttaaaaaaagctattgttgcaaaatttaaaagagaaaataaattaaactactccgttgatcaaataactgttggcacagggggtaaacaggttctttacaatgcctttatggcaaccttaaacaaaggagatgaagtaattatcccagctcctttttgggtttcttatcctgatatggttttgttagctggaggtaaacctaaaattgtaaaatgcactgaacaagaaggttttaagcttacggcaaaaaaattaaaaaaagctatttcaaaaaaaactaaatgggtcattattaattcaccttcaaatccaacaggtgcaggctattcaaaaaaagaaatccaagatttagcgaaggttttaattaataataaaaaaatacatatcttaagtgatgatatttacgagcacgttcgatatgataattttaatttttttacaatagcgcaaatttcaaaactaaaagatagaacacttaccatgaatggtgtcagtaaatcatatgcgatgacaggctggagaataggttatgcagctggcccaaaagatatcattaaagctattggtaaaattcaatcacaatctacatcaaatccttcttcaataagtcaagcagcagcagtcgaggctttaaatggaaaacaaggctttataaaaaccagagctaacgctttcaaagcaagacgagattttgttgtaaaaagtttaaatagcatcaaaggagtcaattgtttaacacctaatggagcattttatgtatttccaagttgtaaaggtttattgaataaaaagacaagattaaaaactgatagtaactttgttcaaaagttacttgaaaaagaaaacgtagcagttgttcaaggatctgcttttggattagatggatattttagaatttcttatgcaacttcgatgcaaaacttaaaaaaagctatgactagaataaaatctttttgtgaaagtataactagatag

SEQ ID NO: 245727 - DNA, 487 bp, Unknown
  Bacterial polypeptide expressing nucleotide sequence isolated from the Sargasso Sea
atgagcatagtttccaatagtttaaagcgaataaaaccgtcaccaactatagctgttacctcaaaagccagggaaatgaaggctgctggtaagaatgtaattgggttaggagcgggggagcctgattttgatactcctgataacataaaagaagcagcaattcaggcaattaaaaacggagaaacaaaatacactgcagtagatggaacaccaaaacttaaacaagctattaaagaaaagtttttaagagagaataatttaaattatgatttagatcaaatatctgttggcacaggaggtaagcaagttctttataatgcttttatggcaacattaaatccaggtgacgaggtaattattccggctccttattgggtgtcttatccagatatggttttattggctgggggaaaacctagaattattaaatgttctgaaaaaatgaatttaaaattacttcaaaagagcttaaaaagcaataaataaa

SEQ ID NO: 245728 - DNA, 1174 bp, Unknown
  Bacterial polypeptide expressing nucleotide sequence isolated from the Sargasso Sea
gcgaattaaaccatcacccactattgctgttactcaaaaagctagagaattaagagcagcaggaaaagatgttataggccttggagcaggagagccagattttgataccccagaccatattaaggaggccgcaataaaagccattaaagatggagatactaaatatacagcagttgatggaactccagttttaaaaaaagcaatagtagaaaaatttaaaagagaaaataatttaaattacacaaccgaccaaattacagtaggagcgggtggcaaacatgtaatttataatttaatgatggccacattaaataaaggagacgaggtaattattcccgcgccttattgggtatcttatcctgacatagtattattagcaggtgcaaatcccatagttatagaatgctcagaggaacaaggttttaaattaaccgcaaaagatttagagagtgcaataactaacaatacaaagtggataatattaaattcaccatcgaaccctacaggcgcctgttatacagagcaagagattaaaaatttagcccaagtattaagaagaaaaccacatgtaaatgttctgagcgacgatatttatgagcatgttacttacgaaggatttaaattttttacaattgctcaaataccagaattaaaaaataaagtagtaactatgaatggcgtaagtaaatcatatgctatgactggttggagaataggttatgctgctggagataaagaagtaataaaagcaatagctaaaattcaatcgcaatcaactacaaatccgtcatctattagccaagctgctgctgtagaagcactaaatggaactcaagattttattcccatcagatctttagcatttcaagagagaagggactttgttgtaaattccttgaatgcaataaatggaattaattgtttaaaacctgatggagctttttatgtttttccaagctgcaaaggtttaattggtaaaaaagataaaaatggaaaaaaattagaaaacgatactgactttgttcagtctcttttagaaaacaataatgttgctgtagttcaaggatctgcttttggattagagggtttttttagaatatcttatgctacatctatggaaaatctagaaaaagcaatgagtagaattaaagaattttgtgaaagcttgagttaa

SEQ ID NO: 245729 - DNA, 1189 bp, Unknown
  Bacterial polypeptide expressing nucleotide sequence isolated from the Sargasso Sea
taatatagaaaatattccaccttcagcgacaatgctaatgacacaacttgctagagatttaaaggcagaaggtaaaaatataataagcatgagcgctggggaacctgattttgatacacccaaaactatcaaagaagctgctatagatgccattaataggggtgaaactaaatatacagcagttgatggaattgatgaccttaaacaagcagtaatagataaatttaaaaacgataataatctagattatgaaaaaggtaatatttctgttgccccaggaggaaaatcaataatttttaatgcaattttgtctacaataaatccaggagatgaagtaattattcctgctccatattgggttagttatcctgatatagtaaaacttgctggaggtaatccagtgataatagaaacatcaccagataataattttaaaatatcacctgatgatcttgaaaaaaatatcactgaaaaaactaaatggctttttattaattcaccttcaaatccaactggccaagtttattctaaagctgagctaattaacttaactgaagttattaagaaaaataaaaacttatacattttatccgatgatatatatgaacatattcgataccaaaataatgagcgtttttatacaatcgctgagctagatgaagagatcttttccagaacattaacaatgaacggtgtttcaaaagcttactcaatgacaggatggcgtattggctattgtggaggtccaattgaaattattaacgccatgcgaaaattaatggggcaatctacatccaacccatcttcgatatctcaatgggcaactgtagaggcattaaatggttcaaaagactttcttaatctgtggatagaatctttcaaagaaagaagagattttatagttaattacttgaatcaatgtaatggtataagctgcctaattcctgaaggggctttttatgtttatccttcttgtgaaggtctcattggaaaggaatataagggtaaactaatttcaaatgataaagatttcgcaatgattctacttaaagaaaaattagttagtgttgtacatggagaggccttcggtttatcgcccttcttcagaatttcatacgcaacttctatggataacataaaattagcttgcgatagaattggtgagctttgtgatgaagcaacatcataa

SEQ ID NO: 245730 - DNA, 1083 bp, Unknown
  Bacterial polypeptide expressing nucleotide sequence isolated from the Sargasso Sea
aagattaaaccatcacctactattgctgttactcaaaaagcaagagaattaaaagctgctggaaaagatgttattggacttggtgcaggagaaccagattttgatactccagataatattaagcaagcagctataaaagctattaatgatggtgataccaaatacactgcagtagatggaactccagcactgaaaaaagcaatcgtagaaaaatttaaaaaagaaaataatttagattatacaactgatcaaattacagttggtgctggtggaaagcatgtaatttataatgcaatgatggctacattaaacgatggtgatgaagtaatagtacctgctccctattgggtctcttatcctgatatggttttattagcaggaggaaaaccagtaataatggaatgtaatgagaaacaaggttttaaaataaatccaaatgatcttgagaaatatataacaccaaaaacaaaatggattattcttaattctccttcaaatccaactggagcatgttattcagagcaagatttaaaagcaattgcagctattttagaaaaacataatcatgtgtatattttaagtgatgatatttatgagcatgtgacttatgagggttttaaattttttacaattgctcaaattgaaagtttaaaagatagagtgcttacaatgaatggtgtaagcaaagcttattcaatgacaggctggagaatagggtatgcagctggtccaaaagatatcgttaaagctattgctaaaattcaatcacaatcaacaaccaatccttcttctattagccaagccgctgcagttgaggcacttagtggaacacaagactttattaaggaaagagctaattcttttcaggagagaagagattttgttgttaatgctttaaatgcgatagatggaattgaatgtctgaatccagatggagcgttctatgtttttccaagttgcaaaggtttaatgggtaaaaaagattcaaatggaaatgaaattaaatctgatactgattttgttcaatcattattagagaatagtggaattgctgtagtcccagggttctgcatttggtttaga

SEQ ID NO: 245731 - DNA, 985 bp, Unknown
  Bacterial polypeptide expressing nucleotide sequence isolated from the Sargasso Sea
cttgataagtattttccatatattaaataaagtaatagaatataaacaattttcaatgagcataatatctaacagtcttaaaagaataaaaccatctcctaccattgcagttactcagaaagcaagagaattgaaagctgctggcaaagatgtaattgctctaggtgcaggtgaacctgattttgacacacctaataatataaaaaaggcagcagttaaagctattagaataggggatactaaatatacacctgttgatggaacacctgcaattaaaaatgcagtaattaaaaagttcaaaagagaaaataacttaacttatacctcagaccagataacagtaggtactggcggaaaacaagttttgtataatgcttttgttgcaacactgaataaaggtgatgaagttattattccagcaccgttttgggtatcctacccagacatggttttgcttgctggaggtaaaccaaaatttattaaatgtggagaagaagatggttttaaattaactccaacaaaacttaaaaaagcaataacaaaaaaaactaaatggataattttaaattctccttcaaatccaactggtgcagcttacacaaaagaagaaattattaatttaggaaaggtgctattaaaaaataagaatattctaattttgagtgatgatatttacgagcatgtaaaatttgataattttaaattttttacaatagcacagataaagaaactcaaagatagaacacttacaatgaatggggtaagcaaagcatatgctatgactggttggagaattggatacgcggctggtcctaaaaatattatagccgcaataagaaaaatccagtcacaatcgacttcaaatccatcatctataagtcaggcagctgctgttgaagctttgaatggaactcagagttttattaaaaaaagagctaaatcttttagcgacaggagaaaattttgttgtgaattatttaaatag

SEQ ID NO: 245732 - DNA, 1087 bp, Unknown
  Bacterial polypeptide expressing nucleotide sequence isolated from the Sargasso Sea
cttgataagtattttccatatattaaacaacgtagtagaatttatttttatttcaatgagcataatatcagacagtttaaaacgaattaaaccatctcctacaattgcagttactcaaaaagcaagagaacttagagcagcaggaaaagatgtaattggacttggggctggagagccagatttcgatacaccagaaaatataaaacaagctgcaattaaagcaattgaaaatggagatacaaaatatacagctgttgatggaacacctgctttaaaaaatgcaattgtagaaaagttcaaaagagaaaataatttagattatagcacagatcaaattacggttggaactggtggtaagcaagttctttacaatgcatttatggcaactttaaataaaggtgatgaagttataattcctgcacctttctgggtttcttatcctgacatggttttattagctggtggaaaacctaaaattgtaaaatgtacagaggaagaaggttttaaaataacaccaaaaaaactaaaaaaagcaattggtaaaaaaaccaaatggttgattttgaattccccttctaaccctactggagcaggttattcaaaaaacgaaatagaaggtttagcaaaagttttaattaaaaataaaaaagttcaaattttaagtgacgatatttatgagcatatcaaatatgatgattttaatttttatacaattgctcaaaattcaaaattaaaagatagaacactaaccatgaatggagttagcaaatcttatgcaatgactggttggagaattgggtatgcggctggccctaaagaaatcataaaagcaattggaaaaattcaatcacaatcaacatcaaacccttcatctgtcagtcaagctgctgctgttgaagcactaaatggtaaacaggattttattcaagaaagatctgatgcttttaaagaaagaagagattttgttgttaacagtttaaatagcattaaaggtattaattgcttgactccaaatggagcattttatgtttttccaagctgcaaaaaattacttggaaaaaaaaacaaaattaaaaacagacactga

SEQ ID NO: 245733 - DNA, 616 bp, Unknown
  Bacterial polypeptide expressing nucleotide sequence isolated from the Sargasso Sea
acgtggagcaaccaaccacaacatttggcgagacgctggatgcgagcaagacacgtttcgttattacaaagagtccactcgtggtctcgatttcgaagggttgatggaggacgtcgaaaaggcgccgaacgggagcatgtttttgttacacgcgtgcgcgcacaaccccaccggcgtcgacccgacggcggagcagtggaaggagatctccaagctcatgaagtccaagggacactttgcgttcttcgacatggcgtaccaaggattcgcgtccggtgattgcgagttcgacgcgcaggcgattcgcatctttgtcgaggatgggcacaaggtggccgtcgcgcaatccttcgccaaaaacatgggcttgtacggacaacgcgtcggcgccgtgagcatcatgtgcgacgacaaggcggaggcggttcgcgtggaatcgcaactcaaagtgatcgcgcgcgccatgtactccaacccgccgcttcacggggcgctcatcgcgtccaccattctcggcgaccccgagctcaaaaagcagtggtacgccgaagtcaagggcatggcggatcgcatcatcggcatgcgaacgatgttgagaaaacacctcgaagagtcc

SEQ ID NO: 245734 - DNA, 1192 bp, Unknown
  Bacterial polypeptide expressing nucleotide sequence isolated from the Sargasso Sea
atgtttgaaaaggttgttgccgccccagcggatccgatcctgggcctgaccgaagccttccgtgctgactctcgcagccacaagatcaacctgggggtcgggatctacaaggatgagaccggtgccacccccattctccactgcgtcaagaaagccgaacagaagctcttgaccgacgagaagaccaagaattacctcggtatcgaaggcaatatcgaatatggccgcatcgtgcagcaactgctgttcgggcaagattctgcgctggtcgccagcggccgggccaagaccgcccaggcaccgggcggtaccggtgccctgcgcatcgccgccgagttcgtggtgcgtaacggcctggccaagactgtctggatctccgatcccacctgggccaaccacgtcagcgtgttccaggccgcgggtctgaccgtcaagtggtacaagtactacgacgccgccagcaagggcctcgactttgccgccatgcaggcctctctggctgaagtgcaggcaggcgatctggtgctgctgcacggctgctgccacaacccgaccggtatcgacccgaccgctgatcagtggcgcgcactggccaagcagagtgctgccgccggctggctgccgctgtttgacttcgcctatcagggctttgcccgcggtatcgaagaggatgccgaaggtctgcgcatctttgccgagtgtcacgacgagctgctggtggcgagctccttctccaagaacttcggcctctacaacgagcgggtcggcgccttcaccctggtcagtgcgaccaaggagattgccgacgtggccttcacccaggtcaagaccgtcattcgtgccaactactccaacccaccgtcacacggcgccgccgtcgtcaccgccgtagtgagcgatcctgccctctatgccgaatgggtggaagaagtggcggccatgcgggtgcgcattcgcgagatgcgtgagctgctggtggaaaaattggccgcgcgcggcgtgaaccaggacttcagctttatccgcgagcagaacggcatgttctccttctccggtctctccaaggatcaggtggagcgtctcaagagcgagtttgccatctacatcgtcggctcgggccggatcagcgtggccggtatcacccgtgccaacatagatcccctgtgcgatgcgatcgccaaggtgttgtaag

SEQ ID NO: 245735 - DNA, 733 bp, Unknown
  Bacterial polypeptide expressing nucleotide sequence isolated from the Sargasso Sea
gatgaatacttcagaggattttttaagtaaacaagctcaaacaaatccatatccttttctaattgacattgaaagggcagaaggcgtttatatatatgacaaaaatggaaagtcatattttgacatgacagcaggagttgctgtaaataatattggtcacaggcataaaaatgtaataaaagcaattcaaagtcaaattgataaacaccttcatgtaatggtttatggtgagtatattcaagatgctcaaatcaatttttcaaaagaactcacatctgttttacctaaagagttaaattgtgtttatccggttaattcaggaacagaagcaaatgaagcggcgattaaacttgctaaaagagcaacaggaagaaacaatatcgtctcgttaacagggtcatatcatgggagtacaataggctcattaagtatatctggaaatgagatcaaaaaacaagcttttagaccattaatgccaggcgttgattttataagcttaaatgatttagatggacttcaaaaaattaatgaacatactgctgctgtaattatagaaaccatccaaggagatgcaggtgtgcgtatcccaaaacatgattatttaaatgccctaaaaaaaaggtgtaaaaaaacaggagcacttttaatttttgatgagattcaatgtgggatgggtaggaccggtcgattttttgcttttgaacactttaatattgtgcctgacattttaacc

SEQ ID NO: 245736 - DNA, 669 bp, Unknown
  Bacterial polypeptide expressing nucleotide sequence isolated from the Sargasso Sea
tatgttacaaagaaatatttctagccatttatatggatttacagacttgaagtcattaaatgaaagaggtcctttagttatttcttatggaaaaggaatatatgtttacgatactaaaggtaataaatatctagatgggaattctggtctatggaatcagtgtgctggttttgatcatcctggattaattgaagttgcaaaaaaacagtatgaaaaatttgctggttatcattctttatttggaagattgtctgaagaaacgttgcagctatctgaaaaaattattgaagtatcaccttttgatcaaggccgtgtattcttttgtaattcaggatctgaagcaaatgacaccatggtgaaaatgttatggatgttaaatgcaagaattggaaagccaaaaagacgaaaaattataacaagaattaatggatatcatggcgttactttaggagcttcttcaatgacagctaaaccatataataaagagtttggtttaccatctgaagaatttattcatattgaatgtcctcattattggaaatatggattagagaatgaaacggaagaagaattttctcttagaatggccaaaaaattagaagaaaaaatcatcaaagaggatcctgaaactattgcaggttttgttgctgaacctgttcaaggtgcggg

SEQ ID NO: 245737 - DNA, 623 bp, Unknown
  Bacterial polypeptide expressing nucleotide sequence isolated from the Sargasso Sea
aatgaataacttattaaaaacttacaagtttagtaattttagagtagtaaagggtaatggatgttatttatacacctctgataaaagaaaattattagatttctcagctggagtagcggttaattctcttggatataatcatccagttgttagaaaaagtttacaagatcaaataaaaactggtatcactcatttatctggttctcaaatgcatgagtttaagaccaaattatctaaattattatctaaaaattctaataagggcgatgttttcttctctaattcaggtgctgaaagtattgaagctgctttaaaaattgcaagaaattatggaagtaaaataggaagagatgaaattattgctatgacctcctcttttcatgggagaacaattggcgccctatccgttggaagtaataaaaaatataaatctaatattggtccagtacctggaaaagttaagttttgtaaatttaatgacgtttctcatcttaaaaaacttgtaaataaaaaaacagtagcaatcatcatagaatttgttcaaggggacggaggtataaatatttgcagtaagaattttgcaaaagctataaaagggatatgtaaaaataagaaaatttttg

SEQ ID NO: 245738 - DNA, 619 bp, Unknown
  Bacterial polypeptide expressing nucleotide sequence isolated from the Sargasso Sea
ccttttaattctggaaaagtttttttttgtaattcaggttctgaagcaaatgatactgcaattaaaatgttatggatgtttaataaaagaataggaaagcctaataaaagaaaaatcatatctagaattaatgcttatcatggcgttactttgggaggatcctctctaactggaaaaccgtatataaatgaatttggaatgccattaagtgaatttcttcatactgattgcccacatttttggaaatacggaaaaaaaaatgaaactgaagagtttttttctaaaagaataggaaataatttagaaaaaatgattttaaaagaaggtccagaaaatattgctgctttttttgctgaacctgttatgggcgcaggaggcgttattcctccatctaagaattattttcaaatcatacaacctattttaaaaaaatacgatattccatttgttgctgacgaagtaatttgcggttttggaagaacaggtaatttatggggatctgaaacttacaatattaaacctgatattataatttcatctaaatgtcttacagcaggtttttttcctatgggagcagtaattgtagataaaaaatttgcagaaaaatttatagaaatct

SEQ ID NO: 245739 - DNA, 622 bp, Unknown
  Bacterial polypeptide expressing nucleotide sequence isolated from the Sargasso Sea
atgagtaaaattttaaatacctataatagaaagaaaatctctttttcaaagggaaaaggaagttttttatatacaacaaatggaaagaaatatttagattttgtccaaggaattgctgttaactgccttggacatgctaatgactatttaataaaatctattaataaacaatctaaaaaattgtggcatgtctcaaatgttttcactatccctgagcaagagagattagcaaaaagattagcccaaaaaacttttgcagattatgtaacttttcaaaattctggtgctgaagctacagaagcagctataaaatttgctagaagatatttttattctaaaggtcaaccaagaaaaaatagagttctttgtattaataatagtttccatggaagaactatcgcagctatttttgccagtaacagtaaaaaagcaattgaaggctttaaacctaaagtagacggttttgatcactttaactttggtgaccacaaaggtttagaaaaagctataaccagcagaacagcagcaatcatggtcgagacaatcatgggagaagggggaattaaagttattccagatttttgccttaagggcttaagaaaactatgtaataagaaaaaaa

SEQ ID NO: 245740 - DNA, 649 bp, Unknown
  Bacterial polypeptide expressing nucleotide sequence isolated from the Sargasso Sea
caaaagatgcttttaaaaaaaaaatatataattaatgagggatataataaacttgattctcttttttcttcaggaaatggatcaaacatttttgttaataaaaaaaaatttcttgacttatctttatgcgcaggatcgttaattcttggacataactcaaaaatatttaaagactcaatgaaaaacgctttaagaaataatatttcaaatttcgcggcaaaaaacaaatttgctgtcaatttctcaagtacattaaaaaaaatttatccaaaatattctgacttcatattttgtaattcaggaaccgaagcagttttcaaatcgttaagaatagccagggcaatttctaataaaaatcttataatttcagtcactggaagttggcatggttcagtaagtgaattattgtttacaagtgataaaaactataaaaatatcccattaagtgatggtcttggacagtataataagaaaaatataaaatttattccttacaataacatcgaaatatcaaaaaaaattttgaagaagtacgaaaaaaaaattatgtgtattattattgaacctattcaaggttgcttaccaataaatacaaaaaaatatttaaaattcctaagtgattatgcaaagaaaaaaaaaataattttaa

SEQ ID NO: 245741 - DNA, 495 bp, Unknown
  Bacterial polypeptide expressing nucleotide sequence isolated from the Sargasso Sea
tatgttacatactaatacttctaatcatctatacggatttacagatttaaagtcattaaatgaaagaggtcctctcgttatttcttatggaaaaggaattcatgtctatgacactaaaggaaataagtatttggatgcaaattctggtttatggaatgcatgtgctggttttgatcatccaggattaatagaagtcgcaaaaaaacaatatgaaaaatttgctggatatcattcattatttggtcgtttatctgaagaaaccttagaactttcagagaaattaattgaagtatctccatttaatcagggtagagtctttttttgtaattcaggatctgaggctaatgacacaatgattaaaatgctttggatgttgaatgccagaattggtaaaccaaaaaaaagaaaaattataacccgtattaatggttatcatggtgtgactatcggtgctgcatctatgactggcaaaccttataataaagaatttggatt

SEQ ID NO: 245742 - DNA, 493 bp, Unknown
  Bacterial polypeptide expressing nucleotide sequence isolated from the Sargasso Sea
aatgttaaaacctaatacatcaagtcacctatatggatttactgatttaaagtcattaaatgatagaggtccacttgttatttcttatggaaaaggtatttatgtttacgataataaaaataataaatacttagacgctaattccggtttatggaatgcatgtgcaggatttgatcatcctggtcttatagaagttgctaaaaaacaatacgaaaaatttgctggctatcattctctatttggacgactttccgaagaaactcttgaattatctgaaaaattaattgaagtttccccatttgatcagggtagggtatttttttgcaattctggatctgaagcaaatgacactatgattaaaatgctatggatgtataattctcgaattggtaagccaaaaaaaagaaaaataattactagaattaacggataccacggagtaacacttggttcagcctctatgacaggtaagccctataataaagaattttga

SEQ ID NO: 245743 - DNA, 333 bp, Unknown
  Bacterial polypeptide expressing nucleotide sequence isolated from the Sargasso Sea
cagctgctattatggttgaaaccattatgggtgaaggtggtattaaagttatccctgattggtgcttaaaagaattaagagcattatgtaataagaaaaaaatattattaatacttgacgaagttcagtgtggaataggaagatctggtgatttctttgcttttgaaaaatcaaaagtaaaacctgacattgtgccaattgcaaaaggaataggtggaggatttcctatcggagcagttttaatgaataaaaaagattgcttcagggatgacaccaggtacccatggatcaacatttgggggaaatccattagcgatggctgttggaaataaa

SEQ ID NO: 245744 - DNA, 496 bp, Unknown
  Bacterial polypeptide expressing nucleotide sequence isolated from the Sargasso Sea
atggtcactcgaactgattttaaccgatatatgatgcctacatacaaaccggcagactttgtgccgtcaaaagcaaaaggatccatagtatgggacaaaaaaaataagaaatatattgattttgcatcaggtattgcagtctctagtttaggtcattgtcatccaaccctgaacaaagcattgacggatcaatcaaagaaaatatggcacctatctaaccttttaacaaatgaacctgctcttagactagctaaaattttttgtaagcatacttttgctgaaaaagtattttttgcaaattctggagctgaggcagtagaaggcgctgtcaaaacagctaggaaacatgcatatttaaatattagtaaaaaaaagaatgaaatagtttctttttctgacgcttttcatggtcgaacaatgatggcgatagcgctcaatggatcggatagatttattgagggattcggtcctatgccaggaggcattaaaaatcatc

SEQ ID NO: 245745 - DNA, 187 bp, Unknown
  Bacterial polypeptide expressing nucleotide sequence isolated from the Sargasso Sea
ttaattttagatgaggtccaatgcggcataggtcgtagtggagatttttttgcttttgagaaatcaaaagttaaaccagatatcgtgcccattgcaaagggaattggaggaggttttccaataggtgccgttcttatgaataaaaaagttgcttctggtatggtaccaggtactcacggatcatctt

SEQ ID NO: 245746 - DNA, 532 bp, Unknown
  Bacterial polypeptide expressing nucleotide sequence isolated from the Sargasso Sea
atgttacaaagaaatactgccagccatttatatggatttactgacttgaagtcattaaatgaaagaggccctttagttatttcttatggaaaaggaatatatgtttacgatactaaaggtagtaaatatctagatggtaattctggtctatggaatcaatgtgctggttttgaccatccaggattaattgaagttgcaaaaaaacagtatgaaaaatttgcaggttatcattctctatttggaagattatctgaagaaacgttgcaactatctgaaaaaattattgaagtatcaccttttgatcaaggtcgtgtattcttttgtaattcaggatctgaagctaatgacactatggtcaaaatgttatggatgttaaatgcaagaattggaaagccaaatagacgaaaaattataacaagaattaatggatatcacggagttactttaggagcttcttcaatgacagccaaaccatacaataaagagtttggattaccatcaaaagaattcattcacattgaatgtcctcatt

SEQ ID NO: 245747 - DNA, 364 bp, Unknown
  Bacterial polypeptide expressing nucleotide sequence isolated from the Sargasso Sea
aatgagacaaaatagtaaaaataatgaattaagaggggtatatgacaacgtaatgttgccaaattactctcctgcaaatttcgtaccgaagaaggcagagggatcacttgtttgggatcaagatgataaagaatatatagattttggaggaggaatagccgttaattccctaggtcattctcacccctcccttatcaaggcactgacagatcagtcaaaaaaaatatggcatcttagtaattacttaacaaatgagccagctattaaattagcaaataagctaactgagttaacttttgcagaaaatattttttttagtaattcaggatcagaagccaatgaagctgctataaaaatagccaga

SEQ ID NO: 245748 - DNA, 763 bp, Unknown
  Bacterial polypeptide expressing nucleotide sequence isolated from the Sargasso Sea
tatgcaagaaataaatatattaaacgaaggctataattatggcaaattagcctcaatatcaaaaggttcaataatcaaaataaacaacaaatcttatattgatttatcttactctgcaggaagcattatattaggccacagcaacaaaatttttaaaaaaattttaaatgaaatttcaaaaaaaaatatatcaaattatgcttttccaaatatatatgcaaaaaaatttagcacatctttaaaaaaaatttttccaaatcataagaagtttattttctgtaactcaggatctgaggcaataattaaaggaataagaatatgtagagccattagtaaaaaaaaaattataatcaatacttctgggagttggcacggatcagtaaatgaaacactttatacttcaaacaaaaatcataaacctatcaagctttcagatggtcttcctaaacacacaaaaaatgaattaagatttattccttatggtgataaaaaaaaatctaaaaaaattttagatgcatataaaaataaaattagctgtattttaattgaaccaattcaaggagcattaccgtcctcagttaatctagattatattaaattcttatatacttatgcaaaaaaaaataatattataattttttttgatgaaattattactggtttaagagatagtaaaaattcatttcaatcgagattcaaatttaagcctaacctttcagtttttggaaagtcatttgcgggcggtctaccaattggaataatt

SEQ ID NO: 245749 - DNA, 811 bp, Unknown
  Bacterial polypeptide expressing nucleotide sequence isolated from the Sargasso Sea
atgaataacttattaaaaacatacaaatttagtaattttaaagtggtaaagggtgatggttgttatttatacacctctgataaaagaaaattattggatttctcagcaggagttgcagtcaattctcttggttataatcacccagtaattaaaaatagccttagggctcaacttaaaacaggaattactcacttatcaggatcacaaatacatgaattcaaaactaaattatctaagttactatctgataattccaataaaggagatgtattcttttctaactctggtgcagagagtattgaggctgctcttaaaattgcgagaaattatggtagtaaaaatggtaaagatgaaatcattgcaatgacctcctcttttcacggcagaacaattggagctttatccgttggtagtaataaaaactataaatctaatattggtcctgttcctggaaaagtaaagttttgcaagtttaatgatgtctctcatctcaaaaaattagtaaataaaaaaacagtagcaataataatagaatttgttcaaggagacggaggtataaatatttgtagtaagaattttgctaaagctataaaagagatatgtaaatataagaaaattttacttattggggatgaaatacaaggcggtataggccgaactggaaaaatatttgcttacaaacattacggtgtcaatccagatatcataacctcagcaaaaggcttaggttcaggcattccaataggtgctacaatagtaaaaaaatatatatccaaaattatttctactggttttcaggctcaacatttgg

SEQ ID NO: 245750 - DNA, 704 bp, Unknown
  Bacterial polypeptide expressing nucleotide sequence isolated from the Sargasso Sea
catgactttcgatgaaaaatttatgcaggatgctatacagctagcaaaacgtgggagattttcaacccaccctaacccaagcgttggcagtgttgtggttaaagatggaaaaatagtggggaaaggctttcaccttagggcagggttaaaacacgctgagataaatgccttagagcaagccggagataaatcaaagggctcaaccctatatgtgacacttgagccttgcagctttcacggaagaactccagcctgcgctaaagcgataataaatgctggtattaatcgcgttgtagttggaactgtcgatcccgacccgagaaattctggaaggggtattgagattctgcgagaagccggtattcaagtggtaacaaattgtctaaaggccgaaacaagtcagttagtggaaggtcatattaaaagatttcgttttggacgcccttttgttcgactcaaacttgcgatgagtttagatggaaaaacagcgctctcaggcgggcagtcaaaatggattacgtcagaaaacgctcgttttgatgttcaaaaacttcgagcttggagtagcgctattgttactggggttggaacaattattcacgatgacccagctctgtcagttaggcttcaggaatcggatcttccgaacagcagagagataatgagtgtagaaagggctatatatgttttagactcgcaattgc

SEQ ID NO: 245751 - DNA, 378 bp, Unknown
  Bacterial polypeptide expressing nucleotide sequence isolated from the Sargasso Sea
aatgagtattttaaatgtttataaccctttaagtattgaagttgaccatggcgatggcgtatatttatactcaaaagagggtacaagataccttgattttacgagtggaattggtgtaaccagtttaggacatagccatccctcattaatatcagctctcaaagaccaagctgaaaagatatggcactgctcaaatctctttaaaatcaaaaatcagcaaattgttgcagataaaattacaaaaaattcatttgctgattctgtttttttttgcaactctggaactgaggcagttgaggctggagttaaagcgataaggaagtactataactacaaaaaagaaaaaaaatttaaaataatatgtgcaagaaactcttt

SEQ ID NO: 245752 - DNA, 821 bp, Unknown
  Bacterial polypeptide expressing nucleotide sequence isolated from the Sargasso Sea
tgatttaaaaacccttaatgaaagaggccctgttgtaataacccatggtaaagggatttatgtgtatgatatttataaaaaaaaatacctagatgctaattctggtttatggaatgcgtgtgcaggatttgatcatccaggtttaatagaagtagcccaaaaacaatatgcaaagtttgctggataccattccttgttcggtagactatctgaagaaacattagaattatctgataaaataattgaagtctctccatttgatgatggtaaagtctttttttgcaattcgggatcagaagctaacgacacaatggttaaaatattgtggatgttaaataatatgaaaggcagtcctcaaaaaagaaaaattatcacacgaataaatggatatcatggagttacacttggcgctacttccatgactggcaaaccatataatgaagtttttcaactaccattagacggctttattcatgctgattgccctcattattggaaatttgctaaagaaaatgaaactgaggaagattttacaaatagaatggcaaaaaatttagaagaccttattttaaaagaagatccagacacgattgctggttttgttgctgagcctgtccagggagcaggtggtgttattccaccttcaaaaggttattttgatttaattcaacctatacttaaaaaatataagatacctttaatagcagatgaagttatatgtggatttggtagaactggtaatttatggggctgcgaaacatatgatattaaaccagatataattatttcttcaaagtgttttaccgctggatattttccaa

SEQ ID NO: 245753 - DNA, 715 bp, Unknown
  Bacterial polypeptide expressing nucleotide sequence isolated from the Sargasso Sea
tatgttacaaactaatatttctagccatctatacggatttacagatttaaagtcattaaatgaaagagggcctcttgttatttcctatggaaaagggattcatgtctttgataccaaagggaataagtatttagatgcaaattctggattatggaatgcatgtgctggttttgatcatcctggattaatagaagttgcaaaaaaacaatatgaaaaatttgctggttatcattctctttttggtcgtttatctgaagagacattagaactttcagagaaattaatcgaggtatcaccttttaatcaaggcagagtctttttttgtaattctggatcagaagctaatgatacaatggttaaaatactttggatgttaaatgctagaaccggtaagcctaataaaagaaaaataataacacgtataaatggttatcatggtgtaactctaggagcctcatcaatgaccgccaaaccatacaataaagaatttggattacctctaaaggaatttattcatacagattgtcctcatttttggaagtttggattagagaatgaaaatgaagatgagttttctaaaagaattgcaacaaatctagaaaacttgatattaaaagaagacccagaaactattgcaggttttgtagctgaaccagttcaaggtgcgggaggagttatacctccatctaaaaattattttgatttaattcaacaa

SEQ ID NO: 245754 - DNA, 187 bp, Unknown
  Bacterial polypeptide expressing nucleotide sequence isolated from the Sargasso Sea
atgaaaaaaaatagcaagaataatgaactaagaggaatttacgacaatgtaatgcttcctaattattcccctgcaaacttcatacctaaggaagcaagagggtcaaggatttgggatcaagataacaaagaatacatagattttggtggaggaatagcagtaaattcattgggtcactctcatccag

SEQ ID NO: 245755 - DNA, 556 bp, Unknown
  Bacterial polypeptide expressing nucleotide sequence isolated from the Sargasso Sea
gaaaaaagaatattgttaatatgtgatgagattcagtcaggtgtagcaaggtctgcgaatttttttgctttcgaaagttcgaaaattaaacctgatattgttccgatcgcaaaaggtattgggggtggatttccaatcggtgccgttctaatgactaataaagttgcaaaggcaatgcagccaggtagtcatggatcaacatttggtggtaaccctaacgcttgtgcagtagggattgaggttatgaaacaaatctttaagccaggatttttaaataatgtgaaaaaaaagtcagattatttctttttaagattacataatttaaaaaataattatccaaaaattattaaggaaattagaggcaaaggcctattaattggagtgcaactgcactttaaccaagctaaatttataaaatctctagaaaaaaataatttattaacaattagggcagctgaaaatgtaattagaattttacctccactaaatgtaaaaaaaagtgaaatagatcaagcaatcagaattatagataaagtttgtgataagtataattaaa

SEQ ID NO: 245756 - DNA, 541 bp, Unknown
  Bacterial polypeptide expressing nucleotide sequence isolated from the Sargasso Sea
attttagatgaggttcaaagtggagtaggtcgaactggaaaaatgtggggttatgagaatttaggaattgaacctgatggattcacccttgctaaaggattaggaggaggtcatgcaattggagcattattggtaaaagaaaaagctaacattttttctccaggagatcatgcaagcacttttggagggaacccatttgcctgcaaggctgccttaactgtattagaagaaatgaatagaagaaatctcatcaataatgtttatctaagaggggaacaattaagcgctgggtttgaagaattgtcaaaaaaatttccaaatattattagcgggaaaagaggtctaggtttaatacaaggtcttcttataaatgatgattatgctgatgcaaaaaaaattacattaaaagcttttgataaaggattacttgtagttcctgcaggaggaaatgttgtaaggattgtcccaccattagttatatctagaagagaaattaatattcttttggataagctaaattcaatttttgaagagttatagc

SEQ ID NO: 245757 - DNA, 637 bp, Unknown
  Bacterial polypeptide expressing nucleotide sequence isolated from the Sargasso Sea
tatgttaaaatcaaatcattcacatcatctttatggttttactgatttaaagactttaaatgaaagagggcctttagtaatttcttacggtaaaggtatttatgtttatgatacatatgataaaaaatatttagatgcaaactcaggtttatggaatgcatgtgctggttttgatcatccagggttgattgaagtagctaagaaacaatattcaaagtttgcaggttatcactcattatttggtagacttccggaagaagtattagagttatctgacaaaattatagaagtttcaccatttgatgatggaagagtttttttctgtaattctggttctgaagcaaatgatacaatgattaaaatgctatggatgctaaatgctagaaaaggaaatccagaaaaaagaaaaataataacaagaattaatggttatcacggggtaactctaggtgcagcttcgatgacaggtaaaccctacaatggggaatttaaattacctttagatgggtttattcatgctgaatgtcctcactattggaaatttggaaaagataatgaaactgaagaagaattttctaaaagaatggcacataatttagaaaaattaattgttaatgaaggagctgatacaatagct

SEQ ID NO: 245758 - DNA, 380 bp, Unknown
  Bacterial polypeptide expressing nucleotide sequence isolated from the Sargasso Sea
aatgagacaaaatactaaaaataatgaattaagaggggtatatgacaacgtaatgttgccaaattactctcctgcaaatttcgtaccgaagaaggcagagggatcacttgtttgggatcaagatgataaagaatacatagattttggaggaggaatacccgttaattccctatgtcattctcacccctctcttatcaaggcactgacagatcagtcaaaaaaaatatggcatcttaataattacttaacaaatgagccagcgattaaattagcaaataagctaactgagttaacttttgcacaaaatattttttttagtaattcaggatcggaagccaatgaagctgctataaaaatagccagaaaatatcactcttcga

SEQ ID NO: 245759 - DNA, 512 bp, Unknown
  Bacterial polypeptide expressing nucleotide sequence isolated from the Sargasso Sea
catgagtaaaattttaaatacttataacagaaagaaaatctctttttccaaagggaaaggaagttttttatttgcaacgaacggtaagaaatatttagattttgtccaaggaattgctgttaattgtcttggtcatgctaatgattatctaatcagatcgataaataaacaatctaaaaaattgtggcatgtatcaaatgtatttactattcctgaacaagagagattggcaaaaagactggctcaaaaaacatttgcagattatgtaacttttcaaaattctggtgctgaagcgacggaggcggctattaaatttgctagaagatatttttattcaaaaggtcaaccaagaaaaaatagagttctttgcatcaataatagttttcatgggagaactattgcagctatttttgccagcaacagtaaaaaagctattgaaggttttaaacctaaagtagatggtttcgatcattttaatttcggcgatcacaaaggtttagaaaaagcgataa

SEQ ID NO: 245760 - DNA, 521 bp, Unknown
  Bacterial polypeptide expressing nucleotide sequence isolated from the Sargasso Sea
aatgcctacatatggaagaattgatatagcttttgaaaacggggaaggctcatatctgttcgacaccaatggtgaaaaatatcttgattttgccactggtatagccaccaactctttgggacactgccacccacatctggtggcagctgtacaagagcaggcagctaagctttggcatgtttccaacctctacaacataccccaacaacaacgatttgctgatagattagttgagaattcctttgctgatacagtatttttctgtaattccggagcggaagcaatggaaggttgtttaaaagtagcgaggaaataccattttgaaaatggagaaccaaaaagagaagagatagtttgtgcaactggtgcttttcacggtcgaaccttaaccactctttctgcaggggatagcgaaaaatatagggaaggttttgggccacgcccggatggctttcatcatgtggcctttggaaatttgaacgaaatgcgggccgcaatgtccgataaaacggcagcaatat

SEQ ID NO: 245761 - DNA, 840 bp, Unknown
  Bacterial polypeptide expressing nucleotide sequence isolated from the Sargasso Sea
ttcaccaacccggcgatggaggctttggccgaccgtctcatcgccgccgcgccgggcgatttggaacgggtgtttttcgtctccggcggctccgaggcggtcgaggcggcgttgaaattggcgcgccaatacttcctggaaattggccaaccccagcgccggcggatcatcacccggcggcagagctaccacggcaacaccctgggcgcgctggccgtcggcggcaatgaatggcggcgtcggccgttccagccgctgttgatcgagaccagccagatcgccccctgcttcgcctatcgcgaccagggtcacaacgagaccgcggagaaatatggccaaagagtcgccgatgagttggaggaaaccctgcaacgccacggcccggacaccgtcgccgcttttatctgcgagccggtggtcggcgccaccgccggcgcggtgcccccggtggccggctatctcgcccgcgttcgcgagatttgcgatcgccatggcgtgctattgatttttgacgaggtgatgtgcggcatgggccgtaccggctaccgcttcgcctgtgacgaggatggcgtggcgccggacctgctggtcgtcgccaaagggctgggcgccggatttcagccgattggcgcgaccctggtcgcccgccgtgttttccaagcgatccatgacggttccggctctttccagcatagtcacacgtatatgggccacccggccgcctgcgccggcgccctggcggtgcaagaggtcatcgacgccgaagacctgctggccaatgtgcagcggcgcggcgaacaattgcgcgccgccctcgatacagctttcggcgaccatccc

SEQ ID NO: 245762 - DNA, 841 bp, Unknown
  Bacterial polypeptide expressing nucleotide sequence isolated from the Sargasso Sea
atgtctagcgtgcttcaccgatctttgaactccacactaccgattatcaaaagcgtggacgcgaattacctaatagatgaagatggcaaacgctacctagacgcatgcggtggagcggcagtatcatgcctaggtcatgacaacgctaaggtacgagcagcgctaaaggatcaaattgataaattagcatttgctcactctggctcctttacaaatgagcccactgaggaactagctgagtttttgataaatcgtgctcctgccggccttggtgcagggcgggttatgtttttaggcagcggatcagaagcgatggaagcagcattaaaactcgctagacagttccatttagagagaaaagatacaaaacgggtaaacattattgcacgaaccccatcgtatcatggtaacactcttggggcacttgctacaggtggccacgcaggcaggcgcgctcctttccagccgatgcttatgcaagtacaccatattgatgccacataccgctaccgaatgaagttagaggacgagagcgaagacgagtatgcgcttcgtatggccaatcaacttgagataaaaatttgtgatctggggcctgaaacagtaatggcattcgtcgcagaaccggtagtaggcgcatctctcggatcgcagcctgcaccaataggatatttcaaacgaatacgggacatatgtaataaatacggtgttttgtatatcgctgatgaagtaatgtgcggcatgggccgaaccggcagtctttttgcgctagagcaggaaggaatatttgctgatattaccacatggcaaaaggactggggcaggttatcagccaatagct

SEQ ID NO: 245763 - DNA, 302 bp, Unknown
  Bacterial polypeptide expressing nucleotide sequence isolated from the Sargasso Sea
gttgcccgtaaccttctcccgaggtgagggagcgatcctgtacgataccgacaacatgccctatctggacggcgtctcagggatcgccgtcacgaatttggggcatcagcatccgcaggtcacggccgcggtaatcgaacaggcgcaaaggcttgttcacacctcgaacctctttcgtatcgacctgcaagagttggtcgccgagcaactccgtggcatgactggcatggagaacatgttcttctgcaactccggcgccgaggccaacgaggccgccataaaactcgcgaggcgctacggac

SEQ ID NO: 245764 - DNA, 804 bp, Unknown
  Bacterial polypeptide expressing nucleotide sequence isolated from the Sargasso Sea
tatgaacagaatagttaattcaattgaggccaaagacattgaaaaccatttccatccgtatactaatccccaaactttaaaagaaaatggtccacatgtgatttgcagaggggaaggtgtatatgtatacgacaattcaaacatgaagttcatagagggcatgagtggtttgtggtgtgcgtcgctagggtttaataataaagatttagttgaagctgcaaccaagcaaatggaaaagctccccttctatcatagtttcgcgggtaaggtgccggaggttgctgctaacttggctgacaaacttgttggaatagctccagaaggattagataaagttttcttttgcaactcaggatcggaggctaatgatactgcaattaaggttgtctggtactatcaaaacgctctaggccgacctgaaaagaggaaaattatcagtcgaaaaaggggctaccatggggtaactatggttgcaggaagtttaacaggattaccgtatgctcaagacgggtttggtttacccttagattttgttaggcatacttcttgtccgcattattttatagaaaaagttgaaggtgagtctgaaaaaaattttgtagatagaatgttaaataatctagaggaacttatccttgaagaaggtcctgatactattggggcgtttatcgcagagcctgttatgggagccggtggagtgattattccgcctaaaaattatttttctaaagtacaggcattgctgaaaaaatatgatgtgctttttattgcagatgaagtgatctgcggattcggtagaacagg

SEQ ID NO: 245765 - DNA, 415 bp, Unknown
  Bacterial polypeptide expressing nucleotide sequence isolated from the Sargasso Sea
atgagttctgttcttggcacatacgcaagaaaggatatttcttttaaagaaggaaagggtagttatctattttctgaaaatggcgaaaagtatcttgactttgtccaaggtattgcgactaacattttggggcattgtcacgatcacttaataagcgcaattcgaaatcagtctgaaaaactttggcacgtatctaatgcttttgttattcctgaacaagaaagattggcaaaaagattaacagacaacacgtttgcagactttgtatgctttcagaattcaggtactgaagctacagaagcaagtattaaaattgctagaaaatattttcataaaataggaaaacctgaaaaaaatagaattattacttttgagggatcttttcatggcagaactcttgcagcattattgccgc

SEQ ID NO: 245766 - DNA, 426 bp, Unknown
  Bacterial polypeptide expressing nucleotide sequence isolated from the Sargasso Sea
tatgagttcaattcttggtacatacgcaaggaaagctatttcttttcaagaaggtaaaggcagttatctttttgctgaaaatggagataaataccttgattttgttcagggaatagcaactaatattttagggcactgtcatgaccatttaattaaggctattcaagaacaatcaaaaaagttatggcatgtctcaaatgcttttgtaattccagaacaagaaaaattagctaagagacttactgatagcacatttgctgattttgtttgttttcaaaactcaggaactgaagcaactgaagcaagcattaaaattgcaagaaaatattttcataaaattggaaaacctgaaaaaaacagaattataaccatgaaaggaagctttcatggtcgtacgttagccgcattatttgctgcaaataaccc

SEQ ID NO: 245767 - DNA, 870 bp, Unknown
  Bacterial polypeptide expressing nucleotide sequence isolated from the Sargasso Sea
tcaccatttgaacaagggcgtgtatttttttgtaactcaggatcagaagcaaatgacaccatggttaaaatgctatggatgttaaatgcaagaataggtaaaccaaatagaagaaaaattataacaagaatcaatggttaccatggagtcactttgggagcttcttcaatgacagctaaaccatacaataaagagtttggtttaccatcagaagaatttattcacattgaatgccctcattattggaaatatggattagagaatgaaactgaagaagatttttccattaggatggcaaaaaatttagaagaaaaaattattaaagaagatcctgaaactatagcaggatttgttgcagaacctgtacaaggtgcaggtggttgtatacccccttcaaaatcatattttgatttagtccagcctatactaaaaaaatacgatataccttttatagcagatgaagttatttgtgggtttggaagaactggaaatttatgggggtgcgatacatacaatataaaacccgatataattatttcgtctaaatgcttaactgctggatattttcctatgggtgcagttatagttaataaagagttttctgagaaatttattgaagtatcggaagaggcagaggaatttccacatggttttacagctggtggtcatcctgttgggtgtgcaatcgctttgaaagcaatagatgtaattatgaatgagggtttgttagaaaatgtaaaattaatggaaccatatttttttgaaagattaaatgaatttaatgattatgagcacattggagaaactagaggtataggttttatggctgcattagagatggtaaaaaataaagatacaaaagaaccattg

SEQ ID NO: 245768 - DNA, 526 bp, Unknown
  Bacterial polypeptide expressing nucleotide sequence isolated from the Sargasso Sea
catgaatacttatgctccttccgatttaacctttgaaagaggtttagggagttggctgtttgatgataaaggtgataaatatttagattttgcatctggaattgctgttaactctgttgggcattcacaccctcatgttgtgtcggcaattcaaaaacaagctgctaaattaattcatacctcaaatttatataatatttcacagcaggaaaagcttgcgaaaaggctttgtgaattaagttttgctgattgtgtttttttttctaactcgggagctgaagctaatgaaggagctgtaaaagtagctagaagatatatgtttgaaaagggaaaacctgagcgtaatgtgatactttgcgttgacggatgctttcatggaaggacaatttctatgctctcggccacatcaaaaaaagagaatagaaccgggtttggtcctctgcctggagggttcaggcatattgcatttaatgatttaaattctctagctgagcagtttgctgccaagacgtggctgcaatcatga

SEQ ID NO: 245769 - DNA, 841 bp, Unknown
  Bacterial polypeptide expressing nucleotide sequence isolated from the Sargasso Sea
tagcaatattatcgcccgcgcgccatcctatcacggtaacactctgggtgctttggcaactggcgggcacgcaggtcggcgtagaccgtttcagcctttacttatgaatgtaagtcatatcgatgcggcctacgagtaccgcatgcggcgcgaaggagaggcagaggtagattttgccctgcgtatggcgaaccttctggaagaggaaatccagaggttaggaactgagactgtcatggcatttgttgcagagcctgtcgtcggtgcgtcactcggcacgcagcccgcgccctccggatacttcaaacgcatccgggagatttgtgacacctatggcgtcctttgtattgcggatgaggtgatgtgtggcatgggtcgcaccggcagcctatttgcattagagcaagaaagcattgtagcagatattactaccttggccaaaggccttggagctggctatcagccgattgcagccgttatggcggcggaaaatgtcattcgcattatgaaagatggcagcggaacgctctggaacggtcatacttatatgtcccacgccatcgcaaccgctggtgcactggctgtgcaacaagtgattgaagaagaaaacctgttgtcaaatgtccgcaggcgtggcgagcagttgcgcgagggattgcaaacccggctcggccaaaaccctcatgttggaaacattcgcggacgtggtcttttctggacggcagaactagtacaggaccgtgcaaccaaacagccctttgatacgacgcttggccttgccccaaagatacaaacaacagcgcttgatataggcttaatgtgctacccctctcaaggggtg

SEQ ID NO: 245770 - DNA, 625 bp, Unknown
  Bacterial polypeptide expressing nucleotide sequence isolated from the Sargasso Sea
tatgcctaaatctaatatttcatctcatttatatggatttactgatttaaagtcattaaatgaaaggggccctttagttatttcctatggaaaaggaatatatgtttacgatataaaaaataataaatatttagatgcaaattcaggtttatggaatgcatgtgcaggttttgatcatccaggattaatagaagtagcaaaaaaacaatatgagaaatttgctggttaccattctttatttggtcgcttatcagaagaaacattagagttatcaaataaattaattgaagtaagtccgttcaaagaaggtagggtgtttttttgtaactcaggttcagaagcaaatgataccatgatcaaaattttatggatgcttaattcaagaacaggtagaccaaaaaaaagaaaaataatctcaagaatcaatggttatcatggtgtaactttaggcgcaacttcaatgactggaaaaccctataataaagaatttggactacctttaagtgattttatttatgctgattgcccgcatttctggaaatatggaaaattaaatgaaactgaagaagatttttcaattcgtatggctgacaacttagaaaaattaatactaaaagaagatcca

SEQ ID NO: 245771 - DNA, 805 bp, Unknown
  Bacterial polypeptide expressing nucleotide sequence isolated from the Sargasso Sea
cgaagtatcacacatctcaccttgctacgcctatcggggtcgaagtgaagatgaatcagaagaggaatacggatgccgtgtggctgacgaattggacgcggagatccaacgtctaggtccagagaacgtggccgcgttcatagccgaaacggtgggtggcgcgacggccggtgtgatcccgcccgtggccggttacttcaagcgtgttcgggagatttgcgatcgacatggggtgctattaatcctggatgaagtcatgtgtggcatgggcagaacagggaccttgttcgcctgtgaacaggacgggatctcgcccgatgttatttgtgtagcaaaagggttgggtgcaggctaccaacctattggcgctacgctggtcaacagtaaggttttgagggctttccagcggggctccaacctcttccagcatggccacacctacatgggccatcccgcagcctgcgccggctctctggctgtgcagcgcaaggtgaaggaccagaacctcctagtgaatgtgcgcgaacgtggcgaacagttggtctccaaactgagcgagcggttcggcaattatccgcatgtcggagatatccgtgggcgggggctgtttcaagggatcgaatttgtggctgatcgggcctctaaaaaggccttcgatccggcgaagaaattgcacgccaagattaaagctgcggccatgcgccaaggtctcatctgctatcccggtggtggcaccgtagatggcgccgagggcgatcatgtcctcctggcgccgccgtttattgttacgcttgatgagcttgac

SEQ ID NO: 245772 - DNA, 811 bp, Unknown
  Bacterial polypeptide expressing nucleotide sequence isolated from the Sargasso Sea
aatggctttaagcccagacataatgaaaacatatggtcgaattgatattgcatttacacatggtaaaggtagttttctattttctgaggatggaagtaaatatctagattatgcaactggcattgctgtaaatgcatttggacattctcacccagatttaatagatgcattgcaagaccaagcctctaaattatggcatgtatcaaacctttataaaataccggaacaagataaagttgcgaatttacttgtaaagaattcatgcgcaaaccaagcttttttttgtaattctggtgctgaggctactgaaggtgctgtaaaagtagcaagaagatatgcttggtctaaaaaggatattgaaagagatgagattttatgtgttacaggagccttccatggcagaacattagctatgcttgcagctaatgatagacctctctttcgagaaggttttggccctaaagttccagggtttagtcatgctgagtggggcaatgttgaagatttaaaaaagaaattaaataacaaagtagcagctgtattgatcgagcctgttcaaggtgaaggtggtgccagaaaagcaccaattaattatttaaaagaagttgaggaattaacaaaacaaaatggatctttactgatatctgatgaagtccaaattggtatgggtcgttctggaaagttatttgcttatcaaaatgagaatatcgaacctgatataattgcacttgcaaaaggattgggaggaggcttcccagttggagcagttcttgcaacatctgaagtgggtgatgcaatggtccctggaact

SEQ ID NO: 245773 - DNA, 592 bp, Unknown
  Bacterial polypeptide expressing nucleotide sequence isolated from the Sargasso Sea
ggcgggcggcaacgccttgcggcggcaaatctatgatccgatccttttcgagaccagccgtattgccccttgctatgcctatcgcgggatgcgggacggcgagagcgaggccgcattcgcgctgcgcgtcgccgacgagctggaaacggaaatcctgaggctgggcgcagggaatgtcatggcgttcgtggccgagccggtggtcggtgcgacgcttggcgcggtgccggcgctggatggctatttcactcgcatccgcgagatctgcgaccggcacggcgtgctgctgatccttgacgaggtgatgtgcggcatgggcaggaccggccatatgttcgcctgcgaagcggatggcgtgcggcccgatatcctgaccatcgccaaggggttgggtgccggttaccagccgatcggggcgatgatgtgcagcaacaacatctaccgggcgattgaggcgggaagcggcttcttccagcatggccatacctatctcgggcatccggcggcctgtgccggcgcgcatgccgtcgtcaccaccttgctggacgaacagctgatcggccgggtaaaaggccagggccgcaagctgatg

SEQ ID NO: 245774 - DNA, 682 bp, Unknown
  Bacterial polypeptide expressing nucleotide sequence isolated from the Sargasso Sea
gttggaatttaaatccattgattatcaacttcaaccttacactaatccagaattaataagtgaaaaaggtcctcaagtatttaattcaggtagtggtgtaaatgtagaggatattgatggaaatagttacatagaaggtatgagtggtctctggtgtgcttcattgggttttggtgaaaatgaattaattgaagcagcagtcaaacaaatgagaaaacttccatattatcattcatttactggaaaaacttgtgaaacaacaataaaattatctgaaaaacttattgaaattgcaccaaataatttgaagaaagtatttttctgtaattcaggttcagaggcaaatgatactgcaataaaaattgtctggtactatcactcgtctttaggaaatccaaataaaagaaagattataagcaggaaaggaagttaccatggtgtcacattagctgcagctagtctaactgccttagattatgctcaaaagggctttggtttaccccttgattttgcccttcatacaacatggccccattattttcaaaattcttatgaaaatgagagtgaaaaagaattttgtagccgtttaattaaagatctagagaaacttatagaaatggagggtgctgaaaatataggtgcttttattgctgaacccttgatgggagcaggtggtgttatt

SEQ ID NO: 245775 - DNA, 1154 bp, Unknown
  Bacterial polypeptide expressing nucleotide sequence isolated from the Sargasso Sea
agcacagacaactaattatccattgggaatcgatgttgtcaaggcagaaggctcatatatttttgatagcgaaaaaaaatatttggatttagtagcaggtgtttcagttcaaaaccttggacattgtaattctgaaataaatgagagtataataaatcaattaaaaaaatattctcatgtaatggtttatggtgaattcatccaaagaccatcacttaatctgtgtgaattactcaacaatatacttcctgagaatttaaactcaacatacctaacaaactccggaactgaggcaattgaagcagcactaaagctagctaaaaggtcaaccggtaggtcgagaataatttccgctttaaattcctatcatggtagtactcatggatctatgagtgtatcaggatttgaacaacgtaagagagcatacagaccattacttccaaatattgattttataaaatttaatagtgaaagtgatataagtaaaataaatcagtcaacatcttgcgtaattttagaaactattcaaggtggtgctggatttatagaaccaaatcagaattacttaaaaaaaatatccaaaagatgtcaggaaatgggagctcttcttattttagatgaacttcaaacaggtctagggagaacaggtaaaatgtttgcctttgaacattatggtgtaagccctgatattcttgtacttggaaaatctttaggtggaggctttccgatcggtgcaatgattagtgatctatctttaatgaataagcttaaaagcaaaccgattctagggcatataacaacattcggaggtcatccagtgatatcacaagctggtttaactacattaaaaattattttgagagataaactgtttgaaaaagctaaaatttcagagcaaaaattcaagcaaagactcaaacatcctgcaataatcgaaattagaggtaaaggactaatgctggcattaatcttagaatctaatgaactggctaagaaattggttattaaatcacttgaaaaaggtttgattttattttggcttctttatgagtcaagagctgtgagaataacacctccacttaatattaccgacaaagaaatcaaaatctccactgatataatactcaaaactcttgatgagatttataattaaa

SEQ ID NO: 245776 - DNA, 1165 bp, Unknown
  Bacterial polypeptide expressing nucleotide sequence isolated from the Sargasso Sea
gctgaaacagcttccatattatcatagttttggcggaaaagcgtctgatccttccatcaatttagcagaaaaactggtttcaattgctccagaaggtttggagaaagttttcttttgtaattcggggtctgaggcgaatgataccgcagtaaaattagtttggtattaccatgcatcacaaggatatcccgaacgaaaaaaaataataagtagaaagagaggttatcatggggtcactgtggcttctgccagcctgacagggttaccatatgcgcaagatggtttcgcactcccacttgattttgcgaaacatacttcctcgccacattattttatggaaaaactagaaaatgaaaccgagtatgaattttcaaaaagacttgttaatgatttggagaatcttattgaaaaagagggtgcagggactatcggggctttcatagctgaaccagtgatgggcgcaggtggcgtgataattcctccgaaaggatattttgaaggggttcaaaaagtccttcgaaggcactcaattttgtttattgccgatgaagtcatttgcgggtttggtcgaactggtaatatgtgggggagtgaaaccttctctttgaaaccagatattctaacctgcgccaaagccctatcatcagcatacatgccaatatcagctgttttggttgcgtctcaagttgtagagggtgtagaaaaacaagcagccaaattaggtgtatttgggcatggatacacctattcagctcatcccgtcccagcggcagtagctcttagaactctcgagttaatggaagaaagaaatattgttcaacatgtacaaaatgtgtcagagcaattttctgagcggataaatgagttaaataaatttgcctgcgttggtgatacgcgagccataggtttgctcggaggaatggagtttgtgggagttcctgatagcagagttaagttggatccctcgttaaaatttgccgctcaagtacaaaagctgattcaggacagtggtgtgattctacgggctttgccgggagacactgttggcttttgtcctccattgattattagtcgtgaggaaatcgacgaaatgtttgataaggtagaaagagctatgccggaagcagatgaactgcttacaaaaacataccgtcctattttgtaa

SEQ ID NO: 245777 - DNA, 1291 bp, Unknown
  Bacterial polypeptide expressing nucleotide sequence isolated from the Sargasso Sea
ttgaagtcattaaatgaaagaggccctttagttatttcttatggaaaaggaatatatgtttacgatactaaaggtaataaatatctagatgggaattctggtctatggaatcagtgtgctggttttgaccatcctggattaattgaagttgcaaaaaaacagtatgaaaaatttgccggttatcattctttatttggaagattgtctgaagaaacgttgcagctatctgaaaaaattattgaagtatcaccttttgatcaaggtcgtgtattcttttgtaattcaggatctgaagcaaatgacaccatggtcaaaatgttatggatgttaaatgcaagaattggaaagccaaatagacgaaaaattataacaagaattaatggatatcatggcgttactttaggagcttcttcaatgacagccaaaccatacaataaagagtttggtttaccatctgaagaatttattcatattgaatgtcctcattattggaaatatggattagagaatgaaacggaagaagaattttcacttaggatggccaaaaatttagaagaaaaaatcatcaaagaggatccagaaactattgcaggttttgttgcagaacctgttcaaggtgcaggaggttgtatacctccttcaaaatcgtattttgatttagttcagcctatattaaaaaaatttaatattccttttatcgcagatgaagtaatttgtggatttggtagaacgggaaatttatggggttgtgaaacctacaatatcaaaccggatataattatctcatctaaatgtttaacagctgggtattttcctatgggtgcagttatagttaataaaaaattttcagataaatttgttgaggtatcagaagaagcagaggaatttccccatggttttacagctggtggccaccctgttggttgcgcaattgctttgaaagcaatagatgtaattatgaatgaaggtttattagataatgtaaagttaatggaaccctattttttcgaaagattaaatgaatttaatgattatgaacacattggagaaactagaggtataggtcttatggctgcattagagatggtaaaaaataaagatacaaaagaaccatttgaaggtcatcttaatatgggagataaagttgctaatttatcaattgataatggattaatttgcagacctttaggtcctggcattgttttgtgtcctcagtttataattactaaaaatcagattgatgaaatatttgactcacttcataaaactataaaacaagtttttaattaag

SEQ ID NO: 245778 - DNA, 1330 bp, Unknown
  Bacterial polypeptide expressing nucleotide sequence isolated from the Sargasso Sea
atgtctaccgtattccatcgctcgccgaagcagtcactgccggtcgcgatcgccggcgacggcatcgaaattatcgattccaccggcaagcgctacatcgatgcttcaggcggcgcagccgtctcgtgcctcggccatagcaatcaacgcgtgatcgacgcgatcaagcgccaggcgcagcaattgccgtacgcgcacacgtcgttcttcacgacccaggccgcggaggaactcgccgagcgcctggtggcgagcgcgccgcaagggctcgaacacgtgtatttcgtgtcgggcggctcggaggcgatcgaggcggcgctgaaactggcgcggcagtacttcgtcgagaagggtgaattgcaacgccgtcatttcatcgcgcgtcggcagagctatcacggcaacacgttgggggcgctcgcgatcggcggcaatgcgtggcggcgcgagccgtttctgccgatcctgatcgaagcacatcacgtaagcccgtgttacgcctatcgcgagcagcgcgccgacgaaaccgaagagcagttcgcgcaacgtctcgcggatgaactcgaacagaagattctggagctcggcgcggacacggtggccgcattcgtcgccgaaacggtggtgggtgcgacggccggcgcggtgccgccggtgcgcgagtatttccgcaagatccgcgccgtgtgcgatcgctacggcgtgctgctgattctcgacgaaatcatgtcgggcatgggccgcacaggctacctgtacgcgtgcgaggaagacggcgtcgcgccggacctgctgaccattgccaaggggctcggcgccggctatcagccgatcggcgcgacgctggtcagcgagcgcatttaccagacgattgtcggcggctcgggcttctttcagcacgggcatacgtatatcggccacgccactgcctgcgccgcggcgctcgaagtgcagcgcgtgatcgctgacgaccggctgctgccgaacgtgcaggcgcgcggcgagcagttgcgtggccgcttgcgcgaacactacgcgcagcatccgcatatcggcgacgtgcgcgggcggggcctgtttgtcggcgttgaactggtacgcgagcgcgccaccaaggcgccgttcgacgcatcgctgaaactgcatgcggctatccggcgcgaggcgttcgcgcgtggcttgatggtgtatccgatgggcggcacggtcgacggcaagatcggcgatcatgtgctgctggcgccgccgtttatctgcacggcgcgcgacatcgacgagatcgtcaaccgtctcaccgatgcgatcgaaggcgcactggccgccatctgat

SEQ ID NO: 245779 - DNA, 653 bp, Unknown
  Bacterial polypeptide expressing nucleotide sequence isolated from the Sargasso Sea
agcagcggttatggttgagactataatgggtgaggggggcataaaagtaattcctaattggtgtttaagagatttaagaaaaatttgtaataaaaaaaaaacactattaatattagatgaagttcaatgtggcataggaagatccggtaaattttttgctttcgagcatgcaaaagttaagccagatattgttcctatagccaaaggaatagggggagggttcccaataggtgcagttttgatgacaaaaaaggtagcatctggaatcgttccaggtagtcacggcagcacatacgctggatcacctctagcaacaagtgttgctaacgaagttttaaatcaaatctttaaaaaaggttttcttaaaaaagtagaaaaaatatctaaatattttaacaatgaattaaataaaatcaaagatgatcataaaaaattaattaaagaggttagaggagttggattattaataggaataaaacttcataatgatcaatcaaaatttattaaaaagttagaggacaataatttacttgtaataagagcggcagaaaatgtagtaagagtactgccacctctaaatgtgaaaaaatcagaaatagatcttgcaattaaaattataagaaaagtttgtaatgaatttaatgaaaaatgaa

SEQ ID NO: 245780 - DNA, 443 bp, Unknown
  Bacterial polypeptide expressing nucleotide sequence isolated from the Sargasso Sea
tatgagttctgttcttggcacatacgcaagaaaagctatttcttttaaagaaggtaaaggaagctatctttatgcagaaaatggtgacaaatatcttgattttgttcaagggattgcaactaatattttaggccattgccatgaacatttagtaaaaacaattcaggaccaatctaaaaaattatggcatgtgtcaaatgcttttattattcctgaacaagaaagactagctaaaagattgacagataatacatttgcggactttgtttgctttcagtcatcgggaacagaagccacagaagcgagtattaaaattgcaagaaaatatttccataaaattggaaagcctgaaaaaaatagaattataactacgaaaggaagttttcacggccgaactttagctgcgttatttgctgcaaataatcctaaacacgtagagggtt

SEQ ID NO: 245781 - DNA, 316 bp, Unknown
  Bacterial polypeptide expressing nucleotide sequence isolated from the Sargasso Sea
catgccaacctatggtcagccgccagtccagtttgtccggggttccggcactgagttattcgatcgcgatggaaatcgatacctcgattttttgtgcggactagccgttacttcgcttggccacgcccatcctgcggttgctgaagcgatagcggaacaagctagaacattgctccatgtgtcgaatctctatgaaacggttcccggacttgaggtagctgcaactattgatcgattacagggcggaaatggccaagttttcttttgcaacagcggggcggagtctcttgaaggggcaataaaacttgcccgacgc

SEQ ID NO: 245782 - DNA, 1264 bp, Unknown
  Bacterial polypeptide expressing nucleotide sequence isolated from the Sargasso Sea
tatgttacaaagaaatacttccagccatttatatggatttactgacttgaagtcattaaatgaaagaggtcctttagttatttcttatggaaaaggaatatatgtttacgatactaaaggtaataaatatctagatggtaattctggtctatggaatcagtgtgctggttttgaccatcctggattaattgaagttgcaaaaaaacagtatgaaaaatttgctggttatcattctttatttggaagattgtctgaagaaactttgcagctatctgaaaaaattattgaagtatcaccttttgatcaaggtcgtgtatttttttgtaattcaggatctgaagcaaatgataccatggtcaaaatgttatggatgttaaatgcaagaattggaaaaccaaatagacgaaaaattataacaagaattaatggatatcatggtgttactttaggagcttcttcaatgacagctaaaccatacaataaagagtttggtttaccatctgaagaatttattcatattgaatgccctcattattggaaatatggattagagaatgaaacggaagaagaattttcccttaggatggccaaaaatttagaagaaaaaatcattaaagaagatccagaaactattgcaggttttgttgcagaacctgttcaaggtgcaggtggctgtatacctccttcaaaatcgtattttgatttagttcagcctatattaaaaaaatataatattccttttatcgcagatgaagtaatttgtggatttggtagaactggaaatttatgggggtgcgatacatacaatataaaacccgatataattatttcgtctaaatgtttaactgctggatattttcctatgggtgcagttatagttaataaagaattctcagataaatttgttgaagtatcggaagaagcagaggaatttccacatggttttacagctggcggtcatcctgttggatgcgcaatcgctttgaaggcaatagatgtaattatgaatgagggtttgttagataatgtaaagttaatggaaccctatttttttgaaagattaaatgaatttaataattatgaacacattggagaaactagaggtataggtcttatggcagcattagagatggtaaaaaataaagatacaaaagaaccatttgaaggtcatcttaatatgggagataaagttgctaatttatcaattgataatggattaatttgcagacctttaggtcctgcaattgttttgtgtcctcaattc

SEQ ID NO: 245783 - DNA, 499 bp, Unknown
  Bacterial polypeptide expressing nucleotide sequence isolated from the Sargasso Sea
catgagtaaaattttaaatacttataacagaaagaaaatctctttttctaaaggaaaaggaagtttcttatatacaacgaatggaaagaaatatttagatttcgttcaagggattgctgtaaactgtcttggccatgctaataatcatttaattaaatcaataaataaacaatcaaaaaaattatggcatgtttcaaacgtattcactattcctgagcaagagaaattagcaaaaagattagcacaaaaaacatttgcagattatgtgacttttcaaaattctggtgctgaggcaacagaggcagctattaaatttgctagaagatatttttattcaaaaggtcagccgaaaaaaaatagagttctttgcattaataacagtttccatggaagaactatcgcagctatatttgccagcaatagtaaaaaagcaattgaaggttttaaacctaaagtagacggttttgatcattttaatttggtgatcacaaaggtttag

SEQ ID NO: 245784 - DNA, 505 bp, Unknown
  Bacterial polypeptide expressing nucleotide sequence isolated from the Sargasso Sea
tatgttacaaagaaatacttccagccatttatatggatttactgacttgaagtcattaaatgaaagaggccctttagttatttcttatggaaaaggaatatatgtttacgatactaaaggtaataaatatctagatgggaattctggtctatggaatcagtgtgctggttttgaccatcctggattaattgaagttgcaaaaaaacagtatgaaaaatttgctggttatcattctttatttggaagattatctgaagaaacgttgcagctatctgaaaaaattattgaagtatcaccttttgatcaaggtcgtgtattcttttgtaattctggatctgaagcaaatgacaccatggtcaaaatgttatggatgttaaatgcaagaattggaaagccaaatagacgaaaaattataacaagaattaatggatatcatggcgttactttaggagcttcttcaatgacagctaaaccatacaataaagagtttgggtttaacatctga

SEQ ID NO: 245785 - DNA, 337 bp, Unknown
  Bacterial polypeptide expressing nucleotide sequence isolated from the Sargasso Sea
tatgtcgcaatatttgatccccacctacgcgcgccagccagtggctttcgtgcggggcgaaggcgtgtggttatatgacgaaaacgaccacaaatacatggatgccatctccggaattggtgtgtgtaacctaggccactgccacccggcggtgacccgaaccctggctgaacaggccaggcaattagtgcacacgtccaacctgtaccgcattcccgcccaagaatcgctggcgcagcgtctgtgtgaattgagcggcatggcaaacgtgtttttctccaattctggtgcagaagccaacgaagcggccatcaagattgcccgcctgtacggctct

SEQ ID NO: 245786 - DNA, 558 bp, Unknown
  Bacterial polypeptide expressing nucleotide sequence isolated from the Sargasso Sea
catggcaactgagcaaccggtaattacccgcgccacattcgatgaagttattttgccgatttatgcaccggcagaattcatcccggtcaaaggtaaaggtagccgcgtttgggatcagcagggcaaagagtacgttgatttcgccggcgggattgcggtgacggcgttagggcattgtcatccggctctggtcgcggcgctgcatgagcagggagaaaccttgtggcataccagcaatgtctttaccaacgagccggcgctgcgtctgggccgcaagctggtggatgccaccttcgccgagcgcgtggtgttcatgaactccggcaccgaagcgaacgaaacggcgttcaagctggcgcgccactacaccattacccgtcacagcccgtataagaccaaaatcatcgccttccataatgccttccacggccgttcgctgttcacggtatcggtgggtgggcagccaaaatattctgatggcttcggcccgaaaccggcggacattatccacgtgccgtttaacgatctgcatgcggtgaaggcggtgatggatgacca

SEQ ID NO: 245787 - DNA, 1336 bp, Unknown
  Bacterial polypeptide expressing nucleotide sequence isolated from the Sargasso Sea
atgacgaccgttttccatcgcgctccgcgcgccaccttgcccgttgccgtcgcaggcgacggcatcgagatcatcgactcgaccggcaaacgctatatcgacgcgtgcggcggcgcggccgtttcgtgtctcggccacagcaaccagcgggtgatcgacgcgatcaagcggcaggcgcagcagctggcgtacgcgcatacgtcgttcttcacgaccgacgtggctgaagaactcgccgaccggctcgtcgctgccgcgccggccggcctcgagcacgtgtatttcgtgtcgggcggctccgaggcggtcgaggccgcgctgaagctcgcacgccagtatttcgtcgagaagggcgagccgcagcgccgccatttcatcgcgcgacgccagagctatcacggcaacacgctcggcgcgctcgcgatcggcggcaacgcgtggcggcgcgagccgttcctgccgctgctgatcgaggcgcaccacgtgagcccgtgttatgcataccgcgaccagcaggcgggcgaaaccgacgaagcttatgcgcagcgcctcgcggatgaactcgaacagaagatcgtcgaactcggcgcggacaacgtcgcggcgttcgtcgcggagacggtggtgggcgcaacggccggcgcggtgccgccggtgcgcacgtacctgaagaagattcgcgccgtgtgcgacaagtacggcgtgctgctgatcctcgacgagatcatgtcgggcatgggccgcacgggctacctgtacgcgtgcgatgaagacggcgtcgcgcccgacctgctgacgatcgcgaaagggctcggcgcgggctaccagccgatcggcgcgacgctggtgagcgatcgcatctaccggacgatcgtcgacggttcgggcttcttccagcacggccacacgtacctgggccacgcaaccgcatgcgcggccgcgctcgaagtgcagcgcgtgatcgccgaggagaagctgctcgacaacgtgaaggcgcgcggcgagcaactgcgtgcatcattgcgcgagcattacggcgcgcacccgcatgtcggcgacgtgcgcggccgcgggctgttcgtcggcgtcgagctcgtgcgcgatcgcgacagcaaggcgacgttcgatcccgcgctgaagctgcatgcggcggtcaagcgcgaagcgatgcagcgcggcctgatggtgtatccgatgggcgggacgatcgacggcgttcacggcgatcacatcctggtcgcgccgccgttcatttgcaccgcgcagcagatcgatacgatcgtcgagcggttgtcgggcgcgatcggcgcggcgctcgcgtcggccggcgcgtgac

SEQ ID NO: 245788 - DNA, 395 bp, Unknown
  Bacterial polypeptide expressing nucleotide sequence isolated from the Sargasso Sea
tatgagcaatttagcaaaaaattataacagaaaaaaaatttcatttaagtatgggaagggaagccatctttactctactaatggaaaaaaatatcttgattttgttatgggtatcgccgttaattctttaggtcatgctcatccaagtttaatcaaaactataaacaaccaatcaaaaaagctttggcatgtatcaaatgcttttcaaattcctgaaggagaaattctagcaaaaaaactatgtaaaaaaacattcgctgattatgtgatgtttcaaaatagtggagcagaagctacagaggcagctattaaagttgctagaagatattttttttcaataggtaaacaaaataaaaatagaattttatgtattaaaaattcatttcatggaagaa

SEQ ID NO: 245789 - DNA, 1255 bp, Unknown
  Bacterial polypeptide expressing nucleotide sequence isolated from the Sargasso Sea
gctgttcggcggtgggaagacctccgtcgacgcggacgaggttcgaaagaacgagcgagagtgcgtgttacagacgtacggacgaggggagactgaagtcatggttcggggaaagggttgcgcgcttttcgacgccgagggacgcgaatttttggatttcacggcgggaatcgcggtgaattgcctgggacacgcggacgagggcgtgagcagagtgatcgctgaacaggcgaaaacgttgacgcacacgagtaatctgtatcacaccgaaccgggggcgacgttggcgagaaaactcacggcgacgtccttcgccgacaaggtgttttattgcaactcggggacggaggcgaacgagggggcgcttaaattcgctcgaaagtatgcgcaaacgcgcgcggtggcggccgggaagacggccaataaggcggcgacggggacggtgagctttgaaaacgggtttcacggacgaacgttcggcgcgttgtcgctgacgtggaaggagggctatcgcgcgccctttgcgccgttggttccggggaactcgttcgcaccgtacggtgatttagaacaggcgcgacggctgatcgtcaaagggaagacttgcgcggtgttcgtggagccggtgcagggcgagggtggcatctaccccgccgacgccgattttttgcgcggtttgagaaagatttgcgacgacgccgacgcgctcctcgtctacgacgaggtccagtgcggtttgggtcgcaccggtaagctctggggacatcagctcgtggaggacgccgaaccggatctcatgacggtggcgaaaccgttggcgaacggtctccccatcggcgccgtgttgatgaaacaaaaagtcgccgacgtcatggcgcccggcgaccacggttccacctttgccggcggcccgctcgtgtgcgcggcggcgaacgaagtcttcgaccgcatcaccgcccctggtttcctcgccaaagtcaccgcgcgaggtgaagagcttaaatctgcgatcgccaccgctctcgccgaccatccgcgcctccgcgaggttcgaggcgccggtttactcgtcggcgcgcaattcgacgtccccgtcggcgccctcgtccaggcgtgtcgcgaggacggtttgctcgtcatcaccgccggcgcgggcgacgtcctacgtctcgtccctccgctcatcgtgaccagcgccgagattcaaaaagccgccaccatcgtcgccaaacgcgcgcgagaagtcgtcgtctga

SEQ ID NO: 245790 - DNA, 640 bp, Unknown
  Bacterial polypeptide expressing nucleotide sequence isolated from the Sargasso Sea
aatgagttcgctagcaaaaaattataaaagaagaaacttgtcttttaaaaaaggaaaaggatctttcctttatacttataatggagttaaatttttagattttgttcagggtattgctgtaaattcgttaggtcacacaaatccggttttagttaaagcaataaaaaagcaatcacaaaaactctggcatgtttcaaattcatttaaaattcctgaaggagaagagttagctaaaaaattgacaaataaaacatttgcagatgcagttattttccaaaatagtggagctgaagccactgaggctgctataaaagttgcaagaagatatttttattcaattggaaagccaaaaaaaaatagaattttatgtataaaaaattcttttcacggaagaacaattgcagcaataaatgcaagtggatcaaaaaaaatgattgagggttttggtccaaaagtaggaggatttgaccattttaaatttggaaaccataaggaacttaaaaaaaaaataacaaataaaacagctgctataatgattgaaccgataatgggagagggtggaataaaagtgatacccacgtggtgtttaaaagaaataagaaagatttgtaacaagaaaaaaattcttttaattttggat

SEQ ID NO: 245791 - DNA, 493 bp, Unknown
  Bacterial polypeptide expressing nucleotide sequence isolated from the Sargasso Sea
tatgacttatttagcgaaaaattataatagaaaaaaaatttcctttaaatatggaaaaggaagctatttatattctaataacaacaaaaaatatttagattttgttcaaggaatagctgttaactctttaggtcacgcccatccaaaattagttaaaactataagagatcaatcaaaaaaactctggcatgtatctaatgcatttgaaattccagagggagaaaaattagccagaaagttgtgtcaaaaaacatttgctgattatgttatgtttcagaattcaggagctgaagctactgaagcagcaataaaggttgcaagacgatatttctattctgtgggaaaaccacataaaaatagaattttatgtataaaaaattcttttcatggaagaactttagcagcaatttttgttagtggatcaaaaaaaatgattgaagggtttggtcctaaagtgacaggttttgatcatttcaaatttggagatcataat

SEQ ID NO: 245792 - DNA, 814 bp, Unknown
  Bacterial polypeptide expressing nucleotide sequence isolated from the Sargasso Sea
aatgcaatcgacagatgcccaaaaaccaggcccggaaacacaaacagtcataaagacgtttgaccagtatgtcgtacctaattatcgacgatttaatgtatgtcttgtacgcggagagggctcacgcgtatgggatgctgatggccaatcctatcttgatttgtttccgggttggggctgcaatttactggggcattgccccggcccagtcgtgcaggctgtccaaaagcaaatggagaagttagttcacgttccaaatacttggtatatggaacctcagggaacctgggcgaaacttctttctgagcggtctttcggcgggcaagcctttttctgcaattcaggaaccgaagcgaacgaatcagcaatcaaacttgtccgattacggtctgagggaaaacgatacaagatcattacattccaaggtggtttccatggccgaaccatgggcagtgtctctgcaacagctcagccaaaataccacgaaggattaggcccgatggttgcgggttttcaatttgccccacacggcgaccttgacgctgttgcacgtttaattgatgaacaaaccgggggcattctcattgagcccattctcggagaaggtggcattgttccagcatctcaggaattccttaagggacttcgaaagcttgcagacgacaatgacttattacttgtctttgatgaagttcaatccggatgtggacgaaccggtaagtggtttggctatcaacatacagacgttgttcctgatgtcatgacactcgcaaaaagtctgtgtgccggtatcgctggtggtgcatgctcacga

SEQ ID NO: 245793 - DNA, 385 bp, Unknown
  Bacterial polypeptide expressing nucleotide sequence isolated from the Sargasso Sea
atggaaacttatggtacaaaaacccttgaatttgtaaaaggtaaaggctgttttttatataataataggaatgaaaagtatttagattttgctagcggtattgcagttaattcacttggtcattgccatcctagattaataaaagcgctaaacaaacaatcaaaacaactctggcatatctcaaatttatatacaataccaaaacaagaaatgtttgctaaatatctatgcaaaaaaacatttgcagataaagttttttttactaattctggtgctgagtcgattgaatgtggaataaaaataattagaagctatcattcattttataaaactggaaagtcagaaataattacctttgatggtgcttttcatggaagaacatagg

SEQ ID NO: 245794 - DNA, 541 bp, Unknown
  Bacterial polypeptide expressing nucleotide sequence isolated from the Sargasso Sea
atgagtgcattagctaaaaattataacagaagaaagattgcttttacaaggggcaaaggaagctttctttattcaacttctggaaaaaaatatctagattttgttcaaggtatagcggtaaattcattaggccacgctaatccatacttaataaaagcaattaatagacaagcaaagaaagtttggcatgtatctaatgcatttataattcctgaaggagaaaaacttgccaaaagactttctaaaaaaacttttgctgattatgtaatttttcaaaattctggaactgaagcgactgaagctgccataaaagtagcaagaagatatttttattcaaaaggtaaaccaaataaaaatagaattttatgtattaaaaattcatttcatggaagaactatagctgcgatttttgctagtggttcaaaaaaaatgacagaaggctttggacccaaagtcccaggatttgatcatattgaaattagaaattttaagcccaagatttccaaaatattagaaataaaattaagaggaatacagcagc

SEQ ID NO: 245795 - DNA, 511 bp, Unknown
  Bacterial polypeptide expressing nucleotide sequence isolated from the Sargasso Sea
aatgaatagtaagactaaatcatatgttatgccaacttatggcactaaaaacctagaatttgtaaaaggtaagggctgctatttatatgataaaaaaaatcaaaaatatttagattttgcaggaggaattgcagtaaattcattagggcattgtcatccaaaacttataagtgctcttaacaagcagaccaaaaaactttggcatatttcaaatctttatacaatcaatacacaagaggaatttgcaaaactcctttgtaaaaaatcttttgcagataaagtattttttactaattcaggaacagagtctatagagtgtggtttaaaaataattagaagctatcattcttttaataatactggaaaaaatgaaattatttcttttgatggagcatttcatggtagaacttatggagctctatctgctcagaaaaataaaaaatattcaaatggttttggaagacttttacctggttttaagaaagttgaattttataatattaataaataa

SEQ ID NO: 245796 - DNA, 472 bp, Unknown
  Bacterial polypeptide expressing nucleotide sequence isolated from the Sargasso Sea
aatggaaaatgtaatgccaacatatggccgaatagatctttcatttgaaagaggagaaggtccttggctttttactgagagtggagaaaagtatttagattttgcaacaggaattgcagtaaatactttggggcattctaataatgctttaaatgatattttaatcaaacaatcaaaaaaagtctggcatacatcaaacttatataatattaaaccgcaaggtgatttagcaaaattaatatgtgaaaactcttttggtgaaagtgtatttttctgtaattcaggagctgaatctttagaaggtactatcaaattatgcagaaaatatcattttaataatggagatgaaaataaaaaagatatattagtatgcagtagtgcttttcatggaagaacattaggtacacttgctgcaggcgataatgaaaagcatagagaaggttttggtgttaatacaaatggttttattagg

SEQ ID NO: 245797 - DNA, 409 bp, Unknown
  Bacterial polypeptide expressing nucleotide sequence isolated from the Sargasso Sea
tatgttaaaatcaaaccaatcacatcatctatatggatttactgacttaaaaacccttaatgaaagaggccctgttgtaataacccatggtaaaggaatttatgtgtatgatattcatgaaaaaaaatacctagatgctaattctggtctatggaatgcgtgcgcaggttttgatcatccaggtttaattgaagtagcccaaaaacaatatgcaaagtttgctggataccattccttgttcggcagactatctgaagaaactttagaattatctgataaaataattgaagtctctccatttgatgatggcagagtctttttttgtaattctggatcagaagctaatgatacaatggttaaaatgttgtggatgttaaataagatgaaaggtatcctcaaaaaagaaaaa

SEQ ID NO: 245798 - DNA, 523 bp, Unknown
  Bacterial polypeptide expressing nucleotide sequence isolated from the Sargasso Sea
atgatttcagaagaacatagccagtatcttatcggaaactacgccgcaccagccattgacatcgtccgtggagaaggcacgaagttatgggattcagcaggtcgggaataccttgatttcgcatctgggatcgcggtcaccaacatcggccacggacaccccgaatgggttaaacaggtgactgaacaaagcagcgtcctttgtcatgcctccaacctgtactcgattcctgaacaggttcgtctggccaaaaggttggtcgaacggatcggaccgggtaaagttcttttttgcaacagtggagcggaagccaacgaagccatgatcaagctttcccggttggttgcccaccaatcggaacaaccggaaagacttgaaatcctagttgccgaaaacgcctttcacggtcgcaccatgggtgccctctccgctaccgcttcttcgaagtaccgcaagggctttgaacccaagcttccgggttttcggtttgcctcctttaaccatagcgaaagctttcgtgaga

SEQ ID NO: 245799 - DNA, 466 bp, Unknown
  Bacterial polypeptide expressing nucleotide sequence isolated from the Sargasso Sea
ccagatattgttccaattgcaaaaggtattggaggaggatttccaataggagcagttttaatgaataaaaaagttgctgcaggaatgaccccaggtactcatggttccacttttgggggtaaccctcttgcgatggctattggaaatacagtgatggatatagtctcaagtaagaaatttctagataatgtaaaaaatgtttcaaaatactttttatcaaaccttaataaaattaaagatgaataccctaatataattaaagaaatacgaggtagaggcttattaattggaatacaacttcactctgatcaaacaatgtttattaaaaaattaatggataataaattattgactattagagctgcagaaaatgtagttagagttttgccaccattaaatgttaaaaaaagtgaaattgattatgctttaaagataattaaaaaagtttgttctgaaatgaattaat

SEQ ID NO: 245800 - DNA, 505 bp, Unknown
  Bacterial polypeptide expressing nucleotide sequence isolated from the Sargasso Sea
tatgagttctttagcaaataattataaaagaagaaaattatcttttaaaaaaggcaaaggatcttttttattctctacagatggaaaaaaatacttagattttgtccagggtattgctgtaaattctttaggtcatgctaattctaacttaattaatgctataaataatcaatctagaaaactttggcatgtgtctaacgcttttataattccagaaggagaaaaacttgcaaaaaaattaacaaataaaacttttgcagattctgtaatttttcaaaatagtggagcagaagcaacagaggctgcaataaaagttgcaagaagatatttttattcaataggaaaaccaaaaaaaaacagaattatttgtattaaaaattcttttcatggaagaactattgctgcaattaatgcaagtggatcaaaaaaaatgacagagggttttgggcctaaggtaagtggttttgatcattttgaatttggtgatcataaaaaacttaaaaaa

SEQ ID NO: 245801 - DNA, 489 bp, Unknown
  Bacterial polypeptide expressing nucleotide sequence isolated from the Sargasso Sea
aatgagctcattggctaaaaattataatagaagaaaaattgcctttaataaaggtaagggaagttttttatattctaacaaaggtcaaaaatatttggattttgttcaaggtattgccgttaactctttaggtcatgcaaatagctatttaacaaaagctataaacaaacaatcaaaaaaagtttggcatgtgtcaaatgcatttataattcctgaaggagaaaaactagctaaaagattaacccaaaaaacttttgctgattacgtaatttttcaaaatagcggtgcagaagctaccgaattggccattaaagctgctagaagatatttttataaaatcggcaaacctcaaaaaaatagaattctttgtattaaaaattcttttcatggaagaacccttgcaacaatatttgcaagcggatcaaaaaagatgacagaaggatttgaacctaaagtgcctggttttgacattttaaattcggtgatcac

SEQ ID NO: 245802 - DNA, 538 bp, Unknown
  Bacterial polypeptide expressing nucleotide sequence isolated from the Sargasso Sea
attgcattatgaagttcaaacaggaatttcaagatcagcagaattcctggctttcgaaagctcaaaaataaaaccagatattgttcccattgcaaaaggaataggtggtggatttcctattggtgcagttttaatgagtaaaaaggttgcttctggaatgacaccaggtactcatggctcaacctttggtgggaatcctttagcaatggctgttgggaattcagtaatagatatagtttcaagtaaaaaattcttaaaaaatgtaaaggagttatcaaaatatttttttataaatttgaatcttttaaaaaaaaaatatccaaagattattaaagaaataagaggaaaaggtttattaattggagttcagctttatacagatcagtcaaagttcattaaaaaattaatggataagagattactaactatacgtgcagctgagaatgttgttcgtattctacctccactaaatgttaaaaaaacagaaatcaaccatgcactaaaaattattgataatgtatgttcaaaaatgagataa

SEQ ID NO: 245803 - DNA, 412 bp, Unknown
  Bacterial polypeptide expressing nucleotide sequence isolated from the Sargasso Sea
atgagtgctctagctaaaaattataatagaagaaaaattgctttcaataggggcaaaggaagttttctatattcaactaatggcaaaaaatatttagactttgtgcaaggaattgcagttaattctttaggtcatgccaatccttatttaactaaagcgattaacaaacaggctaagaaagtttggcatgtttcaaatgcatttattattccagagggagaaaggcttgccaaaagattatcaaaaaaaacttttgcagattatgtaatttttcaaaatagtggtgttgaagcaacagaggcagccattaaggcagcaagaaaatatttccattcaattggaaaacctcaaaaaaatagaattctttgtataaaaaattcttttcacggaagaactttagcagcaattttgc

SEQ ID NO: 245804 - DNA, 673 bp, Unknown
  Bacterial polypeptide expressing nucleotide sequence isolated from the Sargasso Sea
gaaaggttcctttttatattcaaagagaggagttaaatttttagattttgttcaaggaattgcagttaattctttaggtcatgcaaacccaaatttaataaaagcaattaataaacaatcaaaaaaactttggcatgtttctaattcttttataattcctgagggtgaggaattagccaaaaaattaacaaatagaacttttgcagatgctgtaatttttcaaaatagtggggcagaagctacagaggccgccataaaagttgcaagaagatatttttattctataggtaaaccaaaaaaaaatagaattctttgtattaaaaattcttttcatggaagaactattgcggcaattaacgcaagtggatctaaaaaaatgacagagggatttggaccaaaagtgggtggatttgaccattttaagtttgggaaccacaaagaattaaaaagaaagattacaagtaaaaccgcagctataatgattgaaccaataatgggtgaggggggtattaaagtcataccttcatggtgtcttaaagaattgagaaaaatttgtaatcaaaaaaaaattcttcttattttagacgaagttcagtgtggaattggcagatcaggtaagtttttttcttatgaatatgcaaacataaagccagatatagttccaattgcaaaa

SEQ ID NO: 245805 - DNA, 775 bp, Unknown
  Bacterial polypeptide expressing nucleotide sequence isolated from the Sargasso Sea
tatttggattttgcgggaggaattgcagttaattctttaggtcattgccacccagagctgattgaagttttaaaaaatcaacttgataaattatggcatgcttctaatttatactactattctgaacaagaaagttacgctaaattaatttgtattaatagttttgctgaaaaagttttttttacaaattcaggtactgagtctattgaatgtggcattaaaattgttagaagttatcaccaacatcataataattattcaaaaaaaaatataataacatttgaaggagcttttcatggtagatcatttggagctctttcagcacaaaaaaattcaaaattatttgaaccactattaccaggttttgtacaaattccatttgatgacatagaagttttaaaaaaaacagtaaatgaagagacagccgctattatgattgaaccagtacaaggagaggggggtataaaaccagctagtttaagttttttaaaatcaattgagactatatgtagagaaagagaaattttattttttttagatgaagtccaatgtggttttggaagatctggaaaattattttcttacgaatgggcaaaaattaaacctgatatagtggctgttgcaaaaggcataggctctggtttcccattaggtgcatgtttagctactgctgatgcttgcataggaatgaccaagggagttcacggctcaacttatggtggcaatcctttggcaatttgtgttggcaaaaaaggtattagaaattatttgaaaa

SEQ ID NO: 245806 - DNA, 403 bp, Unknown
  Bacterial polypeptide expressing nucleotide sequence isolated from the Sargasso Sea
aatgacatttttagcaaacaattataatagaaaaaaaatttcttttaaaaagggcgttggaagctacttagttgctacaaacggtaagaaatatttagatttttgctcggggattgcagttaatagtttaggccacgcgaatccaagattagtaaaagcactttataaacaagctaaaagagtttggcatgtttcaaatgcttttacaattccagagggagagatgttagcaaaaaaactggtcaaaaaaacttttgcagactcagtgatatttcaaaattctgggaccgaagcaacagaggttgctataaaagtggcgagaagatacttttactcaataggaaaaccaaaaaaaaatagaatactttgtgttaaaaattcatttcatggccggactatagct

SEQ ID NO: 245807 - DNA, 772 bp, Unknown
  Bacterial polypeptide expressing nucleotide sequence isolated from the Sargasso Sea
atgagctcattagcaaaaaattataatagaagaaaaatttcatttagaaaaggtaaaggaacttttctatatggagaaaatggaaaaaaatatttagattttgttcaaggaatagctgttaattctttaggtcattctaatccatatttagtaaaagcaattaacaaacaatcaaaaaaactttggcatgtatctaattcatttataattcctgagggagaaaaattagctaaaagattaacccaaaaaacttttgcagattgtgtattatttcaaaatagtggtgcagaagcaactgaggctgcaattaaaatagcaagaagatatttttattccattggccaaccgcaaaaaaacagaatcctttgtataaaaaactcctttcatggaagaactattgcaacaatatttgcaagtggttcaaaaaagatgacagaaggttttggacctaaagtcccaggatttgatcatattgaatttagagattttaaacctagatttccaaatataaataataaaattaaaaataatacagcagcaattatggtagaaactgtaatgggtgaaggaggtattaaaacaatacctgttaaatgcttaaaatatttaagaaaaatttgtaataaaaaaaaaattcttttgatattagatgaagtgcagtgcggaattggaagaagtggaaaattttttgcatttgaatattcaggagtgaagcctgatattgttccaatagcaaaagggattggtggtggttttcccggtaggtgcagtt

SEQ ID NO: 245808 - DNA, 514 bp, Unknown
  Bacterial polypeptide expressing nucleotide sequence isolated from the Sargasso Sea
agatcaggaaaattttttgccttcgaacatgcaaaaataaaacccgatattgtgccaattgctaagggaataggaggcggctttccaattggagcggttttaatgaataaaaaagtagcatctgctatgataccagggtcacacggaagcacctttggtggaaaccccttggctatgagtgtaggtaatgctgtgttagatcaaatattaaagaaaggttttttaaaaaatgtgcaaaaatcttccaaacactttatctctgaactaaataaaataaaggaagattatccggaaatcatcaaggaagtcagagggattggtttactactaggcttgcagctttataatgatcaaagcaaatttataaaaaaattggaggataataaattgcttacaatgagagcaggagagaatgtagtcagaatcctgcctcctttaaatgttaaaaaacaagaaatagatcttgcaataaaaactataagaaaagtttgtgataaattaaattatgaataat

SEQ ID NO: 245809 - DNA, 634 bp, Unknown
  Bacterial polypeptide expressing nucleotide sequence isolated from the Sargasso Sea
atgagttcactagctaaaaattataatagaagaaaaatttcttttaagaaaggcaaggggagttttttatactcaacaactggtaaaaaatatttagattttgtacaaggtatagctgtgaattcattaggacactctaatccatatttaattaaagcaattaataaacaatctaaaaaagtttggcatgtttctaatgcctttaaaattccagaaggagagaaacttgcacgaagattaaccaaaaaaacatttgcaggtgcagtaatttttcaaaatagtggagcagaagcaactgaagcagctattaaagttgctagaagatatttttattctattggaatgaaaaaaaaaaatagaattctttgtattaaaaattcttttcatggaagaactatagcaacaattaatgcaagtggttcaaaaaaaatgacagaaggatttggtccaagagtaaatggatttgatcactttaaatttggagatcatgagaaacttaaaaaaatgattactaaaaaaacagcagcagttatgattgagacaataatgggagagggagggataaaagtaattcctaaatggtgtttaaaagacttaagaagaatttgtaataaaaaaaatacattattaatat

SEQ ID NO: 245810 - DNA, 466 bp, Unknown
  Bacterial polypeptide expressing nucleotide sequence isolated from the Sargasso Sea
tgatattgttcctatcgcaaaaggaataggtggtggatttccaattggtgcagttttaatgtcaaaaaaagttgcatcttcaatgatcccagggagtcatgggtcaacttttggtggaaatccattggcaatgagtgttggaaatgcagtcttggatcaaatttttaaaaaaggatttcttaataatttaaaaaaattatcaaaatatttttataaaaaattagataaacttaaaaaagattatccaaatataattaaagaaattagaggcgaaggtttattaattggagtacaattacattttgatcaatcgaagtttattaaatctttagaaaaaaactatttattaacaattagagcagcagagaacgttataagaattctaccacctttaaatgtcaaaaaaaatgaaattgatttagcattaaaaatcttaaagaaggtttgtagtgaatataaaaagtaa

SEQ ID NO: 245811 - DNA, 645 bp, Unknown
  Bacterial polypeptide expressing nucleotide sequence isolated from the Sargasso Sea
ctgcaataatggtggagacaattttaggtgaaggcggtattaagcctatacctgataaatgtcttagatatttaagaaaaatttgtaatgaaaaaaaaatattactgatcttagatgaggttcagagtggaatcgggcgtagtggagattttttggcttttgaacgatccaaaatttctcctgatatctgtcctatagccaaaggtataggtggcggttttccaataggtgctgttttaatgacaaataaagtagctaaagcaatgcaaccaggcagtcatggatcaacttttggaggcaatcaacttgctatgaaggtcggtagtaaggtaatggatataatttcaagaaaaagttttttaaaaaatgtgaaaaaaaattcaaattattttcataatgaattgaataaacttaaaaacaaatttccaaaaataattaaagaaataagaggaagaggttttttaattggattacaactttatcaagatcaatcaaagtttatcaaaaaattaatggataataagttattaactatcaaagcagctgaaaatactgtccgtattttacctccattaaatgtaaaaaaaaatgaaatagatcaagctttaaagattatagataaagtttgtgcagactttaaataaa

SEQ ID NO: 245812 - DNA, 993 bp, Unknown
  Bacterial polypeptide expressing nucleotide sequence isolated from the Sargasso Sea
aaaaaagtatttagattttgttcaaggtatagctgtaaattctttaggacattctaccacacatttaataaagcaattaacaatcaatcaaagaaagtttggcatgtttctaatgctttcaatatcccagaaggagaaagactagcaaaaaaattaactcaaaaaacatttgctgatgcagtaatatttcaaaatagtggagcagaggcaacagaggctgccattaaagttgcaagaagatatttttattctattggcaaacccaaaaaaaatagaattctttgtattaaaaattcttttcacggaagaacgatagcagctattaatgcaagtggttctaaaaaaatgaccgaaggtttcggtcctaaagtcaatggttttgaccattttaaatttggagaccataaggcattaaaaaaaatgattactaacaaaacggcagctgttatggttgagactataatgggagaaggagggataaaagtaattccagattggtgtttaagagatctaagaaaaatttgtaataaaaaaaaaacactattaattttagatgaagttcaatgtggtataggaagatctggtaaattttttgcttttgaacatgctaaggttaagcctgatatagtgcctatagcaaaaggaataggcggggggtttccaataggggcggtattaatgacaaagaaggtagcatctggaattgtacctggtagccatggaagcacatatgctggttcaccccttgcaacaactgttgctaatgaggttttaaatcaaatttttaaaagaggttttcttaaaaatgtagaaaaaatatctaaatattttcataacgaattaaataaaattaaaaatgattataaagaattaattaaagaggttagaggggttggattattaataggtataaaacttaataatgaccaatcaaaatgtattaaaaaattagagaataataagttgcttgtaataagagcagcagaaaatgtg

SEQ ID NO: 245813 - DNA, 439 bp, Unknown
  Bacterial polypeptide expressing nucleotide sequence isolated from the Sargasso Sea
atgagtgcgcttgctaaaaattataatagaaaaaaaatttccttcaaaaaaggaaaaggaagttttctctatgctaataatggaaaaaaatatttagactttgtgcaaggaatagctgtaaattctttgggacatgcaaatccacatttaataaatgctgtgaataaacaagcaaaaaaactatggcacgtatcaaatgcttttattataccagagggtgaaaaattggcaaaaagactaaccaaaaaaacatttgcagatttcgttatatttcaaaatagcggaacagaagcaactgaagctgcaataaaaattgcgagaagatatttctactcaattgggaagccaaaaaaaaatagaattctttgcgtaaaaaattcttttcatggaagaacattagcagcaatttttgcaagtggttcaaaaaaaagacagaagg

SEQ ID NO: 245814 - DNA, 768 bp, Unknown
  Bacterial polypeptide expressing nucleotide sequence isolated from the Sargasso Sea
tatgacaataagcccatctataatgacaacatatggaagaatagacattgcctttacacatggtgaaggtagttatttattctctgaagatggaaaaaaatatcttgattatgctagtggtatagctgttaatgcatttggacattgtcacccaaaattggtggaggctttaaaagatcaagcctccaaattatggcatacatctaatctatacaggattccagaacaagaaacggttgcagaaaaacttgtagaaaattcatgtgcagatagagtatttttctgtaattctggtgctgaagcaactgagggtgcagttaaagttgcaaggagatatgcatgggcaaatggtgaaaaagataggacagaaattatttgtgctacaggagcctttcatggccgaactttagcaatgttagctgcaaatgacagaccattattcagagaaggatttggaccatctgcccaaggtttcactcatgttgaatggggggatattaaaagtttaaaaaataaaattggagaacatgttgctgctattttagttgaacctgttcaaggagaaggtggagctagaaaagctcctgaaggatatttaaaattactaaaagaaatagctgctgacaatggatccttattaatttcagatgaagtccaaattggtatgggtaggtcgggtactttatttgcttatcaacaagaaaatattgaaccagatatcatagcgcttgctaagggtcttggtggtgggttccctgtaggagcagt

SEQ ID NO: 245815 - DNA, 646 bp, Unknown
  Bacterial polypeptide expressing nucleotide sequence isolated from the Sargasso Sea
atgagttttttagttaaaaattataatagatcaaatttatctttcactagaggaaaaggaagttatttgtatacaaagaatggaaaaaaatatttagactttgttcaaggaattgctgttaattcattaggtcattcaaatcctaaattaataaaaacaattaattatcaagcaaaaaaactatggcatgtttctaacgcttttagaattcccgaaggtgaaaaattagcaaaaaaaataaaagaaaaaacttttgctgattatgttatgttccagaacagtggagcagaggctacagaggcagcaattaaagttgcaagaagatattttttttcaataggtaaaaaaaaaaaatataagattttatgtgttaaaaattcattccatggaagaacaattgcaacaataaatgcaagtggatcaaaaaaaatgatggaaggatttggaccaaaattgattggatttagccatttcaaatttggtgatcataaaagtttagaaaaatcaattagcacagatacagcagcaattatgattgaaacaataatgggagagggtggaataaaagtaattcctgattggtgcttaaaaagtttaagaaagatttgcgatagaaaaaaaatattattaatacttgatgaggtcc

SEQ ID NO: 245816 - DNA, 851 bp, Unknown
  Bacterial polypeptide expressing nucleotide sequence isolated from the Sargasso Sea
ttctgaaggtaatcgatttttagattatgtaggaggatatgctgttctaaacactggccatctccatcctagagttgttgatagagtcaaaaatcagcttgataatttttcacactcttgttttgcttttgcaccacacgaaaacgcagtaaaactatccgaagaactaaataataggtatcccatagattctgaaactaaaacatttatggtcaatagtggtgccgaggctgtagaaaatgcagttaagattgcaagatattatacaaataaaaaagcaattttatctttcaaaggtggattccatggaagaacataccttgccatgggtttaacgggaaaggacaaaccttataaagaaggctttggaccatttccagaatttgtaaagcatgctgtttatccatatagttatagagatatttcagatgaagatgcattgatgagtgtcaaagatgtacttaacaatcaacttgatcctaatgacacagcagcaattgtgattgaagttgaacttggggagggtgggtatattccagcctcaagtaattttttatcacaactaagagatatttgcgataaaaataatatcttattaatttttgatgaagttcagacaggctatggacgtactggaaatatgtttggtgcagagactgtaggggtaaatccagacattgttacattagcaaaaggaattgctggcggttttcctctagctgcagtattaggtaaatcagagataatggattctattcatgaggctggtataggaagtacatttggagcctcgcctgtgtcttgtgctgcagcattaggtgtattagatgcatttgataatgaagatattt

SEQ ID NO: 245817 - DNA, 409 bp, Unknown
  Bacterial polypeptide expressing nucleotide sequence isolated from the Sargasso Sea
ttgctttcaaaaaaggtatcaaaagggatgacccctggatctcatggaacaacatttggcggcaatcctttagcaatgtccgtcggcaatgcagtacttgatataatttttaaaaaaggttttttaaaacaagtaagtaaaaaaggaaattactttgataaacatttacataaacttcaaaaaaaatatcctcaaattatagaagaagtaagaggaataggtctaatcaaaggtttaaagcttctagttaacaattcaaaatttatggaaaaactcatgaaaaataaaatgttaacagtaaaagctgaagagaatgttattagactttttccacctctcacaataaataataatgaaatagatgaagctattaaaaaactcgataaaacatgcaaggacatgatttaaa

SEQ ID NO: 245818 - DNA, 445 bp, Unknown
  Bacterial polypeptide expressing nucleotide sequence isolated from the Sargasso Sea
atgaattctaaatatgtaatgaatacatattcgccttcagatttaatctttgaaagtgggcaaggtagttggctttttgagaaaaatggtgataggtatttagattttgcttctggaattgcggtcaactcagttgggcattgccacccacatttagttgcagaaattcaacggcaggctgctaaattaatacacacatctaatttatacaacattattcaacaagagaagcttgcaaaaaggttatgtgatttaagttttgctgatgaagtattttttgcaaattctggagcagaggctaacgaaggagcagtaaaagttgctagaaggtatatgcacgaaattggcaggcctgaacgtaatgtaatcctttgcatagaagggtgctttcatggaagaactttatcaatgctttcagcaacctctaaagtgaaaatagagttgg

SEQ ID NO: 245819 - DNA, 445 bp, Unknown
  Bacterial polypeptide expressing nucleotide sequence isolated from the Sargasso Sea
aatgataagatcaaattattcccatcacttatatggatttactgatttaaagtcattaaatgaaaggggtccattagtaattacttctggaaaaaatatctatgtttatgatattcataaaaaaaaatatttagatgcaaactcaggtttatggaatgcttgtgccgggtttgatcatccaggcttaatagaagtagcaaaaaaacaatatgaaaaatttgctggttaccattcactttttggtcgtttatctgaagaaacgttaaaactttcagataaaattatagaagtttctccatttgaagacggaagagttttcttttgtaactcaggatctgaagctaatgactcgatgattaaaatgttgtggatgatgaatcttagaaaaggtaatcctgaaaaaagaaaaattatatctagaattaatggttatcacggagtaact

SEQ ID NO: 245820 - DNA, 436 bp, Unknown
  Bacterial polypeptide expressing nucleotide sequence isolated from the Sargasso Sea
atgtcaaaagtagagcgtgactggtacgaccgctacatgatgccgaactacgcgccggcagaaatgatccccgtgcgcggctcgggttcacggatgtgggatcaggaaggcagggagtacattgattttggcggtgggattgcggttaacgccttgggccatgctcatccgcaactcgttgccgcattgacggagcaggccaatcggctttggcatacctcaaacgttctggctactgaaccagctctacagttggcccggcgactggtagaactcacttttgcggatcgggtcttcttcagcaactcgggtgccgaggccaacgaagccgccctcaagctggctcggcggtatgcattcgaccatcatggcgaagaaaaagaccggatcctggcgtttgagaatgcatttcatggtcggacgctttttacggtaa

SEQ ID NO: 245821 - DNA, 455 bp, Unknown
  Bacterial polypeptide expressing nucleotide sequence isolated from the Sargasso Sea
tatgagttatttagtcaaaaattataacagaaaaaaactttcatttagcaaaggcaaaggaagctatttatatggaatgaatggagtaaaatatcttgattttattcaaggaattgcagtgaactctttaggccacgctaatcctgatttagtcaagataataagccaacaatctaaaaaactttggcatgtatctaatgcctttataataccagagggtgaattgcttgcgagaaagttagcaaaaaaaacctttgctgattatgttatgtttcagaatagtggtgctgaagctacagaggcagctattaaggttgcaagaagatattttttctcagtaggcaaaccttataaaaatagaattttatgtataaaaaattccttccatggaagaacacttgccgcaatatatgcaagtggttctaagaaaatgacagagggttttggacctaaaa

SEQ ID NO: 245822 - DNA, 412 bp, Unknown
  Bacterial polypeptide expressing nucleotide sequence isolated from the Sargasso Sea
tatgagttatttggcaaaaaactataatagaaaaaaaatttcctttaaacatggaaaaggaagctatttatattccactgataacaaaaaatatttagactttgttcaaggaatagcagttaactctttaggtcatgcacatccaaaattagttaaaacaattagagatcaatcaaaaaaactttggcatgtatctaatgcttttcaaattccagaaggtgaaaaactcgctaaaaaactatgcaccaaaacttttgctgattttgttatgtttcaaaatagtggagctgaagctaccgaggcagcaattaaagttgctagaagatatttttactcaataggaaaacctaataaaaatagaattttgtgtataaaaaattccttccatggaagaactttagcagcaattttc

SEQ ID NO: 245823 - DNA, 628 bp, Unknown
  Bacterial polypeptide expressing nucleotide sequence isolated from the Sargasso Sea
tatgacgtatttagcaaataactataatcgaaaaaaaatttcctttaagtatggtaaaggaagttacttattttctactgacaataaaaaatatttagattttgttcaaggtattgctgtaaattcattgggtcatgcacaccctaggcttacaaaaacaattagcacccaagcaaaaaaattatggcatgtttcaaatgcttttcaaattccagaaggagaaaagttagctaaaaaattgtgtaaaaaaacttttgctgattatgtgatgtttcaaaatagtggggcagaagctactgaagctgcaataaaagttgctagaagatatttctattcaattggtaaaacgaataaaaacaaaatattatgtgttagaaactcctttcacggaagaactttggcagcaatttatgcaagtggatcaaagaaaatgattgagggatttggtccaaaagtaagtggatttgatcattttgactttggagatcacaagtccttaaaaaaaaaaattaccaaaaatacagctgcgattatggtggaaacgattatgggtgagggtggaataaaagtaatacctgattggtgtttagtggaattgagaaagctttgtaatcaaaaaaaaatatta

SEQ ID NO: 245824 - DNA, 481 bp, Unknown
  Bacterial polypeptide expressing nucleotide sequence isolated from the Sargasso Sea
aatgagttatttagctaaaaattataatagaagaaagttatcctttgtcagaggaaaaggaagttatctttatactaaaaatggaaataaatatttagatttcgttcagggaatagctgtaaattcattaggacatgctcatccacaattagttaaagctataaacaaacaatcaaaaaaactctggcatgtatctaatgcgtttataataccagaaggtgaagaattagcaaaaaaattagcaaaaaaaacttttgcggattatataatatttcaaaatagtggcacagaagctacagaagctgctataaaagttgcaagaagatatttttactcgataggaaaaccaaataaaaatagaattatttgtataaaaaattcatttcacggaagaactatagctgcaatccacgctagtggttcaaaaaaaatgacagaaggttttggcccaaaagttggggggtttgatcattttaatttt

SEQ ID NO: 245825 - DNA, 751 bp, Unknown
  Bacterial polypeptide expressing nucleotide sequence isolated from the Sargasso Sea
atgagtgctttagctaaaaattataacagaagaaaaattgcttttaaaagaggaaaaggaagtttcctctattctactaatggaaaaaaatatctagattttgttcagggcatagcagtcaattctttaggacatgctaatccatatttaattaaagctatgaataaacaggcaaagaaagtttggcatgtttcaaatgcatttataattcctgaaggagagaaacttgctaaaagacttacccaaaaaacttttgctgatcatgtaatatttcaaaatagcggtgcagaggctacagaagcagcgattaaggtagcaagaagatatttttattctattggaaaaccaaataaaaatagaattttatgtgttaaaaattcttttcacggtagaactattgcagccatttttgctagtggaagtaaaaaaatgactgaaggatttggacctaaaattgcaggatttgatcattttgtctttggaaatcataagtctttaaaaaaaaagattactaaaaatacagcagcaattatggttgaacctataatgggtgagggtggaattaaagtgataccagactggtgtttaaaagaattaagaaaactatgtaataaaaagaaaattcttttaatattagatgaagttcaatgtggaattggaagaagtggaaatttttttgcttttgaaaaatctaaggtaaaacccgacatagttccaattgctaaaggcattggaggtggatttccaaata

SEQ ID NO: 245826 - DNA, 772 bp, Unknown
  Bacterial polypeptide expressing nucleotide sequence isolated from the Sargasso Sea
catgagtaaaattttaaatacttataacagaaagaagatctctttttccaagggaaaaggaagcttcttatatacaccgaatggaaagaaatatttagatttcgttcaaggaattgctgtaaactgtcttggacatgctgacgattatttaattagatctatcaataaacaatctaaaaaattatggcacgtttcaaatgtttttactatccctgagcaagagagattggcgaaaagattagcccaaaaaacatttgctgattatgtaacttttcaaaattctggcgcagaagcaacagaggcagctataaaatttgccagaagatatttttactcaaaaggccaaccaaaaaagaatagagtactttgtattaataatagttttcatggtagaaccattgctgccatttttgctagtaatagcaaaaaagctattgaaggttttaaacctaaagtggatggttttgatcactttaactttggtgatcacaaaggtttagaaaaagccataactagcagaacagcggctatcatggtcgaaactattatgggagaagggggcataaaagttattccagatttttgtctcaaaggcttaagaaaattatgtaataagaaaaaaattttattaattcttgacgaagtacaatgcgggattggaagaagcggtaaattttttgcttttgaatatgcaaaaattaaacctgatatcgttccaatagcaaaagggattggtggaggttttccaataggtgcagttttagtaaataaa

SEQ ID NO: 245827 - DNA, 500 bp, Unknown
  Bacterial polypeptide expressing nucleotide sequence isolated from the Sargasso Sea
tatgagttctttagcaaaaaactataaaagaagaaacctatctttcactaaaggtaaaggatcttatttgtatacaaaaaaaggaataaagttcttagattttgttcaaggaattgctgttaactctttaggtcataccaatccaaatttagtaaaagcaataaacaaacaatcaaaaaaactttggcatgtttctaactccttcataattccagagggagaggaattagctaaaaaattaacaaagagaacttttgctgatgcagttatttttcaaaatagtggagcagaagctactgaggctgctataaaagttgctagaagatatttctattcaatgggtaaaaaaaaaaaaaatagaatcttatgtataaaaaattcttttcacggaagaactatcgcagcaataaatgccagtggatctaaaaaaatgattgaaggatttggaccaaaagtgggtggatttgatcattttaaattttgggaaccacaaagaacta

SEQ ID NO: 245828 - DNA, 601 bp, Unknown
  Bacterial polypeptide expressing nucleotide sequence isolated from the Sargasso Sea
aatgagttatttagctaaaaattataaaagaagaaatttatctttcaacataggtagaggatcctatttgtacacaaaaagtggaataaagtttttagattttgttcaagggattgctgttaattctttaggtcatgcaaacccaaatttagtaagagcaataaacaaacaatcaaaaaaactttggcatgtttctaactctttcataattccagaaggagaggagctagctagaaaattaacaaagagaacttttgccgatgcagttatttttcaaaatagtggagcagaagctactgaagctgctataaaagttgctagaagatatttttattcaataggtcaaaaaaaaaaaaatagaattttatgtataaaaaattcttttcatggaagaactatcgcagcaataaatgctagcggatcaaaaaaaatggttgaaggatttggcccaaaagtaggaggatttgatcattttaaatttggaaaccacaaggaactgaaaagaaaaattacaagtaaaactgcggctataatgattgaaccaataatgggtgaaagaggtattaaagtcataccttcatggtgtctcagagaactgaga

SEQ ID NO: 245829 - DNA, 706 bp, Unknown
  Bacterial polypeptide expressing nucleotide sequence isolated from the Sargasso Sea
atgacgtatttggcaaaaaactataaaagaagaaaaatagccttcaagtatggaaaagggagctatttattttcaaaagataataaaaagtatttagattttgttcagggaatagcagttaactctctaggtcatgcgcatcccaaattggtcaaaacaataaaccaacaatcaaaaaagctttggcatgtttcaaacgcctttcaaattccggagggagaaaaattggctaaaagaatctgccaaaaaacatttgcggattatgttatgtttcaaaatagtggtgcggaggctacagaggcagcaataaaagtagctagaagatatttttactctattggaaaaccaaataaaaacagaattttatgtgtaaaaaattcatttcatggcagaacattagcagcaatttatgctagtggatcaaagaaaatgactgaaggatttggcccaaaagttggaggatttgatcattttagatttggagatcacaaatctcttaaaaaaaagattacaaaaaaaacagcagctataatgatcgaacctataatgggtgaaggaggtattaaggtaataccagactggtgtttaaaagaattaagaaaattatgtaataaaaaaaaaatattattaattttggatgaagtgcagtgtggaatttcaagaacaggcacttttttttcatttgaaaaatctaaaattaaacccg

SEQ ID NO: 245830 - DNA, 464 bp, Unknown
  Bacterial polypeptide expressing nucleotide sequence isolated from the Sargasso Sea
tgatattatgactgtagcaaaggcattaggtggtggcttcccaataggcgcatgtatggctattgaagaggttgcaagtgcatttattcctggaacccatggatcgacattcgggggtaacccaatggctacaacaattgcaaatgcagttttggatgaaatccaaaatgtgcattttcttgaaaatgttgtagcaaatggggatttccttaaagagcgtttaaatttaatccgcagtagtggatcagtaattacagaggttagaggtaaaggcttaatgatagggatacagtgtaatatacctgcattagatatgatggctgcactaaggagaaaaaatttgctaactgttatagcagagtgcaatacaataagacttttgcccccgcttacagttgataggatagagattgacgaagcttgtgaagcaattgaatcagttgttaaggagttgggtagttgat

SEQ ID NO: 245831 - DNA, 868 bp, Unknown
  Bacterial polypeptide expressing nucleotide sequence isolated from the Sargasso Sea
tgaggcctcgatgaaagttgcaagaagatatttttattctattggcaaaccaaaaaaaaataaaattctttgtataaaaaattcatttcatggaagaacgattgcagcaatttttgctagcggatcaaaaaaaatgactgaaggatttggaccgaaagttccaggatttaatcattttaaatttggagattttaaatcactaaaaaaatctataacccaagatacggcagcaataatgatagagacaattatgggagaagggggaattaaagttcacagtaattcttttttgaaaaatctcagaagaatatgtaaccaaaaaaaaatattgttaattcttgatgaagttcagtgtggggtaggaagaagtggaaaattttttgcatttgagtatgcaaaaattaaacctgatattgtacctatagcaaagggaattggtggagggtttccgcttggtgcagttttgatgacaaaaaaagttgcttcagcaatggttccagggactcatggaacaacgaacggtggtaatccgcttgctatgagcgtaggtaatgtaatattagatcaaatttttaaaaaaggatttctaaaacatgtgaaaaaaatatctaaatactttcataatgagctaaataaaattaaaaaaaatcattctcaattaatcaaggaagtaagaggagttggtttattaattggtttacaactttttaaggatccaacaaaatttattgaaaaacttcaggacaacaagttgcttactataagatcaggtgaaaatactgtgagaattttgcctcctcttaatgttaaaaagtctgaaatagatattgcaataaaaattattcaaaaagtttgtaaagaattttaa

SEQ ID NO: 245832 - DNA, 622 bp, Unknown
  Bacterial polypeptide expressing nucleotide sequence isolated from the Sargasso Sea
aatgggagagggaggaattaaagtcattccagacttttgtttaagagaactaagaaaattatgcgataagaaaaaaattcttttaatgctggatgaagttcaatgtggaataggtaggtcaggagatttttttgcatttgaaaaatctaaagtaaaaccagacatagtcccaatagctaaagggattggaggagggtttccaataggagcagtacttatgaacaaaaaggtagctgcaggtatggtacctggaactcatggatctacatttggaggcaatccattagctatgtcagttggtaataaggtaatggatatagtttcaaaaaaaaagtttttaaataatgtaaaaaaattatctaaatatttcttatcaaacttgaacaaagttaaggaaaaatatcctaatattattaaacaaataagaggaagaggttttttaattgggatacagttacatcaagatcagacaaattttattaaaaaattaatggaaaataaattattaactattcgtgctgcagaaaatgttgtcagaattttaccacctcttaatgttaaaaaaagtgagattgatgaagctttaaaaattataaataaagtttgtagtcaatataaatag

SEQ ID NO: 245833 - DNA, 634 bp, Unknown
  Bacterial polypeptide expressing nucleotide sequence isolated from the Sargasso Sea
gatgacatttttagcgaataattataacagaaaaaaaatttcttttaaaaaaggtgttggaagctatttggttgccacaaatggtaagaaatatttagatttttgttcgggaattgctgttaatagtttaggtcatgcaaatccaagattagtaaaagcattgtataaccaagcaaaaaaagtttggcatgtttcaaacgcttttacaattcccgagggagaaattctagcaaaaaaattggttaaaaaaacttttgcagattcagtgatatttcaaaattctggaactgaagcaacagaagtcgctgtaaaagtggctagaagatatttttattcaattggaaaaccgaaaaaaaatagaatcctttgtgtaaaaaattcatttcacggtcgaacaatagctgcaatttttgcaagtggatcaaaaaaaatgacagagggttttggccctaaagtaagtggtttcgatcattttatttttggcgatcacgattctcttaaaagaaaaattacaaagaatactgctgctattatggttgaaacaattatgggtgaaggcggaataaaagtaattccagactggtgtttaagagatttgcgaaaattatgtaataaaaaaaaaatattactcata

SEQ ID NO: 245834 - DNA, 814 bp, Unknown
  Bacterial polypeptide expressing nucleotide sequence isolated from the Sargasso Sea
tctgtttcgtcgccctgcgccgagcctggacgatttgatcgtgaacgcgcgccatgacggcttcagtaaatccctgatgccgactgtggcaaggcccgcgcaggtgtttgtgcgtggccagggctcctggctctggggcagcgacgagcgcgcctatctggatttcagccagggcagcgccgccaacagcctcggtcatagcccgcaggtattgatcaaagccctggccgatcagactcatatgctgatcaaccctggcaacggcctgcacaaccgcgcccaactgaacctcgtcgatcggctgtgcgatcacaccggcagcgaccagggttacctgctcaacagcggctcggaagcctgtgaagccgcgatcaaactggcgcgtaaatggggccagctgtatcgcggtggtgcctatcacatcatcagcgccagcagcggttgtcatggtcgaagctttgcggcattggcagcctcggctaatgctggcggcaaccgttttgagccgcaactatcgggcttcagccatgtgcccttcaacgatttgccggcgctgcatgcagccgtcgatgcccaaacagttgccatcatgttagagccgatccagagtgaagctggcgttattcctgctaccgagcactatttgaagggcgtcgagcgcctgtgccgcgaactggggatcctgctgatcctcgatgaagtgcaaaccggcattggccgttgcggcagcctgctggctgaacaacagtacggcgtgcgtgccgacatcatcaccctcggcaaaggcttgggcggcggtgtgccgttggcggcg

SEQ ID NO: 245835 - DNA, 629 bp, Unknown
  Bacterial polypeptide expressing nucleotide sequence isolated from the Sargasso Sea
aatgagttctttagctaaaaattataaaagaagaaacttatccttcaataaaggtaaaggatcttttttatatacaaaaagaggaataaagtatttagattttgttcaaggaattgctgttaattctttaggtcatgcaaacccgaatttagtaaaagcaataaataaacaatcaaaaaaactttggcacgtttctaattcttttattattcctgagggcgaaacgttagcaaaaaaattaaccaagaatacttttgctgatgctgttatttttcaaaatagtggagcagaggctacagaagctgccataaaagttgctaggagatatttttattcaataggtcaaccaaaaaaaaatagaattctatgtataaaaaattcgtttcatggaagaactattgcagcaataaatgctagtggatcaaaaaaaatggtagagggatttggcccaaaagtgggcggatttgatcattttaaatttggcaaccataaggaattgaaaagaaaaattacaagtaaaactgctgctataatgattgaaccaataatgggcgagggaggtattaaagtcatacctccatggtgtcttagagaattgagaaagatttgtaataaaaaaaaaattcttc

SEQ ID NO: 245836 - DNA, 712 bp, Unknown
  Bacterial polypeptide expressing nucleotide sequence isolated from the Sargasso Sea
aatgaattccaaatatatcatgaagacttattctccttccgatttaagctttgataaaggtttagggagttggctgtttgatgataaaggttataaatatttagattttgcatctgggattgctgttaactctgttgggcactcacaccctcatgttgtatcggcaattcaaaaacaagctgctaaattaatacatacatcgaatttatataatattcctcaacagcaaaagcttgcgaaaaggctttgtgacttaagttttgctgattgtgtttttttttctaactcgggagctgaagctaatgaaggagctgtaaaagtagccagaagatatatgtttgaaaagggaaaacctgatcgtaatgtgatactttgcgttgacggatgctttcatggaaggacaatttctatgctctcggccacatcaaaaaaagagaatagaaccggttttggtcctctgcctggagggttcaggcatattgcatttaatgatttaaattctctagctgagcaatttgctgccaaagacgtggctgcaatcatgattgaaccagttttaggagagggtggtgttaaatcaatatccaaagaattcttcaaaaaagcccaagaattagctaataataataattgcttggtaatatcagatgaagttcaaacaggtataggcagattaggaacaaaaattggttatgaaaaaactgatcttaaa

SEQ ID NO: 245837 - DNA, 186 bp, Unknown
  Bacterial polypeptide expressing nucleotide sequence isolated from the Sargasso Sea
tgtcaccctaaactagtaaaaactttaaaaaaacaatctgaattactatggcatacttcgaatctttataaaaacagaaatcaagaattatttgcaaaagaattgtgtagtaaaacatttgcagataaagttttttttacaaactcgggcgccgaagctatagaatgtggtttaaagatagtaaca

SEQ ID NO: 245838 - DNA, 730 bp, Unknown
  Bacterial polypeptide expressing nucleotide sequence isolated from the Sargasso Sea
aatgagttatttagctaaaaattataatagaaaaaaattatcatttgttagaggaaaaggaagtttcctttatactaaaaatggtgccaaatatttagattttgttcagggaattgctgtaaattcattgggtcatgctcatccacaattagttaaagctataaacaaacaatcaaaaaaactctggcatgtatccaatgcatttgtaatacctgaaggggaagagttagcaaaaaaattagcgcaaaaaacttttgcagattatattatgtttcaaaatagtggcgcagaagctactgaggctgctataaaagttgcgagaagatattttttttcaataggaaaaccaaataaaaatagaattatttgtattaaaaattcatttcatggaaggactatagctgcaatccatgcaagtggttctaaaaaaatgacagaaggttttggcccaaaagttgggggttttgatcatttcaattttggagatcataaaaaattgaaaaaattaattaccaaaaaaacagccgcaattatggttgaaacaattatgggagaaggtggaattaaaaaaataccagattggtgcctaagaggattaagaaaactatgcgataaaaaaagaattttattaatattagatgaagtccagtgtggaataggtagaacaggagatttctttgcatttgaaagctctaaagtgaagccagacatagtacccatgcaaaaggga

SEQ ID NO: 245839 - DNA, 823 bp, Unknown
  Bacterial polypeptide expressing nucleotide sequence isolated from the Sargasso Sea
tttgttagaggaaagggctgttatttatatactacatctagggaagaaatatttagattttgcaggtggaatagctgttaattcattaggacattgtcatccgcaattagtaaaaatattaaataaacaatctaaaatactttggcatacatcaaatttatataaaaataataaccaagaattatttgctaaagaactatgtaataaaacatttgcagacagagttttttttactaattctggtgctgaggcaattgaatgtggtttaaaagtgataaaaagttattggaatttaaaaaacaaaaataaaaaaaccattattacttttaaaggcgcttttcatggaagaacttttgcagctctatcagcacaaaaaaataaaaaatactctgaaggctttacccctttacttagtggttttaaaaatattaccttcaatgatgaaaaagtattattgaaaaatattactaaagaaaccgctgcaataatgattgagccagttcaaggcgaaggtggtattatacccgcttcacttaaatttttaaaatatattaaaaaaatttgcttaaaacatgatatcatcctttttttagatgaggttcagtctggttttggaagatctggacaattatatgctcatgaatgggctaaaattaagcctgatatattagcaacagcaaaaggaataggttcgggatttcctttgggtgcatgtttagcgacttcaaaggtgagtgtgggtatgactaaaggaaaacatggttcaacttatggaggaaatccattagctgtagcggtcggtagagaagttctgaagattatt

SEQ ID NO: 245840 - DNA, 568 bp, Unknown
  Bacterial polypeptide expressing nucleotide sequence isolated from the Sargasso Sea
tatgagtgcaattttaaatacttacaatagacaaaaaatttcttttaaaagaggaaaaggtagctttttgtatgctgaaaatggaaaaaagtatttagatttcgttcaaggtattgcagtaaattgccttggtcattcaaatgattatttaaacaaagctatacaaaaacaatcaaaaagattatggcatgtatctaatgtatttactattcctgaacaagaaaaattagctagaagacttaaacaaaaaacttttgccgattacgttttttttcaaaattctggagcggaggcaaccgaagcagcaattaagtttgctagaagatacttttattcaaaaggacagccaaaaaaaaatagaattttgtgtataaataatagttttcacggaagaacgttagcaactatttttgcaactaataataaaaaattaactgaaggcttttatcctaaagtcgatggattcgaccattttaactttggtgaccataaaggattagaaaaggctattactaagaggactgcagcagtaatggtggagacaattttgggagaaggaggaataaaa

SEQ ID NO: 245841 - DNA, 550 bp, Unknown
  Bacterial polypeptide expressing nucleotide sequence isolated from the Sargasso Sea
atgctaaaatcaaaccaatcacatcatctatatggatttactgatttaaaaactcttaatgaaagaggccctgttataataacacatggtaagggtatttatgtgtatgatattcatgaaaaaaaatatctagatgctaattctggtttatggaatgcttgtgcaggttttgatcatccaggtttaatagagatagctcagaaacaatatgcaaagtttgctggataccattccttgtttggcagactatctgaagaaactttagaattatctgataaaataattgaagtctctccatttgatgatggcagagtctttttttgtaattcaggatcagaagcaaatgacacaatggttaaaatgttgtggatgttaaataagatgaaaggaaatcctcaaaaaagaaaaattataacacgaattaatggatatcatggagttacacttggtgctacttccatgactggcaaaccatataatcaagtttttcaactaccattagatggttttattcatgctgattgcccgccattattggaaattgcaaaag

SEQ ID NO: 245842 - DNA, 484 bp, Unknown
  Bacterial polypeptide expressing nucleotide sequence isolated from the Sargasso Sea
aatgagtgctttagccaaaaattacaacagaagaaaaattgcttttaaaagagggaagggcagttttttatattcgaccaatggcaaaaaatatctggattttgttcagggtatagcggttaattccctgggccatgcaaatccttacttaaccagggcaatgaataagcaagctaagaaagtttggcatgtttcaaacgcatttgttattcctgaaagcgaaaggcttgctaaaagattaacgcaaaaaacttttgcagattatgtaatatttcaaaatagtggcgttgaagcgacagaggccgctataaaggccgcaagaagatacttttattcaattggaaagcctcaaaaaaacagaattctttgtataaaaaattcttttcacggaagaactctggcagcaatttttgccagcggatcaaaaaaaatgacagagggatttggacctaaagtacctggatttgatcattttaattttggc

SEQ ID NO: 245843 - DNA, 775 bp, Unknown
  Bacterial polypeptide expressing nucleotide sequence isolated from the Sargasso Sea
catgagtaaaattttaaatacttataacagaaaaaaaatctctttttccaagggaaaaggaagtttcttatatacaacaaatggaaagaaatatttagatttcgttcaaggtatcgctgttaactgccttggtcatgccaataaccatttaatcaaatcaataaataaacaatccaaaaaattgtggcacatttcaaacgtttttactatccctgagcaagagaaattggcaaaaagattagcccaaaaaacatttgcagattatgtaacttttcaaaattctggcgcagaagctacggaggcagctattaagtttgctagaagatatttttattcaaaaggtcaaccaaaaaaaaatagagttctttgtattaataatagttttcatggaagaactatcgcagctatttttgcaagtaacagtaaaaaagctacagaaggttttaaacctaaagtagatggttttgatcactttaactttggtgatcataaaggtttagaaaaagctataactagcagaacagcagctattatggttgagactattatgggggaaggggggattaaagtaattccggatttttgcctcaaaggtttaagagaactgtgtaacaagaaaaaaattttattaattcttgatgaagtgcaatgtggtattggaagaagtggtaaattttttgcttttgaatatgcaaaaattaaacctgatatcgttccaatagcaaaaggtattggaggcggttttcctataggtgcagttttagttaataaaaaa

SEQ ID NO: 245844 - DNA, 640 bp, Unknown
  Bacterial polypeptide expressing nucleotide sequence isolated from the Sargasso Sea
atgagttatttagcaaaaaattataatagaaaaaaaatttcctttaaatacggaaaaggaagttatttatatactaatggtaacaaaaaatatttagattttgttcaaggaatagctgtcaactctttaggacatgctcatccaaaattagttaaaacaataaaagatcaatcaaaaaaactttggcacgtttcaaatgcttttcaaattccagagggtgaaaaacttgctaaaaaattatgcgctcaaacttttgctgattatgtaatgtttcaaaatagtggagctgaagctacagaagcagcaattaaagttgctagaagatatttttactcaataggtaaaccaaataaaaatagaattttatgtataaaaaactctttccatggcagaactttagcagcaatttttgctagtggatcaaagaaaatgacagagggatttgctccaaaagtaacaggttttgatcacttcagttttggagatcatcactctcttaaaaaaaaaattaacaaaaacacagctgctattatggttgaaacaattatgggtgaaggtggtataaaagtgataccagataggtgcttaaaagaattaagagcattatgtaataagaaaaaaatattattaattctgacga

SEQ ID NO: 245845 - DNA, 448 bp, Unknown
  Bacterial polypeptide expressing nucleotide sequence isolated from the Sargasso Sea
ggtttcccaatcggtgccatgctaaccaccacagcaattgctgcgcatctaaaagcaggtacacacggcagtacatatggtggtaaccctctggcttgtgctgtagctgaaaaggcttttgatattgttaatcaaccggaagtgcttgaaggtgtagttaaaaaagaagcgcttttccgtgaactacttggcgctattaacgagaagtacaatgtatttgaagaagttcgtggtcaaggcatgttgcttggttgtgcacttaatgaaaaatatcaaggtcgtgcgcgtgatttcatgatggcggcgactaaagagcaccttatgtgtctagtggcaggtgtgaacgttatccgctttgcgccttcacttattattcctgatgaagatatcaaagctggccttgcacgttttgaacgcgccgttgcagccgttgtaaacgccgaataat

SEQ ID NO: 245846 - DNA, 517 bp, Unknown
  Bacterial polypeptide expressing nucleotide sequence isolated from the Sargasso Sea
tatgagttcattggcaagtaattataacagaagaaaaatttcttttaaatatggaagaggtgcttttttatattcaaccaagggtaaaaaatatttagattttgttcaaggaatagctgtaaattcacttggacacgcaaatccaaaactaataaaggcattaaataagcaagcgaaacacgtttggcatgtatcaaatgcttttcaaataccagaagctgaaaagctagcaaaaatgttaactaaaaatacgtttgccgataaagtgatatttcagaatagcggtgctgaggcaacagagttagcaattaaagcagcaagaagatattttttttccataggtaaacctcacaaaaatagaatactttgcataaagaactcatttcatggaagaactattgcagcaatctatgcaagtggttcaaaaaaaatgactgagggttttggacctaaagttccaggatttgatcatattgaatttagagattttgaaccaaggttttcaaatattagaaac

SEQ ID NO: 245847 - DNA, 700 bp, Unknown
  Bacterial polypeptide expressing nucleotide sequence isolated from the Sargasso Sea
tatgagcaatttagcgaaaaactataacagaaaaaaaatttcatttaagtatggtaagggaagctatttatattcaactaatggaaaaaaatatttagattttgttcaaggtatagccgtgaattctttaggacatgcacatcctaaattggtaaatactataaataaacagtcaaaaaaactttggcatgtttcaaatgcatttcaaattccagagggagaaatgttagcaaaaaaattagcaaaaaaaacttttgctgactttgttatgtttcaaaatagtggtacagaagcgacagaagctgcgataaaagctgcaagaagatatttctactcaattggaaaaccaaaaaaaaatagaattttatgtattaaaaatagttttcatggaagaactttggcagcaatttttgcaagcggatcaaagaaaatgacagagggatttggtccaaaagtaacaggtttcgatcacttcacttttggcgatcaccattctcttaaaaagaaaataaataaaaatacagctgctattatggttgaaactattatgggcgaaggtggcattaaagttattcctgattggtgcttaaaagaattaagaacattatgtaacaagaaaaaaatattattaattcttgacgaagttcagtgtggaataggaagatctggtgatttctttgcttttgaaaatctaaagtaa

SEQ ID NO: 245848 - DNA, 455 bp, Unknown
  Bacterial polypeptide expressing nucleotide sequence isolated from the Sargasso Sea
tcctatcgcgaaaggaataggcggaggttttcctataggagcagtgctaatgaacaaaaaggttgcatctgcgatgaccgttggtagtcatggatcaacctttggcggaaatccattagctatgaaaattggaaatgaggtgatggatattgtatcaaataaaaattttttaaataatataaaaaaaaattcaaaattttttttaaaagaattaaataacttaaaaaaaaagtttcctaaaattataaaaaacataagaggaagaggttttttaattggaatacaacttcacaatgatcaaactaagttcattgacgatttgatgaaaaatgaattacttactattaaagctgctgaaaatgttgtgagaattttacctcctttaaatgtaaaaaaaagtgaaataagttcagctttaaagattataaataaagtttgtcaaaactacaattaat

SEQ ID NO: 245849 - DNA, 694 bp, Unknown
  Bacterial polypeptide expressing nucleotide sequence isolated from the Sargasso Sea
atgacttatttggcaaaaaactataatcgaaaaaaaatttcctttaagtatgggaaaggaagttatttgttttcaactgataacaaaaaatatttagattttgttcaaggtattgccgtaaattcattgggtcatgcgcacccaaaacttacgaaaactattagtgctcaagcaaaaaaattatggcatgtttcgaatgcttttcaaattccagaaggagaaaagttagccagaaaattgtgtaaaaaaacttttgctaattacgtgatgtttcaaaatagtggtgcagaagctactgaggctgcaataaaagttgctagaagatatttctattcaattggtaaaaccaaaaaaaacaaaatattatgtgttagaaattcctttcacggaagaacgttagctgcgatttatgcgagtggatcaaagaaaatgacagagggatttggtccgaaagtaagtggatttgatcattttgtctttggagatcacaagtctttaaagaaaaaaatcaccaaaaatactgctgctattatggtggaaacgattatgggtgagggtggaataaaagtaatacctgattggtgtttagtggaattgagaaagttatgtaaccaaaaaaaaatattactaatcttagatgaagttcagtgtggaatagcaagatctggtgatttttttgcgtttgaaaaatcta

SEQ ID NO: 245850 - DNA, 750 bp, Unknown
  Bacterial polypeptide expressing nucleotide sequence isolated from the Sargasso Sea
tagaaggaacattgcttttaaaagaggcaagggaagttttttatattccactaatggaaaaaaatatttagattttgttcaaggaatcgctgtaaattctttagggcattcaaacccttatttaataaaagaaatgaataaacaagctaaaaaactttggcatgtttcaaatgcatttgttattcccgaaggcgagagacttgcaagaagattaaccaaaaaaacttttgcaaattctataatttttcaaaatagcggcgttgaagcaaccgaagcagccataaaagcggctagaagatatttttattcaattggcaaaccttataaaaatagaattctttgtataaacaattcctttcacggaagaactttggcagcaatttttgctagtggatctaaaaaaatgactgagggatttggacccaaggttccaggcttcgaccactttaattttggcgatcatgaaaagttggaaaaagccattacaaaaaaaacagctgctataatgtgcgaaacaataatgggagaatcaggcattaaagttataccagagtggtgtctaaaaggtttaagaaagctttgtaataagaaaaaaattttattgatcttggatgaagtacaatgtgggataggtagatcgggtagatttttagcttttgagtatgccaaaattaaacccgatatagttcccattgccaaaggtataggtggtggtttcccacttggcgcagttttattgagcaaaaaggt

SEQ ID NO: 245851 - DNA, 439 bp, Unknown
  Bacterial polypeptide expressing nucleotide sequence isolated from the Sargasso Sea
atgagttctctagcaaaaaactataaaagaaggaacctatctttcaacaaaggcaaaggatcttatttgtatacaaaaaaaggaataaagtttttagattttgttcaaggaattgctgttaattctttaggtcatgcgaatccaaatttagtaaaagcaataaacaaacaatcaaaaaaactttggcatgtttctaactccttcataattccagagggagaggaattagctaaaaaattaacaaagagaacttttgctgatgcagttatttttcaaaatagtggagcagaagctacagaggctgctataaaagttgctagaagatatttttattcaattggtcaaaaaaaaaaaaatagaattttatgtataaaaaattcttttcacggaagaactattgcagcaataaatgccagtggatctaaaaaaatgtcgaagg

SEQ ID NO: 245852 - DNA, 532 bp, Unknown
  Bacterial polypeptide expressing nucleotide sequence isolated from the Sargasso Sea
tatgagttccttagctaaaaattataaaagaagaaacttatctttcaataaaggtaaaggatcttttttgtattcacatggaggtaaaaagtttttagattttgtacaaggaattgctgttaattctttaggtcatgcaaacccaaatttagtgaaagcaataaataaacaatcgaaaaaactttggcatgtttctaactctttcataattcctgagggagaggaattagctaaaaaattaacaaagagatcatttgcagatgctgttatttttcaaaatagtggtgcagaagcaacagagactgccataaaagttgctagaagatattttttttctataggtaaaccaaaaaagaatagaattctttgtattaaaaattcttttcatggaaggactattgcagcaataaacgcaagtggatcaaaaaaaatggtggaaggatttggtccaaaagtgggcggatttgatcattttaaatttggaaatcacaaggagttaaaaaggaaaattacaagtaaaaccgctgcaatt

SEQ ID NO: 245853 - DNA, 564 bp, Unknown
  Bacterial polypeptide expressing nucleotide sequence isolated from the Sargasso Sea
tatgagctttttagcaaaaaattataatagaaaaaaaattgcatttacaaaagggaaaggtagttatctattttcaaccaatggtaaaaaatatttagattttgttcaaggtattgctgtcaattctttaggtcatgctcatccaaagttaattaaaactattaaggatcaatcaaaaaaactttggcatgtttctaatgcttttcaaattcctgagggagaaaaattagctaaaaagttatgtcagaaaacattcgcagattatgtaatgtttcaaaatagtggcactgaagccactgaagctgcaataaaagcagcccgaagatattattattcaattggtaaacctaacaaaaatagaattttatgtattaaaaattcgtttcatggaagaacaattgcagcaatttatgcgagtggatcaaaaaaaatgactcaagggtttggacctaaagttcctggatttgatcatataaatttcagagactcaaatccaagattcccaaatttaagaaaaaaaattaaaaaaaatacagctgcaattatggtggaaactataatggg

SEQ ID NO: 245854 - DNA, 577 bp, Unknown
  Bacterial polypeptide expressing nucleotide sequence isolated from the Sargasso Sea
tatgagcgctttagcaccaaattataaaagaaaaaatttatcttttgtcaaaggcaaaggtagttttctagtaacatcagatggtaaaatatatttagattttgttcaagggatcgcagtaaattcacttggacatgcaaataaaaaacttattaatgcaataaataaacaatccaaaaaactttggcatgtatctaatgcttttaaaataccagagggagaaagattagcaaagagattagtagagaaaactttcgcagactctgttatcttccaaaacagtggagccgaagcaacagaagcagcaattaaagttgcaagaagatatttttattcaaaaggcaaaaaacataaaaatagaattatttgcataaaaaattcattccatggaagaacaattgcagcaatacacgcaagcggttcaaaaaaaatgactgaaggatttgggccaaaagttccaggctttgatcattttgaatttggcgatcacaaaaaattaaaaaaattgattaataaaaatactgcagccattatgattgaaacagttatgggcgagggaggcattaaagtaattcct

SEQ ID NO: 245855 - DNA, 697 bp, Unknown
  Bacterial polypeptide expressing nucleotide sequence isolated from the Sargasso Sea
atgagttcattagcaaataattataaccgaagaaaattatcttttaagtatggaaaaggaagttttttaatttcaaccaaaggtaaaaaatatttagattttgtacaaggaatagctgttaattcacttggccactctaatccaagcttaataaaagcattaaacaaacaatcaaaaaagctttggcatttatctaatgcatttcaaattcctgaagcagaaaagttagcaaaaatgttaacacaaaagacatttgccgacaaagttatttttcaaaatagtggtgctgaagcaactgaggcggcaattaaaattgctagaagatattttttctataaaggaaaacctaataaaaatagagtactttgtataaaaaattcatttcatggaagaacaatcgctgcaatttttgcaagtggctcaaataaaatgactgaaggatatggtccaaaagttccaggatttgatcatattgagtttagaaaatttaagccaagatttccaaatataagaaataaaataaaaaaggatacagccgctataatggtagaaactgttatgggagaaggaggcataaagactattcctgataaatgtcttaaatacttaagaaaaatttgtaatgaaaaaaaaatattattaattttagatgaagtacaatccggcgtaggcagatcaggaaacttttttgctttcg

SEQ ID NO: 245856 - DNA, 373 bp, Unknown
  Bacterial polypeptide expressing nucleotide sequence isolated from the Sargasso Sea
atgaatacttacggacgggctgaaattgccttcgtgcgggggcatggatgctggctggagagtgaatcacgcgagcggtatttagactgtgccagcggcatcgcggtcaacacacttggccattcgcacccgcggctggtcacggcgttacaggaccaagccagcaaattgtggcatacgtcaaatctctaccgtatcccgggccaagagcaggtggcaaaaagactggcgtcattatctggtcttgatcaggtgtttttttgcaattctggggctgaagccaccgaggcggcggtaaaaattgcccgccgggcagcctatgagaagggcatgcctgatcgcacaacaattttatgtgcaagcggcagcagtt

SEQ ID NO: 245857 - DNA, 469 bp, Unknown
  Bacterial polypeptide expressing nucleotide sequence isolated from the Sargasso Sea
aatgacatttttagcaaacaattataatagaaaaaaaatttcctttaaaaagggctctggcagctatctggttgccactaatggtaagagatatttagatttttgctcaggaatagctgttaatagtttaggtcatgcaaatcccagattaataaaggcattatataaacaagcaaaaaaagtttggcacgtttcaaacgctttcacaattccagaaggggagatgttagcaaaaaaattggtcaaaaaaacttttgcagaatcaattatatttcaaaattctggtactgaagcaacagaagttgcaataaaagtggctagaagatatttttattcaattggaaaaccaaaaaaaaatagaatcctttgtgtgaaaaattcatttcatggtcggactatagccgcaatttttgctagtggatcaaaaaaaatgaccgaaggttttggtccaaaagtaagtgggatttga

SEQ ID NO: 245858 - DNA, 732 bp, Unknown
  Bacterial polypeptide expressing nucleotide sequence isolated from the Sargasso Sea
aatgtcttcactagcaaataattataatcgtagaaatatttcctttaaaagaggaaagggaagttttctatattcaacaaaaggtgtaaaatatttagatttcattcaaggaattgcagtaaattctttaggtcattcaaatacatatttaaacaaagcgttagctaatcagtcaaaacaactttggcatgtttcaaatgcattccagattccagagggagagaagcttgcaagaagacttacaaaaaaaacgtttgcaaattatgtaatatttcaaaactctggagcagaagctacggaagccgcaataaaggctgctagaagatttttttatttaaaaaataaaccttataaaaatagaattctatgtattaaaaattcttttcatggaagaacacttgccgcaattcatgctagtggttcaaaaaaaatgaccgaaggttttggcccaaaaattccagggtttgatcattttacatttggtgaccacgaatctttaaaaaaatcaataacaaaaaaaacagctgcgattatgatagagccggttttaggagagggtggtattaaagtgataccaaaatggtgtttaaaaggtttaagaaaaatatgtgatcaaaaaaaaatattacttatttgcgacgaagttcaatgtggcataggaagatcaggtaagttttttgccttcgaatattcaggaataaagccagatattgtaccaatagcaaaaggtat

SEQ ID NO: 245859 - DNA, 481 bp, Unknown
  Bacterial polypeptide expressing nucleotide sequence isolated from the Sargasso Sea
tatgccaacttatggtgaaagaaatttagtttttaaaaaaggtaaaggctgttatttatatacgccctcaggaaaaaaatatttagattttgcaggaggtattgcagtaaattcacttggacactgccatcctaaattggtaagtgttttaaaaaaacaatctgaaatactttggcacacatcaaatctatataagaataattcacaagagttatttgcaaaagaactttgtaaaaacacatttgcagataaagttttttttacaaattcaggtgtagaagctatagaatgtggtttaaaagtagtaaaaagttactggaatttaaaaaataaaaataaaaaaaatattattacttttaaaggcgcttttcatggcagaacttttgctgctctatctgctcaaaaaaataaaaaatactctgaaggtttcactcctttgctaggggggtttaaaaacataccttttaacgatgagaaagct

SEQ ID NO: 245860 - DNA, 664 bp, Unknown
  Bacterial polypeptide expressing nucleotide sequence isolated from the Sargasso Sea
aatgagtgcattagctaaaaactataatagaagaaaaattgcttttaagagaggtaatggaagttttctttatgctggtaacggaaaaaaatatctagattttgttcaaggtatagcagttaactcactaggtcatgctaatccatatttaattaaagctataaataatcaggcaaagaaggtctggcatgtatcaaatgcatttataattccagaaggtgaaagacttgcaaaaagacttacgcagaaaacttttgcagattacgttttatttcaaaactctggtactgaagcaacagaagcggcaataaaggttgcgagaaggtatttttattctataggaaaaccaaataaaaatagaattttatgcattaaaaattcatttcatggaagaaccattgcagcaatttttgcaagtggatcaaagaaaatgactgagggttttggtccaaaagttggaggctttgatcattttaaatttggagatcatcaatctctaaaaaaagctatttcaaataaaacagcggcaattatggttgaacctataatgggagaaggtggtattaaagttattccagactggtgcttgaaagaactaagaaaaatttgcaacaagaaaaaaatacttttaatattagacgaagtgcaatgtggtataggaaga

SEQ ID NO: 245861 - DNA, 661 bp, Unknown
  Bacterial polypeptide expressing nucleotide sequence isolated from the Sargasso Sea
aatgagttctctagctaaaaattataacagaagaaaaattgcttttaaaagaggaaaaggaagttttttatattcaactaacggaaaaaaatatctagattttgttcaaggtatagcagttaattccttaggccatgctaatccatatttaataaaagctatgaataaacaggctaaaaaagtttggcatgtatcaaatgcgtttataattccagaaggtgaaaaacttgcaaaaagaattacgcaaaaaacatttgctgattatattatttttcaaaattcaggcacagaggcaacagaagcagcgataaaagttgcaagaagatatttttattcaataggaaagccaaataaaaatagaattttatgtgtgaaaaattcatttcatggaagaaccatagcagcaatctttgccagtggatcaaaaaaaatgacagaaggctttggacctaaagttccaggatttgaccatattgaatttagaaaatttaagccaagatttccaaatattagaagtaaaattaaaaagaataccgcagcaataatggtagagactataatgggcgagggtggcattaagcctataccagataaatgtctcaaatatttaagaaaaatttgtaatgaaaaaaaaatattattaattctagatgaggttcaa

SEQ ID NO: 245862 - DNA, 661 bp, Unknown
  Bacterial polypeptide expressing nucleotide sequence isolated from the Sargasso Sea
aaaaaaactgcagctataatgtgcgaaactgtaatgggggaatccggaattaaagttatacctgattggtgtttgagaggtttaagaaaaatttgtaatcaaaaaaaaatattattaattctggatgaagttcagtgcggagtcggaagatcagggaaattttttgcatttgaatacgcaaaaataaaaccagatattgttcctatagctaaaggcataggaggtggtttccctattggcgcagtattaatgaatagaaaagttgcctcagctatgtcaccaggttctcacggaagtacttttggaggaagtcctctagctatgagtgttggaaatgctgttttagatcaaatttttaaaaaaggatttttaaaaaatgttcagaaactatctaaatattttatatttaagctaaatgagataaaaaaagattaccccaatgtagttaaagaagtcagaggtattggattgctcataggtattcaacttgttgtaaatcaaagtaaattcattaaaaagcttgaaatgaacaaattattaacaatcaaagcaggggagaatgtagtcagaatattgcctcctttaaatattaaaaaacaggagttagatcttgcattaaaaatcataagaaaagtttgcaagcaatttaatttatcatgaa

SEQ ID NO: 245863 - DNA, 488 bp, Unknown
  Bacterial polypeptide expressing nucleotide sequence isolated from the Sargasso Sea
tatgccaacttatggtgataaaactcttgaatttgtaaaaggtaaaggatgttatttatactctagtcaaaacaaaaagtatttagattttgcaagtggcatagctgtaaactctcttggtcactgtcaccctaaactaatagatgcactgaataagcaatcgaaacaactctggcatgtttcaaacttatataaaattaagaaacaggaacaatttgcaaaattactttgtaaaaactcttttgcagacaaagttttttttactaattctggaactgaatctattgaatgtggaattaaaataattagaggatatcattcatatcacaagacaaaaaaaacagatattataacttttgatggtgcatttcatggaagaacttatggcgcactttcagcacaaaaaaacaaaaaatactctaatggttttggccctatgcttaaaggttttaaacaaattgaattcaataatgaaaaaaaattaatat

SEQ ID NO: 245864 - DNA, 730 bp, Unknown
  Bacterial polypeptide expressing nucleotide sequence isolated from the Sargasso Sea
atgagttcgctagcaaaaaattataaaagaagaaacttgtcttttagaaaaggaaagggatctttcctttatacttataatggagttaaatttttagattttgttcagggtattgctgtaaattcgttaggtcacacaaatccagttttagttaaagcaattaaaaagcaatcacaaaaactctggcatgtttcaaattcatttaaaattcctgaaggagaagagttagctaaaaaattgacaaataaaacatttgcagatgcagttattttccaaaatagtggagctgaagcaacagaggctgctataaaagttgcaagaagatatttttattcaattggaaagccaaaaaaaaatagaattttatgtataaaaaattcttttcatggaagaacaattgcagcaataaatgcaagtggatcaaaaaaaatgactgagggatttggtccaagagtaggaggatttgaccattttaaatttggaaaccataaggaacttaaaaaaaaaataacaaataaaacagctgctataatgattgaaccgataatgggagagggtgggataaaagtgatacccacgtggtgtttaaaagaaataagaaagatttgcaacaagaaaaaaattcttttaattttggatgaggtccaatgtggaataggcagaactggcaggtttttttcatatgaatatgcaaatataaaacctgatatagttccgatagctaaaggaa

SEQ ID NO: 245865 - DNA, 688 bp, Unknown
  Bacterial polypeptide expressing nucleotide sequence isolated from the Sargasso Sea
gatgagtgcacttgctaaaaattataatagaaaaaaaatttcttttaaaaaaggtaaaggaagttttctttacggcaacaacggaaaaaaatatttagactttgttcaagggatagcagtaaattctttaggacattcaaatcctcatttaataaatgctataaacaaacaagcaaaaaaattatggcatgtatcgaatgcttttaccataccagagggcgaaaaattagcaaaaaaattaactagaaaaacatttgcagattttgttatttttcagaatagtggaacagaagcaacagaggctgctgtaaaagtagctagaagatatttttattcgattggaaaaccaaacaaaaatagaattctttgtataaaaaattcttttcatggaagaacattagcagcaatttttgcaagtggatcaaaaaaaatgacagagggatttggaccaagagtagatggatttgatcactttgaatttggtaatcatagatcattaagaaaagctataactaaaagaacagctgcaataatggttgaaccagtaatgggagaaggtggaattaaagtaataccagattggtgtttaagagaacttagaaaaatatgcaataaaagaaaaatattattaattttagatgaagttcaatgtggaattggaagatctggaaaattttttgcttttgag

SEQ ID NO: 245866 - DNA, 454 bp, Unknown
  Bacterial polypeptide expressing nucleotide sequence isolated from the Sargasso Sea
atgagttatttagcaaaaaactataatagaaaaaaaatttccttcaaatacggcaaaggtagttatctatattccactgataaaaaaaaatatttagattttgtacaaggaatagcggttaattccttgggtcatgctcatcccaaattagtaaagactataaaagatcaatcaaaaaaattatggcacgtttctaatgcatttcaaattccagaaggtgaaaaacttgctaaaaaattgtgtgctaaaacttttgctgattttgttatgtttcaaaatagcggagctgaagctacagaggcagcaattaaagttgctagaagatatttttattccataggtgaaccaaataaaaatagaattttatgtattaaaaactctttccatggaagaactatagcagcaattttcgctagcggatcaaagaaaatgacagagggatttggtccaaaag

SEQ ID NO: 245867 - DNA, 601 bp, Unknown
  Bacterial polypeptide expressing nucleotide sequence isolated from the Sargasso Sea
atgagctatttagcaaaaaattataatagaaaaaaaatttcttttgtaagaggtaaggggacttatctttacactgcaaatggaactaaatatttagattttgttcagggtatagcagtaaactctttgggtcacacaaatcccaaattagtaaaatgtattaaagatcaatcaaaaaaactatggcatgtgtccaatgcttttcaaattccagaaggagaaaaattagctaaaaagttgtgtcaaaaaacttttgctgattatgtaatgtttcaaaatagtggcgcagaagctacagaagcagcaattaaagttgctcgaagatatttttattcaataggaaaaccaaaaaaaaatagaattttatgcattaaaaattcatttcatgggcgaacaattgctgctatttttgcaagtggatcaaaaaaaatgacccaaggttttgggccaaaagttccagggtttgatcacattgattttagagaggtaaaaccgagatttccagatataagaaaaaaaattaagaaaaatactgctgcaataatggttgaaacaatattaggtgagggtggcataaagcaaataccagataaatgtctca

SEQ ID NO: 245868 - DNA, 529 bp, Unknown
  Bacterial polypeptide expressing nucleotide sequence isolated from the Sargasso Sea
tatgagcgctttagcacctaattataaaagaaaaaatttatcatttgtaagaggcaaaggtagttttcttataacagctaaaggtagaaaatatctagattttgttcaaggcattgcagtcaattctttagggcactcaaataaaaaacttattaatgcaattaataaacaatcaaaaaaactttggcatgtatctaatgcctttaaaataccagagggagaaaaattagctagcagattggttaaaaaaacttttgcagactctgttatttttcagaatagcggtgcggaagctacagaagcagcgattaaagttgctagaagatatttctactcaattggaaaagaaaataaaaatagaataatttgtataaaaaattcatttcatgggagaacaattgctgcaattcatgcaagtggctcaaaaaaaatgacacaaggatttgggccaaaaatacctggttttgatcattttgactttggagatcataagaaactaaaaaagttaattaataaaaatactgctgct

SEQ ID NO: 245869 - DNA, 637 bp, Unknown
  Bacterial polypeptide expressing nucleotide sequence isolated from the Sargasso Sea
gcaaggtgaaggcggcatcatcaccccaactaaggaatttatccagggtgtggctgctttgtgtaaaaagcataatgcactgatgatttttgacgaagtgcaatctggtgtaggccgcactggcgagttatacgcctatatgggcttaggtgtagtcccagatattctgaccacggccaaagccttaggtggcggtttccctataggtgctatgctgaccaccactgctattgcaaaacatttagtcgtaggcacacacggttctacttatggtggtaatccactggcttgtgctgtaggtatcgctgcttttgatacagtcaacacgcctgaagtgttaaatggcgtaaaacagcgtgagcagttattccgtgaaggtttaacagctattaatgctaaatacgatgtgttcagtgaaattcgcggtcagggcctgttaataggtgcggcactgaatgacaagtatcagggcaaagcccgtgactttatgctggccgcagctgatgaaggtttaatgatgttagtcgctggctacagtgttattcgtatgactccgtcactgatcattccggaagccgatatagctgaaggtttcaaacgtcttgaaaaagctgtagctaagatggtacaggcttaa

SEQ ID NO: 245870 - DNA, 604 bp, Unknown
  Bacterial polypeptide expressing nucleotide sequence isolated from the Sargasso Sea
ggagttcctgaaaggactgcgtgaactgtgcgatgagcaccaggcgctgctggtatttgatgaagtgcagtgcggcatggggcgtaccggttcgctgtttgcatatatgcactacggcgtgacgccagacattcttaccagcgctaaagcgctgggtggcggcttcccgatcagcgctgtactgaccaccagtgatattgccagcgcattccacgccggttcccacggttcgacctacggcggtaacccgctggcctgcgccgtcgccggggcggcatttgatctgattaatacgccggaggtgctggagggcgtgaaggcgaagcgcgagctgtttgtgcagcatctccagcaaattgacgcgcagtttgacctgttcagcgacatccgcggtatggggctgttgattggcgcggagcttaagccgcagtataaaggccgggcacgcgattttctctatgccgcggcagatgcgggcgtgatggtgctgaatgccgggccggatgtgatgcgctttgtcccttcgctggtcatcgacgagaaggatattgctgaaggtatggcccgctttgcccaggcgataaagcaggttcttaacgcttaa

SEQ ID NO: 245871 - DNA, 587 bp, Unknown
  Bacterial polypeptide expressing nucleotide sequence isolated from the Sargasso Sea
gatgagttttttagcaaaaaattataatagaaaaaaaatatcttttgtaagaggaaaaggaagctttttatttacaaaaagtggtgtcaaatatcttgattttgttcaaggtatcgctgttaattctctaggtcacgctcatcctaaattagttaaaactataaatgaacaatcaaaaaaactttggcatgtttctaatgctttcgtgattccagaaggagaaaaattagctaaaaaattagctgaaaaaacttttgctgactatgttatgtttcaaaatagtggagctgaagctactgaggctgcagttaaagtggctagaaaatatttttattcgataggtaagcctcataaaaatcgaattctttgtatcaagaattcatttcatggaagaacaatcgctgcaatttttgcgagtggctcaaaaaaaatgaccgagggatttggtcctaaagtttctggttttgaccatgttaagttcggagatcataaatccttgaaaaaaaagattaccaaaaatactgcagctataatggttgaaacaatattaggtgaaggaggaataaaagtaatacctgattggtgtt

SEQ ID NO: 245872 - DNA, 693 bp, Unknown
  Bacterial polypeptide expressing nucleotide sequence isolated from the Sargasso Sea
tatgagcgcaatattaaaaacatataacagaaaaaaaatatcttttaaaagaggcaaaggtagttttctttactctacaaagggcaccaaatatttagattttgtacaaggtatagcagtaaattgtttaggccattctaatgattatttgaacaaagctattcaaaaacaatcaaaaaagttatggcatgtttcaaatgtttttaccataccggagcaagaaaaattagctaaaagattaaaacaaaaaacatttgcagattacgttcttttccaaaactcaggcgccgaagcgaccgaagcagctattaaatttgctagaagatatttttattctaagggcaaatctaaaaagaatagaattttatgtattaacaatagtttccatggaagaactttagcaacaattttcgcaagtaatagtaaaaaaatgactgaaggattttacccaaaagtcgaaggatttgaccattttaattttggagatcacaaaaaattggaaagagctataactagtaagaccgcagccattatgattgaaacaattatgggtgagggaggaattaaagtaatacctgactattgcttaaaaggattgagaaaattatgtaataaaaaaaaaattttacttatcttagatgaagttcaatgtggcattggaagaagtggaaaatttatggcttacgagtacgc

SEQ ID NO: 245873 - DNA, 508 bp, Unknown
  Bacterial polypeptide expressing nucleotide sequence isolated from the Sargasso Sea
tgttcgcctacaacattacggcgtgaccccggacatcctcaccagcgccaagagcctgggcggcggtttcccgatcgcggcgatgcttaccactgaagcgctggccaagcacctggtggtcggcacccacggcaccacttacggcggcaacccgctagcatgtgcagtggccgaagcggtgatcgacgtgatcaacacccctgaagtgctggcgggcgtgacggccaagcacgcactgttcaaggcgcgcctggagcagatcggcaagcagtacggcatcttcaccgaagtgcgcggcatgggcctgctgatcggttgcgtattgagcgatgcattcaagggcaaggccaaggacgtgttcaacgcagccgaaaaagaaaacctgatgatcctgcaagccggccccgacgtggtgcgtttcgccccgagcctggtggtggacgaagcagacatcaacgaaggcctggatcgtttcgagcgtgcggttaaaacgctgacccaagcctga

SEQ ID NO: 245874 - DNA, 577 bp, Unknown
  Bacterial polypeptide expressing nucleotide sequence isolated from the Sargasso Sea
atgagctcacttgcaaaaaattataatagaagaaaaatctcttttaaaaaaggaaaaggtagctttctttttggaaataatggaaaaaaatatttagattttgttcagggcattgcagtaaattctctaggacattcaaatccaaaattaattagagcgattaacaagcaagcaaaaaaagtttggcatgtttcgaacgcttttgtaatacccgaaggagagaaattagctaaaagacttacgaaaaaaacttttgctgattacgttatttttcaaaattctggtacagaggccacagaagccgcaataaaaattgcaagaagatatttttattcaaaaggaaataaaaataaaaatagaattctttgtataaaaaattcttttcatggaagaactttagctgctatttttgctagtggttcaaaaaaaatgactgaaggatttggtcctaaagttccaggttttgatcattttaaatttggagatcacaaatccttaaaaaaagctattaccaaaaaaactgctgcaattatggtagagcctataatgggagaaggaggaattaaagtaataccag

SEQ ID NO: 245875 - DNA, 433 bp, Unknown
  Bacterial polypeptide expressing nucleotide sequence isolated from the Sargasso Sea
catgagtgctttagctaaaaactataatagaagaaaaatctcttttaagagaggaaagggaagctttttgtattcaactaatggaaagaaatatttagatttcgtacaaggtatcgcagttaattccttgggtcacgctaattcttatttgacaagagcaatgaataagcaagcaaaaaatgtttggcacgtatcgaatgcatttacaattcctgaacaggaaagacttgcaaaaaggcttacccaaaaaagttttgctgattacgtgatattccaaaacagtggcgttgaagcaacagaggctgcaataaaggttgcaagaaggtacttttactcaattggaaaaccacaaaaaaacagaattctttgcataaaaaattcttttcatggaagaactctggcggcaatttttgctagtggatcaaaaaaaatg

SEQ ID NO: 245876 - DNA, 696 bp, Unknown
  Bacterial polypeptide expressing nucleotide sequence isolated from the Sargasso Sea
tatgagttatttggcaaaaaattataatagaaaaaaaatttcatttgttagaggaaaaggatcttatctctatactgcgactggaacaaaatatttagattttgtacagggcatagcggttaattgtttaggtcatgctcatccaaaattaattgaaactataaataaacaatcaaaaaagctttggcatgtatctaatgcatttctaattcccgagggagagaaattagcgaaaaaattatgtaaaaaaacttttgcagattatgtaatatttcaaaatagtggtgcagaagctactgaggccgcgattaaagttgcgagacgatatttttattcaataggcaaaccaaataagacaagaattttgtgtgtaaaaaactcgtttcatggaagaactttagctacaatttttgcaagtggatctaaaaaaatgactgaaggatttggatatgtaggtggttttgatcattttatttttggagatcataaatctttaaaaaaaaagataaccaaaaatacagctgcaattatgatagaacccattatgggcgagggtggtattaaagttgtaccagattggtgtttaaaagagttgagaaaattatgtaatgagaagaaaatattacttattttagatgaggtgcaatgtggtatttcaagatcaggtagtttttttgcatttgaaaaatcaaaatg

SEQ ID NO: 245877 - DNA, 577 bp, Unknown
  Bacterial polypeptide expressing nucleotide sequence isolated from the Sargasso Sea
actgagacagatttgtaataaaaaaaaaattcttcttattttagatgaagtccattgcggaattggaagatcaggtaagtttttttcatatgaatatgcaaatataaaaccagatatagttccagtagcaaaaggaattggaggtgggtttccaattggtgcagtattaatgacaaaaaaagtttctaaggctatggttccaggtacacatggatccacatttggaggaaaccctttagcaatgtcggttggtaatgctgtaatggatgaaatttttaaaaaagactttctttcaaaagttaaaagtaattcaaaatattttatttcagaattaaataaaattaaaaataaatttccaaacattattaaagaaataagaggaataggattaattctgggaatacaattacatcatgaccaaacaaaattcatacaaagtttactgaaaaataaactactaacaattagagcagctgaaaatgttataagaattttgcctccattaaatgttagtaaaaatgaaataaatatagctttaaaaattattaataaagtttgcgaaggatataaaaaataa

SEQ ID NO: 245878 - DNA, 1126 bp, Unknown
  Bacterial polypeptide expressing nucleotide sequence isolated from the Sargasso Sea
atgaaaacattcgacgtttacaaccaatttgatgtagttcctgtaaagggaaaggatgtatatatttatgatgattttaataataaatatttagatttatatggaggacatgcagtaatctcaataggtcattctgaaaaaaaatatgttaagaatataactaatcaacttaagagtataggattttattcaaatgctgtaagaaatccattacaggatgaattatcgaaagagattaactcacaagcagatttagataattataagctgttcatgtgtaactctggtgctgaggctgtagaaaatgctctaaagctttcttcttttaatacaggaaaaaagagaataattgcttttaaaaattcttttcatggaagaacatcagctgccgttgcagttactgataataaatacattaactctgagctgaacaaacaacataatgttagttttattgaatttaatgacaataaaaagttagaaatagagatagataagggagacgtaagtgcaataatatttgaatcaattcaaggggttggaggacttgaccaacctgatgaggactttattaatggactagactattatcaaaaaaaatatcaggtatctataattgcagatgaggttcaatcaggattttgtcgttccggtcaattttttgcttttcaaaaatttaatattcagcctgatataattacaatcgcaaaaggaatgggaaatggttttccagtaggaggaattcttgtaaatcctaatatccatcctcaaaaaggtatactagggactacatacggtggtaatcatctagcatgtgttgcttctttgagtgttcttgaatttttgaaaaaaaataacatttgtaaaaaagccatagagttagagagctattttaaaaatattgcttcaaaattcaactccataaaaaaggtaaagggaagaggtttgatgttgggaatagaatttgattttgatgtctcagaattaagatcaaagttagtctacgaacataaaatttttactggtagcagcagtaataaaaatttaattagaattttacctccattgtcaattaaaaaaaatcattttgatatttttttcaatgcacttaataaatcactatgaa

SEQ ID NO: 245879 - DNA, 508 bp, Unknown
  Bacterial polypeptide expressing nucleotide sequence isolated from the Sargasso Sea
tgtttgcttatgaacaattttggcgttaagccagatatcatgtgctgcgccaaaggtattggtggaggaattccaattgcagctgtcttaactacaactaaaatagccaaaagcatggaaataggatctcatggaactacatttgggggtaacccactagcttgtgcagtagctgagaaagtcatgactctgcttgcaaaaaaaatgttactaaatggtgttaagaaaaaagaaaaaatctttttgagagaattacaaagtatcaacaaagatcataagtgttttagtgccattagaagttctgggctttggataggctgtaagttaaacgttacagaaaattttaatttagatactgtaatgaaagcctgttatgaaaatggcctaatgatacttaaagcaaatgataatactattagaatagcgccaagcctcattattgcagatggtttaatcttaaaaggattaaaaattttgagagctgttattcaggagcagcatccttagt

SEQ ID NO: 245880 - DNA, 919 bp, Unknown
  Bacterial polypeptide expressing nucleotide sequence isolated from the Sargasso Sea
tatgaataacttattaaaaacatacaaatttagtaattttaaagttgtaaagggtaatggttgttatttatacacctctgataaaagaaaattattggatttctcagcaggagttgcagtcaattctcttggctataatcaccaagttgtaagaaaaagtttacaagatcaaataaaaactggcattactcatttatcgggttctcaaatgcatgagttcaagactaaattatctaaattattatctgaaaattctaacaaaggtgatgtgttcttttctaattcaggtgcagaaagcattgaagctgcattaaaaatagcaagaaactatggaagtaaaaagggcaaagatgaaattattgctatgacttcctcttttcatggaagaacaattggagccttatcagtcggcagtaataaaaaatacaaatctgacatagggcctgtgccaggtaaagtaaagttttgtaaatttaatgacgtctctcatctcaaaaaattagtaaataaaaaaacggtagcaataataatagaatttgttcaaggagacggaggtataaatatttgcagtaagaattttgctaaaactataaaagagatatgtaaaaataagaaaattctacttattggagatgaaatacaaggtggcataggtagaactggaaaaatatttgcttacaaacattacggtgtcaatccagatatcataacctcagccaaaggattaggttcaggaatccctattggagcaacaatagttaaaaaagaaatatcaaaaaatataagtattggtttccacggctctacttttggaggtggaatgttgcaaacacgggttgcatacaatgtctttaaaacaatcaataaaaaaagttttttaaataaagttattaataatggaaacttactctctaaatta

SEQ ID NO: 245881 - DNA, 383 bp, Unknown
  Bacterial polypeptide expressing nucleotide sequence isolated from the Sargasso Sea
tatgaccagcaaaatcatgcctacttacaacaggaagccagttacctttacaagcggtgaaggtatttatctatatgattcagagggaaagcagtatcttgatgctctttgcgggctagcagttactagcttgggtcactcacacccactcatagcggaaacagttagtaagcagtctgcgaaattgatacatacttccaatgcatttcatattgagagtcaagaaaaattagcaaaaagattgtgtcaactaaccggaatggagaatgtatttttttgtaactcaggtgcagaatctgtcgaggcagcgattaaaattgccaggaagtacggtcatgacaaagattataataatcccaaaatcatagtaatgtctaatagct

SEQ ID NO: 245882 - DNA, 352 bp, Unknown
  Bacterial polypeptide expressing nucleotide sequence isolated from the Sargasso Sea
aatgactaatgttcttccaacatacccgagatcaaacttagaatttacccatggagttggtagctatttgtatacaaaatcaggggagaagtttttagattttggtacaggaatagcagttaattccctaggttattcaaatccatatctaaacgataaattgaaaaaacaaattgataaattatggcatttatcaaatgtatatcagataccagaacaagaaaaacttgcgcaaagattatgtgataattctttcgcagattatgtattcttttgtaattcaggtactgaagctattgaggcaagcataaaaattgctagaagatattttcatagttcagaaaattggtca

SEQ ID NO: 245883 - DNA, 564 bp, Unknown
  Bacterial polypeptide expressing nucleotide sequence isolated from the Sargasso Sea
actggtttttactcatggcgttggtagtgaactattttctgagagtggcgaagcttaccttgatttcttatccggaattgctgtaacaagctttggtcattctcaccctcatctaaacgaggcgttaaagcagcaggcagataagctttggcacgtctctaatttgtttagaatacctgaagctgaggttttagccactcgccttgttcaggaaagttttgccgacaatgtattttttgcgaattctggagcagaagccgttgaggcagggttaaaagccataagaggctatcatgctgccaggggtgacaataagcggacaaggattattgggttttctgatagttttcacggtagaacgatggcaaccgtagcagcggctggcaataaatcccatatgcaaaattttgtgccgggggatcagggttttgatcacgtagagtggggtaatctggaggccttggaaaatgtaattagtgacagcacagcaggtattatcttggagccagttcaaggtgaaggaggcattcggccggttacacaaaaattcctagcaagcatagc

SEQ ID NO: 245884 - DNA, 694 bp, Unknown
  Bacterial polypeptide expressing nucleotide sequence isolated from the Sargasso Sea
atgtcaaaagttgagcgtgactggtacgaccgctacatgatgccgaactatgcgccggcagcaatgattcccgtgcgcggctcgggttcacggatgtgggatcaggaaggccgggagtacattgattttggcggcgggattgcggtaaatgccttgggtcatgcccatccggagttagttgccgcccttacggagcaggcgaaccggctttggcatacttcaaacgtccttgctactgaaccggccctgcagttggcgcgtcggctggtcgagttaacctttgctgatcgggtttttttcagtaactcgggtgcagaagccaacgaggccgcccttaagcttgctcggcgctatgccttcgaccatcatggcgagggaaaagaccgaatcctagcctttgaaaatgcgtttcatggacgcaccctctttacggtaaccgctggcgggcaagccaattatcgacagggcttcgggcccttgcccggcgcgatcgagcaccttccgtttaacgacactcaagcgcttaccgaggctttcggtgatgatgtctgcgccgtgattgttgagccggttcagggcgaagggggcgtgattgccgcggacaaggagtttctcgagacgatcagaaggctttgtgatcagcacaacgcgctgctgatcatcgatgaggtgcagacgggtgtggggcgaatag

SEQ ID NO: 245885 - DNA, 387 bp, Unknown
  Bacterial polypeptide expressing nucleotide sequence isolated from the Sargasso Sea
attggtagacgcagctgactcaaaatcagccggccactggtcttgggggttcaagtcccccggctcccatccagagtcggtgatgaacacctacaaccgcttccccctcaccttggtgcggggacgtggttgctgggtctgggacgacaaggggcaacgccatctcgatgccgttgccggcatcgccacggacacccttggccacagcgaccgtgccctgcgccgcagcctcggtcgtcaactccgccgtctccagcacgtttccaacctctaccggattcccgagcaggacgccctggccacctggttggtgcggcacagctgtgctgacagcgtttttttctgcaactccggcgctgaagccaatgaagcggccatcaagctggg

SEQ ID NO: 245886 - DNA, 497 bp, Unknown
  Bacterial polypeptide expressing nucleotide sequence isolated from the Sargasso Sea
taaattttttgcattcgaatatgcaaatgtaaaacctgatatagttcccatagcaaaaggaattggaggaggtttcccaatcggagcagtattgatgactaaaaaagtttcgaaagcaatgaagccaggtacccacggctccacttttggtggtaatcctttagccatggcagttggaaacgcagtcatggatcaaataaataagaatttattaaaaaatgtaaacaaaatgtcaaaatattttattcacggacttaatgaaatgaaaattaaatatcctaatataattaaagaagtcagaggagtggggctgttaattggtttacaactttttaatgatcaaactaagtttataaaaaaattaatggaaaataaattattgactattagagcagctgaaaatgtcataagaattttacccccattaaatgtaacgaaaagagaaattgatatagctttaaaaattattagcaaagtttgtaaccagataaaatgaa

SEQ ID NO: 245887 - DNA, 485 bp, Unknown
  Bacterial polypeptide expressing nucleotide sequence isolated from the Sargasso Sea
tgaaaaatccaaagtaaaacctgacattgtaccaattgccaagggtattggcggtggatttcctattggagcagttttaatgaataaaaaggttgcctcaggaatggttgctggatctcacggatcaacttttggaggaaaccctttggccatgtctgttggtaatacagttatggatattgtaactaaaaaaagttttttaagtaacataaaaagtctatctaaatattttttagaaagtctcaacaatattaaatctaaacatccaaaaactatcaaagagattagaggtaagggtttattaattggtattcaactttataaagatccaacaaaatttatacaaaagttaatggataacagattattaacaatacgtgcagccgaaaatgtcattcgaattttacctccattaaatgtaaaaaaaagtgaaatagataatgcgctaaaaattatttccaaagtttgcaatgattttaaataat

SEQ ID NO: 245888 - DNA, 518 bp, Unknown
  Bacterial polypeptide expressing nucleotide sequence isolated from the Sargasso Sea
aatgacctcacttgctaaaaactacagcagaagaaaaatatcttttaaaaaagggaaaggtagttttttgtatagcagtaaaggaaaaaaatatttagattttgttcaaggaattgcggtaaattcacttggacactcaaaccccaatctgaacagagttcttgctaaacaatctaaaaatctttggcatgtatcaaatgcatttgaaattcctgaggctgaaaaattagcaagaaaattaacaaaaaaaacttttgcagataaagttatatttcaaaactctggcttagaagccacagaagcagcaatcaaagttgcaaaaaggtacttttattctattgggcagccacaaaaaaatagaattctttgcatcaaaggttcttttcacggtagaagtctagctaccatatttgcaagctctgcaaaaaaaatgattgaaggatttgggccaaaaattgacggttttgaccattttaactttggtgaccataagtctctaagaaaagctatacaaaaag

SEQ ID NO: 245889 - DNA, 1079 bp, Unknown
  Bacterial polypeptide expressing nucleotide sequence isolated from the Sargasso Sea
aatgtccagcatactacatcggactttagaattaaccccacccactgctgttaggggggagggcaactatttaattgacgatgctggaaagcgctatttggatgcctgcggtggagctgctgtatcctgtctggggcatgataatgcaaaggtgcgcgaagcgctaaaggctgaattggataatatagcctttgcccatagtggtttctttaccaaccaaccagcagaagagctggcacagtttctaatcgatcgcgcacctaaaggaaccggactgggtcgcattatgtatctgggaagcgggtccgaagcgatggaggcggcgcttaaactggcccgccagtaccatttagaacgcggcgaacccaaacgtagcaatatcattgcccgtgcgccatcctatcacggtaacacacttggtgctttggctactggcgggcacgcaggtcggcgtgaaccgtttcagccactacttatgaatgtcagtcatatcgacgcggcttacgagtaccgtatgcggcgcgaaggagaggcaggagcggattttgccctgcgtatggcgaaccttttggaagaggaaatccagaggctgggcaccgagactgtcatggcatttgtggcagaacctgtcgtcggtgcgtcactcggaacgcagcccgcgcctatgggatacttcaaacgcatccgcgagatttgtgacacttatggcatcctttttattgcagatgaggtgatgtgtggtatgggtcgaaccgggagcctatttgcattagagcaagaaggcatcgccgcagatattactaccttggcaaagggccttggggctggctatcagccgattgcagccgtcatggcggcagaaaatgtcattcgcattataaaggatggcagcggaacgctttggaacggtcatacttacatgtcccacgccatcgccaccgccggtgccctggccgtgcaacaagtgattgaagaagaaaacctgttgtcaaatgtccaaatgcgtggcgagcagttgcgcgagggcctgcaaacccaaatggccaaaaccctcatgttggagatattcgaggacgtgg

SEQ ID NO: 245890 - DNA, 1171 bp, Unknown
  Bacterial polypeptide expressing nucleotide sequence isolated from the Sargasso Sea
ttgatcgataaattcaaaaactttcaggctcaaattgttccaaaccctttatcaatcgaaattgtaaaagctgagggctcttatatatatggaaaaaataaaaaatatttagattttgttgctggtgtctctgtgtgtaatattggtcatagcaacaagaaagttttcagagcagtttcaaatcaactaaaaaaatactcacatgtgatggtttatggggaatttgttcaagagcctagtgtgaatttatgtgaactactagtaaaaaatttgccatataacctcaactcagtttacttgaccaattccggaacagaagctgttgaagctgctttaaaaattagtaagcgaattactgggaggtcaaaaatagtttcagcaaagaattcatatcatggtagtactcatggatcattaagtgtttcgggctatgaaagcagaaaaagagcatatagacctctcttacctaacattgaatatttagagtttaattgtgatgacctatctgtgattgatgaaaatactgcttgtgtaattttagaaaccatacaaggtggagctggatttataactcctgagaataattttttaattaaagtaaaaaaaagatgtgaaaaggttggagctctaatgattttagacgaactacaaactggccttgggagaactggaaaactatttgcttttgaacactacgaaataagtccagatattttattactgggaaaggcccttggtggtggcttccccattggagcaatgattacaaaaaaatctaatatggatttactgcaaaaaaatccaattctaggacacataaccacatttggtggacatccagtaattgcagctgcaggattagagactctttctatcataattaagaataaattatccaaaaaagcaattgagaaagagaatctttttaaagaactattggtccatccattaatcaatgaagtaaggagtaaaggtttaatgattgcattaattatgaaaaataatgaaatagccaatcagttggtaatcaattctttaaataatgggcttatattattttggttactttatgaaaaaagggctgtaagaataactcctcctctaacaatatcaaattcagaaataaaaaagggctgtaaaataattttatctgttcttgactcaatctaaa

SEQ ID NO: 245891 - DNA, 557 bp, Unknown
  Bacterial polypeptide expressing nucleotide sequence isolated from the Sargasso Sea
gctactgatgctcgatgaaatacagtccggcaacggccgcaccggggattactttgcctgcctgggtgccaatgtcactccggatgtgctgaccacggccaaaggcctaggcaacggctttccgattggcgcctgcctggttgccggcaaagccgaaggtgtgttcggccccggtaatcacggcagcacctacggcggcaacccgttgggttgcgctactgccctgaccgtcgtcaatgcgctcaccgatgatgtcattgatggtgtggccgacaaaggcgcctggctgaaagatgcctttactcaggcgttttcagacctgcccatggtcaccgaaattcgtcagcggggcctgatgctaggtatccagctcgatcgcccttgtcccgagctggtcaaccgcgcccgcgacgccggcctactaatcaatgtcaccgccggatccgtggtacggctactgccgccgctagtgatcaaccaaactgaaatgcagcatctagtggacactctgtctgccctgatccaccgttttgccgatgagcaggaggtcgcatgac

SEQ ID NO: 245892 - DNA, 772 bp, Unknown
  Bacterial polypeptide expressing nucleotide sequence isolated from the Sargasso Sea
ttgggaacaatcgcagctgcaagtaattccagtcatcttgaaggctttggtgaaccgttaagggggttcgtaagtgtagaacgtaatgacattaatcaattgaaaaaagcatgcaacgagaaaacagctgcaatacttattgagcctgtacaaggagaaggcggaataaatgtttttgacagagaatttattaatagtcttcaagttatcgcaaaagagaaggatttacttattctgtttgacgaggttcaatgcggtgtaggcaggacaggaaaaatatttgcatatcagtggtttgacgtaaaacccgatgtcatggcattagctaaaggtcttggtggaggttttccaattggcgcttgcctaatgagagatgatattgcggaagctcttattccagggagccatggatctacttttggcggaaatccattagcaatggctgtgggtaattgtgttatggatattgtaaacaaggttgatttcttatcaaaggttgaaaagaatgggcttttcttcaaaaatcaactgaataaactgtgtgaaaaatatccaaatgttattactgaaattagaggtctgggtctaatgatcggaataaagtgtacaatcgcgaataatttattagccaataaactatatgaaaatggtatcctcactgtgaatgcggcagacaatgtaattcgaatactaccaccactcaacataacaattcctgaaatcaagaaggttatatccctatttgaaaaatcaattaaagaaattttataat

SEQ ID NO: 245893 - DNA, 513 bp, Unknown
  Bacterial polypeptide expressing nucleotide sequence isolated from the Sargasso Sea
aatgacgaatttggcaaaaaactataatcgaaaaaaaatttcctttaagcatggtaaaggaagttacttattttctactgataacaaaaaatatttagattttgttcaaggtattgctgtaaattcattgggtcatgcacatcctaagcttacaaaaacaattagtgcccaagcaaaaaaattatggcatgtttcaaatgcttttcaaattccagaaggagaaaagttagctaaaaaattgtgtaaaaaaactttcgccgattatgtgatgtttcaaaatagtggtgcagaagctactgaagccgcaataaaagttgcaagaagatatttctattcaattggtaaaactaataaaaacaaaatattatgtgttagaaattcctttcatggaagaactttggcagcaatttatgcaagcggatcaaagaaaatgactgagggatttggtccaaaagtaagtggatttgatcattttgactttggagatcataagtctttaaagaaaaaaattta

SEQ ID NO: 245894 - DNA, 460 bp, Unknown
  Bacterial polypeptide expressing nucleotide sequence isolated from the Sargasso Sea
gatatagtccccatagcaaaaggaattggaggtggttttcctattggcgcagtcctaatgacaaagaaagttgcaaaagctatgataccaggtacacatggatcaacatttggcggtaacccacttgcaatggcagttggtaatgctgttttagatcaaataaataagaatttattaattaatgtaaataaaatgtctaagtattttatacatgaacttaatgaaataaaaattaaatatccaaaggtaatcaaagaagttagaggagtaggattattaattggtttacagctttttaaggaccaaactgagtttataaaaaaactaatggaaaataagttattaactattagagcagctgaaaatgtaataagaattttgcccccattaaatgtaaaaaaaagagaaattgatatagctttaaaaattataaataaagtttgtaatgaaataaaatgaa

SEQ ID NO: 245895 - DNA, 733 bp, Unknown
  Bacterial polypeptide expressing nucleotide sequence isolated from the Sargasso Sea
aatgacatttttagcaaataattataatagaaaaaaaatttcttttaaaaaaggcgttggaagctatttagttgccacgaatggtaaaaaatatttagatttttgctcaggaattgctgtcaatagcttgggccatgcaaatccaagattagtaaaagcactatataaacaagcaaaaaaagtttggcatgtttcaaatgctttcacgattccagagggagagatgttagcaaaaaaattggtcaaaaaaacttttgcagactcggtgatatttcaaaattctggaactgaagcaacagaggttgctattaaggtggcaagaagatacttttactcaataggaaaaccaaaaaaaaatagaattctttgtgtaaaaaattcatttcatggtcggactatagctgcaatttttgccagtgggtcaaaaaaaatgacggaaggtttcggcccgaaagtaagtggtttcgatcattttacttttggagatcataattctttaaaaaaaagaatctcaaaaaatactgcagccattatggttgagacgataatgggcgaaggcggaataaaagtaatacctgactggtgtttaagagatttgagaaaattatgtaataaaaaaaaaatactgcttatactcgatgaagttcaatgtggcattggaagatctggagatttttttgcttttgaaagttcaaaagtaaaaccagatattgtgcctatagctaaaggtata

SEQ ID NO: 245896 - DNA, 499 bp, Unknown
  Bacterial polypeptide expressing nucleotide sequence isolated from the Sargasso Sea
aaattttttgcttttgaatatgcaaaggttagaccagatattgttcctatcgctaaaggaataggcgggggctttccaattggagcagtattaatgaataaaaaagtctccaaatgtatgactccagggtctcatgggtctacatttggaggaaatcctcttgcaatgagcattggtaatgcagtattagaccaaatttttaaaaaaggttttttaaataatgtgagaaaaaattctcttttatttattaatggactcaaaaaaattcaaaaggattatcctagtgtcatcaaggaagtgagaggtttaggttttttattaggattacagctttttaaagatcaatcaaaatttatagataaactccttgaaaacagaatgttaacaataagagctagtgaaaatgtagtaagaattttaccaccactaaatgtaagtaaaaaagaaatatacattgctttaaaaaaaatcagaaaagtttgcaagaacataaaataaa

SEQ ID NO: 245897 - DNA, 487 bp, Unknown
  Bacterial polypeptide expressing nucleotide sequence isolated from the Sargasso Sea
atgatgccaaactatgcacctgcagactttataccagatagagctctaggatcacgagtttgggataagaacaataaagaatatattgatcttggaggaggtattgcagttaatagcctaggacactctcatccgatcttaattaaagaacttaatgaacaagccaataaactttggcatacgagtaattacttagcaaatgaacctgctatcaatcttgcaaaaaaacttacggatctaacttttgctgaaaaagtctattttagcaactcaggctctgaagcaaatgaagcggcgataaagatagcaagaaaatttcatcatgatagaggagagaatagagatgaattaatttcttttgaaaactccttccatggcagatctcttttgaatatttctctaggaggttcagataaccataaaataggttttggacctctagtcagcggagtcaaacatgctaaatataatgatattagttctgtcg

SEQ ID NO: 245898 - DNA, 769 bp, Unknown
  Bacterial polypeptide expressing nucleotide sequence isolated from the Sargasso Sea
gcgctaccaccagggcttcgaaccgatggtcgagggcttcgattacttcccctacaacgatatccaagccttcgaggcgttgctcgaacgccatgaagaaaacggacctgcggtggcggccgtgctgcttgaacctctgcagggtgaaggtggggtgcaccccggggatgccggcttcttccaacgcctgcgccacctctgcagcgagcgcaacatcctgctgatcctggatgaggtgcaagtgggtatgggccgcagcggtcggctctggggctacgaacagctcggcatcgaaccggacgccttcaccctggccaagggactggggggcggccatgccatcggtgccctgctggtgaacgctatagcggatgtgttcgagcccggtgatcacgccagcaccttcggcggcaacccctttgcctgcacagctggactgaccgtggcgcaggaaattcagcgcagggggttgctgcgcaatgtggaggaacgtgggcagcagctgcagcagggaatccaggatctcgtcgcgcgttacccccaaatgttgcagggagtgcgcggctggggcctgcttcagggcctggtgctgcatcaggactgtggtgtcacagctccacagctggcgaaggccgcgattgagcagcggcttctgctggtggcagctggagcgactgtgctgcggatggtgcctcctctggtgatctccgccaacgaggtgcggcaattgctcagacgactggacgcgaccctcgctgagctggtctga

SEQ ID NO: 245899 - DNA, 1045 bp, Unknown
  Bacterial polypeptide expressing nucleotide sequence isolated from the Sargasso Sea
catgtatctgggaagtggctccgaatcgatggaggcggcgcttaaactggcccgccaatactatttagaacgcggcgaaccccaacgtagcaatatcattgcccgtgcaccatcctatcacggtaacactcttggtgcgttagctactggcggccacgcaggtcggcgtgaaccgtttcagcctttacttatgaatgtcagtcatatcgacgcggcgtacgagtaccgcatgcggcgcgaaggagaggcagaggcggattttgccctgcgtatggcgaaccttttggaagaggaaatccagaggctgggcaatgagactgtcatggcatttgttgcagaacctgtcgtcggtgcgtcactcggcacgcagcccgcgcctttggggtacttcaaacgcgtccgcgagatttgtgacacctatggcgtcctttttattgcggatgaggtgatgtgtggcatgggtcgcaccggcagcctatttgcattagagcaagaaggcatcgcagcagatattactaccttggcaaagggtcttggagctggctatcagccgattgcagccgttatggcggcggaaaatgtcatttgcactataaaggatggcagcggaacgctttggaacggtcatacttatatgtctcacgcgatcgccaccgctggtgcactggccgtgcaacaagtaatcgaagaagaaaacttgttgtcaaatgtccgcaagcgtggcgaacatttgcgcgagggactgcaaacccggctcggtcaaaacccacatgttggagatattcgtggacgtggtcttttctggacggcagaattagtgcaggaccgtgcaaccaaacagcccttcgatgtgacgcttggccttgccacaaagatacaaaaaacagcgcttgatttaggcttaatgtgctacccatctcaaggttgtgccgatggaacgcaaggcgatcatgtgttacttgcccctgcctataactcgacaagtgaagagatcgagaccatctgcaatctgatcactcaggcaatagagacagcgctatcctga

SEQ ID NO: 245900 - DNA, 1021 bp, Unknown
  Bacterial polypeptide expressing nucleotide sequence isolated from the Sargasso Sea
aggacatgctgttatttcaattggacactcacaccccgattatgttaaaaatatatctagacaattgaataaaataggtttttattcaaactcggttaaaaacaatcttcaagaagaactcgcaaattcaattgtgaattattctggatgtaaggaatattcattgtttatgtgtaactccggtgcagaggctaatgagaatgctttaaaattagcatcaatgcatactagaaaaagtagaataattgcatttagaaactcatttcatggaagaagtaatgctgctattgccgcaactgattttaaaaaatatcattctaaattagaaaaaaaattagatgttacttttattaatctaaatgatagtaaaacatttgaaaatgaaattaaaaaaggagatgtttgcgcggttttacttgaatctatccagggttatggtgggttagatgaacctaataaagattttgttttattaataaactctctatgtcaaaaatataattcatgcttaattgcagatgaagttcaatcaggttttggtagaacgggtgagttctttgcatttcaaaaatataatataaaaccacatcttatttgtatggcaaaaggaatgggtaatggattccctgttggtggattattagttaattctattattaagagtgaacatggaatgttaggaacaacttttggggggaatcatttggcttgtgtggcgtcattaacagttttgaatgttattgaaaaagatgacttacaacaaaacgcaagagaaattggaaattattttattgaaaatgcaaaacaaatccctgaaataatcaatattaagggaaggggattaatgttaggaatagagtttaataatgaagtcaaagaaattagaaaaaaactcatttatgataaaaagatttttactggtagtagtggaaataaaaacttgttaagaattcttccacctctaactatcaaaaaaaagcatattgatattttttttaaatcactaaaagaagtaatatga

SEQ ID NO: 245901 - DNA, 766 bp, Unknown
  Bacterial polypeptide expressing nucleotide sequence isolated from the Sargasso Sea
aatttctacttccaattctgataaaatgaaagagggatttggtccacttattcctggatgtaaatcattaagctttaatgatagagatgctttataccaaaatattactgataaaactgctgcagtaatcgtcgaaccaattcagggagaaggtggaataaggtcattttcttcagaaattttaaaattaattagaagtttatgcgatgatactggagcacttttaattatcgatgaaattcaatgtggtttaggaaggtcaggaaaactttttgcccatgaatggtttgatttaaaacccgacataatgacaatagcaaagggaattggaggaggtttcccattaggtgcttgtttgtcaactgacaacgcatctattggaatgttgaaaggaaagcatggatcgacttatggtggaaacccccttgcatgtgctgttgggtgtgaggttatgaataatgttttggaaaaaggtttcttagataatgttatgataatatcaggatatttttctcaaaaaatgttaggacttgttagtgagtttccttcggtgtttgaagagttaagaggttctggtttaatgttgggtttaaaaactaaaattgagaatatctctttcacaaacgaagcatttaatcaaaatttgttattagccccagcctcagataatgttgttagaattttacctcctcttaacataacaaaacaagaagtagattatgttatagaactgttgagtaagactgcacaaaggtttaaaaattga

SEQ ID NO: 245902 - DNA, 763 bp, Unknown
  Bacterial polypeptide expressing nucleotide sequence isolated from the Sargasso Sea
atgtctaaaaactcaacatatataatgccaacatatggtgatagaaatttagaatttatcgaaggtcaagggtgttatttaacttccacagataataataaatacttagattttggtagtggtatagctgttaattctttaggtcattgccatcctagattagtgaaagctttgcagtttcaatcttctaagctatggcatgtatccaatctttatcataactccacacaagaggaatatgcaaaatttttatgtttaaatagttttgccgaaaaaatatttttcactaattctggtgttgagtcaattgaagcaggaataaaagttataaaaagttatcatcattatcataacaatgtagatcaaaagaatataattacttttgaaggagcatttcatggaagaacatttgctgctttatcagcgcaacaaaatgaaaagtattccaaaggatttgagccattattatctggatttattaaaattcccttcaatgatattgaggctgttaaaaaaaatgttaacaaaaatacggcagctataatgatagaacctattcagggtgaaggaggtattagacctgctaatttaaaatttttacaagatataaaaaaaatctgtgaaaaaaataatttattattttttttagatgaggttcaaagtggttttggaagatcaggtaaattatttgctcatgagtgggcaaattttgagcctgatatagtggctactgcaaaaggtataggttcaggattccctatgg

SEQ ID NO: 245903 - DNA, 958 bp, Unknown
  Bacterial polypeptide expressing nucleotide sequence isolated from the Sargasso Sea
aaataaagcaattaataagcaatctaaaaaattatggcatgtttctaatgtttttataattccagaacaagaaaagctagcaaagaggttgacgcaaaaaactttcgccgattacgttgtatttcaaaattctggcgctgaagctactgaagcagcgattaaaattgcaagaagatatttttattctaaaggacagccaaaaaaaaatagaattctttgcattaataaaagttttcacggaagaacccttgctactatttttgcaagtaatagtaaaaaaatgatggaaggtttctatccaaaagttgatggttttgatcattttaatttcggagatcataaaggtttagaaaaaaaaataaccaaaaaaactgcagcaataatggttgaaacaataatgggtgaaggaggaataaaagtgattcctgatttttgtctaagacatttaagaaaactttgtaacaaaaagaaaatattacttatcctggatgaagttcaatgcggtataggaagaactggtaaattttttgcttacgaacacgcaaaaattaaaccagatatagtaccaatagctaaaggtataggaggcggatttcctattggtgcttgtttaatgactaaaaaggttgcttcagggatgacacctggttctcacggcactacttttggaggaaatcctctagctatgagcgtgggcaatgcagttcttgatgtgatatttaaaaaaggttttttgagaaatgtacagcaaacatcaaagtattttcataatgagcttcaaaacttaaaaaagaaatatccaaaagtcattttggaagtaagaggaatgggattattattaggccttaaaatttcaaaagatcaaaataaatttattaataaactattagaaaacaaacttttagcagttagggctgctgaaaatgttataaggttgcttcctcccttaatgttaaaa

SEQ ID NO: 245904 - DNA, 568 bp, Unknown
  Bacterial polypeptide expressing nucleotide sequence isolated from the Sargasso Sea
gcgtcgcgccctcagcaggcagctcggtcggctgcagcatgtctccaacctgtacaacattcctgaacaggaagagctcgccagctggatcgtgcagcacagctgcggcgacagcgttttcttctgcaactcaggcgcagaagccaatgaagctgccatcaagctggcccgtaagcacggccatctcaggcgaggcattgagcgccccgtgatcctgacggctgcagcaagctttcacggacggaccttggcggccgtcactgcgacgggacaacccaaatatcaccggggattcgagccagttgtcgatggcttcgattacttcccgtacaacgaccttgatgccttccaatcgctgctggaacagcacgaagcaaacggtccagccgttgcggccgtgctggtcgagccacttcagggcgaaggtggtgtgaatcccggagacaagacgtttttcagagagcttcgccgcctctgcgacgccaaagggattctgctgatcctcgatgaagtgcaggtcggcatggggcgaaccggatcttggtggggctatcagcagctggacatc

SEQ ID NO: 245905 - DNA, 736 bp, Unknown
  Bacterial polypeptide expressing nucleotide sequence isolated from the Sargasso Sea
gacagaaggatttttaccaaaggtaggaggatttgatcactttaaatttggagatcataagtcactcaagaaaaaaattactagaaataccgcagctattatggtcgaaactataatgggagagggtggtattaaagtaatacctgattggtgcttaaaagaattaagaaaaatctgtgataaaaaaaatatattattaattttagacgaggtgcaatgtggaatttcaagaactggagacttttttgcttttgaaaaatctaaagtaaaaccagatattgtaccaatagcaaagggtattggaggaggttttcctataggagcagttttgatgaacaaaaaagtagcaataggaatgacaccaggaactcatggttctacgtttggtggtaatccgcttgcgatggcggttggaaatacagtgattgatatagtttcaagcaagaaatttttaaaaaatgttaaaaatgtttcaaaatactttttattcaaccttaacaaaataaaagatgaatatcctaatttaattaaagaaataagaggtagaggtttattgattggcatacaactacatattgatcaaacaaaatttataaaaaaacttatggataataaattattaactataagagccgcagaaaatgtagttagaattttaccaccacttaatgttaaaaaaaatgaaattgatcaagctttaagaataattaaaaaagtttgttcagaaatgatttaa

SEQ ID NO: 245906 - DNA, 850 bp, Unknown
  Bacterial polypeptide expressing nucleotide sequence isolated from the Sargasso Sea
gcaaaaagatatttttattcaatcggtcaacctcaaaaaaatagaatactttgtataaaaaattcttttcatggaagaacattggcaacaatttttgcaagttcttcaaagaaaatgatagaaggatttggtcctaaagtaaatggctttgatcattttgaatttggaaatcatatccaattaaaaaaaaaaattacgaaaaaaacagcagctataatgattgaaccaataatgggagagggtggtattaaagtaataccgcattggtgtttaaaagagattagaaaaatttgtaataaaaaaaaaattttattaatcttagatgaagttcagtgtggagttggaagaacaggtaatttttttgcatttgaaaattcaaaaattaaacctgatatagttccaatagccaaaggtattggtggtggatttcccataggagcagttttaatgaccaaaaaggtagaaaaagcaatggttgcaggaagccatggatctacatttggaggcaatcctaacgcttgttcagttggaatagaagttatgaaccaattatttaaaaaaggtttcttacagagcgtaaaaaaattatcaaagtattttcataaagaattaagaaaattacaaaatgaatatccaaaaattataaaagaagttaggggagctggtttattaattggtttgaaattattttgtaatcaaacaaaatttataaaaaaattagaagataataaacttttaactattagagctgcagaaaatgtggttagaattttgccaccattaaatgttaaaaaaaaagaaattgatttatcaattaaaataataaaaaaagtttgtaaagaaatttaat

SEQ ID NO: 245907 - DNA, 499 bp, Unknown
  Bacterial polypeptide expressing nucleotide sequence isolated from the Sargasso Sea
ttggtagacgcaccgcactcaaaatgcggcaccttcgggtatgtcggttcaagtccgaccgctcccactttgatgaatacttatactagatttaatatttctttcaagaaaggtaatggatgttggctatgggatgaaaaaggcaaaaaatatcttgatgctgtggctggtatagcaacatgtagccttgggcatagcaatagaatcttaagaaaaaagttatccggacaattaaaaaaagttcagcacatatcaaatctttataaaattgaagagcaagaagaattaagcaaatatttaactaaacagagttgcgctgaaagtgtttttttctgcaatagtggtgcagaggcaaacgagtcagctattaaattaatcaaaaagtatggaaatacagtacataaaggtaaagaatcttttattcttgctgctgaatctagctttcatggtagaacactcgcaactttaagtgctactggtcagcctaagtaccaaaaag

SEQ ID NO: 245908 - DNA, 847 bp, Unknown
  Bacterial polypeptide expressing nucleotide sequence isolated from the Sargasso Sea
aatgcaattaaaaaacagtcgaaaaaattatggcatgtatcaaatgcttttataatacctgagggcgaaagattagcaaaaagattaacaaaaaaaacgtttgcggattttgtaattttccaaaacagcggagccgaagccactgaagcagcagtaaaagttgcaagaagatatttttattctattggaaaacccaataaaaatagaattctttgcataaaaaactcttttcacggaagaaccacatctatgatttatgcaagtggatcaaaaaaaatgacagaaggatttggtcctagggtaaatggtttcgatcattttaaatttggcgatcacaatggattaaaaaaatctattactagcaaaactgcagcaataatggtggaacctattatgggcgaaggtggaattaaaatgatcccagattggtgtctaagagatttacgaaaaatttgtaataaaaaaaaaatattactgatattagatgaagtgcaatgtggaattggaagatcaggcagattttttgcttttgagcatgcgaaagttaagccagacatcgttcctatagccaaaggaataggaggtggttttccaataggtgcagttttaatgactaaaaaagcagcatcaggaattaatcatcctggtacacatggaagtacatttggaggcaatccattagcgatgagcgtgggtaatgcagttctagaccaaatctttaaaaaaggttttttaaaaaacgttcaagtggtttctaaatatttccatttcaaactaaaagaaattcaaaaaaaatatccatatattattaaggaaataagaggagtcggattgttaattggaattc

SEQ ID NO: 245909 - DNA, 918 bp, Unknown
  Bacterial polypeptide expressing nucleotide sequence isolated from the Sargasso Sea
tatttatacactagacaaaacaaaaaatatttagattttgcaagtggaatagctgtaaactctcttggtcattgtcatcctaaactaatagaggcactgaataagcaatctaaacaaatctggcatgtttcaaacttatataaaattaaaaaacaggaagaatttgcaaatttgctttgtaaaaattcttttgcagacaaagttttttttactaattctggaactgaatctattgagtgtggaattaaaataatcagagggtatcattcatatcacaagacaaaaaaaacagagattataacttttgagggtgcatttcatggaagaacttacggtgcactttcagcacaaaaaaataaaaaatactctaatggctttggccctatgctcaaaggctttaaacaaattgaatttaataatgaaaaaaaattaatatcggcaataaatagaaaaacagctggtattataattgaaccgattcagggagaaggaggtattcgtcctgctcatctaagttttttaaaattattaagaaaaatttgtaacgaaaataacatcttactttttcttgatgaagttcagtgtggatttggtagatcaggtaaattattttcacatgaatgggcaaaaataaaaccagatattatgtctgtagcaaaaggtataggatcgggttttccactaggagcctgcatgtcaacaaacaaagcatgtgtcgcaatgactaagggtagtcacggatcaacctatggtggtaatccgttagctatgagtgtagggttagaagttttaaaagttatctctaataaaacatttctttcaaagattgataaaaccgcaagatatttttggaaaaatttaaaaaaattagaggatacatttaatattatttctgaggtgagaggtgcaagacttttt

SEQ ID NO: 245910 - DNA, 791 bp, Unknown
  Bacterial polypeptide expressing nucleotide sequence isolated from the Sargasso Sea
tcacggaagaactttggcagcgatatttgccagtggttcaaagaaaatgacagaaggatttggacctaaagtacctggatttgaccattttaattttggtgatcataaaggtttgaaaagggctattacaaaaaaaacagccgcaataatgatagaaacagcaatgggagagtcaggaattaaagttatacccaattggtgtttaaaagatttaagaaaaatttgtaataagaaaaaaatcttactaatcctagatgaggttcaatgcggaataggaagatcgggaaaattttttgcttttgaacatgcaaaaataaagcctgatattgtaccaattgcaaagggaatagggggcggttttccaattggagcagttttaatgaataaaaaggtggcatcggctatgacaccagggtcacacggaagtacttttggcggaaaccctttagctatgagtgtaggcaatgcggtattagatcaaatatttaatagaggatttttaaaaaacgtagagaaatcttctaaacactttattactgaactaaacaaaataaaggaagactatccggaagtaattaaagaagtcagagggattggtttattgttggggatacagctttataatgatcaaactaaatttattaaaaagttagaggataacaagttgcttacaatgagagccggagagaatgtagtcagaatcttgcctcctttaaacgttagaagacaagaaattgatcttgcaataaaaattataagaaaagtatgtgataaactaagttatgaataat

SEQ ID NO: 245911 - DNA, 970 bp, Unknown
  Bacterial polypeptide expressing nucleotide sequence isolated from the Sargasso Sea
tgtgtcaatgttatgccaacttatggtattaaaaatcttgaatttgtaaaaggtaaaggatgttacttatactctagtcaaaataaaagatatttagattttgcaagtggaattgctgtaaactctcttggtcattgccatcctaaacttatagaggcacttaataagcaatcaaaacaagtctggcatgtttcaaacttatataaaataaaaaaacaagagcaatttgcaaagttactttgtaaaaattcttttgcagacaaagttttttttactaattctggaactgaatctattgaatgtggaattaaaataattagaggatatcattcatatcacaagacaaaaaaaacagaaattatcacctttgatggtgcttttcatggtagaacttatggagcgctttcagctcaaaaaaacaaaaaatactctaatggctttggccctatgcttaaaggctttaaacaaattgaatttaataatgaaaaaaaattaatatcagcaataaataaaaaaacagctggtattataattgagccaattcaaggagaaggaggtattcgtcctgcaaatctaaattttttaaaattattaagaaagatttgtaacgaaaagaaaatcttacttttttttgatgaagttcagtgtggatttggaagatctggtaaattattttcatatgaatgggcaaaaatcaaacctgatattatgtctgtagcaaaaggtattggatcgggttttccacttggagcttgtttgtcaacaaacaaagcatgcattgcaatgacaaaaggtagtcatggatcaacctatggtggtaacccgttagccatgagtgtaggtttagaagttttaaaaattatttctaataaaacatttcttaaaaaagttgataaaacagctagatacttctggaaaaatttaaaaaaattagagaatacatctaatatcatttcagaggtaagaggcg

SEQ ID NO: 245912 - DNA, 872 bp, Unknown
  Bacterial polypeptide expressing nucleotide sequence isolated from the Sargasso Sea
aatgagctcgctagctaaaaattacaatagaagaaaaatttcttttaaaaaaggaaaaggttcttttttatattctaccgatggaaaaaaataccttgattttctttctggtattgcggtcaattctctaggacattcaaatccccatttaataagagcattaggaaaacaatctaaaaaagtttggcatgtctctaatgcatttttaattccagagggagaaagattagctaaaagactaacccaaagaacatttgcagattatgtgctatttcaaaatagcggaacagaagcaattgaggctgcaataaaaatagctcgtagatatttttattcaattggaaaaccaaaaaaaaatagaattctttgtataaaaaattcattccatggaagaacgctcgcagctatatttgcgagcggatcaaaaaaaatgaccgaagggttcggtcacgtaggtggtttcgaccattttaagttcggtgatcacaattcattaaaaaaagcaattacaagtaaaacagctgctattatggttgaacctattatgggagaaagtggaattaaagttattccagattggtgtttaagggaattaagaaagatttgtaataaaaaaaaaattttattaattcttgatgaagttcaatgcggagtaggaagaaccggaaaatttttcgcttttgagcacgcaaaagtaaaaccagatattgttccagtagctaaaggtattgggggaggtttcccaataggggcagttttaatgacaaaaaaggcagcttcaggaattaattttcctggaacacatggttcaacttttgggggcaatccattagcgatgagtgtaggaaatgctgttttggatcagattttta

SEQ ID NO: 245913 - DNA, 867 bp, Unknown
  Bacterial polypeptide expressing nucleotide sequence isolated from the Sargasso Sea
gcagctatttgtatcaaaatcaggagataagtttttagattttggtacagggatagcggttaactccctaggttattcaaatccctatctaaatgataagttaaaagaacaaattgataaattatggcatttatcaaacgtatatcagataccagaacaagaaaaacttgcaaaaaggttatgcgataattcctttgcggattatgtatttttctgtaactcaggtactgaagctattgaggcaagcataaaaattgccagaagatattttcatagttcagaaaattggtcacataaaaaagaaatcttaagtttttcaggttcatttcatggtagaacaataggggcgctcgcagcgggaggtccagacaaactcagctcttttaataccacagttaatgattttaaatttcttgaatttggtgatcatgagcagcttcaaaactcaataaacgaaaaaactgctgcagtaattattgaacctatacaaggtgagggcggtataagagaagttcccaagcaatgccttgagggattaaagaaaatttgtgatgaaaataactgccttctaatctttgacgaagtgcaatgtggtatgggtagaacaggaaaattatttgcatatgaatggtctgaagtaaatccagatattatgacaatagctaaagctattggaaatggttttccattaggtgcatgcctgacatcaaaaaaagttggtgaaaaaatgaattttggttcccatggttcaacttttggaggcaatccacttgcctgcacggttggaaatgcagttttggatataatgctaaaagataaattttttagtgaaattaatgttgttgcaaaaaaactctatgaaggact

SEQ ID NO: 245914 - DNA, 589 bp, Unknown
  Bacterial polypeptide expressing nucleotide sequence isolated from the Sargasso Sea
tggtgtttaaaagaattaagaaaattatgtaataagaaaaaaatattattgattttagatgaagtacaatgtggaatttcaagaacaggcagctttttttcatttgaaaagtcgaatattaaacctgatatcgtaccaattgcaaaggggatagggggaggatttccgataggtgctgttttaatgaataaaaaagttgcttctggaatgatacctggaacccatggatctacttttggtggaaatcctttagctatggctgtcggtaacgcggtaatggatatagtttcgagaaaaaaatttttgagaaatattgaaaatttatcaaaatatttcctatctcaattaaagaatattaaggagacatatccacatctaattaagagcattagaggaagaggttttttaatcggaattcaactatataaagatcaaacgatttttattaaaaagctaatggaaaatagattgctgacaataagagcttcagaaaatgttattcgtatacttcctcctttaaatgttaaaaaaagtgagttagatctgtctttaaagataataaatcaggtctgtaaagaacttaactaaa

SEQ ID NO: 245915 - DNA, 787 bp, Unknown
  Bacterial polypeptide expressing nucleotide sequence isolated from the Sargasso Sea
atgtctaaaaattcaacatatatcatgccaacatatggcgatagaaatctagaatttaaagaaggtaagggatgttacttgactgctgtagataataataaatacttagattttggtagcggtatcgctgttaattctttaggtcattgccatcctagattagtaaaggctttgcaacatcaagcttctaagttatggcatatatccaatctttatcataattccttgcaagaggaatatgcaaaacttttatgtttaaatagttttgcagaaaaagtttttttcactaattctggagttgagtcaattgaagcaggaataaaagttataaaaagttatcatcattatcataacaatacagatcaaaagaatataattacttttgagggagcatttcacggcagaacatttgctgctttatcagctcaacaaaatgaaaagtattcaaaaggatttgagcctttattaagtggatttattaaaatccccttcaatgatattgatgctgttaaaaaaaatgtaaacaaaaatacagctgctataatgatagaacctatccaaggtgaaggaggcattagacctgctaatttaaaattcttacaagatataaaaaaaatctgtgaaaaaaataatttattattatttttggatgaggttcaaagtggttttggaagatcaggaaaattattttctcatgagtgggcaaatattgagcctgatatagtagctactgctaaagggattggttcaggatttcctatgggcgcttgtttagccacaaaataaa

SEQ ID NO: 245916 - DNA, 644 bp, Unknown
  Bacterial polypeptide expressing nucleotide sequence isolated from the Sargasso Sea
agcaattatggttgagacaatacttggagaaggtggaataaaagtaattccggattattgcttaaaaggacttagaaaactttgtaataaaaaaaagatattgttaatattagatgaagttcaatgtggaattggaagaactggaaaattttttgcttttgaacatgctaaaattaaaccagatattgtgcctatagctaaaggaataggcggaggttttcctattggagcagtattagtaaataaaaaagtagcttcctgcatgaaaccaggtacccacggatcaacctttggaggaaatcctttagcaatgagcgcgggcaatgcagttatcgatgtactattcagaaaaggttttttaaaaaacgtcactaaaaacggaaaatattttcaacaagagttaaataaacttaaagaaaaatatccaaaagttattaaagaagttagaggactagggttattgttaggagttgcactttatagaaatcaagcagactttattaataagttattacaacaaaaattacttactgtaagagcttctgagaatgttgttagacttttgcctcctttaaatgttacaagaaaggaaataaatttagcaattaaaatcctaaataatgtatgtgagaattataaatgaa

SEQ ID NO: 245917 - DNA, 830 bp, Unknown
  Bacterial polypeptide expressing nucleotide sequence isolated from the Sargasso Sea
ggccgcaagaagtattttttattcaattggaaaacctcaaaaaaatagaattctttgtataagaaattcttttcatggaagaactttagcagcaatttttgcaagtggatcaaagaaaatgaccgagggatttggacccaaagtaccaggctttgatcactttaattttgctgaccacaaaggtttaaaaaaggcaataacaagaaaaacagctgctataatgatcgaaaccgtaatgggtgagtcgggcattaaagttatacctgattggtgtttaagagatttaaggaaaatttgtaataagaagaaaattcttctaattttagacgaggttcagtgcggcataggaagatcgggaaaattttttgctttcgagtacgcaaaaataaaacctgatatcgttccaattgccaaagggataggcggaggctttccaataggagcagttttaatgaataaaaaagtagcatctgctatgacaccaggatcccacgggagtacttttgggggcaatcctctagctatgagtgtaggaaatgcagttttggatcagatatttaaaaaaggatttctaaagaatgtaaaaaaatcttctagttactttatttctgaactaaataaaatacagtccgattatccagaaataattaaagaagtcagaggagttggtttgttaataggattgcaactttataacgatcaaactaactttattaaaaagttacaggataataagttgctaactatgagagcaggagaaaacgttgtcagaatcctgcctcctttaaacgttaaaaaacaagaaatagatcttgcaataaaaattataa

SEQ ID NO: 245918 - DNA, 593 bp, Unknown
  Bacterial polypeptide expressing nucleotide sequence isolated from the Sargasso Sea
cttcagtcgctgcgcccagcttggtgatgagcgccaactgctgttgatcagtgatgaggtgcaggtgggtatggcccgcagcggcaccctctggggctaccagcagctgggcattgagcccgatgctttcaccaccgccaagggccttggcggtggcttcccgattggcgctctggcagtgaaaaaccatgccgccgtcttcgagccgggagatcacgcgagcacctttggcggcaaccccctggcctgccgcgccgccctcaccgtggcccgcgaactgcagcagcgacgcctgctggagaacgtgcagcaacggggcgagcaattgcagcagggcctgcaacaacgggtggagcaatggccgcagctgctggctggtgaacggggctggggcttgattcgcggcctgctgctgcgtgatgacagcatcagcgccatcgatctggtcaaggccgccatggcagaggggctgttgctggtgccggctggcagccaagtggtgcgttttgtgccccccctggtgatcaaccgccgccaaatccaccaggccctgcagcgcttggatcaggccctcagcaaactcgcggcctgac

SEQ ID NO: 245919 - DNA, 779 bp, Unknown
  Bacterial polypeptide expressing nucleotide sequence isolated from the Sargasso Sea
ggtgaccgctacttcgcagccaaaataccaggagggattcggtcccctgccgggaggcttccgctatgcagcttacaacgatttcgaagaagccgaaaaggccatcgggccccagacctgtgcagtgctcgtagaaccgcttcagggcgaaggtggggtgaatcctgcccgtcccggcttcctcagacacctccgggaactctgtaaccaccatcaggcgcttttgatcttcgatgaaatccaatgcggaatgggccgaaccggaaaactctttgcccatgaatgggaggagggagtcgttcccgatgtgctgaccctggccaaagcccttggctgcggacttcccatcggcgccatgctctgcagcgaaaaagtctcccaggctttcaaaccgggggatcacgggacgaccttcggaggaaacccgatcgtcgcctccgttgcccgtgctgccctcaaaaagatcaatacaccgcagatgatggcccatgtcatcaaacaaggggaagccatccgcggaagattgcattccctcaacgatgaactcaataattttggtgaaatccgtggtaagggactgatgctcggtggtgtgctccacggggcatggaaaggacgggctggggaaatcgtctcgactgcactgaatcatggggtgctgatcctggtcgccgggccggacgtggtgcggctcgttccgcctctcaccatcactggagacgaagtccagaccggactggaaagactcaccaaagccctcaaagaactcgcatcataaa

SEQ ID NO: 245920 - DNA, 724 bp, Unknown
  Bacterial polypeptide expressing nucleotide sequence isolated from the Sargasso Sea
tggtccaaaagtaagtggatttgatcattttgactttggagatcacaagtctttaaagaaaaaaattaccaaaaatacagctgctattatggtggaaacaattatgggcgagggtggaattaaagtaatacctgattggtgtttagtggaattgagaaagctatgtaatcaaaaaaaaatattactaattttagatgaggttcagtgtggtatagcaagatctggtgacttttttgcatttgaaaaatctaaagtaaagccagatattgtgccaatcgcaaaagggattggaggtggatttcctatcggagcagttttaatgaataagaaagttgctgctgggatgacaccaggaacacatggttcaacttttggtggtaatccattagcaatggctgttggaaatactgtgatagatatagtttcaaataaaagttttctgaaaaatgttaaaaatatttctaaatattttttattaaaattaaataatttaaagaatgtttatccaaatataataaaaaatataagaggcaaaggacttttaattggtattcagctacatgcagatcaaacaaaatttataaaaaaacttatggacaataaattattaaccatacgtgcagcagaaaatgttgttagaattttacccccacttaatgttaaaaaaaacgaagttgatcaagctttgaaaataataaataaagtttgtaaagaattaaattaa

SEQ ID NO: 245921 - DNA, 578 bp, Unknown
  Bacterial polypeptide expressing nucleotide sequence isolated from the Sargasso Sea
agaattgagagcattatgtaataaaaaaaaaatattattaatacttgatgaggttcagtgtggaataggaagatctggtgatttttttgcttttgaaaaatcaaaagtaaaacctgatattgtgccaattgcaaaaggaataggtggaggatttcctattggagcagttttaatgaataaaaaagttgcatcgggcatgacaccaggcacccatggatcaacatttggaggaaaccctttggctatgtctgttggaaatgcggtaatggatattatatcaaataagaaatttttaaataatgtaaaaggtctatcaaaatattttttatttaagcttaataaaattaaagaaaaatatccaaatgtaattaagcagataagaggaaaaggctttttgattgggatacagttatataaagatcaaactgaatttataaaaaaattgatgaacaatcagctattgactattagagctgcagaaaatgttgttcggattttacctccattaaatgtcaaaaaaaatgaactagacttagcattaaaaattattgaaaaggtctgctcacagataaaataat

SEQ ID NO: 245922 - DNA, 706 bp, Unknown
  Bacterial polypeptide expressing nucleotide sequence isolated from the Sargasso Sea
atgaaaactagtaaggctctaattgaaaataataaatatattatccagaattaccaaagatatcccattgaaataataaggggtgatgggtcttttatatgggattcaaaaggaaaaaaatatctagattttatttctgggattgccgttaataatttgggtcataataattccaagattaataaagctatttcatctcaacttcaaaagattcttcatatttcaaatctttttgtaattaaagagcaagttaattatgcaaaagagctttataagaaaaagttgggatatcaaacttttttctgtaacagtggaactgaggcaaatgaggctgcctttaagctatcaagaagatggggaatgctaaacggtaaaaggagcaccattgtgtctttttcgggagcatttcatggaagaacttttggttccttgagtgccacttcaccgaaaaaatatagatttgggttctatcctttgaccccaggctttaaaagcatagaatttaataattttatcgaacttgagaagctattaaataaaaataaaaaaattgtagctataattgttgaacctattcaaggcgaggctggagtaaagtttagtgacaaaggttttttaaataaaattcaagaactttgtagaaagaataatatattatttattgttgatgaagtgcaagttggaattggtaggactggaaaaactt

SEQ ID NO: 245923 - DNA, 832 bp, Unknown
  Bacterial polypeptide expressing nucleotide sequence isolated from the Sargasso Sea
tttcaaaattctggaaccgaagcaactgaagctgcaataaaagtagcaaggagatatttttattctaaaggaaaaccacataaaaatagaattttatgtataaaaaattcatttcatggaagaaccattgccgcaatttttgcaagcggatcaaaaaaaatgactgaaggttttggacctaaagttccaggatttgatcatattgaatttagaaagtttaagccaagatttcctaatattagaagtaaaattaagcagaataccgctgcaataatggtagagactataatgggtgaggcaggaattaagcctatacctgataaatgtcttaaatatttaagaaaaatttgtaatgaaaaaaagatattattaattttagatgaggttcaatgtggaataggcagatcaggagatttttttgcatttgaaagatcaaaaataaagccagatattgttcctatagccaagggaatagggggaggttttccattaggcgcagttttgatgacaaaaaaagttgcaaaatcaatgagcccaggaagtcatggctcaacttttggaggaaatccattagcaatgagtgtagggaatgcagttttggatcaaatttttaaaaaaggatttcttaaaagtgtaaaaaaaatatcaaaatatttttttaacgaattaaataaagttaaaaatgattatcctaaattaattaaagaagttagaggactaggtttgttaataggtttacagctttttaatgaccaaaaaaaatttatacaaaaattagagaacaataatctacttacaatcagagctgctgaaaatgttgtacgaattttac

SEQ ID NO: 245924 - DNA, 860 bp, Unknown
  Bacterial polypeptide expressing nucleotide sequence isolated from the Sargasso Sea
acaaacccaactttagtaaatgctataaataagcagtcaaaaaaactttggcatgtttcaaactcttttataattcccgaaggtgaagagctggcaagaaaactaacaaataaaacttttgctaatgcagtaatttttcaaaatagtggagcagaagctacagaagctgcgataaaaattgctagaagatatttttactcaataggtaagccagagaaaaatagaattttgtgtataaaaaattcgtttcatggaagaactatagcagcaataaatgcaagcggttcaccgaaaatgacagagggatttggtcctaaagtaggaggttttgatcattttaaatttggaaatcacaatgaactaaaaaaaaaaatatcaagtaaaactgcagcaataatgatagaaccaataatgggagagggaggtattaaggtaataccagattggtgtttaaaagaactaagaaaaatatgtgataagaataaaattctcttaattttagatgaggttcaatgtggaattggtagaactggcaaatttttctcttttgaatatgcaaaaattaaacctgatatagtgccaatagcaaaaggaattggaggtggatttcctataggtgctgttctgatgactaaacaagtttcagcagcaatggtgcccggcactcatggatcaacttttggtggaaaccctctagcaatggcagttggcaatgctgtaatgaatgaaatttttaaaaaaggctttctttcaaaagttaaaattaattcaaaatatttcatctcagaattaaataaaattaaaaataaatttccaaagattattaaacagataagagggaaaggtcttattataggaat

SEQ ID NO: 245925 - DNA, 584 bp, Unknown
  Bacterial polypeptide expressing nucleotide sequence isolated from the Sargasso Sea
tttgaaatatttgagaaaaatttgcaatcaaaaaaaaatattattaattttagatgaagtccagtgtggtattggtcgaagtggtgatttttttgcctttgaaagatcaaaagtaaaacctgacatagtccctatagcgaaaggtattggaggaggttttcctattggagcagttctaatgaataaaaaagttgcttcaggcatgtctcccggaacacatggatcaacttttggaggtaatccactagcaatgaaaataggatccacagtaatggatattgtagcaaacaaagtttttttggataatgtaaaaaataattctgaatattttcacaaaaaattagataatttgagaaaaacattcccaaaaataattaaagaaattagaggaagaggccttttaataggtttaaaattacataatgatcagacaaattttataaaaaatcttatggaaaataaattattaacaattagggcagcagaaaatgttgtcagaattttacctcctctgaatgtaaaaaaaagagaaattgaccaagcaattaagattattaataaagtttgtaaagagtataattaat

SEQ ID NO: 245926 - DNA, 731 bp, Unknown
  Bacterial polypeptide expressing nucleotide sequence isolated from the Sargasso Sea
tttattctaacgggcaaaccaaataaaaatagaattttatgtataaaaaattcgtttcatggaagaacgattgcagcaatttttgccagtggatcaaaaaaaatgactaagggctttggacccaaagttccaggatttgatcatattgaatttagaaaatttaagccaagatttccaaatattagaaataaaataaggaagaatactgcagcaataatggtagagactataatgggagaaggaggcattaagtctatacctgacaaatgtcttaagtatttaagaaaaatttgtaatgaaaaaaaaatattgttaattttagacgaagttcagtgtggaataggtagaacaggagatttttttgcgtttgaaagatcaaaagtaaagccagatattgttcctatagctaaggggataggcggaggttttccattgggtgcagttttgatgaaaaaaaaagttgggtcatcaatgattccagggagtcatggttcaacttttggaggtaatccattagcaatgaatgtgggaaatgcagttttggatcaaatttttaaaagaggatttcttaaaaatgttagaaaaatatcaaaatattttcacatagaattaaataaacttaaaaatgattatccaaatattattaaagaaattagaggcaaaggcttattaattggaatacaattgcattttgatcaatcgaaatttattaaatctttagaaaaaaatta

SEQ ID NO: 245927 - DNA, 733 bp, Unknown
  Bacterial polypeptide expressing nucleotide sequence isolated from the Sargasso Sea
gaggggttcggggccaaaagtaccagggtttgatcattttgactttgctgatcataaaggtctagaaaaagccattacaaaaaaaacagcagcaataatgtgtgaaactgcaatgggtgagtcgggtataaaagttatacctgattggtgtttaaagggtttaagaaaactctgtaataagaaaaaaatactcttaattctcgacgaagttcaatgtggtatcggtagatctgggaaattcttcgcatttgaacatgctaaaataaagcctgatattgttccaatagccaaaggtattggcggtggttttccaattggcgcagttttaatgaataaaaaagtagcatctgcaatgacacccggttctcatgggagtactttcggtggaaatcctttagcaatgagcgttggaaatgctgttatggatcaaatgtttaaaaaaggtttttttcaaaatgtacagaaattatcaaaatattttattagtgaattaaacctaataaaagaagattacccagatataattaaagaggtaagaggtattggactattgatcggattacaactttttgaagaccaatcaaactttattaaaaaattagaattaaacaaattacttacaataagagcaggagaaaatgtagtcagaattctgcctcctttaaatgttaaaaaacaagaaatagatcttgcagtaaaaataattagaaaagtttgcgaaaattacaattaa

SEQ ID NO: 245928 - DNA, 759 bp, Unknown
  Bacterial polypeptide expressing nucleotide sequence isolated from the Sargasso Sea
ttcactaggccatgctaatcaaaatctaattagagctatcaataaacaagctaaaaaagtgtggcatgtatcaaatgcatttataattcccgaaggagaaaaacttgctaaaagacttactcagaaaacttttgctgattatgttattttccaaaattcaggaactgaagcaactgaagcagcaataaaagttgcaagaagatatttttattccatcggcaaatcatataaaaatagaattttatgtgtaaaaaattcatttcatggaagaactatagcagcaatatttgcaagtggatcaaaaaaaatgaccgaaggatttggaccaaaagttgcaggctttgaccattttagatttggggaccataaatctttaaaaaaatctattacaaataaaacagcagcaattatggttgaacctataatgggagaaggcggcattaaagtaataccagactggtgcttaagagaactaagaaaaatttgtaataaaaaaaaaattcttttaatattagacgaggtccaatgtggaatcggtagaactggaaatttttttgcatttgaaaactctaaagttaaacctgatatagtacctattgcaaagggaattggaggtggttttccaatgggagcagtgttaatgacgaaaaaggttgcgctctcaatgtctcctggaacgcacggttctacttttggaggcaatccacttgctatgagtgttggaaatgttgttttggatcaaattttaaaaaaaggatt

SEQ ID NO: 245929 - DNA, 763 bp, Unknown
  Bacterial polypeptide expressing nucleotide sequence isolated from the Sargasso Sea
aaaaaaaatagaattttatgtataaaaaattcttttcatggaagaactattgcagcaataaatgctagtgggtcaaaaaaaatggttgaaggatttggcccaaaagtggctggatttgatcattttaaatttggtaaccacaatgagctaaaaagaaagattacaaaaaaaactgctgctataatgattgaaccaataatgggtgagggtggaattaaagtaatacctacttggtgtttgaaagaattgagacagatttgtaataaaagaaaaattcttcttattttagatgaagttcagtgtggaattggaagatcaggtaagtttttttcatatgagtatgcaaagataaagcccgatatagttccaattgcaaaaggaattgggggtgggttcccaataggcgcagttttaatgacaaaaaaagtttctaaagctatggttcctggtacacatggatctacttttggtggtaacccattggccatgtctgttggcaacactgttatggacgaaattttcaaaaaaggctttctcacaaaagttaatatcaattcaaaatattttatttcagaactaaataaaattaagaacaaatttccaaatattataaaagaaatcagaggcataggattaattttggggatacagttacatcacgaccagacaaaatttattcaaagtctaatgaaaaataaattattaacaattagagcagctgaaaatgtcataagaattttgcctcctattaaatgtaactaaa

SEQ ID NO: 245930 - DNA, 739 bp, Unknown
  Bacterial polypeptide expressing nucleotide sequence isolated from the Sargasso Sea
aatgacagagggatttggaccaaaagtccctggatttgaccattttaattttgctgaccacaaaggattaaaaaatgcgattaataaaaaaacagccgcaataatgattgaaacagctttaggagagtcaggcattaaagttattccaaattggtgtttaaagggtttaagaaaaatttgtaacaaaaaaaaaattttattaattttggatgaagtccaatgtggtattggcagatctggtagattttttgcttttgaagatgctagtataaagcctgatattgtgccaatagcaaaaggtataggcggtggttttccaatcggagcagttttgatgaataagaaagtggcatctgctatgacaccagggtcacatggaagtacttttggaggaaaccctttagctatgagtatcggaaatgcagttttggatcagatttttaaaaaaggatttttaaaaaatgttcagcaatcctcaaaatactttatgtctaaactaaacaaaataagagaagactatcctgaaattattaaagaaataagaggaattggtttgttaataggtttgcaactttacgataatcagtcaaagtttattaaaaaattagaggataacggattacttacaattagagcaggagaaaatgttgtcagaatcttgccccctttaaatgttaagaaacaagaaatagatcttgcaattaaaataataagaaaagtttgtgataaactgaattaa

SEQ ID NO: 245931 - DNA, 796 bp, Unknown
  Bacterial polypeptide expressing nucleotide sequence isolated from the Sargasso Sea
aagaattcattccatggaagaacattggctgcaatttttgctagcggatcaaaaaaaatgacagagggatttggtcctaaaataccaggtttcgaccattttagatttggaaatcacgattctttaaaaaaaaaaataaacaagaatactgccgcaataatggtggaaactgtcatgggagagggaggaattaaagtaatacctgattggtgtttgagagaattaagacatttgtgcaataaaaaaaaaattttattaattcttgatgaagtacaatgtggagtagcaagatctggtgacttttttgcttttgaaaaatccaaggtaaaaccagacattgttccaattgctaaaggaattggaggaggatttcccattggagcagttttaatgaacaaaaaagttgcatcaggcatgaccgttggctctcatggctcaacctttggaggaaatcctttagctatgactattggaaatacagttatggatatagtttcaaaaaaaagttttttaaataacataaaaaaattatctaaatattttttcgaaaaattgaatattatcaaatctaaacacccagatattataaaagaaataagaggaagaggattattgattggtattcaacttcataataacccaactttatttataaaaaaactaatggaatatagattattaaccattcgtgctgctgagaatgttattcgaatattacctcctttaaatgtcaaaaaaaaagaaatagacattgcagtaaaaatcatctccaaagtttgcaatgatcttaagtaag

SEQ ID NO: 245932 - DNA, 590 bp, Unknown
  Bacterial polypeptide expressing nucleotide sequence isolated from the Sargasso Sea
ttggtgtttaaaggaattaagaaaactgtgtgataaaaaaaaaatattgttaattttagatgaagttcaatgtggaatttcacggtctggtgatttttttgcatttgaaaaatctaaagttaaacctgatatagtaccaattgcaaaaggtattggaggaggatttcccattggtgctgttttaatgaacaaaaaagttgctgcaggcatgataccaggaacacatgggtcaacttttggtggaaaccctttagctatggctgttggaaatactgtaatggatatagtttcttccaaaaaattcctttacaatgtaaaaaagtcttcaaaatattttttttcaaatttaaataagttaaaagaaaaatacccaaaaattataaaagaaataagaggaagaggtttgttgattggagtacagcttcataccaatcaaactaagtttattaaaaatttaatggataatagattattaacaatccgtgcagcagaaaatgttgttcgtattttacctccattaaatgttaaaaaaaaagaaatagatttagcgataaaaattattgaaaaggtctgttcgcagataaaataat

SEQ ID NO: 245933 - DNA, 666 bp, Unknown
  Bacterial polypeptide expressing nucleotide sequence isolated from the Sargasso Sea
aagctataactaaaaaaacagcagcgataatggtagaaacaataatgggcgaaggtggaataaaggtaattcctgattactgtttaagaggactaagaaaactttgtaataaaaaaaagatacttcttattcttgatgaggttcagtgtggcgttggcagaacaggtaaattttttgcatttgaacatgcaaaaataaaaccagatattgtgccaattgcaaaaggtataggtggaggctttccaattggagcctgtttagtaacaaaaaaagttgcttcatgtatgacatatggatctcatggatctacttttggaggtaatccacttgctatgagtgtaggtaatgcagtacttgatcaaatttttaaaaaaaattttttaagaaatgttcaaagaatttcaaaatattttagatcaaaacttacaaatcttcatgccgaatatccaaaagtaatagaagaaattagaggcaaaggattattattgggcattaaagttttaaaagatcaaaataaatttataaaaaaattatatgataataaattactgacaattagggcttctgaaaatgttataagattattgccacccttaaatgttaaaaagcaaaatattgatgaagcattggcaatattaaaaaaagtgtgtaaaacttataaatgaa

SEQ ID NO: 245934 - DNA, 817 bp, Unknown
  Bacterial polypeptide expressing nucleotide sequence isolated from the Sargasso Sea
aatgtcagctttagctaaaaattacaacagaagaaaaatttcttttaataggggcaagggcagtttcctatactctaccaatggaaaaaaatatctagattttgtacaaggtatagcagttaattccttaggtcatgctaatccatacttaataagagctatgaatagacaagcaaagaaagtttggcacgtctcaaatgcatttttaattccagagggagaaaaattagcttcaaagcttaaagaaaaaacatttgctgattatattatgtttcaaaattctggagcagaggcaactgaggctgcaataaaggtagcgagaagatatttttattcaataggcaaaccacacaaaaatagaattttgtgtattaaaaattcatttcatggaagaacattagctacaatttttgctagtggatcaaaaaaaatgactgagggttatggtccaaaagttgatggatttgatcattttgaatttggtgatcatcaatcattaaaaaagaaaattaataacaaaacagctgcaataatggttgaaccgattatgggagaaggagggattaaagtggtaccagattggtgcttaagagagttaagaaaaatttgtaataaaaaaaaaattttattaattttagatgaagttcaatgtggagttggaagatcaggaaagtttttcgcatttgaatattcaaaaataaaaccagacatagtaccaatagcaaaaggtattggtggagggttccctataggagctgtcttaatgacaaaaaaagtagctttttgtatggttccaaggagctcaccgggagtacgt

SEQ ID NO: 245935 - DNA, 638 bp, Unknown
  Bacterial polypeptide expressing nucleotide sequence isolated from the Sargasso Sea
tatggttgagacaattttaggagagggaggcattaaagtgatcccaaatttttgcctagaaggtttaagaaagctttgtaataaaaaaaagatcttattaattttagacgaagtacaatgtggaattggtagaagtggaaaattttttgcttttgaacatgccaaaattaaaccagatatagttccaattgcgaaagggattggcggaggttttccgattggagcggtgttagttaataaaaaagttgcatcagcaatgaaaccagggacacacggatcaacatttggaggaaatcctttggcaatgagtgcaggaaatgctgttttagatgttatgtttaaaaaaggttttttaaacaacgtaactaaaaatggagaatacttcattaaaaaattgaataaagttagagaaaaatatccaaagatcattaaagaggttagaggaaaaggattattaattggcttgtgtttgtataaagatcaaactaattttatcaaaaaacttcaagacaataatcttttaagtgtcagagcatcagaaaatgtagtcagacttctgcctcctttaaatgttaaaaaaagagaattaaatttagctttaaaaatactcagcaaagtgtgtaaggattatagatgaa

SEQ ID NO: 245936 - DNA, 742 bp, Unknown
  Bacterial polypeptide expressing nucleotide sequence isolated from the Sargasso Sea
aaaggaaaaggaagttatttatactctacaaatggtaaaaaatatttggattttgtgcaaggtatagctgtaaattctttaggtcatgctaatcctgatttaattaaagcaataagtaaacaatcaaaaaaagtgtggcatgtttcaaatgcatttgtaatacccgaaggggaaaagctagcaaaaaaattaacccaaaaaacttttgctgattctgtaatatttcaaaatagtggcactgaagctacagaggctgcaattaaaattgctagaagatatttttattcaattggaaaaccaaataaaaatagaattatttgtatcaagaattcatttcatggaagaacaattgcagctataaacgcaagtggttctaaaaaaatgacagaaggatttggtccaaaagttcctggctttgatcattttgaatttggaaatcataaaaaaatgaagaaactaattaacaaaaatacagctgctatcatggtagagacggtaatgggagaagggggaataaaagtaatacctagctggtgtattaaagaattgagaaaaatctgtaataaaaaaggaattttgttgatattagatgaagtacagtgtggaattggtcgtagtggaaagttttttgcatttgagaatgcaaaagttaaaccagatattgtgcctatcgcaaaaggaatagggggaggatttccaataggtgcagttttaatgtcaaagaaagttgcaaaggcaatga

SEQ ID NO: 245937 - DNA, 808 bp, Unknown
  Bacterial polypeptide expressing nucleotide sequence isolated from the Sargasso Sea
tttatgcgttaaaaattcttttcatggaaggactctagctgcaatttttgcgagtggttctaaaaagatgacagaaggttttggtccaaaagttggtggatttgatcatttcgaatttggtaatcataaatcattaaaaaagaaaattagcaacaagactgcagctataatggtagaaccaataatgggagagggtggtattaaagtaatacctggttggtgtttaagagagttaagaaaaatttgcaataaaaagaaaattttactaattttagatgaagtgcagtgtggagttggaagatctggaaaattttttgcatttgaacacgcaaaagtaaaaccagacatagttccaatagccaaaggtattggtggtggatttcctataggcgccgtactaatgacaaaaaaagttgcgtcttgcatggttccaggaacccatggaagcacgtttggtggaaatccattagcgatgagcattggtgatgctgtattagatcaaatatttaaaaaaggtttccttaaaaatgttaaaaagatatcattatattttcataaagagctgaacaaaatcaaaaatgattatccaaagataatcgaagaagtaagaggcataggtctacttattggtttaaaacttttcaataatcaaattaaatttattaaaaaactagaaaacaataagttgctcactataaaagctgcagaaaatgttgtcagaatactccctgctcttaatgtaagtaagtccgaagttgatcttgcaatacaaattattagaaaagtttgtaaagaattagaagtataa

SEQ ID NO: 245938 - DNA, 724 bp, Unknown
  Bacterial polypeptide expressing nucleotide sequence isolated from the Sargasso Sea
ctgcgcagtactgattgagccaatccaaggtgaaggtggtgtcaatcctgtaaaaccaggatttttgtcccatttaagaaaactttgtgaccagcatgatgtactgctgatttttgatgaaattcagtgtgggatgggtcgtacaggaaaattattcggctaccagtgggaaaattctgaagattctgaacagccggataattcagtgacaaatctgaaaccggatattgttaccatggccaaagctttgggtggtggactgccaattggcgcaatgctttgcactgaaaaggttgcgcaaaccttcaaacccggagaccatggaacaacatttggagggaacccgattgtcactgctgttgccggtgctgcattccgaaaagttaatactccggaaatgatggagcaggtactgaaaaaaggcttagttatcaaaaatcacctgaaagcactcaacgatgaacttagtttgtttgaaacaattcgtggtcgtggaatgatgcttggtgccgtgttatcaaaggcctggaaagggaaagcctccaaaatggtcacagcctgccaagaagagggtgttctggttttggttgcaggaccggatgtattacgttttttgccgccgttgaatatttcaactgcagatctgcaaactgccttggaccgggtcggcaaagccctgaaaaatttacatgcagacgagttgtcgtcctccacaaaaacttaa

SEQ ID NO: 245939 - DNA, 959 bp, Unknown
  Bacterial polypeptide expressing nucleotide sequence isolated from the Sargasso Sea
tttggcaaaaaattataacagaaagaaaattgcttttagttatggaaaaggaagttatcttttctcaactgatggtaaaaaatatttggattttgtgcaaggaatagctgttaactctttaggacatgcgcatccaaaattagttaaaacaataagagatcaatcaaaaaaactttggcatgtttctaatgcatttcaaattccagagggagaaaaattagcgaaaaagttgtgccaaaaaacatttgctgattatgttatgtttcaaaattcaggagcagaagctaccgaagcagcgataaaagttgctagaagatatttttactcaataggcaaaccaaataaaaatagaattttatgtattaaaaattccttccatggaagaactttagcagcaattttcgctagtggatcaaagaaaatgaccgagggatttggtccaaaagtaacaggtttcgatcactttagatttggagaccataattctcttaaaaaaaaaattaataaaaacacagctgcaattatggttgaaacaattatgggtgaaggcggcattaaagttatccctgattggtgcttaagagaattaagagcattatgtaacaagaaaaaaatattattaattcttgacgaagttcagtgtggaataggaagatcaggtgatttcttcgcttttgaaaaatcaaaagtaaaacccgatattgtaccaattgcaaaaggaataggaggaggatttcctattggagcagtgttaatgaataaaaaagttgcgttgggcatgacgccaggtactcatggatcaacatttggaggaaatccattagctatgtctgttggaaatactgtaatggatattgtatcaaacaagaaatttttaaataatgtaaaaagtttatctaaatattttttattaaaattaaataaagttcaggcaaaatatccaaatataattaaacaaa

SEQ ID NO: 245940 - DNA, 703 bp, Unknown
  Bacterial polypeptide expressing nucleotide sequence isolated from the Sargasso Sea
tataaaaaaactatctttagatagtgttgaaaaaaaaatatctgaacgaacatgcgcaatcctcgtcgagccaataatgggtgagggaggaatagtaactctatcctgttcctttatgaaaggacttaaagatctgtgtaaaaaatataaattactgctcatttttgatgaggtgcaatccggtattggcagatccggtcatttcttggcgcatgaaaaatgtgaaattacaccagatgttgtggccttggcaaaaggtctaggaaatggctttcccatcggagcttgtttggcaacaaaaaaagttgcagattgtatggtgcctggaacgcatggttcgacttatgggggaaatcctttgggttgtgctgtagcgctagagacaatcaaacatatattgaagccaaagtttttatctacaatcagagcaaagggagagttttttaaacacaaattaaatgtcttgaaagacatttttcctgaacaaatattagaagttagggggagaggtctaatgttggggttaaaatgtgttagtaaaaacactgaccttatagatatgtgtaggaaagaaatgctgttgttggttccaggagcttcaaatactttacgaatattaccgcctctaactataacatataaagaaatagaagagggtactacgagattagaacaagcattattacaaatgagaaagctataa

SEQ ID NO: 245941 - DNA, 937 bp, Unknown
  Bacterial polypeptide expressing nucleotide sequence isolated from the Sargasso Sea
atgagttatttagcaaaaaactataatagaaaaaatatctcttttaagtatggaaaaggaagttatctatactcaattgataataaaaaatatttagattttgttcaaggtattgcagtaaactctttaggtcacgcacatccccaattagtaaaaactataaaaaaacaatcaaaaaagctttggcatgtttctaatgcttttctaattccagaaggagaagagttagccaaaaagctttgtcaaaaaacatttgctgattatgtaatgtttcaaaatagtggtgcagaagccacggaggctgcaataaaagttgctagaaggtatttttattctattggtaaaaaaaataaaaacgtaattttgtgcataaaaaattcatttcatggcagaacactagcagcaatttatgccagtggttcaaaaaaaatgacagaaggatttgggcctaaagtatctggatttagtcattttacttttggagatcataaatctttaagaaaaaaaataactaatagaacagcagcaatcatggtcgagcctataatgggagaagggggtattaaagaaatacctgactggtgtttgaaagagttgagaaaattatgtaacaaaaaaaagatattattgattttagatgaagttcaatgtggaatttctagaactggtaattttttttcatttgaaaaatcaaaagtaaaacctgatatagtccctattgcaaaaggaataggagggggttttcctataggtgctgttttgatgaataagaaagttgcgtcttcaatgactcctggtacacatggatctacttttgggggtaatcctctagcaatggctgtgggcaatactgtgatggacatagtttcaaataaaaaatatttaaaaaatataagaaatttatctgaatattttttgtcaaaatttaaatattata

SEQ ID NO: 245942 - DNA, 825 bp, Unknown
  Bacterial polypeptide expressing nucleotide sequence isolated from the Sargasso Sea
aaaccaaataaaaatagaattttatgtgttaaaaattcatttcatggaagaaccattgctgcaatttttgcaagtggatcaaaaaaaatgacagagggttttggtccaaaagttgaaggcttcgaccattttaaatttggagatcataaatctcttaaaaaagctatttcaaataaaacagcagcaattatggtggagcctataatgggagaaggtggtattaaagttattccagactggtgcttgaaagaactaagaaaaatttgtaataagaaaaaaatacttttaatattagacgaagtgcaatgtggcataggaagaacaggaaacttctttgcatttgaaaaatctaaagttaaacctgatattgttcctatcgcaaaaggaataggtggtggatttccaattggtgcagttttaatgtcaaaaaaagttgcatcttcaatgatcccagggagtcacggctcaacttttggaggaaatcctttggcaatgagcgttggaaatgctgttttggaccaaatttttaaaaaaggattttttaataatttaaaaaaaatatcaaaatatttttataaagaattagataaacttaaaaatgattatccaaatataattaaagaaattagaggtgaaggtttattaattggagtacaattacattttgatcaatcgaagtttattaaatctttagaaaaaaactatttattaacaattagagcggcagagaacgttataagaattcttccacctttaaatgtcaaaaaaaatgaaattgatttagcattaaaaatcttaaagaaagttttagagaatacaaataat

SEQ ID NO: 245943 - DNA, 854 bp, Unknown
  Bacterial polypeptide expressing nucleotide sequence isolated from the Sargasso Sea
tgaaaaattatggcatgtctcaaatatttatcaaatatctgaacaggaaaaacttgctaagaggctttgcatagcttcttttgcagactatgtattcttttgcaactcaggaaccgaagctgttgaagcaagcattaaaattgcaagaaaatatttttatgaaactttaaaatctaaaactaaaaatcaaattataacctttgatggctcattccatggaagaactttgggagcattggctgcaggaggcccttccaaacttgaaccatttaatactgaggtaaatggttttaaatttttagattttggtgatttgaataaagttaaagaagcaatttctgaagatacagccgcaattttaattgagcctattcaaggagaagggggagtaatagaagccccagtagaatttattaaaggattaagaaaattatgtgacgaaaataatattcttttaattttcgatgaagttcagtgcggcgtaggaagaacaggtaaaatgtttgcacatcaatggttaggtatagtccctgatataatgaccgttgcaaaggcaataggcaatggttttccacttggggcatgtttaacaactgaaaaagtaggctcaacaatgaattttggttctcacgggtcaacttttggtggaaaccctttagcatcagcagttggaaatgctgttttggatatcatgcttgaaaaagatttttttcttaatgtcaaagaagtttcacaaaatttattttctggattgcaagaaattaataaagagtttcctggtgtaatagaattagttagaggtcgaggattaatgataggaataaaatgcaaaattaaaaacacagatttgtaga

SEQ ID NO: 245944 - DNA, 901 bp, Unknown
  Bacterial polypeptide expressing nucleotide sequence isolated from the Sargasso Sea
gtctggtatagctgttaattcattaggtcatgctcatccaaaattaattaaaactataagagatcaatcaaaaaaactttggcatgtttctaatgcttttcaaattccggagggagaaaaattagctaaaaagttgtgtaaaaaaacttttgctgattatgtcatattccaaaattctggggcagaagctacagaagcagctattaaagttgcaagaagatatttttattcaattggaaaacctaacaaaacaagaattttgtgtattaaaaattcttttcatgggagaaccttagccactatttttgcgagtgggtcaaagaaaatgatagaaggatttgggcatgtaggtggttttgatcattttgcttttggagaccacaagtctctaaggaaaaaaattacaaaaaatactgcagcaatcatggttgaaaccatcatgggtgaaggtggtatcaaagttattccagattggtgtttaaaagaactaagaaaattatgtgacaagaaaaaaatattattaattttagatgaagtgcaatgtggagtctcacgttctggagatttttttgcttttgaaaaatctaaagtaaaaccagatatagtgccaatcgcgaagggtattggtggtgggtttcctattggtgctgttttaatgaataaaaaagttgctgcaggtatgacaccaggtacacatggctcaacttttggcggaaatcctttagctatggctgttggaaataccgttatggacatagtatctactaagaaatttcttaatatcgtaaaaaaatcttcaaaatattttttgtcgaatttgaataaattaaagaaaaaatatccaaatattattaaagaaataagaggaagaggttttataatcggcattcagcttcatata

SEQ ID NO: 245945 - DNA, 817 bp, Unknown
  Bacterial polypeptide expressing nucleotide sequence isolated from the Sargasso Sea
gatgggtaactatagtcctttatcagttgagtttaaggaaggcgctggtccttggctcatagataatgaaggcgatcgttatttagatgctttaagtggtatcgcagtttgtggacttggtcattcacatccatcgcttagtaaagtaatcgcagagcaatcagcgaaattaattcatacctctaatgtatatcgtatttcattccaagagaaactcgctgaaaaacttacagctctctctgggatggataatgcatttttttgtaactctggagctgaggcaaatgaagcagcaataaaacttgcacgtcttcatgcgcataatcaaaagattcatgagccaataattgttgttatgcagaatagttttcatggaagaacaatggcaactattagtgcgagcggtgaaagagttcaagatggtttcaaaccactattaggcggctttaaacatatgccatacaataatgttgaggctttagaagattatgttaaggtttcggaaaatatagttgccataatgatcgagccaattcaaggcgagggcggtattgttgttcccaatgatagttatttaaattctattagaaatatttgtgatcaaagtaatttattaatgatcgtagatgaagttcaaaccggaatgtgtcgcacaggaaagtggtttgcgtatcagcatgaaggtgtattgcccgatgtggttacgattgctaaagctttgggaaatggtgtgcctataggagcttgtctggcaaaaggaaaagcatctggatattttattgcaggaagtcatggatcgacttttgggggaaaccca

SEQ ID NO: 245946 - DNA, 856 bp, Unknown
  Bacterial polypeptide expressing nucleotide sequence isolated from the Sargasso Sea
ggaattgctgttaattcacttggtcatgctaatcctactttggtaaaagcaataaatatacaatcaaaaaagctttggcatgtttccaactctttcataattcccgaaggagaagaattagcaaaaaaattgacgaataaaacctttgctgatgctgttatttttcaaaatagtggagcagaggctactgaggctgccataaaagttgctagaagatatttttattcaataggacagccacaaaaaaatagagttctgtgtataaaaaattcctttcatggaagaactatcgcagcaataaatgcaagtggatcaaaaaaaatggttgagggatttggcccaaaagtaggtgggtttgaccattttaattttgggaaccataaagagctaaaaaaaaaaattactagtaaaactgctgcaataatggttgaaccaataatgggtgaaggaggaattaaagtaatacctgcatggtgtcttaaagaactaagaaagatttgtactaaaaaaaaaattcttcttattttagacgaagtgcagtgcggaattggtagatcaggtaagtttttttcatatgaatatgcaaacataaagccagatatagttccaatagccaaaggaattggaggtggttttccaattggtgcagtattaatgacaaaaaaagtttccaaggctatggttccaggtacacatggatctacttttgggggcaaccctttagcaatgtctgttggtaatgcagtgatggatgaaatttttaaaagaggctttctttcaaaagttaaaagtaattcaaaatattttatttcagaattaaataaaattaaaaataaatttcacaagtattattaaa

SEQ ID NO: 245947 - DNA, 754 bp, Unknown
  Bacterial polypeptide expressing nucleotide sequence isolated from the Sargasso Sea
aatgactgaagggtttggacccaaagttcctggatttgatcatattcagtttaaaaattctaaaccaagatttcctaatataaaaaataaaattaagaaaaacactgcagcaattatggtagaaaccattatgggagagggaggtataaagacaataccagataaatgtctaaaatatttaagaaaaatttgcaatcaaaaaaagattttattaattctagatgaggtccaatgcggtataggtcgtagtggagatttttttgcttttgagaaatcaaaagttaaaccagatattgtgccaattgcaaagggaattggaggaggttttccaataggtgctgtacttatgaataaaaaagttgcttctggtatggtaccaggtactcacggatcaacttttggaggaaaccctttagcaatgaaaattggaagtacagttatggacatagtggctcaaaaaagttttttgaataatgtaaaaaaaaattctcaatattttcataaagagttaaatattattaaggaaaaatttccaaaaataattaaagaaataagaggcaaaggttttttgattggcttacaattacacaatgatcaaacaaattttataaaaaagcttatggaaaataaactacttacaataagagcagcagaaaacgtaataagaattttaccacctttaaatgtaaaaaaaagtgaaattgatcaagcgattaaaattataaacaaagtttgtaaaacttataaatcatga

SEQ ID NO: 245948 - DNA, 815 bp, Unknown
  Bacterial polypeptide expressing nucleotide sequence isolated from the Sargasso Sea
aacaaaaaatgaaataattagctttgaaggttcttttcatggaagaacaatcggttcacttgctgctggtggcccagataaacttgaaagttttaatactattgtaaatggatttacacatataaagtttggcaaccatgagcagttaaagaaagaaataaatgaaaatactgctgcaattattattgagccacttcaaggagagggtggtataagagaagttcctcaagagtgcttaaagggtctaagaaaaatttgtgatgaaaatgatattttattaattttcgatgaagttcagtgtgggttagcaagaacaggtaaaatgtttgcctatgagtggtctggcgtggttcctgatataatgaccattgctaaagcaataggaaatggatttcctcttggagcgtgcttaacatctagaaaagttggttctgtaatggattttggttctcacggatctaccttcggtggaaatcctcttgcatcagcagttggaaatgccgtgttggatattatgcttggagaaggttttttaaacaatgtagaagtaatttcaaaaactttattttctggaatgcaatcaattcaaaaagattttcctgacattattgagttagttcgaggaaaagggttgatgataggaataaaatgtaaggttaaaaatactgactttgtagaaaatgctagaaaaaataaattgttatcagttaaagcatctgacaatatagttagattaatgccacctcttgttttgagccttaaagaatgcaatgaaggtcttgaaaagattaggtctacttgtgagagattctaag

SEQ ID NO: 245949 - DNA, 666 bp, Unknown
  Bacterial polypeptide expressing nucleotide sequence isolated from the Sargasso Sea
tgatcagtgacagtacagcaggtattatcttggagccagttcagggagaagggggaattcgtccggttacacaaaaattcttagcaagcataagagagttgtgtgatgagcacggtgtcctgttgatgtttgatgaagttcagtgtggcataggaaggacaggccatctctttgctcaccaacattacggtatcaaccctgatgtgatggcccttgcaaaaggtttgggaggagggtttccaattggtgcttgcctctctacagaggaggttggaagctcaatggtggtggggactcatggaagcacgttcggaggaaaccctctggcaacagcggtcggcaatgcagtaatggatctgctgctagaggatgaaacgttaaaaaaagtaattgagaaaggtaaatacctaaatggagagttagaacggctcaaaatagaacacaatgatttgctggattcggtgcacggacttgggttgatgataggagtgaagtgcaagatgccttgtgcagatttagcattaagcttgcgagataattacctactagtggggcagtctggatccaacatggtccgtttactgccgcccctgaatgtgagtcaatcagaacttgaaaaagcgataagtatcttcgagcagacccttaaaaaaattagccattagc

SEQ ID NO: 245950 - DNA, 868 bp, Unknown
  Bacterial polypeptide expressing nucleotide sequence isolated from the Sargasso Sea
tatgacttatttatcaaagaattataatagaaaaaatatttcctttaagcatggaaagggaagttatctatattccactgataaaaaaaaatatttagattttgttcaaggcatagctgttaactctctaggtcatgctcatccaaaattagttaaaacaattaatgaccaatcaaaaaaactttggcatgtatctaatgcatttaaaattccagaaggagaaaaacttgctaaaaaattatgtactaaaacttttgctgattatgttatgtttcaaaatagtggagctgaagctacggaagcggcaataaaagttgcgagaagatatttttactcaataggtaaaccaaataaaaatagaattttatgtattaaaaattcctttcatggaagaactctagcggcaatttttgcaagtggttcaaagaaaatgacagagggttttggcccaaaagtaactggttttgatcactttagctttggagatcattattctcttaaaaagaaaattaataaaaatacagctgctattatggttgaaacaattatgggcgaaggaggtataaaagtgataccagattggtgcttaaaagaattaagagtattatgcaacaagaaaaaaatactattaattcttgacgaagttcaatgcggaataggaagatctggtgatttctttgcttttgaaaaatctaaagtaaaacctgatattgtaccaattgcaaaaggaataggtgggggatttcctattggagcggttttaatgaataaaaaagtagcctctggcatgacaccaggtactcatggatccacatttggaggaaaccctttggctatgtctgttgggaatactgtaatggatattata

SEQ ID NO: 245951 - DNA, 526 bp, Unknown
  Bacterial polypeptide expressing nucleotide sequence isolated from the Sargasso Sea
ttggtagacgcaccgcactcaaaatgcggcaccttcgggtatgtcggttcaagtccgaccgctcccactttgatgaatacctatagtcgattcgatatatctttcaaaaaaggaaaaggttgttggctatgggacaaaacaggtaaaaaatatcttgatgctgttgctggtatagcaacttgtagtcttggacatagcgatagagttttaggaagaaggctatcaagtcaactaaaaaagattcagcatatttccaatctctacaacattgaagaacaagaacaattaagcagaactttaacgaatatgagttgtgccaaaagcgtcttcttctgcaacagcggtgcggaagcaaatgaatcagcaattaaattaattaaaaaatatggtaatacaacaaataaaggtaaagaatcaattattcttgctgcagaatccagctttcatggaaggacgctagcagccttgagtgctactggacagccaaaatatcaaaaaggtttcgaaccaatgattcaagggtcaa

SEQ ID NO: 245952 - DNA, 825 bp, Unknown
  Bacterial polypeptide expressing nucleotide sequence isolated from the Sargasso Sea
gcaacttgtagtcttggacatagcgacagagttttaagaagaagtttatcaactcaactaaaaaagattcagcacatttcaaatctctacaacattgaagaacaagaacaattaagcagaactttaacgaatatgagttgtgctgaaagcgtcttcttctgcaatagtggtgcagaagcaaatgaatcagcaattaaattaattaaaaaatatggtaataccacaaataaaagtaaagaatcaattattctcgctgcagaatccagctttcatggaaggacgcttgcagccttgagtgccactggacagcccaaatatcaaaaaggtttcgaaccaatgattcaagggttcaaattttttaaatttaacaattttgattcggtaaaaaaattatttgaagagtgtgaaaataatgatcaaaaaatttccggtgttttagttgaaccaatacaaggagaaggcggcgtaattcctggaagtaaaatatttttcaaaaacctgcgagaaatatgtgataaatataattctcttctaattttagatgaggttcaaagtggagtaggtcgaactggaaaaatgtggggttatgagaatttagaaattgaacctgatggattcacccttgctaaaggtttaggaggaggtcatgcaattggagcattattggtaaaagaaaaagccaacattttttctccaggagatcatgcaagcacttttggagggaacccattcgcctgcaaagctgccctaacagtattagaagagataaatagaagaaatcttgttaataatgtttatctaagaggggaaccattaagtgctggg

SEQ ID NO: 245953 - DNA, 625 bp, Unknown
  Bacterial polypeptide expressing nucleotide sequence isolated from the Sargasso Sea
tatgggagaaggtggaattaaagtagtacccgattggtgtttaagagagctaagaaaaatatgtaataagaaaaaaatattattaattttagatgaggttcaatgtggaattggaagaactggtaaattttttgcttttgaacacgccaaagttaaacctgatatagtacccatagcaaaaggtattggaggaggatttccaataggtgcagttttaatgactaaaaaggcttcatctggaatgattccagggacacacggttctactttcggaggtaacccattagcaatgagtgtaggtaatgcggttttagatcaaatttttaaaaaaggatttttaagcaatgttcaaaaaatttctaaatattttcatttagagttaaaaaaaattcataaagaatattctaacattattaaagaagtaagaggaaagggattgttaataggattacagcttcataaggatcaatcaaagtttattcaaaaattaatggataacaatcttttaaccataagagcttcagaaaatgtaataagaatacttccaccacttacagttaaaaaaaaagaaattaatctggccattaaaattataaaaaaagtttgtaaagaatataaagtctaa

SEQ ID NO: 245954 - DNA, 790 bp, Unknown
  Bacterial polypeptide expressing nucleotide sequence isolated from the Sargasso Sea
aaatattacatgcaagttgtaaatagaatgccacctgttcttattagtgggaaaggtacagaagtttttgacaatgaaggcaattcatatttagatttcactgcaggatgggcagtgttaaatgtaggtcacaatcatccaaaagtaactaaagcgattcaggatcaagcatctaaaatattgcaaatgtctaatttattttatacaacaccacagcttcccttggcaaaaattttaattgaaaactctgacttagatagagtgtttttttgtaattctggagcagaagccaatgagggagcctgtaaggttgcaagaaaatggggcaagaaaaaattaaatggagcctttgaaattatcactacgttgaattcttttcacggtagaacacaagcaatgatggcagcaacaggacagccacattatcaaaataactggaagccactgatgcctggatttgttaatgttgagtataataatttggaagcaataaagtctgcatatgacaaagataaaacatgtgcagtactacttgaacctgttcaaggtgaaggaggagttaatataccttcagaaaattacctgcttgatgtaatgaatttttgtcatgaaaaaaatattctcttcatgttagatgaagttcaaacaggtatgggaaggttaggaacattttttgggtaccaaaaatatagtaatgtagagcctgatgtaatgagcttagcaaaagcacttggagcaggaactccattaggagctttcttgaccaaagaaattttgttcggttttagag

SEQ ID NO: 245955 - DNA, 814 bp, Unknown
  Bacterial polypeptide expressing nucleotide sequence isolated from the Sargasso Sea
ctgtgggaccaggaaggccgagaatacgttgacctggcgggcggtattgcagtgaacgcgctgggccatgcacacccggcgctggttgaggcactgaccgagcaggcgggcaagctgtggcacgtctccaacatcatgaccaacgagccggcgctgcgcctggccgacaagctggtgcaggccacctttgccgagcgggtgttttttgccaattccggtgccgaggccaacgaggccgctttcaagctggcgcgccgctgggggcataacaccggtggtgcggccaagcaccagatcatcgcctgcacgaacagcttccacggtcgctcgctgtttaccgtcagtgtcggcggtcagcccaagtactccgaaggcttcggccctgccatgggcggcatcagccacgtgccctatcaggacctggccgcactggaagcggctatgtccgatgccacctgtgcggtggtgctggagccggtccagggtgaaggtggcgttattccggccagcagcgactacctgcaggcggtgcgcgcactctgtgacaagcatcaggcgctgctggtgtttgatgaggtgcaaagcggtatggggcgtactggcaggctgtttgcttacatgcacagcggtgtcgtgcccgatattctgaccagtgccaagagcctgggcggcggtttcccgatttcggcgatgctgaccaccacggcgattgccgagcattttgctgttggcacccatggcagcacctacggcggtaatccgctggcctgcgctgttgccgagcgggtgctggatatcgtcaatacaccggcgg

SEQ ID NO: 245956 - DNA, 829 bp, Unknown
  Bacterial polypeptide expressing nucleotide sequence isolated from the Sargasso Sea
ccaaaattaattaaagttatgaacaagcaagcaaaaaaactttggcatgtctcaaatgcctttactattcccgaaggtgaagagctcgcaagaaaattagcaaaaaaaacttttgcagattatgtaatttttcaaaatagtggtgcagaggcaacagaggctgccattaaagctgctagaagatatttttactccatcggaaaacctaacaaaaacagaattatttgtattaagaattcatttcatggaagaacattagcaacaataaatgctagtggttctaaaaaaatgtgtgaaggatttggcccaaaagtaagtggttttgatcactttaattttggagatcataaaaagttaaaaaaactaattaataaaaaaacagctgctattatggttgaaactatcatgggtgaaggaggaattaagactatacctaattggtgcttaaaaggattaagaaaattatgtagtaaaaaaaagatattattaatacttgatgaggttcagtgtgggataggcagaactggtgatttttttgcttttgaacaatcaaaaataaaaccagatattgtcccaattgcaaaaggtattggagggggttttcctattggagccgttttgatgaataaaaaagttgcatctggaatgacaccaggaactcatggatcaacttttggggggaatcccctcgctatgaaagttggcaatgcagtttttgatattatttcaactaaaaaatttttgaataatgttaaaaataactctcaatattttcattctgaattagacaaaattaaacaaaaatttccaaaaataataaaagaaataa

SEQ ID NO: 245957 - DNA, 977 bp, Unknown
  Bacterial polypeptide expressing nucleotide sequence isolated from the Sargasso Sea
aatttcgtgccgaagaaggcagagggatctcttgtttgggatcaagatgataaagagtacatagattttggaggaggaatagccgttaattccttaggtcattctcacccctctcttatcaaggcactgacagatcagtcaaaaaaaatatggcatctaagtaattacttaacaaatgagccagcgattaaattagcaaataagctaactgagttaacttttgcagaaaatattttttttagtaattcaggatcagaggctaatgaagctgctataaaaatagccagaaaatatcactcttcgagaaatgaaaatagaaatgaaatagtttcttttcaaaactcttttcatggaagatcccttttaaatatttctctaggaagttctgaaatgcacaggaatggattcgaacccctaatgcccggaattaaacacggagtatttaatgacttatcatgtttagaagaccttattactgatcaaactgctgctgtaattcttgaaccagttcaaggagaggctggagtcttcaaagcgacgaatgactttatggcaaaactcaatgaggtgacatctgaaaaaggtgctcttctaataattgacgaagtacaaagtggagttggcagaatgggaagcctctatggatatatgaactatgacattcaaccggacatagtgacatctgccaagggattaggtggtggaatacctattggggccacactaacgacaaaagttattggtgagagtatgcagccaggcactcatggctcaacttttggaggcaatccaattgcctgtgcagttgctcatgaagtattaaatatagtgagtgatgaaaaatttcttagtgatgtcagtgaaaaggagaaattatttttaaatcttttatctgatttagaaagtcagggaatcttctcagatataaggtctgcgggattatggattggttgcgatttagtagataaaagtgctaa

SEQ ID NO: 245958 - DNA, 423 bp, Unknown
  Bacterial polypeptide expressing nucleotide sequence isolated from the Sargasso Sea
catgcccccgcaggatcaatctaccgctgtgatggccacctacggccgcttccctgtgaagttggaacgtggccaaggggtttgggtgcatgacagccaaggacgccgctacctcgattgcgttgccgggattgccacctgcaccttgggccatagcgatcgggccctgcgccgggctttaacccagcagctgcgcaagctgcagcacgtctcgaacctgtatgccatcggtgagcaggagcagctagccagctggattgcaggcaacagctgttgcgatcaggtctttttctgcaactccggcgccgaggccaatgaggccgccatcaagttggcccgcaaatacggccacagccgccgcggcatcaaccagccgctgatcctcacggcccgcgccagctttcacggccgcaccctggcggc

SEQ ID NO: 245959 - DNA, 943 bp, Unknown
  Bacterial polypeptide expressing nucleotide sequence isolated from the Sargasso Sea
gttattctttaggtctactcatccaagtttagtaaaaacaattaatcagcaatcaaaaatgctttggcatgtttcaaatgcttttcaaatccccgagggagaaaaattagcaaaaaaattatgtaaaaaaacatttgctgattatgtaatgtttcaaaacagcggagcagaagctacagaagcagcgattaaagttgctagaagatattttttttcaattggtaaatcaaataaaaatagaattttatgtataaaaaattcatttcatggaagaacgttagcagcaatttatgcgagtggatcaaagaaaatgactgaaggatttttgcctaaggtaggtgggtttgatcattttaattttggagatcataaagccttggaaaagaaaattacaaagaataccgcggctataatggttgagacaattatgggagaaggagggattaaagttatcccagacttctgtttaagacaacttagaaaattatgtgataagaaaaaaattcttttaattctcgatgaagtccaatgcgggataggtagatcaggcgacttttttgcatttgaaaaatcaaaagtaaaaccagatatagtcccgatagctaaaggcattggtggtgggtttccaataggagctgtactaatgaataaaaaagtggcaacaggcatgattccaggaactcatggatctacatttggaggtaatccactagccatgtcagttggtaacaaagtgatggatataatttcaaataaaaaatttttaaataatgtaaaaaaactatccaaatatttcttatcaaacttgaataaaattaaagaaaaatatcctaatattattaaacaaataagaggcagaggttttttaattgggatacagctacatcaagaccagacaaattttattaaaaaattaatggataataatttattacaatacgtg

SEQ ID NO: 245960 - DNA, 601 bp, Unknown
  Bacterial polypeptide expressing nucleotide sequence isolated from the Sargasso Sea
gttattccagattggtgtttgaaagaattaagaaaattatgtaacaagaaaaaaatattattaatacttgatgaagttcagtgtggaataggaagatctggtgatttctttgcttttgaaaaatcaaaagtaaaacctgatattgtaccaattgcaaaaggtataggtggaggttttcctattggcgcagttttaatgaacaaaaaagttgcttcgggaatggtgccaggtactcatggatcaacatttggaggaaatcctttggccatgtctgttgggaatactgtaatggatataatatcaaataagaaatttttaaataatgtaaaaaatttatcaaattattttttattaaagcttaataaaattaaagaaaaatatccaaatattattaagcaaataagaggaaaaggatttttgattgggatacagttatataaagatcaaactgaatttataaaaaaattgatgaataatcagttattgactataagagctgcagaaaatgttgttcggattttacctccattaaatgttaaaaaaaatgaactagatttagcattaaaaattattgaaaaggtgtgttcacagataaagtaat

SEQ ID NO: 245961 - DNA, 688 bp, Unknown
  Bacterial polypeptide expressing nucleotide sequence isolated from the Sargasso Sea
ggagccaaagtatgggacaaagatgaaaatgaatatattgatcttggttcaggaataacagttaacagttcaggtcacattgattctgaacttctagctgtactaactgaacaggcaggaaaattatggcatacaactaacttgtatttaactgagccctcaattaggctggccgatgaacttgtcaaagaaacatttgcagatagaatatttttctgcaattctggagcagaagcaaatgaagcagcaattaaaattgctcgaaaattctcaagcttgaataatactacaaaaaaacgagaaattttgacatttgaaggttcttttcatggccgtactttaactacaatttctgcaactgcacaaccaaagtatcaaaaaggattcgaaccgttgacagagggtttccgctattgcccctttaatgatttcgaagaggctaagaaaatgattggtcctcaaacatgcgcggttttgatagaacctgttcagggtgaaggtggaattaatccttcaaaatacggattcctacaacatttacgaaaactttgtgatcatcatcaagctctactgatttttgatgaaattcaatgtggtatgggacgtacaggaaaattattcggctatcagtgggataattcatctgattcagaacaaccagtagaaatgtctcataacgaaaatataa

SEQ ID NO: 245962 - DNA, 805 bp, Unknown
  Bacterial polypeptide expressing nucleotide sequence isolated from the Sargasso Sea
atacttttgtataaaaaattcatttcatggaagaactttagctacaatttttgcaagtggatcaaaaaaaatgaccgaaggattcggacctaaagttggaggttttgatcattttaaatttggtgatcataaatcattaaaaaaagctataacaaaaaaaacagctgcaatcatggttgagcctgtattaggagagggaggaataaaagtaatacctgattggtgcctaagagaactaagaaaaatttgtaataaaaaaaagattttattaatattagatgaagtgcagtgcggaattgggcgatctggtaaattttttgcttttgaatattcaaaagttaaaccggacattgtacctattgcaaaaggcataggaggtggatttcccataggagcagttttaatgaataaaaaagttgcttctgcaatgacgcccggaacacatgggtcgacatttggaggaaatcccttagctatgagtgttggtaatgcagttttagatcaaatttttaaaaaaaattttttaaaaaatgttcaaataaactccaaatattttcataaagaattaaaaaagattaaaataaaatatcctgaaattataaaagaagtaagaggtattggcttattaataggattacaagtttataaagatcaaataaaatttattaaaaaattagaagataataaattgcttactatcagagcagcagaaaatgtaattagaatattacctcctcttaatgttaagaaatcagaaataaatctcgcaataagaattattaaaaaagtttgtagagaaatataa

SEQ ID NO: 245963 - DNA, 722 bp, Unknown
  Bacterial polypeptide expressing nucleotide sequence isolated from the Sargasso Sea
attggtagacgcaccgcactcaaaatgcggcaccttcgggtatgtcggttcaagtccgaccgctcccactttgatgaatacctataatagattcgatatatctttcaaaaaaggaaaaggttgttggttatgggacaaaaaaggtaaaaagtatcttgatgcagtcgctggtatagcaacttgtagtcttggacatagtgatagagttttaagaaaaaggttatcaactcaactaagaaagattcagcacatttctaatctctataatattgaagaacaagaacaattaagcagaactttaacgaatatgagttgtgccaaaagtgtcttcttttgcaacagtggtgcggaagcaaatgaatcagcaattaaattaattaaaaaatatggtaatacagtaaataagggtaaagaatcaataattcttgcagcagagtccagctttcatggaaggacgctggcagcattgagtgctactggacaggccaaatatcaaaaaggcttcgaaccattgattcaagggttcaaattttttaaatttaacgattttgattcagtaaaaaaattatttgaagagtgtgaaaataatgatcaaaaaatttcaggcgttttagttgaaccaatacaaggagaaggcggcgtaattcctggagataaaatattttttaaaaaactgcgaaaaatatgtgatagatataattctcttctcattttagatgagg

SEQ ID NO: 245964 - DNA, 694 bp, Unknown
  Bacterial polypeptide expressing nucleotide sequence isolated from the Sargasso Sea
ttacttcggagatcataaaaagttaaaaaaacttattaataaaaaaacagctgctattatggttgaaactatcatgggtgaagggggaataaagactatacctaattggtgcttaaaaggactaagaaaactttgtagtgaaaaaaagatattattgatacttgatgaagttcaatgtggtataggcagaactggtgatttttttgcttttgaacaatcaaaagtaaaaccagatattgtaccaattgcaaaaggcattggagggggttttcctattggagctgttttaatgaataaaaaagttgcttctggaatgacacctggaactcacggatcaacttttggagggaatcctctcgctatgaaaattggcaatgctgtttttgatataatttctagtaaaaaatttttgaataatgttaaaagcaattctcaatatttccattctgaattgaataaaattaaacaacgatttccgaaaattataaaagaaataagagggagaggttttttgattggtttgcaactttttaaggatcaaaccaattttataaacgccctaatgaaagaaaaacttctgacaataaaggctgcggaaaacgttattagaattttaccacctctaaatgtaaagaaggatgaaatcaatcaagctttaaagattataaataaagtttgtttaacatataaataa

SEQ ID NO: 245965 - DNA, 694 bp, Unknown
  Bacterial polypeptide expressing nucleotide sequence isolated from the Sargasso Sea
gatgcaaacctacaataggaagccagtatcatttgttaaaggtgagggggtttatttgtgggatgataatggaaaaaagtacattgatgctctatgtggacttgccgttacaagccttggacattcaaatcaattaataagtaatgttttgtcactacaatcaaaaactctcattcatacctccaatgcatttcatatagatgcacaaaaaattcttgcctctagattgtgcaagttatctggtatgacaaacgccttcttctgtaactcgggggcagaatctgtagaaacagcaattaaaattgcaaggaagtatggcaatgatcagaacatttcaatgccgaagattttagtgatggaaaatagttttcatgggagaacgcttgctgctttatccgctacgagcagtaaaaaatcacatgaggggtttacgccgctcgtcgagggttttataagagtcgcttttgacgctccagagaaaatagagtcagttctacataatcaaaaagatatagtagcaatattaactgaacccattcaaggagagggtggcataaaaattccaaagtcaggatacttaaagaaattgagagatatctgtaatgataaaaacttattatttatggtagatgaagtccaatcggggtttttgcagaacagggaaatggtttgggtatcagcacgatcacatcac

SEQ ID NO: 245966 - DNA, 841 bp, Unknown
  Bacterial polypeptide expressing nucleotide sequence isolated from the Sargasso Sea
atgagttctttagccaaaaattacaagagaagaaaaattgcttttaaaagaggaaaaggtagttttttgtattctactaatggtaaaaaatatctagattttgttcagggtattgcagttaactctttaggacatgctaatccatatttaaatagagcaatgagcaaacaagccaaaaaagtttggcatgtttctaatgcatttataatcccagaaggagaaaagcttgctaaaaaattaacacaaaaaacttttgctgattatgttctattccaaaatagcggaacagaagcaacagaagctgctgtaaaaattgcaagaagatattttttttcaattggaaaaacaaaaaaaaatagaattctttgtgtaaaaaattcttttcatggaagaactttagcggctatttttgcaagtggctcaaaaaaaatgacagaaggttttggaccaaaggtagatggatttgatcattttgagtttggtaaccataaatcattaaaaaaagctattacaaataaaacagccgcaataatggtagagccaataatgggagaaggcggaattaaagtaatacccgactggtgtttaagagagttaagaaaaatatgtaataaaagaaaaatattattaatattagatgagattcaatgtggaattggaagatctggtaaattttttgcttttgaacatgcaaaaattaaaccagatatagtgcctatcgcaaaaggtattggtggaggattccccataggagctgttctgatgactaaaaaagtagcatctggaatgaccccaggaacacacggatcaacatttggtggcaatccattagcaatgagcg

SEQ ID NO: 245967 - DNA, 749 bp, Unknown
  Bacterial polypeptide expressing nucleotide sequence isolated from the Sargasso Sea
aaaaaaaatgactgaaggatttggtccaaaagtagatggttttgaccattttgaatttggtaaccataaatcattaaaaaaagctattacaaataaaacagcagcaattatggttgaaccaataatgggcgagggtggaattaaagtaatacctgattggtgcttgcgagcaataagaaaaatatgcaataagaaaaaaatattactaattttagatgaagttcaatgtggaatcggaagatctggtaaattttttacttttgaacacgcaaaagtaaaaccagacatagtgccaatagcaaaaggattaggtggaggatttcctattggtgctgttttaatgaataaaaaggtagcatctggaatgactccaggaacgcatggctcaacttttggaggcaatccattagcaatgagtgttggaaatgctgttttagatcaaatatttaaaaaaggattcttaaaaaacgtcaaaaaaatttctgactattttcattctgagctaaaaaaaattcaaaaaaaatattcaaatattattaaagaagttagaggtatggggctgctgatagggttgcagcttcataaggatcaaacaaaatttattcaaaaattaatggacaataatttgcttactataagagctggcgaaaatgtgattagaatacttcctccgcttacggttaaaaaaaaagaaattgatttagcaattaaaataataaaaaaagtttgcaaggaatacaaaacttaat

SEQ ID NO: 245968 - DNA, 845 bp, Unknown
  Bacterial polypeptide expressing nucleotide sequence isolated from the Sargasso Sea
actaagtatttagattttgtccaggggattgctgtaaactcgctaggtcatgcacacccaaaacttgttaaagtaataaacaagcaatcaaaaaaactctggcatgtttctaatgcttttataatccctgagggtgaggaattagcaaaaaaattagcaaaaaaaacttttgcagattttacattatttcaaaacagtggagcagaagctactgaagctgcaataaaagttgcaagaagatatttttactcaattggaaaaccaaataaaaatagaattatttgtataaaaaattcgtttcatggtagaactatagctgccattcacgctagtggttctaaaaaaatgatagaaggttttggtccaaaagttgggggatttgatcattttaactttggtgatcacaaaaaactaaaaaaattaatcaccaaaaatactgctgctattatgttagaaacaataatgggagaaggaggaattaaggaaataccagattggtgcttgagagaattaagaaaactatgtaacaaaaaaaaaattttattgatattagatgaagttcaatgtggaataggaagaacaggagatttttttgcatttgaaaaatctaaggtcaagccagatatagtacctattgcaaaaggaattggcggaggttttccaataggagcagttttaatgaataaaaaagttgcctcaggtatgaccgcgggaacccatggatcaacttttggaggtaatccacttgcaatgaaaataggtgttgctgttttagatattatatcaaaaaaaagttttttaaaaaaagtaaaatctcaatcttcatacttccatgcaaatttaat

SEQ ID NO: 245969 - DNA, 924 bp, Unknown
  Bacterial polypeptide expressing nucleotide sequence isolated from the Sargasso Sea
gcagtttgcggacttggacatgctcacccggagcttgctcatgtcttgtctgatcaagccaaaaatctttggcatacctcgaatctttatcgggtcgaactccaggagagcttggcaagttcgttgtctgaaataacaaagcaaaagcgtgtttttttctgtaactccggagcagaggctaacgaggcggcaattaaactagctaaaaaatacggtaatgacaacggaataaaagctcccatcatagtaactatgaatggaagctttcatggaagaactatggctaccctcagtgctacaggaaatccgaaagtgcactctggattttcgcccctgctacaaggttttaaacatattgattatgattctgccgaagaagctgcgagggcaattcaagcgagagatgtcgtggcgattctggttgagccgattcaaggagaaggaggaatcgttgttcctgaaaagggatatctttccaaactcaggaaattatgtaacgagaccgatactttgctgatgttggatgaggtacaaacaggaataggtcgaactggggaatggtttgcttttcaggaagaaggtattgagcccgacgttctgacgatagcaaaagggctcggtaatgggatacccataggagcatgtttagcaaaaggagttgcgggtaacgttcttacaccagggacacacgggagtaccttcggcggtaatccgttggtagccagggtagccttgaaagtgttagaaattattgagcgagaaggattgctcgaaagagcaaggcatttgggcgactggattcgttatcaatttaaagaaaagcttgagtcgttggtaggtgtaatagaaattagaggccgaggtctcatgatagggatcgagttagatagaccatgtgctgagattgtcgaggttgctctgaag

SEQ ID NO: 245970 - DNA, 752 bp, Unknown
  Bacterial polypeptide expressing nucleotide sequence isolated from the Sargasso Sea
aagcaatagtaaaaaagcaattgaaggttttaaacctaaagtagatggttttgatcatttcaacttcggcgatcacaaaggtttagaaaaagcgataaccagcagaactgctgcaattatggttgagacaatcatgggagaagggggaataaaagttattccagatttttgtctcaaaggcttaagaaaactatgtaataagaaaaaaattttattaatccttgatgaagttcaatgcgggattggaagaagcggtaaattttttgcttttgaatatgcaaaaataaaacctgatattgtcccaatagcaaaaggtattggcggtggttttccgataggtgcagttttagtaaataaaaaagtagcatcagggatgaagccgggaactcatggatcaacatttggtggaaacccactagcaatgagcgctggaaatgcggtaatggatataatgtttaaaaaaggttttttaaacaatgtaagtaaaaatggaaaatattttataaatcaacttgataaaattaaaaataagtatcctaaagttattaaagaaataagaggtaaaggactgctcattggactttgtcttcatgtaaatcaagctaaatttattcaaaaacttttagataataatttattgacagtgagagcagctgaaaatgttgtcagacttttgcctcctttaaatgtaacaaagagtgaaataaacttaggtttaaaaataatagagaaagtttgcaaaaaattttaaa

SEQ ID NO: 245971 - DNA, 765 bp, Unknown
  Bacterial polypeptide expressing nucleotide sequence isolated from the Sargasso Sea
caaacaatcaaagaaactttggcatgtttctaattcttttatgattccagaaggagaggaattagcaaaaaaattaacgaatagaacttttgcagatgctgttatttttcaaaatagtggagctgaagccacagaagcggctattaaagttgctagaagatattattactcaataggtcaaccaaaaaaaaatagaattctatgtattaaaaattcttttcatggaagaactattgcagcaataaatgctagtggctcaaaaaaaatggtcgaaggatttgggccaaaagtgggtggatttgatcattttaaatttgggaaccacaaggaacttaaaaggaaaattacaagcaaaacagcggctatcatgattgaaccaattatgggcgagggaggcattaaagtcataccttcatggtgtctcaaagaattgagaaagatttgtaatcaaaaaaaaattcttcttattttagacgaagttcagtgtggaattggcagatcaggtaaatttttttcatttgaatatgcaaacataaaaccagatatagttccaattgcaaaaggaattggaggtgggtttccgataggtgcagtattaatgaaaaaaaaagtttctaaggctatggttccaggtacacatggatctacttttggtgggaatcctttagcaatgtctgttgggaacgctgtaatggatgaaatttttaaaaaaaggcttcttttcaaagttaaaagtaatttcaaatattttatttcagaattaaa

SEQ ID NO: 245972 - DNA, 629 bp, Unknown
  Bacterial polypeptide expressing nucleotide sequence isolated from the Sargasso Sea
aaccataattggtgaaggcgggattaaagtaatcccagaattttgtttaaaaggtctaaggaaactttgtaataaaaaaaagatcctactaattcttgatgaagttcaatgtggaataggtagatcaggaaaattttttgcttttgaatatgcaaatataaaacctgatattgtgcctatagccaaaggtataggcggaggttttccattaggcgcatgtttaatgaccaaaaaagtagcaagttgtatgacaccaggttcacatggcactacttttggaggaaatccgttagctatgagcgttggtaatgctgttttagatttaatttttaaaaaaggttttctaaaaaatgttcaaaaaatttcaaaatattttcataacgaactttataaattacaaaatgattatccggaattaattcaagaaataagaggtaagggtttgttagtaggtattaagatatcaaaaaatcaaacagaatttataaaaaaattattaggaaaagggttgcttacaattagagctggggaaaatgttgtaagattattgcctcctcttactgtaacaaagaaaaatattgatgaggcagtgacaataattaagaaagtatgtaaaacttatagatgaa

SEQ ID NO: 245973 - DNA, 565 bp, Unknown
  Bacterial polypeptide expressing nucleotide sequence isolated from the Sargasso Sea
ttatgtaataaaaaaaaaatactattaatcctcgatgaagtacaatgtggaattggtagaacaggtgatttttttgcttttgataaatctaaagtaaaaccagatatagtacccattgcgaaaggtattgggggaggtttcccaataggtgcagtattgatgaataaaaaagtagcttccgtaatgagtcccggtactcatggatcaacttttggaggaaatccattggcaatgaaaattggaagcacagtaatggatattatatctaaaaaaaaatttttaaacaatgttaaaaaaaattcaaaatattttcacattaaattaaataaactcaaagaagattttccgaatataataaaagaaataagaggtcgtggttttttaatcgggattaaattacataaagatcaaacagattttataaaaaaattaatggataataaattacttacgataagagctgctgaaaatgttgtaagagttttgccaccattaaatgtaaaaaagaaggaaattgatcaagcgcttaaaataattaaaaaagtctgtaaagaatacaattaat

SEQ ID NO: 245974 - DNA, 613 bp, Unknown
  Bacterial polypeptide expressing nucleotide sequence isolated from the Sargasso Sea
gggtggtattaaagttgtcccagattggtgtttgaaagaattgcgaaaattatgcaataaaaagaaaatattactcattttagatgaggttcaatgtggtatttcgagatcaggtaatttttttgcttttgaaaaatcaaaatgtattccagacatagtcccaatagcaaaaggtattggaggtgggtttccaatcggagcagttctaatgaataaaaaagttgctgcagggatgactccaggaactcatggctctacttttggtggaaatccattggcaatggcagttggaaatgctgtcatggatatagtttcaagcaaaaaatttttaaaaaacattaaagaattatctaaatactttttttcaaatttaaacttacttaagaaaaagtatcccaaagttatcaaagagattagaggaaaaggttatttaataggaattcagctttataaagatcaaacaaaatttattcaaaaacttatgaataaaaagttattaactattagagctgcagaaaatgttgtccgtattttacccccactaaatgtcaaaaaaaatgagttagatcaagctataaagattatcgacaaagtttgcgcaaaactaaaataa

SEQ ID NO: 245975 - DNA, 772 bp, Unknown
  Bacterial polypeptide expressing nucleotide sequence isolated from the Sargasso Sea
ttggtagacgcaccgcactcaaaatgcggcaccttcgggtatgtcggttcaagtccgaccgctcccactttgatgaatacctatagtcgattcgatatatctttcaaaaaaggaaaaggttgttggttatgggacaaaacaggtaaaaagtatcttgatgcagtagctggcatagcaacttgtagtcttggacatagcgacagagttttaagaagaaggttatcaactcaattaaaaaagattcagcacatttcaaatctctacaacattgaagaacaagaacaattaagcagaactttaacgaatatgagttgtgctgaaagcgtcttcttctgtaatagtggtgcggaagcaaatgaatcagcaattaaattaattaaaaaatatggtaatacaaaaaataaaggtaaagaatcaattattctcgcagcagaatccagctttcatggaagaacgcttgcagctttgagtgctactggacagcccaaatatcaaaaaggtttcgaaccaatgattcaaggtttcaaattttttaaatttaacaattttgattctgtaaaaaaattatttgaagagtgtgaaaataatgatcaaaaaatttccggcgttttagttgaaccaatacaaggagaaggcggcgtaattcctggaagtagaatattttttaaaagcctgcgagaaatatgtgataaatataattctcttctcattttagatgaggttcaaagtggagtaggtcgaactgggaaaatgtggggttatgagaatttag

SEQ ID NO: 245976 - DNA, 937 bp, Unknown
  Bacterial polypeptide expressing nucleotide sequence isolated from the Sargasso Sea
tcactaggtcattcccatcctaaattaattaaagcacttacgcttcaatctaaaaaagtttggcacgtttcaaatgcttttaaaatacctgagggtgaaaaattagcaaaaaaattgactaaaaatacttttgctgattatgtcatgtttcaaaacagtggggcagaggcaacagaagcagcaattaaagttgcaagaaaatacttctattcgattggtaagcctaaaaagaatagaattttatgtataaaaaattcatttcatggcagaacaattgccgcgatatttgctagtggatcaaaaaaaatgactgaaggttttggaccatcaatagagggatttgaccatttcgactttggtgaccacaagtcattaacaaattctataaataatcaaaccgcagctataatgatagagccaattttaggagaaggtggaattaaagtgataccttcatggtgtttgagagaattaagaaaaatatgtaataaaaaaaaaattcttcttattttagatgaagtacaatgcggcattggaagatcaggaaaattttttgcctttgaacattcaaaaataaaacctgatattgttccaattgcaaaagggataggaggaggttttcctataggggctgttttaatgacaaaaaaagtggctaagttcatgacacccgggtctcatggaagtacttttgggggaaatccattagcaatggcggtaggaaatgcagtaattgatgaaatattaaaaaaagactttttgtataatgtgagacggatatcaaaatactttcactcagaattaaacaatattaaaaatgaattcccaaatattataaaagagataaggggtgtgggattactaattggtatacagctttttaataatcaaaatttatttattaaaaatttaatgaaaaaaaaaattattaaccata

SEQ ID NO: 245977 - DNA, 846 bp, Unknown
  Bacterial polypeptide expressing nucleotide sequence isolated from the Sargasso Sea
aaaatctccttcagatatggaaaaggtagttacttatactcaaaagataataaaaagtatttagattttgttcaaggtatagcagttaattctttgggacatgcacacccaaaattagtaaaggcaatcaacagtcaatcaaaaaaactttggcatgtctcaaacgcttttcaaattccagagggagaaaaattagctaaaaaaatatgccagaaaacatttgcagattatgttatgttccaaaatagtggagcagaggccacagaggcagcaattaaagtagctagaagatatttttattctattgggaaacctaataaaaatagaatcctatgtgtaaaaaactcatttcatggcagaacattggcggcaatttatgccagtggttctaaaaaaatgactgatggatttggccccaaaatagcaggatttgatcattttaaatttggagatcacaaatcgctcaaaaaaaagattacaaaaaaaactgcagccataatgatcgaaccaattatgggtgaaggggggatcaaagtaattccagactggtgtttaaaagaattaagaaaattgtgtaataagaaaaaaatattattgatcttagatgaagtgcagtgtggaatctcaagaacaggtagctttttttcatttgaaaagtcgaagattaaacctgacattgttccaattgcaaagggaataggtggtggatttccgctaggtgctgttttaatgaacaaaagagttgcttctgcaatggtacctggtacccatggttccacttttggtggtaatcctctagctatggccgttggaaacacagtaatggatatagtttcaaataaaaaa

SEQ ID NO: 245978 - DNA, 544 bp, Unknown
  Bacterial polypeptide expressing nucleotide sequence isolated from the Sargasso Sea
tcttattttagacgaagttcagtgtggaattgggagatcaggtaaatttttttcatatgaatatgcaaaaattaagccagatatagttccaattgcaaaaggaattggaggtggttttccaataggtgcagtgttaatgacagaaaaagtttctaaagctatggttccaggcacacatggatctacctttggcggtaaccccttggcaatgtctgttggtaatgcggtaatgaatgaaatttttaaaagaggttttctttcaaaagttaaaagtaattcaaaatattttatttcagaattaaataaaattaaaaataaatttccaaatattattaaagaaataagaggattaggattgattttgggaatacaattacatcatgaccagacaaaattcatacaaagtttactgaaaaataaactattaacaattagagcagctgagaatgttataagaattttgcctccattaaatgttaataaaaaagaaataaatatagctataaaaattattaataaagtctgtgaaggttataaaaaataa

SEQ ID NO: 245979 - DNA, 934 bp, Unknown
  Bacterial polypeptide expressing nucleotide sequence isolated from the Sargasso Sea
tatgatagaaagaaaatttcgtttaaatatggaaaaaggtgcctatttattttcaactaataaaaaaaaatatcttgatttcgtacaaggtatagctgtaaattctttgggtcatgcccaccctaaacttgtatcgactattagaaatcaatcacaaaaactttggcacgtttctaacgctttccaaattccagaaggtgaaaaattagctcaaaagttatgtaaaaaaacttttgcggattatgttatatttcaaaatagtggtgcagaggcaacagaagcatcagttaaagtggcgagaagatatttttattctattggaaaaccaaataaaaaccggattttgtgcattaaaaactcatttcacggaagaacattagctgcaatttttgctagtggttcaaaaaaaatgacagagggatttggaccaaagatagccggttttgatcacttcaaatttggtgatcatgaatctttaaagaataaaataaataaaaatactgcagcgataatgattgaaactattatgggagagggaggaattaaagtaattccagactggtgtttaagagaacttagaaagttgtgtgataaaaaaaaaattttattaattcttgatgaagtacaatgtggagtagcaagatcaggtgatttttttgcgttcgaaaaatcaaaagttaaacctgatatagttcctattgctaaaggaattgggggtggttttccaataggcgcagtattaatgaacaaaaaagttgcgactggtataatcccaggatcccatggttcaacttttggaggaaatccattagccatgtctgtaggcaatactgtgatggatatagtttctaataaaaaatttttaaaaaacgtaaagaatttatcgagatatttttttttaaatttgaataaaattaaacacaaatatccaaac

SEQ ID NO: 245980 - DNA, 781 bp, Unknown
  Bacterial polypeptide expressing nucleotide sequence isolated from the Sargasso Sea
gctactgaagcagctattaaagttgcaagaagatattttttttcaataggaaaacccaataaaaatagaattttatgcataaaaaattcttttcatggaagaactattgcagccatatttgctagcggctcaaaaaaaatgactgaaggttttggtccaaaagtcccaggttttgatcattttacatttggagatcacaaatccttaaaaaaaaaaatcaataaaaatactgcagcgattatgattgaaactatcggaggtgaatcaggaataaaagtaattcctgatttttgtttaaaagaattaagaaaactgtgtaacaaaaaaaagatattactcatattagatgaagtacaatgtgggatttcacggtcgggagattttcttgcatttgagaggtctaagataaagcccgatatagttcctattgccaagggaataggtggcggatttcccattggagcagttctaatgaataaaaaagttgcttcaggcatgaccccaggaacacacggatcgacctttggaggaaatcctttggccatggctgttgggaacactgttatggacattgtatctaagaaaaattttttgaataatgtaaaaaaattatcaaaatattttatacttaagttaaatcgtattaaagacaaatacccaaatttaataaaagaaattagaggaagaggatttttaattggaatacaactttataaagatcaaacagtatttattaataaattaattaataataagcttttaactatacgtgcagcagaaa

SEQ ID NO: 245981 - DNA, 642 bp, Unknown
  Bacterial polypeptide expressing nucleotide sequence isolated from the Sargasso Sea
tatgggtattttagaagtttataatcctcttgatatcgaaattgatcacggtgatggagtgtatttatactcaaccgatggtacgagatatctggattttactagtggcattggtgttacaagtctgggacatagtcatccctctctggtaaatgcattgaaagatcaaggagataagctctggcattgttctaatttattcagaattaatggacaagagttagttgcaaaaagaattgtcaaaaattcatttgcttcaaaagtttttttttgtaactccggtgcagaatctgtagaggcaggaataaaggtagtgagaaaatattttaattcaaaaggttctgataaatataagataatatgtgctaagaattcatttcatggaagaacctatgccgcaatctcaacaagcggtaaatcaaaattgacagatggatttttcccgattttggaaggttttgagcaagtcgaatttaatgatattaaagatttaaaaaaaaaagttgataagaagactgcagcaataatgatcgaaactgttcagggtgaagggggaataattccggctaataagcaatatctgaaagaggttcaaaaaatagctaaggataacgaactactattattttttgatgaagtaca

SEQ ID NO: 245982 - DNA, 812 bp, Unknown
  Bacterial polypeptide expressing nucleotide sequence isolated from the Sargasso Sea
tacaacaaatgaaggtaaagagtcaattattcttgcagcggagtcaagctttcatggcagaacattggcagccttaagtgcgactggtcaaccaaaatatcaaaaaggtttcgaaccattgataaaagggtttaagttttttgaatttaacaattttgattcggttaaaaaattatttatagagtgtgaaaataatgatcaaaaggtttctggtgtattggttgaaccaatacaaggagaaggtggcgtgattcctggaagtaaaatattttttaaaagcctaagagatatatgcgataaatataattctcttctcattttagatgaggtccaaagtggggtaggtcgaactgggaaaatgtggggttatgagaatttaggaattgagcctgatggattcactcttgctaaaggcttaggtggaggtcatgcaattggagcattattggtaaaagaaaaagctaacattttttctccaggagatcatgcaagcacttttggaggcaacccattcgcctgtaaagctgccttaactgtaatagatgaaataaatagaagaaatcttatcaataatgtttatctaagaggggaacaattaagcgctgggtttgaagaattgtcaaaaaaatttccaaatattattagagggaaaagaggtttaggtttaatacaaggtcttgtgatcaatgatgattatgctgatgcaaaaaaaattacattaaaagcttttgacaaaggattactggtagttcctgcaggaggaaacgttgtaaggattgtcccaccattagttatatctcgaaaagaaatta

SEQ ID NO: 245983 - DNA, 745 bp, Unknown
  Bacterial polypeptide expressing nucleotide sequence isolated from the Sargasso Sea
tatgagctatttagcaaaaaattataatagaaaaaaaattgcctttaaatatggaaaaggaagttatctttattcaacagatggaaaaaaatatctcgacctgatcagtggaatagcagttaactctttaggtcatgctcatccaaaattagttaaaacaataagagatcaatcaaaaaaactttggcatgtttctaatgcttttcaaattccagaaggagaaaaattagctaaaaagttgtgccaaaaaacatttgctgattatgttatcttccaaaattcaggagcagaagctactgaagcatccattaaagttgcaagaagatatttttactcaattggaaaacccaataaaacgagaattttatgtattaaaaattcttttcatggaagaactttagctactatttttgcaagtgggtctaaaaaaatgacagaaggatttggttatgtgggtgggtttgatcattttatttttggagaccacaagtctttaaagaaaaaaatcactaagaataccgcagcaatcatggttgagacagtcctaggagagggtgggataaaagtcattccagactggtgtttaaaagaattaagaaaactatgtgataaaaaaaaaatattattgattttagatgaagtacagtgtggcataggaagatccggtaatttttttgcttttgaaaaatctaaagtaaaaccagatatagtaccaatcgcaaaaggaataggtggaggttttcct

SEQ ID NO: 245984 - DNA, 658 bp, Unknown
  Bacterial polypeptide expressing nucleotide sequence isolated from the Sargasso Sea
atgtcaaaaaacttaacatatataatgccaacatatggtgatagaaatctagaatttattgaaggtcagggatgttatttaacttccttagataataataaatacctagattttggtagtggtatagctgttaattctttaggtcattgccatcctagattagtaaaagctttgcagttacaatcttctaagttatggcatacatccaatctttatcatcactctacacaagagaaatatgcaaaacttttatgtttaaatagttttgctgaaaaaatatttttcactaattctggagtagagtcaattgaagctggactaaaagttataaaaagttatcatcattatcataacaatatagatcaaaagaatataattacttttgagggagcatttcacggcagaacctttgcagctttatcagctcaacaaaatgaaaagtattcaaaaggatttgagcctttattaagtggatttattaaaatcccctttaatgatattgaggctgttaaaaaaaatgtagacaaaaatacagctgctataatgatagagcctatccaaggtgaaggaggtattagacctgctaatttaaaatttttacaagatataaaaaaaatctgtgagaaaaataatttattattatttttagatgaggttc

SEQ ID NO: 245985 - DNA, 599 bp, Unknown
  Bacterial polypeptide expressing nucleotide sequence isolated from the Sargasso Sea
tattcctgattggtgtctaaaagaattaagagaattatgtaataaaaaaaaaatattattgatactgatgaaagtccagtgtggaataggaagatctggtgatttctttgcttttgaaaagtcaaaagtaaaacctgatattgtaccaattgcaaaaggaattggaggaggatttcctattggagcagttttaatgaataaaaaagttgcttcaagtatgacaccaggtactcatggatcaacatttggtggaaatcctttggcgatgtctgttggaaatgcagtaatggatataatatcaaaaaagaaatttttaaataatataaaaagtttatcaaaatattttttatttaaactaaacaaaattcagcaaagatatccaagtgttataaagcaaataagaggaaaaggttttttaattggtatacaattatataaagatcaaactgaatttataaaaaaattgatggataatcatctattaactattcgtgcagcagaaaatgtagttcgtcttttacctccattgaatgttaaaaaaaatgaaattgatatagcaatcaaaataattgaaaaagtatgttcacagataaaataat

SEQ ID NO: 245986 - DNA, 739 bp, Unknown
  Bacterial polypeptide expressing nucleotide sequence isolated from the Sargasso Sea
ttgaacattagtgagaaagtctcagaaaaatattctaaagctgaagacaagtccaaaaatatatatcaagaaaaaaactcagaagaatcagaattaaataccaacaacctaccaaattcttctgaattactagaaacagcatcgcaggtttttgttccgacttattcaccaaacttgattttatcaaagggccttggagcaaaagtttgggacaaagatgaaaatgaatatattgaccttggttctggaatttctgtcaacaattcaggccatattgacaaagaactcctagcagtactgactgaacaggcaggtaaattatggcatacaactaacttatatctcaatgaaccttcaatcagacttgccgaagaacttgtaaaagcaacatttgcagatagagtatttttctgcaattcaggagcagaagcaaatgaagcagcaattaaaattgccagaaaattctcaagtttgaacaattccacggaaaaacgcgaaattttgacatttgaaggttctttccatggtcgcactttaactacaatttctgcgactgctcaaccaaagtatcagcagggatttgaaccattgacagagggttttcgctattgcccatttaatgatttcaatgccgctgagaaaatgattggccctcaaacttgcgctgtattaatagaaccaatacagggtgaaggcggagtaaaacctgcagaatcaggatttctgtaccattgcgaga

SEQ ID NO: 245987 - DNA, 778 bp, Unknown
  Bacterial polypeptide expressing nucleotide sequence isolated from the Sargasso Sea
atgagtgcattagcaaaaaactatagcagaagaaaaatttcttttaaaaaaggcaagggaagttttttatattcaactaatggaaaaaaatatttagattttgtgcaaggtatagctgtaaattccttagggcatgcaaatccatatttaattaaagcaatcaacaaacaatctaaaaaagtttggcatgtttctaatgcattcaatattcccgaaggtgaaagacttgcaaaaagattaacacaaaaaacatttgctgatgcggtaatatttcaaaacagtggagcagaagcaacagaagtagctattaaagttgcaagaagatatttttattctatcggcaaaccaaaaaaaaatagaattctttgtattaaaaattcttttcatggaagaacgatcgcagctattaatgcaagtggttcaaaaaaaatgactgaaggttttggtcctaaagtaaatggttttgaccactttaaatttggagatcataagggactgaaaaaaatgattactaataaaacagcagctgttatggttgagaccataatgggagagggaggcataaaggtaattcccgattggtgtttaagagagctaagaaaaatttgtaataaaaaaaaaatacttttaatattagatgaggttcaatgtggcataggaagatctggtaaattttttgcttttgagcatgcaaaagttaagccggatattgtgcctatagccaaaggaataggcggaggctttccgataggtgcagttttaatgacaaaaaaggtaa

SEQ ID NO: 245988 - DNA, 952 bp, Unknown
  Bacterial polypeptide expressing nucleotide sequence isolated from the Sargasso Sea
aagcagtcaaaaaaactatggcatgtatcaaatgcttttactatacccgagggcgaaagattagcaaaaagattaacaaaaaaaacgtttgcagattttgtaatttttcaaaacagtggagcggaagctactgaggcagcagtaaaagttgcaagaagatatttttattctattggaaaaccaaataaaaatagaattctttgtataaaaaactcttttcatggaagaaccacatccatgatatatgcaagtggatcaaaaaaaatgacagaaggatttggtccaagagtaaatggttttgatcattttaaatttggagaccacaatggattaaagaaatctattactagaaaaacagcagcaataatggtggaacccattatgggagaaggtggaattaaaactattccagattggtgtctaagagatttacgaaaaatttgtaacaaaaaaaaaatattactgatattagatgaagtgcaatgtggaattggaagatcaggtagattttttgcatttgagcacgcaaaagttaagccagacattgttcctatagctaaaggaattggaggtggttttccaataggcgcagttttaatgacaaaaaaagcagcgtcaggtatcaaccatcctggtacacatggaagcacatttggagggaatccattggctatgagtgtgggcaatgcagttttagaccaaatctttaaaaagggattcttaaaaaatgttcaagcggtttctaaatattttcatttagaattaaaaaaaattcaaaaaaaatatccaaatattattaaagaaataagaggagttggactattaataggtattcaactttttaaagatcagacaaaatttatacaaaaattaatggataaaaaacttttaacaataaaagcagcagagaatgtgattagagtacttccgcccattaacggtaaaaaaaaag

SEQ ID NO: 245989 - DNA, 757 bp, Unknown
  Bacterial polypeptide expressing nucleotide sequence isolated from the Sargasso Sea
aatgagcaaactagtaaaaaattataatcgaagaaaaatttcctttaaatacggcaaaggaagttttttatattcgactgatggaaaaaaatatttagattttgttcagggtatagctgtaaattccttgggacatgcacacccacaactagtaaaaacaattaatcaacaatcaaaaaaactttggcatgtttcaaacgcttttgtaatcccagagggagaaaaattagcccaaaaacttaccaaaaaaactttcgctgactttgtaatgtttcaaaatagtggtacagaagctacagagggagcaataaaggttgctagaaaatattttcactcaataggtaaaccaaaaaaaaatagaatattatgtgtaaaaaattctttccatggaagaacaatagctgcaatttacgcaagtggatcaaaaaaaatgacagaaggatttggaccaaaagtaagtggctttgatcattttctttttggaaatcacaaatctttaaaaaaaaagattaataaaaatacagcagcgatcatggtagaaactattatgggtgaggggggtataaaggtaataccagattggtgtttgagagaattaagaaaaatttgtaataaaaaaaatatacttttaatacttgatgaagttcaatgtggaattggtagatcaggtgatttttttgcatttgaaaaatctaaggtaaaaccagatatagtaccaatagcaaaaggaattgggggaggatttccaattggagcg

SEQ ID NO: 245990 - DNA, 843 bp, Unknown
  Bacterial polypeptide expressing nucleotide sequence isolated from the Sargasso Sea
ttcaaccaaaggaaaaaaatatttagattttgttcaaggaatagcggttaattccttaggacatgcaaacccttatcttggcaaagcaattaaaaaacaagccaaaaagatttggcatgtttcaaacgcttttattattcctgaaggcgaaaaacttgctaaaaggttgacaaaaaaaacttttgctgattacgtcatgtttcaaaatagcggggttgaagcaaccgaggcagctataaaagctgcaagaagatatttttattcgattggaaaacctcaaaaaaatagaattctttgcataaaaaactcttttcatggaagaactttggcagcaatttttgctagtgggtcaaaaaaaatgacagagggttttggaccaaaagtacctggttttgatcattttaattttggcgatcacaaaggtttaaaaaaagcaattacaaaaaaaacagctgcaataatggttgaaacagtaatgggtgagtctggtattaaagttatacctgactggtgtttaaaaggtttaagaaaaatttgtaatcaaagaaaaattttattaattttagacgaagttcagtgcggaataggaagatcaggcaaattttttgcttttgaatatgcaaaaataaaacctgatattgtgccaattgcaaaaggtattggaggaggttttccagttggagcagttctaatgagcaaaaaagttgcatcttctatggtaccaggatcgcacggaagtacttttggaggaaaccctttagctatgagtgtaggtaatgcagtattagatcaaatatttaaaaaagggtttttaaaaaatgtacagaattcttccaaatattt

SEQ ID NO: 245991 - DNA, 630 bp, Unknown
  Bacterial polypeptide expressing nucleotide sequence isolated from the Sargasso Sea
aatgcactcatcaattttatctacttataaaagatctaatttttcttttgttaaaggaaaaggttcttatttaactgccaaaaatggcaagaaatatttggattttgctagcggcatagctgtaaattctcttggacattgtaatgcagaattaattaaagcactatataaacagtcaaaaaaaatatggcatgtatcaaatgcatttcaaatttcagagcaagaagaattagctaaaaagttagtaaaacttacatttgctgataaagtttttttttgtaactcaggagcggaatctgttgaaacagccattaaaacagctagagcctaccatcaaataaaaaaaaaaacaaaaaaatttaaaattattacaattaaaggtagttttcatggcagaactttagcggcaatttctgcatcaggacaaaaaaagttaattgaagggtttgatcctttagttgatggttttgtacaagtagaatttggtgatcacaaattaattgaaaaagtaatagataaacaaacagcagcaattatggttgaaccaattttaggtgaaggtggtataaaagtaattcctaatgtatgtttggaaggattaagaaaactttgtaataaaaaaaaaatttt

SEQ ID NO: 245992 - DNA, 891 bp, Unknown
  Bacterial polypeptide expressing nucleotide sequence isolated from the Sargasso Sea
gctggcgagctggattgcggccacagctgctgcgatcaggtgttcttctgcaactccggcgccgaagccaatgaggccgccatcaagttggcccgcaagtacggccacagccgccgtggcatcaaccagccactgatcttgaccgcccgagccagcttccatggccgcaccctggcggccgtcaccgccacaggccagccgaaataccaccgcggctttgaacccttgcccgatggttttgcctacttcgattacaacgacatcagcagccttgagaccgcgctgcagcagcacagcgaccgagctgtggccgtgctgctggaacccctccaaggcgaaggcggcatccttcctggtgatcgggactttttcgcccgtctgcgccaactctgtgatgagcggcagctgctgttgatcagcgatgaagtgcaagtgggcatgggccgcagcggcagcctttggggctatgagcagctaggcattgagcctgatgccttcaccacggctaagggcctaggcggtggcttccccatcggcgcactggcggtgacaaacgaagctgctgtcttcgaacctggtgatcacgccagcacctttggcggcaatcccttggcctgccgtgctgccctgactgtggccacggaactgcagcggcggcacctgctggaaaacgtgcagcaacgcggcgagcaactgcagcaaggcttgcaacagcgggttgaacagtggccccagctgctggccggccagcggggctggggcttgattcgcgggctgctactgcgcgatggatccatcagcgcggtggatttggtcaaagccgcgatggccgaggggctgttgttggtgccagcgggcagccaagtggtgcgctttgtgccgcccttggtg

SEQ ID NO: 245993 - DNA, 813 bp, Unknown
  Bacterial polypeptide expressing nucleotide sequence isolated from the Sargasso Sea
caagaagatatttcttttcaataggaaaaccatataaaaatagaatcctatgtataaaaaattcctttcatggcagaactattgcagcaatttatgcaagtggttcaaagaaaatgactgaaggttttttacctaaagttccaggttttgaccatattgagtttaaaaattctaaaccaaggtttcctaatattagaaaaaaaataaaaaaaaatacagcagcaataatgattgagactgttatgggagagggaggcatcaaagtaattccagataaatgtcttaaatatttaagaaaaatttgtaatgaaaaaaaaatattattgattttagatgaagttcagtgtgggattggaaggactggtaaattctttgcatttgaacatgccaaaataaaacctgatataactcctattgcaaaaggaatcggaggtggatttcctattggtgcggtattgatgactaacaaggtagccaagtgtatgataccaggaacgcatggctcaacttttggtggaaatcctttagcgatgtcagtaggtaattcagttttagatcaaatattgaaaaaaaattttttaactaatgttacaaaattatcaaaatattttttaaatggattaaataaaattaaaaacaaatatccaaatgttataaaagaaatacgtggaaaaggttttttaattggaattcaattacaatctgatcagacaaagtttattaagtcccttgaaaaaaactatcttttgacaataagagcagctgaaaatgttataagaattttgcctccgattaaatgtcaaaaaaactgag

SEQ ID NO: 245994 - DNA, 787 bp, Unknown
  Bacterial polypeptide expressing nucleotide sequence isolated from the Sargasso Sea
tatgagttttttagcaaaaaattacaatagaaaaaatatttcgttcaaatatggaaaaggtagttatcttttttcaacaaatggaaaaaaatatttagattttgttcaaggaatagctgttaactctttaggtcatgcacatccaaaattagttaaaacaataagagatcaatcaaaaaaactttggcatgtttctaatgcatttcaaattccagagggagaaaaattagcgaaaaagttatgtcaaaaaacatttgctgattatgttatgtttcaaaattcaggagcagaagccactgaagcagcaataaaagctgctagaaggtatttttattctattggaaaaccaaaaaaaaatagaattttatgtataagaaactcttttcatggaagaactttagcagcgatttttgcaagtggatcaaaaaagatgacacaaggttttggacccaaagttccaggttttgaccattttgtttttggaaatcatatatctttaaaaaaaaaaataacaaagaataccgcagcaattatggttgaaccaatcatgggggaaggtggaattcgtgtaatacctgatttttgcctgagagagttaagaaaattatgtaaccaaaaaaaaatattacttattttggatgaagtgcaatgtggaatttcgcgttcaggtgaattttttgcttttgaaaaatctaaaatatttgcagacatagtcccaattgcaaagggtcttgctggcggattccctattggcgcagttcttatgaataaaaaagttgctggcagg

SEQ ID NO: 245995 - DNA, 810 bp, Unknown
  Bacterial polypeptide expressing nucleotide sequence isolated from the Sargasso Sea
aaattttatgtgttaaaaactcatttcatggaagaacattagcagcaatttatgctagtgggtcaaaaaaaatgactgagggatttggtccaaaaatagcaggatttgaccattttagatttggagaccatgaatctcttaaaaaaaagattacaaaaaaaacagcagccataatgattgaacctattatgggcgagggaggtataaaggtaataccagactggtgtttaaaagaattaagaaagctgtgtaataggaaaaaaatattattgattttagatgaagtacagtgcggaatttcaagaacaggaagctttctttcatttgaaaaggctaagattaaacctgatatcgttccaatcgcaaaaggaataggtggtggatttccattaggagctgttttaatgaataaaaaagctgcctctggaatgatacccggaactcatggatctacttttggaggaaatcccttagctatggcggttggaaatacggtaatggatatagtttcgagtaaaaaatttttgaaaaatatcgaaaatctatcaaaatattttctatttgaattgaaaaatattcaagagttatatccgcgtcttattaaaagcataagaggaagaggtttcttaattggaattcaactacatagagatcaaacaaatttcattaaaaaactcacagaaaatagattacttacaataagagcttcagaaaatgttattcgtgttcttcctccgttaaacgtaaaaaaaaatgaactcgatctctgtttaaaaattataaataaggtttgtaaagaacttaattaaa

SEQ ID NO: 245996 - DNA, 631 bp, Unknown
  Bacterial polypeptide expressing nucleotide sequence isolated from the Sargasso Sea
tgaaactattttaggagaaggtggtattaaggtgatacctgatttttgtttaaagcatttaagaagactttgtaataagaaaaaaatacttttaattcttgacgaggttcagtgcggtataggaagaactggaaaattttttgctttcgaccatgctaaaattaaaccagatatcgtccctatagctaaaggaataggcggcggctttccaatcggcgcatgcttagtcaataaaaaagtagcttctgggatgacacctgggtctcatggaactacatttggaggaaaccctttagcgatgagtgtaggcaatgcagtgcttgatgtaattttgaaaaaagggtttctaaaaaatgttagaaaaaattccaagtattttcataataaattgaataatttgaaaaaagattatcctaaaattataaaagaagtgagaggcttaggtttcctaatcggtttacagttacattttgaccaaacaaaatttatacaaaaactaatggataataagatgcttacaattaaagcttcagaaaatgttgtaagaatattgccgccgcttaatgtaaaaaaacaagaaattgatctagcgatagcaattttgaagaaagtgtgtcaaaattataaatga

SEQ ID NO: 245997 - DNA, 646 bp, Unknown
  Bacterial polypeptide expressing nucleotide sequence isolated from the Sargasso Sea
tgacgagattcaatgtggtatggggcgtacaggtaaacttttctgctatcagtgggaaaattatccagaaccagaaatatccgtaaatactcttcaatacgaaaaaataaataagactaatataactgaatctaatttagtgccagacattgtaacaatggctaaagcacttggtggcggtcttccattaggcgcaatgctctgtagtgaggaagtggcactatcctttaaacccggagaccatggaacgacttttggaggaaacccaattgtcacagcagtagcagaagcttcttttaggaaaataaacacaccggaattgatgcaacaagtccaaaataatggtaccttgataagaaaaaaactcgatttgttaaatgatgaaatacacatgtttgaaaagattcgaggacgcggactgatgcttggtgctgtattatcaaaggcatggaaaggaaaagcaccaactatagtaaacgcctgtcagaaatttggtgtacttgttttaacagctggacctgatgttctgcgtttattacctcctctgaatatttccgacgaagagcttgaaacaggaatgcatcgtatctgcaaagcattaaaaaatttgcatgaagttgaactgtcttcaactagtcaaagatga

SEQ ID NO: 245998 - DNA, 775 bp, Unknown
  Bacterial polypeptide expressing nucleotide sequence isolated from the Sargasso Sea
atgagttatttagcaaaaaattataatagaaaaaaaatatcctttaaatatggaaagggaagttatttatattcaattgacaaaaaaaaatatttagattttgtacaaggtattgcagttaattcattaggtcatgcacatcctaaattagtaaaaactataaattatcaatcaaaaaaattgtggcatgtttctaatgcttttcaaattcctgagggagagaaactagctaaaaaattatgtaaaaaaacttttgctgactatgttatgtttcaaaatagtggagctgaggcaactgaagcggcaattaaagttgctagaagatatttttattctattggaaaacctaataaaacaagaattttatgtgttaaaaattcttttcatggaagaactttagctacaatttttgcaagtggatctaaaaaaatgacagagggatttggatatgtaggtggttttgatcattttgtgtttggagatcataaatctttaaagaaaaaaattaataagaatacagctgcaattatgcttgaaactataaaaggggaaggtggcatcaaaactatacctgattattgtttaaaagaattaagaaaactatgtgataagaaaaaaatattattaattttagatgaggtacaatgtggaattggaagaactggagatttttttgcttttgaaaaatccaaagtaaaaccagatatagtaccaattgccaaaggtattggcggtggatttcctattggtgcagttcttatgaataaaaaaagtg

SEQ ID NO: 245999 - DNA, 752 bp, Unknown
  Bacterial polypeptide expressing nucleotide sequence isolated from the Sargasso Sea
tgcgagtggttcaaaaaaaatgacggaaggctttgggccaaaagtgactggttttgatcacttcgaatttggtaatcacaagtctttaaaagaaaaaatttttaaaaacacagctgcaattatgatcgaaactattatgggagaaggaggaattaaagaaattcctgattggtgtttaaaggaacttagaaaaatttgtgataaaaaaaatattttattaattttagatgaggttcagtgtggaattgggagatctggtgatttttttgcttttgaaaaatcaaagataaaaccagatattgttccaatcgcaaaaggtattggagggggatttccaatcggagcagttttaatgaacaaaaaagttgcatctggaatgacagcaggaactcatggatcgacatttggtgggaatcctttagcaatgagcgttggaaattcagtaatagatattatttcaaacaaaaaatttttaaataaagtaaagaaaatttcaaaatattttttgttaaatcttaataaaataaaaaatgagtatcccaatattattaaagaaattagaggcagaggtttattgattggaatacaactaaaaacagatcaaacaaaatttataaataaacttatggataataatttattaacaattagagcagctgaaaatgttgttagagttttaccaccacttaatgtaaaaaaaaatgaaattaatctatcactcaaaaaaataaaaaaagtttttcagaactaaa

SEQ ID NO: 246000 - DNA, 739 bp, Unknown
  Bacterial polypeptide expressing nucleotide sequence isolated from the Sargasso Sea
atgtctaaaaacttaacatatataatgccaacatatggcgatagaaatctagaatttaaggaaggtcaaggatgttacttaacttctatagataataataaatacttagactttggtagcggtatagctgttaattctctaggtcattgccatccaaggttagtaaaagctttgcagtttcaatcttctaaactatggcatatatccaatctttattataactccacacaggaggaatatgcaaaacttttgtgtttaaacagttttgctgaaaaaatatttttcactaattctggagttgagtcaattgaagcaggaataaaagttataaaaagttatcatcattatcataacaatgtagatcaaaaaaatataattacttttgaaggagcatttcacggcagaacttttgctgctttatcagcacaacaaaatgaaaagtattcaaaaggatttgagccattattatctggatttattaaaattcccttcaatgatattgaggctgtcaaaaaaaatgttaacaaaaatacggcagccataatgatagaacctattcaaggtgaaggaggtataaggcctgctaatttaaaatttttacaaggtataaaaaaaatctgtgaaagcaataatttattgttatttttagatgaagttcaaagtggttttggaagatcaggtaaattatttgctcatgagtgggcagacttagaacccagatgttgtagctaccgctaaa

SEQ ID NO: 246001 - DNA, 776 bp, Unknown
  Bacterial polypeptide expressing nucleotide sequence isolated from the Sargasso Sea
aatggcagaacatattcaggtcacccgtgcactttttgatgaagtgatggttccaaattatgcaccggcacctgttattccggttcgtggtcagggctctcgcgtttgggatcaggcgggtcgtgaatacgttgattttgcaggtggtatagcggtgaatgccttaggtcattgccatccggctttagtctccgctttaaaagaacaagctgacaagttgtggcatctaagcaatgtgatgactaatgagcctgctttgcgtctggcacagaaattagtcgacagcacctttgccgaaaaagtctattttgccaactctggcgctgaagccaatgaagccgctttaaagctggcacgccgttgggctttggataagtttggtgcacaaaagcaacaaattatttcttttggcaaaagtttccacggccgtactttttttactgtgacagtaggtggtcaggctgcgtactcagatggttttggtcctaaacctggtggcatagatcacgctgaatacaataaccttgaaagcttaaaagcgctgatgtcggataacacttgtgccgtgatactagagcctttgcaaggcgaaggcggcattattcccggtgatctggcgttcctgcaaggtgtgcgtgatttatgtaaccaattcaatgcactgatgatttacgatgaagtgcaatctggtgtaggtcgtaccggtaaattatatgcctacatgcacagcaatgtagtgcctgacattctgaccacagctaaatctttaggcggtg

SEQ ID NO: 246002 - DNA, 565 bp, Unknown
  Bacterial polypeptide expressing nucleotide sequence isolated from the Sargasso Sea
tttccgacggctttggaccaagccggcagatatcatccatgtcccgtttaacgatctgcatgcggtcaaagcggtgatggacgatcacacctgcgcggtggtgatcgagcctattcagggcgagggtggcgttactgcggcaacgccggcattcctgcaaggcttgcgtgagctctgtgatcagcaccaggcgctgttggtatttgatgaagtacagagcgggatggggcgtactggctcactgtttgcctatatgcactacggcgtgacgccggatatcctcaccagcgccaaggcgctcggtggcggtttcccggtgagcgcggtgctgaccacccaggagattgcctccgcgttccacgtgggttcacacggctccacatacggcggtaacccgctggcctgcgcggttgcgggagctgcgtttgatatcatcaacacgccggaagtgctggaaggtattcaggccaaacgccaggcgtttgttcagcatttgcagaaaattgaccagcagtttgacattttcagcgacattcgcggtatgggactgctgattggcgccgaa

SEQ ID NO: 246003 - DNA, 802 bp, Unknown
  Bacterial polypeptide expressing nucleotide sequence isolated from the Sargasso Sea
catgctaacgaccacttaattagatctattaataaacaatctaaaaaattatggcacgtttcaaatgtttttactatccctgagcaagagagattggcaaaaagattagcccaaaaaacatttgctgattatgtaacttttcaaaattctggtgcagaagcaacagaggcagctataaaatttgctagaagatatttttattcaaaaggtaaaccaaaaaaaaatagagttctttgtattaacaatagttttcatggaagaactattgccgccatatttgccagcaacagcaaaaaagctattgaaggttttaaacctaaagtagatggttttgatcattttaacttcggcgatcacaaaggtttagaaaaagcgataaccagcaggactgctgctatcatggttgagacaatcatgggagaagggggcattaaagttattccagatttttgcctcaaaggcttaagaaaattatgtaataagaaaaaaattttattaattcttgatgaagttcaatgcggtgttggaagaagtggtaaattttttgcttttgaatacgctaagataaaacctgatattgtaccaatagcaaaagggattggtggcggttttcctataggtgcagttttagttaacaaaaaagtagcatcgggcatgaagcctggaacccatggatcaacatttggaggaaatcctttagcaatgagtgctggaaatgccgttatggatattatgtttaaaaaaggttttttaaataatgtaagtaaaaatggaaaatattttattagtcaacttgataaaa

SEQ ID NO: 246004 - DNA, 790 bp, Unknown
  Bacterial polypeptide expressing nucleotide sequence isolated from the Sargasso Sea
taaaaaatatctcgacttcgtgagtggaatagctgttaactcattaggtcacgctcatccaaaattagctaaaaaaataagagatcaatcaaaaaaactttggcatgtttctaatgcttttcaaattccagaaggggaaaaattggcaaaaaagttatgtcaaaaaacatttgctgattatgtgatatttcaaaattctggggcggaggctactgaagcggccattaaagttgcaagaagatatttttattcaatcggaaaacctaataaaactagaattttatgtattagaaattcttttcatggaagaactttagctactatttttgcaagtgggtcaaacaaaatgacggaaggatttggttatgtgggtggttttgatcattttatttttggagaccataagtctttaaagaaaaaaatcactaagaaaaccgcagcaatcatggttgagacggttctaggagagggtggaataaaagtcattccagactactgtttaaaagaattaagaaaattatgtgataaaaaaaaaatattattgattttagatgaagtccagtgcggcgttggaagatctggagatttttttgcttttgaaaaatctaaggtaaaaccagatatagtaccaatcgcaaaaggaataggtggaggttttcctattggtgcagttttaatgaataaaaaagttgcttcaggtatgacaccaggtacgcatggttcaacttttggtggtaatccgttagctatggcagtgggaaatactgtaatggatatagtttctactaag

SEQ ID NO: 246005 - DNA, 717 bp, Unknown
  Bacterial polypeptide expressing nucleotide sequence isolated from the Sargasso Sea
gcttgtagaacagacctttgcagacaaagtcttttttactaattctggggcagagagtattgaatgtgccataaagatggcaagacgttatttctttagccgaggcgaaaaatcaaaaaatcaaattattacctttaggggatctttccatggccgaaccattgggactatttctgcagcgggatcaagaaaaatgttagaaggatttggtcctaaggcatcaggatttaattcagtaaaaataggaaaattaaaagatttggagcaaagaattactcaaagaacatgtgctatattaatagaacccatactaggagaaggaggaattataccaataccttgtaagtttctaaaagaaatgggcgcgatttgtaaaaagaatgacattttgttaatttttgatgaggttcaaacaggaatagggagaacaggttattttttagcacacgaaaaatgttacataaaaccagatattgtggctctggcaaaaggcctaggaggagggtttccaataggtgcttgcctcacaactaataagatagcaaaagggatgacaccaggcacccatggatcgacctatggtggtaatccgctagcatgcgctgtggcaacagcaatagtaaaggaaattataaagccagaattcctagagaatgtgaggcgaaaaggaaacttttttgaaatggggttaaaaaaacttgttaaaaaatactccaa

SEQ ID NO: 246006 - DNA, 818 bp, Unknown
  Bacterial polypeptide expressing nucleotide sequence isolated from the Sargasso Sea
catacccgaaggtgaaaaacttgcaaaaagacttactcaaaaaacatttgctgattatgtaatttttcaaaatagcggtgttgaagcaaccgaagcagcaataaaagctgcaagaaggtacttttattcaatcggaaagcctcaaaaaaatagaattctttgtataagaaactcttttcacggtagaactttagctgcaatttttgcaagcggttcaaaaaaaatgacagaaggattcggaccaaaagttcccggatttgaccattttaattttgcggatcacaagggtttaaaaaaggctattacaaaaagaacagccgcaataatgattgaaacggttatgggagagtcaggtattaaggttatacctgactggtgtttgaaagatctaaggaaaatttgtaataagaaaaaagtcttattaattttagatgaggtccaatgtggaataggaagatcaggtaaattttttgcgtttgagtatgcaaaaattaaaccagacattgttccaatcgccaaaggaattggtggtggttttccgataggagcagttttaatgaacaagaaagttgcatcttctatgacaccaggatcccacggtagtacttttggaggtaatcctttagccatgagtgtaggtaatgcagttttagaccaaatttttaaaaaaggttttttgaaaaatgtacagaaatcttctgaacatttcctttccgagctatacaaaataaaagaagattacccagaaataatcaaagaagttagaggaattggtttgttgttaggcttacaactttatacggatcaaagtaaattta

SEQ ID NO: 246007 - DNA, 577 bp, Unknown
  Bacterial polypeptide expressing nucleotide sequence isolated from the Sargasso Sea
gaactagcaattaaaattgcaagaaaatatttccattctaaaggaaaaccaaccaaaaatagaattctttgcataaataacagttttcatggaagaactttggctacaatttttgcaagcaatagtaaaaaaatgacagagggatttggcccaaaagtttctggtttcgatcattttacatttggtaatcataaagatttggaaaaaaaaataacaaaaaaaactgctgcaataatgattgaaacaataatgggggagggtggaataaaagttattccagatttttgcttaaaaggccttagaaagctttgtaataaaaaaaagatactcttaattctggatgaagttcagtgtggaataggaagatcgggtaaattttttgcttttgaatacgccaatataaagcccgacattgtgccaattgcaaaaggtataggtggcggatttccaataggtgcctgcttagtaaataaaaaagttgcatctacaatgaaaccgggttcccatggaacaacatttggaggaaatcctttagcaatgagtgtaggtaatgcagtgttagatgtaatttttaaaa

SEQ ID NO: 246008 - DNA, 874 bp, Unknown
  Bacterial polypeptide expressing nucleotide sequence isolated from the Sargasso Sea
ttatgcaacaaatggaaaaagatatttagattttgtacaaggaatagcagttaattcactaggccatgctaatccaaatctaattagagctatcaataaacaagctaaaaaagtatggcatgtatcaaatgcatttataattcccgaaggagaaaaacttgctaaaagactaactcagaaaacgtttgcggaatatgttatttttcaaaattcaggaactgaagcaactgaagcagcaataaaagttgcgagaagatatttttactcaaagggcaaaccacataaaaatagaattttatgtgtaaaaaattcatttcatggaagaactatcgcagcaatatttgcaagtggatcaaaaaaaatgacagaaggatttggaccaaaagtttcgggttttgaccactttagatttggagatcacaaatctttaaaaaaatctattacaaataagacagcagcaattatggttgagcctataatgggagaaggtggcattaaggtgatcccagactggtgcttgagagaactaagaaaaatttgtaataaaaaaaaaattcttttaatattagacgaagtacaatgtggtatcggtagaactggagatttttttgcatttgaaaactctaaagttaaacctgatatcgtccctattgcaaagggaattggaggtggatttccaataggggcagtattaatgaaaaaaaatgttgcgctctcaatgtcacctggttcacacggttctacttttggaggtaacccgctagcaatgagcgttggaaatgctgttttggatcaaattttaaaaaaaggatttattaataatttaaaaaaaatatcaaaatatttttaccaagaattaaataaaataaaaaag

SEQ ID NO: 246009 - DNA, 632 bp, Unknown
  Bacterial polypeptide expressing nucleotide sequence isolated from the Sargasso Sea
aatgaccaatgttcttccaacatacccaagatcaaacttggaatttacccatggactcggtagctatttgtatacaaaatcaggagagaagtttttagatttcggtacagggatagcggtcaactccctaggttattcaaatccctatctaaatgataaattaaaagaacaaattgataaattatggcatttatcaaacgtatatcagataccagaacaagaaaaactcgcgaaaagattatgcgataattcttttgcagactatgtattcttttgtaactcaggtactgaagcgattgaggcaagcattaagattgccagaagatattttcatgacacaaaaaattcgtcgaataaaacagaaattttaagtttttcaggttcatttcacggcagaacaataggagcacttgcagcaggtggtccggacaaacttagctcttttaatactacagttaatgattttaaatttctagaatttggtgatcatgagcagcttcaaaactcaataagtgaaaagactgctgcagtaattattgaaccaatacaaggtgagggcggtgtaagagaagttcctaagcaatgccttgagggattaaggaaaatttgtgatgaaaacaagtgtcttctaa

SEQ ID NO: 246010 - DNA, 724 bp, Unknown
  Bacterial polypeptide expressing nucleotide sequence isolated from the Sargasso Sea
agcagcaataaaagttgctagaagatatttttattcaataggcaaacctaaaaaaaatagaataatctgtattaaaaattcttttcatggaagaacaatagcagctatcagcgcaagcggttcaagaaaaatgacagaaggttttggacctaaggttgctggttttgatcattttaaatttggtgatcacaaaaaactaaaaaagttaataacaaatagaacagcagcaatattggttgagactatactgggtgaaggtggaataaaagtaattccaaattggtgcttaaaagaattaagaaaaatttgtgatcaaagaaaaattctcttaattttagatgaaattcaatgcggtattggaagatcaggtaaattttttgcatttgaacatgctaaaataaaacctgatattgttcctatagcaaaaggaattggtggtggttttccgattggagcagtattaatgactaaaaaagtgtctaaaggtatgattccaggtactcatggttctacttttggaggcaatcctttagcgatgtcagttggcaatgctgttttagaccaaatgtataaaaaaaattttttgaagaatgtgaacaaactttcaaagtacttcttaatagaattaaataaaataaaaaacgagtatccaaaattaattaaagagattagaggattaggattattaattggaattcagctatatgaagatcaaacaagatta

SEQ ID NO: 246011 - DNA, 919 bp, Unknown
  Bacterial polypeptide expressing nucleotide sequence isolated from the Sargasso Sea
agaaggagaaaagttagcaaaaagattatcaaaatatacttttgcagaaaaaatattttttcaaaatagtggagcagaagcgactgaagcagctataaaagtggcaagaaagtactttttctcaataggaaaaaaagaaaaaaatagaatcatttgtataaaaaattcttttcatggaagaactatagcagcaattagtgctagtggatcaaaaaaaatgacgaatggttttggaccaaacgccccaggatttgaccatttcgaatttggtgatcataaaaaattgaaaaagttgataaataaaagaacagctgcaattatggtcgagcctataatgggtgagggtggaataaaagttataccagaatggtgtttaaaagaattaagaaatatatgtaataaaaaaaaaatattactaattcttgatgaggtacagtgtggaattggaagaactggtaagttttttgcatttgaacatgctaatgttaaaccagacatagttccaatagcaaaaggtattggtggtggatttccaattggcgcggtattgatgaccaataaagtagcaaaatatataagtcccggcacgcatggctctacttttggaggaaaccctttagcaatgtcagtaggtaatgcagtgctagatcaattattaaagaaggattttttaaaaaatgtagaaaaattatcaaaatattttttaaatgaattaaataaaatcaaaaatgaatatccaaaaattataaaagaaatacgtggtaaagggtttttaattggaatacaattaaactttgatcagacaaagtttattaaatcattagaaaaaaattatctattaacaataagagctgcagaaaatgttataagggttttgcctccattgaatgttaagaaaaacgaaattgatttagcatta

SEQ ID NO: 246012 - DNA, 888 bp, Unknown
  Bacterial polypeptide expressing nucleotide sequence isolated from the Sargasso Sea
gctgttaattgcttggggccactcaaatccaaaactgatacaaactattaataatcaatcaaaaaaactttggcatgtatctaatgcttttcaaattcctgagggagagaaattggcaaaaaaattatgccgaaaaacttttgctgattacgtaatgtttcaaaatagtggtgcagaagcaacagaagcagctataaaagtcgcaagaagatatttttattcaattggaaaacctcataaaaatagaattttatgtgttaaaaattcttttcatggaagaacgatagctgcgatttttgctagtggctcaaaaaaaatgacagagggctttggaccaaaagtttcaggctttgaccattttgtttttggcaatcatgagtctttaagaaaaaaaattactaaaaatactgcagcgattatgattgaaagtataatgggagaaggaggaataaaagtaataccagatttttgtctaagagaattaagaaaactttgtaacaaaaaaaaaatattgttaattgccgactctgtacaagacggagtgggaagatcgggagattttttcgcatttgaaaaatcaaaaattaagcctgatattgtgccgattgctaaaggtataggcggaggatttccaattggtgcagtattaatgacaaaaaaagtcgcgaaagcgatgacaccaggtacacacggttcaacatttggaggaaaccctttagctatggctgttggaaacacaattatggatatagtttctaacaagaaatttttaaataatgttaagaaagtatcaaaatattttttttcaaaattaaatcagttaaaagataaacaccctaatattataaaagatattagaggaagaggtttattgattggtatacaact

SEQ ID NO: 246013 - DNA, 800 bp, Unknown
  Bacterial polypeptide expressing nucleotide sequence isolated from the Sargasso Sea
tattaaaaattcttttcatggaagaacacttgccgcaatacacgcgagcggttcgaaaaagatgatcgagggttttggcccaagaactccggggtttgatcattttaaatttggaaatcatgagtctttaaaaaagtttataacaaaaaaaacagcagcaattatgatagagcctgttttaggtgagggtggaattaaagtaatacctaaatggtgtctaaaaggtttaagaaaaatctgcgatcaaaaaaaaatattacttatttgtgacgaggtccaatgtggcataggaagatcaggaaagttctttgccttcgaatattcaggaataaagccagatattgtgccaatagcaaaaggcataggaggtggatttccacttggtgcagttcttatgaataaaaaagttgcaattggcatgacaccaggaacgcatggctcaacatttggcggaaacccattagccatggaaataggaaatgcagttttagataaaataatgaacaaaaaatttttaaaaaacgttcaaaagacctcaaaatatttcttaaatgagttgaataaaattaaaatcgaatatccagggattattaaagagataagaggaataggactattgattggccttcagttacataaagatcaaaataaatttattaaaaagcttgaaaaaaataaattattgacaattagagctgccgaaaatgttatcagaatactacctcctttaaatgttaaaaaattagagatcgatatgtccatcaaaattattaaaaaagtttgtaaagaatataaataaa

SEQ ID NO: 246014 - DNA, 925 bp, Unknown
  Bacterial polypeptide expressing nucleotide sequence isolated from the Sargasso Sea
tcgaaaataccttttgcagatcatgtaatttttatgaattctggtgcggaagcaacagaggcaagtattaaaatagcaagaaaatatttttatgaaaaaggtcagattaataaaaatagaattataacttttaaaggtgcttttcatggaagaactttagcttctttatttgctgcaaacaatcctgaccacattaaaggatttgagcctaaagttgacggctttgatcaagtagattttggagatcatgatagtttaaaaaaagcaataaataaaaatacagctgcaattatggttgaaacgattttaggagagggcggaatcaaagtaattccccctgaatgtttaataggtttaagaaagatttgtgatgaaaatgatcttttacttattttagatgaagtgcaatgcggtattggtagaactggaaaattttttgcatttgaatggtctggtattgaaccagatattgtgccaatagctaaaggaattggaggaggttttccaatcggagcttgtcttgtaaataaaaaagctggtagctgcatgaagccaggatcacacggatctacatttggtggaaatccacttgcaatgagcataggtaatgcagttttagatattatttttgaaaaaaactttctagataatgtcatttctcaaggaaactattttgaagaacaattacttaaaattaaaaaaaagtttcctcacgtcgtagaaggtgtcagaggtaaaggattattaaaaggtattaagttaaaggtagaaaatacaaaatttattaatcaattatttgaacaaaagttattagttgttaaagcatctgaaaatgtagttagattactaccacctctgatcgttaataaaaatgagatcgatgaagcaatttcaattattgacaaagtctgcgagattttctaat

SEQ ID NO: 246015 - DNA, 892 bp, Unknown
  Bacterial polypeptide expressing nucleotide sequence isolated from the Sargasso Sea
ttagctaaaaaactaacaaaaagaacttttgctgatgcagttatttttcaaaatagtggagcggaagctacagaggctgctataaaagttgctagaagatatttttattcaataggtcaatcaaaaaaaaatagaattctttgtgttaaaaattcatttcatggtagaactattgcagcaataaacgcaagtggatctaaaaaaatggttgaaggatttggaccaaaagtaggtgggtttgaccattttaaatttgggaaccacaaggaattaaagagaaaaattacaagtaaaactgcagctataatgattgaaccaataatgggtgagggtggtattaaagtaatacctgcttggtgccttaaagaacttagaaagatttgtaataaaaaaaaaattcttcttattttagatgaggttcagtgtggaattgggagatcaggtaaatttttttcatatgaatatgcaaaaataaagccagatatagttccaattgcaaaaggaattggaggcggttttccaataggcgcagtgctaatgacaaaaaaagtttctaaggctatggttccagggacacatggatctacttttggcggtaaccccttggcaatgtcagttggtaatgcggtaatggatgaagtttttaaaagaggctttctttcaaaagttaaaagtaattcaaaatattttatttcagaattaaataaaattaaaaataaatttccaaatattattaaagaaataagaggaataggattgattttgggaatacaattacatcaagaccagacaatatttatacaaagtttaacgaaaaataaactattaaccattagagcagctgagaatgttataagaattttgcctccattgaatgttaataaaaaagaaa

SEQ ID NO: 246016 - DNA, 609 bp, Unknown
  Bacterial polypeptide expressing nucleotide sequence isolated from the Sargasso Sea
ggggcattaaagttattccagatttttgcctcaaaggattaagaaaactatgtaataagaaaaaaattttattaattctcgatgaagttcaatgcggtattggaagaagtggcaagttttttgcttttgaatatgcaaaaataaaacctgatatcgttccaatagcaaaagggattggcggtggttttccaataggtgcagttttagttaataaaaaagtagcatcaggcatgaagccagggactcacggatcaacatttggaggaaacccattagcaatgagcgctggcaatgcagtcatggatgtaatgtttaaaaaaggttttttaaataatgtaagtaaaaatggaaaatattttttaaatcaacttgataaaattaaaaataagtatcccaaagttgttaaagaagttagaggcaaaggattactgattggactttgtcttcatgtaaatcaagctaaatttattcaaaaacttttagataataatttattgaccgtaagagctgctgaaaatgttgtcagacttttgcctcctttgaatgtaacaaagagtgaaataaacttaggtttaaaaataatagagaaagtttgcaaaaaattttaaa

SEQ ID NO: 246017 - DNA, 852 bp, Unknown
  Bacterial polypeptide expressing nucleotide sequence isolated from the Sargasso Sea
aatgccaacatatggcacaaagaaactcaaatttttaaaaggaaaaggttgttatttatataacaataataacgaaaaatatttagattttgcaagtggaattgctgtaaactcactaggtcactgtcatcctagattagttagtgccctttataatcaatcaaaacaactctggcatgtttcaaatttatatataattaaaaaacaagaacaatttgcaaaattattatgtaaaagctcttttgcagataaggtattttttacaaattctggaacagaatcaattgaatgtggaataaaaataattagaggatatcattcttaccataacacaggtagaacaaatataattacatttgatggctcatttcatggaagaacttttggagcattatctgctcaaaaaaataaaaaatactcaaaaggttttggaccactgctttcaggttttaaaaaagtagaattcaataatataaagaaattaaaggctgttattgacaataaaactgctggaatattaattgaaccagttcaaggcgaaggcggaataagacctgcagatttacagtttttaaagtttataaaaaaaatatgtgatgaaaatgatattttgctttttttagatgaagttcagtgtggttttggcagatcaggtaaattgttttctcacgaatgggctaaaataaaaccagatataatggctgtggcaaaaggtattggatcaggctttcctttaggtgcatgtttatctacaagtaaggcatgtgtatcaatgacgaaagggagtcatggctcaacctatggtggtaacccccttgcaatgagtgttggattagaagtattaaaaatagt

SEQ ID NO: 246018 - DNA, 643 bp, Unknown
  Bacterial polypeptide expressing nucleotide sequence isolated from the Sargasso Sea
atgatcgaaccaataatgggtgagggaggtattaaagtaatacctgcctggtgtcttaaagaactgagacagatttgtaataaaaaaaaaattcttcttattttagatgaagttcagtgtggaattggaagatcaggtaagtttttttcatatgaatatgcaaatataaaaccagatatagttccaatagcaaaaggaattggaggcggatttccaattggtgcagttttaatgacaaaaaaagtttcgaaggctatggttccaggtacacatggatctactttcggaggaaatcctttggcaatgtcagttggaaatgctgtaatggatgaaatttttaaaaaaggctttctttctaaagttaaaagtaattcaaaatattttatttcagaattaaataaaattaaaaataaatttccaaatattattaaagaaataagagggacaggattaattttgggaatacagttacatcatgaccagacaaaatttatagaaagtttaatgaaaaataaattattaacaatcagagcagcagaaaatgttataagaattttgcctccattaaatgtaaataaaaatgaaataaatatagctttaaaaatcatcaataaagtttgtgataaatacaaaaaaaaatgaa

SEQ ID NO: 246019 - DNA, 765 bp, Unknown
  Bacterial polypeptide expressing nucleotide sequence isolated from the Sargasso Sea
taaatgctagtgggtcaaaaaaaatggtcgaaggatttggaccgaaagtgggtggatttgaccattttaaatttggaaaccacaaggaactaaaaagaaaaattacaagcaaaacagcggctataatgattgaaccaataatgggcgagggaggcattaaagtcataccttcatggtgtctcagagaattgagaaagatttgtaatcataaaaaaattcttcttattttagatgaagttcaatgtggaattgggagatcaggtaagtttttttcatatgaatatgcaaacataaagccagatatagttccaattgcaaaaggaattggaggtgggttcccaataggtgcagtgttaatgacaaaaaaagtttctaaggctatggttccaggcacacatggatccacttttggtggaaaccctttagcaatgtctgttggaaatgctgtaatggatgaaatttttaaaaagggctttctttcaaaagttaaaagtaattcaaaatattttatttcagaattaaataaaattaaaaataaatttccaaacattattaaagaaataagaggaacaggattaattttgggaatacagttacaccatgaccagacaaaatttatacaaaatttaatgaaaaataaattattaacaattagagcggctgaaaatgttataagaattttgcccccattaaatgttaataaaaaagaaataaatatagctttaaaaattatcaataaagtttgtgatgggtataaaaaataat

SEQ ID NO: 246020 - DNA, 795 bp, Unknown
  Bacterial polypeptide expressing nucleotide sequence isolated from the Sargasso Sea
aaaatagctaaaaagttgtgtaaaaaaacttttgctgactatgttatgtttcaaaatagtggggcagaagcaacggaagcggcagtaaaagtcgctagaagatatttttattctaatggcaaacctaataaaaatagaattttgtgtattaaaaattcttttcatggcagaacattggctgcgatttttgcaagtggatctaagaaaatgacagagggatttggaccaaaagttgctggttttgatcatttcatatttggagatcataattcccttaaaaaaaaaattactaaaaacacagcagcaattatggttgaaactattatgggagaaggtggtataaaggtaattccagattggtgtttaaaagaattaagagcaatatgtgataagaaaaaaatattattaattcttgatgaagttcagtgtgggataggaagatctggtgatttctttgcttttgaaaaatcaaaagtgaaacccgatattgtaccaattgcaaaagggataggtggaggatttcctatcggagcagttttaatgaataaaaaagttgcctccagtatgacaccaggtacgcatggatcaacatttggaggaaaccccttggctatgtctgttggaaatgtggtaatggatattatatcaaataagaaatttttaattaatgtaaaaaatttatcaaaatattttttatttaaattaaaaaaaattcaagaaaaatatccaaatgtaattaagcaaataagaggaaaaggttatttgattggaatacaattatataaagatcagaat

SEQ ID NO: 246021 - DNA, 637 bp, Unknown
  Bacterial polypeptide expressing nucleotide sequence isolated from the Sargasso Sea
tatgcttgaaacaataatgggagaaggtggaattaaagtagtaccagattggtgtttaagagagcttagaaaattatgtaatagaaagggtattttattaatacttgatgaagtccagtgtggaattgggagaacaggtaatttctttgcttatgagaaatcaaaggtaaagccagatatagtccctatagccaaagggataggaggaggatttcctataggtgcagttttaatgaacaaaaaagttgcatctggaatgacacctggaagccacggttcaacatttggtggaaatccattggcaatgaagataggtagcacagtattagatataatttcaaaaaaaaaatttttagctaacgtaagaaaaaattctgaatattttcatcaaaagttaaagatcattaaagcaaaatatcctgaaattattaaagatataagggggagaggtttcttgattggtctacaactttttactgatcaaacatactttattgaaaagcttatgcaaaataaattattgacaattaaagcagctgaaaatgtaataagaattttaccaccattaaatgtaaaaaaaaaagaaatagaccaggctttaaaaataattaataaagtttgtttggaacatagataa

SEQ ID NO: 246022 - DNA, 691 bp, Unknown
  Bacterial polypeptide expressing nucleotide sequence isolated from the Sargasso Sea
gattacattttttttcaaaattcaggcacagaagcaacggaagcagcaataaaggtagcgagaagatatttttattcaataggaaaaccaaataaaaatagaattttatgtgtgaaaaactcttttcatggaagaactattgctgcaatttttgctagtggatcaaaaaaaatgacagaggggtttggaccaaaagttggaggttttgaccactttaaatttggagaccatcaatctctaaaaaaagctattacaaataaaacagcagcaattatggtggaacctataatgggagaaggcggcattaaagttattccaaactggtgcttaaaagaactaagaaaaatttgtaataaaaaaaaaatacttttaatattagacgaagtgcaatgtggtataggtagaactggaaatttttttgcatttgaaaattctaaagttaaacctgatattgttcctattgcaaaaggaataggtggtgggtttccaattggtgcagttttaatgacaaaaaaagttgcatcttcaatgacaccagggagtcacggatcaacttttggaggaaatcctttggcgatgagtgtcggaaatgctgttttggatcaaatttttaaaaaaggatttcttaataatttaaaaaaagtatcaaaatatttttttaaggaattagataaaataaaaaaagattatc

SEQ ID NO: 246023 - DNA, 825 bp, Unknown
  Bacterial polypeptide expressing nucleotide sequence isolated from the Sargasso Sea
atttagatttcgttcaggtattgctgtaaactgtcttggccatgctaacgactatttaataagatctatcaatagacaatctaaaaaattatggcacgtttcaaacgttttcactattcctgagcaagagagattagcaaaaagattagcccaaaaaacatttgctgattacgtaacttttcaaaattcgggtgccgaagcgacagaagccgctattaaatttgctagaagatatttttattcaaaaggtcaaccaagaaaaaatagagttctatgtataaataatagtttccatggaagaactatcgcagctatttttgcaagtaacagtaaaaaagcaattgaaggctttaaacctaaagtagacggttttgatcactttaactttggtgaccacaaaggtttagaaaaagcgataaccagcagaacagctgctatcatggttgagacaatcatgggagaagggggcattaaagttattccagatttttgtctcaaaggcttaagaaaactatgtaataagaaaaaaattttattaattctagatgaagtacaatgcggcattggaagatgtggcaaattctttgcttttgaatacgcaaaaatcaaacctgatatcgttccaatagcaaaaggaattggcggtggctttcccataggtgcagttttagttaataaaaaagtagcttcaggaatgaagccgggaacccatggatcaacatttggagggaaccctttagcaatgagcgctggcaatgcggtgatggatataatgtttaaaaaaggttttttaaataatgtaagtaaaaatggaaaatatttttt

SEQ ID NO: 246024 - DNA, 623 bp, Unknown
  Bacterial polypeptide expressing nucleotide sequence isolated from the Sargasso Sea
aatgggtgaatcaggtataaaagttattcccgaatggtgtctaaaagaattgagaaagctatgtaataagaaaaaaattttattaattttagatgaagttcaatgcgggataggcagatcaggaaaattttttgcttttgaacacgcaaaaataaaacctgatatagtgcccatagcaaaaggaatagggggcggctttccaatcggagcagttttgatgaataaaaaagtagcttcggccatgaccccaggctcacacggaagtacatttggtggcaatcctttggctatgagcgtgggcaatgctgttctggatcagatattcaaaaagggatttttaaaaaatgttcaaaaatcatctaaatatttcataaacgaattaaacaatataaaggaagattacccaaatataataaaagaagtcagggggatagggttgctcttagggatccaattatatggtgatcaaaacaaatttataaaaaaattagaagaaaacaaacttcttactatgaaagcaggagagaacgtagtcagaatcttgccccctttgaatgttaaaaaaaaagaaatagatattgcaataaaaatcattagaaaagtttgcgattatttaaattagt

SEQ ID NO: 246025 - DNA, 553 bp, Unknown
  Bacterial polypeptide expressing nucleotide sequence isolated from the Sargasso Sea
aatgtctacttacggcgtacgtaaacttgaatttattaaaggaaaaggtgtatatctattttcaagtgataataaaagatatctagattttggaagtggtatagcagttaattcattaggtcattgtcatccattattagttaaaactcttagaaaacaatcgttaaaactttggcatacttcaaatttatattttaataaaagtcaagaagagtatgcaaaattattatgtaaatatagttttgctgaaaaagttttttttactaattctggaagcgaatctattgagtgtggaattaagcttataagaagttataatcattattttaaaaaattttggaaaaaaaatattattacttttaaaggatcttttcatggtagaacaatgtccgctatttcagcacaaaaaaataaaaaatattctaatgattttaaacctttgcttccaggatttgttcaagttccttttgataatataaatgcattagagaaaaaaattgatgaaaaaacagcagcaataatggttgaaacaatacagggagaaggaggcatt

SEQ ID NO: 246026 - DNA, 867 bp, Unknown
  Bacterial polypeptide expressing nucleotide sequence isolated from the Sargasso Sea
tgaagctactgatggtgtaattaaaataatacgaaagtatcattatgaaaatggaaataagaaaaaaaataagattattgtttttaataatgcctttcatggaaggacattgactggtattttagcaggttccaacgaaagtcatagagaaggatttttacctcatgctaaatccactggaggttttgtaagagttaattatggtagcattaaagctatagataaagctatagatgataatattgcaggaattttttttgaacctatacaaggcgaaggaggaattaatgtagcagatgttaattatctcaaagaggttagaagaatttgtaataaatacaatatcttacttgctttagatgaagtgcaatgtggtataggaagaacaggcaagcttttcgcttatcaatggagtaatataaaaccagatttattgacttctgctaaagggttaggaggtggttttcctataggggcagtgctgatgacaaataaggttgcaaaaaaaatgaattttggttcacatggttcaacttttggaggaaaccagcttgcttgttctgtagcctcagctgtcataagggaaataacaaagaaaaattttcttaaaaaagtacaagaatatgggttttttttaaaagagaagctcgaggtattcaaagtgaattatcccatgattatttcatcgataaagggaaaaggattacttagtgggattgaattaaaaataccaaccgatactttctgtaaactagcaagagaaaaaaaattactattagttccagctgctaacaatgtagttagaatattgccaccattaaatgtaaaaaaaaatgaaataaaaatggctatttctgttattgaaga

SEQ ID NO: 246027 - DNA, 796 bp, Unknown
  Bacterial polypeptide expressing nucleotide sequence isolated from the Sargasso Sea
tatgccaacttatggcaataaaactcttgaatttgtaaaaggtagtggatgttacttatatactagtcaaaacaaaaaatatttagattttgcaagtggaatagctgtaaattctcttggtcattgtcatcctaaactcattgaggcacttaataaacaatcgaaacaactctggcatgtttcaaatttatataaaattaaaaaacaagaacaatttgcaaaattactttgcaaaaactcttttgcagataaagtattttttactaattctggaactgaatctattgaatgtggaattaaaataattagaggatatcattcatatcataagactaaaaaaacagaaattataacgtttgacggtgcttttcatggaagaacttatggtgcactttcagcacaaaaaaacaaaaaatactcttctggttttggccccatgcttaaaggttttaaacaaattgaatttaataatgaaaaaaaattaatatcagcaataaataaaaaaactgctggtattatgattgagccaattcaaggagaaggaggcattcgtcctgccaatttaaattttttaaaattattaagaaaaatttgtttggaaaataacatcttacttttttttgatgaagttcagtgtggatttggcagatctggtaaattattttcacatgaatgggcaaaaattaaacctgatataatgtctgtagcaaaaggtattgggtcagggtttccgcttggagcttgtatgtcaacaaataaagcatgcgttgcaatgacaaagggtagtcatggatca

SEQ ID NO: 246028 - DNA, 826 bp, Unknown
  Bacterial polypeptide expressing nucleotide sequence isolated from the Sargasso Sea
attgtggcatgtatcaaatgctttcaaaattccagaaggtgagaaattagcaaaaaaacttgttgataggacttttgcagattctgtgatctttcaaaatagtggtgctgaagcgacagaaacagcaataaaaattgcaagaagatatttttattcaattggaaaaccttataaaacaagaatagtttgcatcaaaaattcatttcatggtagaacattagccgcgatccatgcaagtggctcaaaaaaaatggttgaaggatttgggccaaaatttcccggatttgatcattttagatttggagatcacaaaaaattaaaatctttaattaataagaacactgctgcaatcatgattgaaactgtgatgggagaaggcggtattaaagttattccatcatggtgtataaaagaattaagagaattatgtgataaaaaaaatatattattaattcttgatgaagttcaatgtggaataggtagatcaggaaaattttttgcatttgaatatgctaaagtgaaacctgatatagttcctatagctaaaggaatcggaggtgggtttccaataggagcagtcttgatgacaaataaaatatcaaaagcaatgacaccaggcacacacggatctacttttggaggcaacccattagcgatgactgtcgggaacgcagttatagatcaaataaataataaattgttaaataatgtgaataatatgtctaaatattttattaaaaatttagagaatttaaaaagaaaatatccaaatattataaaagaagtgagaggtctaggactcctaattggttttacaactttttaa

SEQ ID NO: 246029 - DNA, 766 bp, Unknown
  Bacterial polypeptide expressing nucleotide sequence isolated from the Sargasso Sea
attactaaccaagaacactttcgcagaaaaagttttttttacaaactcgggagcagaaagtgtcgagtgttctattaagattgctaggaggttttttttctccaagggccaatcaaatagaaataggataatttcttttgaaggatcttttcatggaagaactacgggtacaatatcagctgctggtagcagaaagttattggaagggtttggtccaagattgcccggttttgacttagttaaaagattttctcttgaaagtgttgaaaaaaaaatatcaaaaagaacttgtgcaatccttgttgagccaatacttggagagggaggaatagtaactctttcctgttcttttttaaaagggcttaaagacctttgtgaaaaatataacttattgcttatttttgatgaggttcagtccggtattggtagatctgggcattttttagcccacgaaagctgtgaggtgactcctgatattgtggccctggcaaaaggcttgggaaacggctttcctataggtgcttgtttagcaacaaaaagagttgcagattgtatggtgcccggaactcatggctcaacttacgggggtaatcctttaggttgtgctgttgcgttagaaacaacaaaacatattttaaaaccacgctttttatctgaaattcgcaaaaaaggtgatttctttaaagaaaaattaaatagtttaattgacatttttcccgatcaaatattagaggtaaggggaagggggctaatgttgggtttaaag

SEQ ID NO: 246030 - DNA, 766 bp, Unknown
  Bacterial polypeptide expressing nucleotide sequence isolated from the Sargasso Sea
ataaatgccagtggatctaaaaaaatggtcgaaggatttggaccaaaagtggatggatttgaccattttaaatttggagaccacaaggaactaaaaagaaaaattacaagcaaaaccgcggctataatgattgaaccaataatgggcgagggaggtattaaagtgataccttcatggtgtctcaaagaattgagaaagatttgtaatcaaaaaaaaattcttcttattttagacgaagttcagtgtggaattgggagatcaggtaagtttttttcatatgaatatgcaaacataaagccagatatagttcctattgcaaaaggaattggaggcgggttcccgataggtgcggtattaatgacaaaaaaagtttctaaggctatggttccaggtacacatggatctacttttggtggaaaccctttagcaatgtctgttggaaatgcggtaatggatgaaatttttaaaaaaggatttctttctaaagttaaaattaattcaaaatattttatttcagaattaaacaaaattaaaagtaaattcccaaacattattaaagaaataagaggtataggattaattttaggaatacagttacatcatgatcaggcaaaatttatacaaagtttaatgaaaaataaattattaacaattagagcagctgaaaatgttataagaattttgcctccattaaatgttaataaaaatgaaataaatatagctttaaaaattatcaataaagtttgtgaaaggtataaaaattaat

SEQ ID NO: 246031 - DNA, 550 bp, Unknown
  Bacterial polypeptide expressing nucleotide sequence isolated from the Sargasso Sea
tatgactagcaaaatcatgcccacttacaacaggaagccggttacctttacacggggcgaaggcatctatttatatgattctgaaggtaagcagtatcttgatgcactctgtgggttagcagtcacaagcttaggtcattctcatccgctcatagcagagacagttagcaaacagtctgcaaaattaattcacacttccaatgcatttcatattgagagccaagaaaaactggcaaaaagattatgtcaactaactggaatggagaatgtatttttctgtaactcgggcgcagaatctgtagaagcagcaattaaaattgcaagaaaatatggtcatgataaggattataaaaatccaaaaattatagttatgtctaatagttttcatggaagaactatgggagcaatgagtgcaacatctagcacactctctcatgacgcatttggacctatcttagacggtctcatcagagtagaatttaataaaattgaagccataaagaatgttttaagcaatcatgatgacgtatctgcaattcttctagaacca

SEQ ID NO: 246032 - DNA, 874 bp, Unknown
  Bacterial polypeptide expressing nucleotide sequence isolated from the Sargasso Sea
ttaggaaatcgcgggagaaaagcagtgatacctgaaatcatgccaagctatggaagggccgacattgcctttgaacggggtgagggagctcatctattttcaacggatgggaagcgctacctcgactttgccacagggattgcggttaatgtacttggtcacaatcacccgcggcttgtagagacgctaactgaacaaggcggtaagctttggcatgtttccaatctttatcgagttccagagcaggaagagctagcgcgcaaattagttggtgcaagctttgccgataacgcctttttttgtaattcaggcgccgaagcggttgaggctagcataaaaattgtacgaaaataccaatcggaaaccggacaccctgagcggtatagaatcatttcatttgatagtagcttccatggcagaacgctctcaactattgctgccgctaaaaacgctgcacatgttgcagggtttggccctatgcctgatggtttcgatcaggtcccgtttgataatttgaatgagctccggagcgcaattacggaggagaccgcggggattatcgttgagcctattcagggggagggtggtatcaggccttcgaatgcggagtttttgagaggtttacgtgaagcttgcgatgagtttgggcttttgctcatctttgacgaggttcagacaggtataggccgcgcaggaaagctattcgcttacgagaattttggcgtagaaccagatgtcatgtcacttgcaaagggattaggcggcggttttcctgttggcgcctgtctcgcatcgggaaaagctgccgtcgggattacccccggaacccatggcagcacctttggcggtaatccactggcaatggctgtggcta

SEQ ID NO: 246033 - DNA, 804 bp, Unknown
  Bacterial polypeptide expressing nucleotide sequence isolated from the Sargasso Sea
ctcgccgatatttttattctattgggaagcctcaaaaaaatagaatactttgtataaaaaattcctttcatggtagaactattgcagcaatttatgctagtggttcaaagaaaatgactgagggattttatcccaaagttcctgggtttgaccatatagaatttaaaaatactaagccaagatttcctaatattagaaaaaaaataaaaaaaaatacagcagccataatgattgaaactgtaatgggagaaggaggaattaaagtaatccctgataaatgtcttaaatacttaagaaaattatgtaatgaaaaaaaaatattattaattttagacgaagttcaatgtggaattggaagaactggtaaattctttgcatttgaacatgctaatataaaaccagatataacccctatagcaaaaggtattggaggaggattccctattggtgcggtattaatgactaataaagtggcaaaatgcatgataccaggaacgcatggatcaacatttggtggaaatccattggctatgtcagtaggaaatgcagttttagatcaaatattaaaaaagaattttttaaaaaacgtttcaaaattatcaaaatattttttaaatgaacttaacaaaatcagaaatgaatttccaaaaataataaaagatatacgtggaaagggatttttaattggaattcaattacaatttgatcagtcaaagtttattaagtctctcgaaaaaaacaaacttttgacaataagagctgcagaaaatgttataagagttttacctcccactaaacgttaaa

SEQ ID NO: 246034 - DNA, 829 bp, Unknown
  Bacterial polypeptide expressing nucleotide sequence isolated from the Sargasso Sea
aaaacttttgctgattatgtaatgtttcaaaatagtggtgcagaagcgacagaggcagcaataaaagttgcaagaagatatttttactcaattggtaaacctaaaaaaaatagaattttatgtgttaaaaatagttttcatggaagaaccatagcagcaatttatgcaagtggttcaaaaaaaatgactgaaggttttggaccaaaggtaagtggctttgatcattttgaatttggcaatcattcctctttaaaaaaaaagatttcaaaaaatacagcagccataatgatagagacaataatgggagagggcggtataaaagtagtacctgattggtgtttaatagagttaagaaaaatttgtgacaaaaaaaatatattgttaattttagatgaagttcaatgtggaataggaagatcaggtgatttttttgcttttgaaaaatctaaagtaaaaccagatattgtaccaattgcaaaaggaattggaggtggatttccaataggtgctgttttaatgaataaaaaggttgcttcaggaatgattggaggaactcatggttctacttttggaggaaacccacttgctatgtctgttggtaataaagtgctggatattattcataacaaagagtttttagacaacgtaaaaaaaatttcaaaatattttttacttaatcttaattttatcaaggaaaagtatcctaacgttataaatgagatcagaggtaaaggtttattaattggaatacaacttaaagcagatcaaacaaaatttataaaaaaactaatggacaatagattattgactattagagctgctgaaaatg

SEQ ID NO: 246035 - DNA, 839 bp, Unknown
  Bacterial polypeptide expressing nucleotide sequence isolated from the Sargasso Sea
tctacgcatttcaattccagaaggtgaaaaacttgcaaaaaagctatgtaataaaacttttgctgattatgtaatgttccaaaatagcggaactgaggcaacagaggctgcggttaaagttgcgagaagatacttttattcaattggaaaaccaaataaaaacagaattttgtgtgttaagaattcatttcatggaagaacattggctgcaatttttgctagtggatcaaaaaaaatgacagaaggatttggccccaaaataccaggttttgaccattttaattttggaaatcactcctcactaaaaaaaaagataaataaaaacacagccgcaataatggttgaaacaatcatgggggaaggtgggattaaagtaatacctgattggtgtttgaaagaactaagacatttgtgtaacaaaaaaaatatattgttgattttagatgaagtacaatgtggcattgcaagatctggagatttttttgcatttgagaaatccaaagtaaaacctgacattgttccaattgctaagggaattgggggtggatttcctattggagcagttttaatgaataaaaaagttgcctctggaatgattgctggatctcatggatcaacttttggaggaaaccctttagctatgtctgttggtaatacagttatggatattgtaactaaaaaaagttttttaaataacgtaaaaagtctatctaaatatttcttagaaagcctcaataacattaaatctaaacatccaaaaactattaaagaaataagaggcaaaggtttattaattggtattcaactttataaagatccaacaaaatttattcaaaaac

SEQ ID NO: 246036 - DNA, 646 bp, Unknown
  Bacterial polypeptide expressing nucleotide sequence isolated from the Sargasso Sea
gacgaaatccaatgtggtatgggacgtacaggtaaatttttatgctatcagtgggaaaattcacctgactcagaacaaccagcagaaacgcctcaaaacggaaacaaaaagcctttgaatataaatgaatctaatctaatgccagacattctgacaatggctaaagcacttggaggaggtctcccatttggcgcaatgctctgtactgaggaagtggcacactcatttaaaccaggagaccatgggaccacctttggagggaaccctcttgttacagcagtagcagaagcttctttaaggaaaataaactcaccagaattgatgcatctagtacagaaaaaaggtaaattcataaggataaaactcgatttgttaaaccatgaagttagcatgtttaaaacgattagaggacgtgggatgatgcttggtgctgtattatcaaaagcatgggaagggaaagcaaatgcaattgtacaggcctgtcaggaatacggtgtgcttgttttaacagctggaccggatgttctgcgtttgttgccgcctctgaatattctagatgaagagcttgaaactggattgaatcgtatcggcaaagcactaaaaaaattacatgaagttgaattgtcttcttcgacacaaaaatgaa

SEQ ID NO: 246037 - DNA, 433 bp, Unknown
  Bacterial polypeptide expressing nucleotide sequence isolated from the Sargasso Sea
catggccgccgggctcgaccagataaccggccttgaagacccgatcgggcgcgaactggcccgctggagcaagaccgtcgcggtgatgctcgagccgatccagggcgaaggcggcgtgattccggccacgcgcgaattcatgcaggcgctgcgcgcgctgacgaagcaccacaacctgatgctgatcgtcgacgaggtgcaaagcggctgcggccgcgcgggcacgctgttcgcgtacgagctgtccggcatccagccggacgtcaggacgctcgcgaaagggatcggcggcggcgccccgctcggcgcgctgctgtcgaaagccgagttcgcggtgttcgaggccggcgaccagggcggcacgtacaacggcaacccgctgatgacggcggtcggctattcggtgatctcgcagctcgtcgcaccgggcttc

SEQ ID NO: 246038 - DNA, 622 bp, Unknown
  Bacterial polypeptide expressing nucleotide sequence isolated from the Sargasso Sea
aagagtgcctgacggttaccttctgggagtacgagcagcagccgatgaatttggcgctttggttattgcggacgaagtacaagcgggcattggccgcaccggacgtctattttcttatgaggatagtgagatcaagccagatattgttgcacttgcgaaaggcttggcgggaggattcccgatcggggcagtgattacgagcaaggtggttggtgatgcgatgacgccgggaacgcacggatcaacctttggtggtaatccgctggcaatggccgcggcacaggtcgttcttgaggtgttgagcgaggaggggtttctggcagatgtaagggcccgtgctgtccatcttgatgatgcgctgcagggtttgcagggacaattcccgacggcgattgctgaatgccgtggtcgtggctttttgcgcggtataagactggatgaaacaattgaccttgctgcctttgttaaaacattgcgagatgatcatctgttatgtgtgccggcggctgaaaatacacttcggcttttgcctccattaacgattagtaaagacgaaattgacctggcggttgctaagattgctaaggtgctaaatgacattcccaagcatgatagccaataa

SEQ ID NO: 246039 - DNA, 925 bp, Unknown
  Bacterial polypeptide expressing nucleotide sequence isolated from the Sargasso Sea
agatttcaaccaatacatgatgccgacatacaagccggcagaattcattccctcaaaagcaaaaggatccttgctttgggataaagaaaataaaaaatatatagactttgcctcagggattgccgtatcgagtcttgggcactgtcatcctactttaaataaagcactggctgatcaatcaaaaaaaatttggcacttatcaaacctattaaccaatgaaccagcacttagactggctaaaattttctgcaagcatacttttgctgaaaaagttttctttgcaaattctggcgctgaggctgttgaaggggcaataaagactgctcgaaaatatgcttacctcaatcatagcaaaagaaaaaatgagatagtttctttctctgatgcctttcacggacgcacaatgatggctattgctcttaatggatcagatagatttatcgaaggttttgggcccatgcctaaaggtatcaagcatcatccatttaatgatgaaaataagcttgaaaaagctattaccaagaaaactgcagctgtaatacttgagcttgttcaaggggaagcaggaatcattaaagcaaaaagaggctttgttcaaaaaattaaaagattatgcaaacaaaataaagcattgctaataattgatgaagtgcaatcaggggctggaagaacaggaacattatttgcctacgagcagtttgacattaagcctgacattttgtgctgtgcaaaaggcataggtggtggaattcctattggtgcaatacttacctctacacaaattgctgagtgcatgcaacttggctctcatggatcaacctttgggggtaacccacttgcctgcgctgtagctgaacaagtcatgatgatgttatccaaaaaatcgctgctgaatggagttagaaaaaggaaaaactatttttaa

SEQ ID NO: 246040 - DNA, 616 bp, Unknown
  Bacterial polypeptide expressing nucleotide sequence isolated from the Sargasso Sea
gggaggtggaattaaaaaaataccagattggtgcttaagaggattaaaaaaactatgtaacaaaaaaaaaattttattaatattagatgaagtccaatgtggtataggtagaacaggagatttctttgcatttgaaagctccaaagtgaagccggacatagtacccattgcaaaagggcttggtggtggatttcctataggggcagttttaatgaataaaaaagttgcttctggtatgactgcaggaacacatggatcaacttttgggggcaatccacttgcaatgaaagtaggtattacagctttagatattatatcaaaaaaaagctttttaaataaagttaaatcaaactctaaatacttccatattcatttaataaaaattaaagaaaaattcccaaatattattaaagaggtaagaggtcaaggttttctaattggcttacaactttataaagaccaaacaaaatttataaaacaacttatggataataaattattaactattaaagctgctgaaaatgtagttagaattttgcctcctttaaatgtaaaaaaaactgaaatcgataaagctattaaaataataaagaaagtttgttcaaaatataactaa

SEQ ID NO: 246041 - DNA, 580 bp, Unknown
  Bacterial polypeptide expressing nucleotide sequence isolated from the Sargasso Sea
aaagaattaagagcattatgtaataagaaaaaaatattattaatacttgacgaagttcagtgtggaataggaagatctggtgatttctttgcttttgaaaaatcaaaagtaaaacctgacattgtgccaattgcaaaaggaataggtggaggatttcctatcggagcagttttaatgaataaaaaagttgcttcagggatgacaccaggtacccatggatcaacatttgggggaaatccattagcgatggctgttggaaataaagtaatggatattatatcaaataagaaatttttaaataatgtaaaaagtctatcaaaatattttttatttagattaaataaagttcaggaaaaatatcccaatttaattaaacaaataagaggaagaggttttttgattgggatacagttatataaagatcaaaccgtatttattaaaaaattgatggataataagttattgacaattcgagcagcagaaaatgttgttcgtattttacctccactaaatgttaaaaaaaatgaaatagatttagcgataaaaattattgaaaaggtatgttcacagataaaataat

SEQ ID NO: 246042 - DNA, 814 bp, Unknown
  Bacterial polypeptide expressing nucleotide sequence isolated from the Sargasso Sea
agaaaaaatagagttctatgtataaataatagtttccatggaagaactatcgcagctatttttgctagtaacagtaaaaaagctattgaaggttttaaacctaaagtagatggttttgatcactttaactttggtgatcacaaaggtttagaaaaagctataaccagcagaacagcagctatcatggttgagacaatcatgggagaagggggcattaaagttattccagatttttgtcttaaaggcttaagaaaattatgtaataagaaaaaaattttattaattcttgatgaagttcaatgcgggattggaagaagtggtaaattttttgcttttgaatatgcaaaaatcaaacctgatatcgtcccaatagcaaaaggtatcggtggtggctttccaataggtgcagttttagttaataaaaaagtagcatcaggcatgaagccagggactcacggatcaacatttggaggaaacccattagcaatgagcgctggaaacgcagttatggatgtgatgtttaaaaaaggttttttaaataatgtaagtaaaaatggaaaatattttattaatcaacttgataaaattaaaaataagtatcccaaagttataaaagaagtaagaggtaaaggactgctcattggactttgtcttaaagtaaatcaagctaaatttattcaaaaacttttagataataatttattaacagtaagagctgctgaaaatgttgtcagacttttgcctcctttgaatgtaacaaagagcgaaataaacttaggtttaaaaataatagagaaagttgcaaaaaatttta

SEQ ID NO: 246043 - DNA, 868 bp, Unknown
  Bacterial polypeptide expressing nucleotide sequence isolated from the Sargasso Sea
gattttgttcaaggaattgctgttaattctttaggtcatgcaaacccaaacttggtaaaagcaattaataaacaatcaaaaaaactttggcatgtttctaactctttcataattcctgagggagaggaattagccaaaaaattaacaaatagaacttttgcagatgctgttatttttcaaaatagtggggcggaagctacagaagctgcgataaaagttgcaagaagatatttttattctataggtaaaccaaaaaaaaatagaattctttgtattaaaaattcttttcatggaagaactattgcggcaataaatgcaagtggatctaaaaaaatgatagaggggtttggaccaaaagtggacggatttgaccattttaaatttgggaaccacaaagaattaaaaagaaagatcacaagtaaaaccgcagctataatgattgaaccaataatgggtgaagggggtattaaagtaatacctgcttggtgccttaaggaattgagacagatttgtaataaaaaaaaaattcttcttattttggacgaagttcagtgcggaattgggagatcaggtaaatttttttcatatgaatatgcaaacataaagccagatatagtcccaattgcaaaaggaattggaggtggttttccaataggtgcagtacttatgacaaaaaaagtttctaaagctatggttccaggtacacatggatctacttttggtggtaaccccttggcaatgtctgttggcaatgcggtaatggatgaagtttttaaaagaggctttctttcaaaagttaaaagtaattcaaaatattttatttcagaattaaataaaattaaaaataaatttccaaaatattattaaa

SEQ ID NO: 246044 - DNA, 783 bp, Unknown
  Bacterial polypeptide expressing nucleotide sequence isolated from the Sargasso Sea
aatgagttttttagccaaaaattataaaagaagaaacttatctttcaataaaggtaaaggatcatttttatatacaaatagaggtgtaaagtttttagattttgtacaaggaatagctgttaattctttaggtcatacaaatccaaacttagtaaaagcaattaataaacaatcaaaaaaactttggcatgtttctaactcttttataattcctgaaggagaggaattggcaaaaaaattaacaaaaaaaacttttgcagatgcagtaatttttcaaaatagtggagcggaagctaccgaagctgctataaaagttgctaggagatatttttattcaataggtaaacctgaaaaaaatagaattttatgcataagaaactcctttcatggaagaactattgcaacaataaatgctagtggatcaaaaaaaatgattgaaggatttggcccaaaagtggctgggtttgaccattttaaatttggcaaccataaggaacttaaaagaaagatttcaaacaaaactgctgcaataatgattgaaccaattatgggcgaaggtggaattaaggtaatacctacttggtgtttaaaagaattgagacagatttgtaataaaaataaaattcttcttattttagatgaagttcaatgtggaattgggagatctggaaagtttttttcatatgagtatgcaaacataaagccagatatagttccaattgcaaaaggaattggaggtggatttccaataggtgcagtgttaatgacaaaaaaagttctaag

SEQ ID NO: 246045 - DNA, 805 bp, Unknown
  Bacterial polypeptide expressing nucleotide sequence isolated from the Sargasso Sea
tatgaataaacaggccaagaaagtttggcatgtatcaaatgcatttataattcctgaaggagaaagacttgcaaaaagacttacccagaaaactttcgcaggtaacattttgtttcaaaattcaggcacagaagcaacggaagcagcaataaaggtagcgagaagatatttttattcaataggaaaaccaaataaaaatagaattttatgtgtgaaaaactcatttcatggaagaactattgctgcaatttttgctagtggatcaaaaaaaatgacagagggctttggtccaaaagttggaggttttgaccactttagatttggagaccatcaatctctaaaaaaagctattacaaataaaacagcagcaattatggtggaacctataatgggagaaggtggtattaaagttattccagactggtgtttaaaagaactaagaaaaatttgtaataaaaaaaaaatacttttaatattagacgaagtgcaatgtggtataggtagaacaggaaatttttttgcatttgaaaattctaaagttaaacctgatattgttcctatcgcaaaaggaataggtggcgggtttccaattggtgcagttttaatgacaaaaaaagttgcatcttcaatgacaccagggagtcacggatcaacttttggaggaaatccattagcaatgagtgttggaaatgcagttttggatcaaatttttaaaaaaggatttcttaataatttaaaaaaagtatcaaaatatttttttaaggaattagaaaaacttaaaataaattatccaaaatattattaa

SEQ ID NO: 246046 - DNA, 688 bp, Unknown
  Bacterial polypeptide expressing nucleotide sequence isolated from the Sargasso Sea
aatgagtgcattagccaaaaattataatagaagaaaaattgctttcagtagaggaaaaggaagttttttatactcgagcaaaggtcaaaaatatttagattttgtccaaggaatagctgtaaattctcttggccatgcaaacagctacttaacaaaagctataaataaacaatcaaaaaaagtttggcatgtttcgaatgcttttataattccagaaggtgaaaaattagctcaaagattaaaacaaaaaacctttgctgattatgttatttttcaaaatagcggcgctgaagcaaccgagctagcaataaaggcagctagaagatatttttataaaatcggtaaaccccaaaaaaatagaatactttgtattaaaaattcatttcatggcagaacgcttgcaaccatatttgcaagtggatcaaaaaaaatgaccgagggatttgagccaaaagttcctggttttgatcatttcaatttcggtgaccacaaagcccttaaaaaatctattacaaaaaagactgcagcaataatggtagaaactgcaatgggggagtcaggaataaaagttattccagactggtgtttaagagaactaagaaaactttgtaataaaaagaaaattttattaattttagacgaagtccagtgtggcatcggtagatctgggaaaattttttgcctttga

SEQ ID NO: 246047 - DNA, 805 bp, Unknown
  Bacterial polypeptide expressing nucleotide sequence isolated from the Sargasso Sea
agattttgtacagggtattgctgtaaattccttaggacactcaaataaaaaactaataaaatcaattaacaaacaatcaaaaaaattatggcatgtatcaaatgcttttataattcctgaaggtgaaaaattggcaaatagattggtaaaaaaaacttttgctgactcggttatctttcaaaatagcggagcagaagcaacagaggcagcaataaaagtagcgagaagatattttttttcaattggaaagccaaataaaaataggattatttgtataaaaaattcttttcacggaagaacattagctgcaatttatgcaagtggttcaaaaaaaatgacacaagggtttgggccgaaagtgcctggttttgaccattttgaatttggtgaccataaaaaattaaaaaaattaataaacaaaaatactgcagcaataatgattgaaactattatgggtgaaggtggcattaaagtgattccaaattggtgtataaaagaaattagaaaactttgtaataaacatcaaatacttttaattcttgatgaagtgcaatgtggcataggtagaacgggcaaattttttgcttttgaacacgctggggtaaaacctgatatagttccaattgcaaagggaattggtggtggatttccaatcggagctgttttaatgacaaaaaaaattgcaaaagctatggtgcctggcactcatggttctacttttggaggaaatcctttggcaatgtctgttggtaatgcagttttagatcacataaataataatttattaaaaaatgtaaatttaatg

SEQ ID NO: 246048 - DNA, 681 bp, Unknown
  Bacterial polypeptide expressing nucleotide sequence isolated from the Sargasso Sea
gttatcccggttaaaggtaaaggctcccgtgtttgggatcagcaaggtcgtgaatatgttgacttcgcaggcggcattgcagtgagcagccttgggcattgccatccggctcttgtcggtgcattaacgtctcaggccggcaagctgtggcatttaagtaacgtcatgacgaacgagccagcgctgcgcctggcaaaaaagctggttgatgcaacgtttgctgaaaaggtctatttcgctaactcgggtgcagaggccaatgaagctgcatttaaactggcccggcgttgggcgctggaacaatatagtgcagaaaaagaccagatcatttcgtttggtaaaagtttccatggtcgtacgtttttcaccgtcacagtcggcgggcaagccgcgtattcagacggttttggccctaaacccggtgctgtgctacatgcagaatttaataatctggatagtgtcaaggcgctgatatctgacaaaacctgtgccgtggtattagaacctattcagggagaaggcggcattatccctgcgacaaaagaatttattgaaggtgtgcgtgcactttgtgaccaatacaaggcgctgctgataatggatgaggttcagacgggcgttggccgtaccggcaagctgtatgcgtatatgcattatggcgtaacgccggatattctgacg

SEQ ID NO: 246049 - DNA, 569 bp, Unknown
  Bacterial polypeptide expressing nucleotide sequence isolated from the Sargasso Sea
aaaactttgtaataaaaaaaagatattattgatattagatgaagttcagtctggggtagggagaactggaaaatttttagcttttgaatatgctaaaataaaacctgatattgtgcctatcgcaaaaggtattggaggaggttttccaattggagcagtcttagtaaataaaaaagttgcttctggaatgaaacctggcacccacggatctactttcggaggcaatcctttagctatgtgtgtcgggaacgcagtaattgatgtactatttaagaaaggttttttaaataacgtaagaaaaaatggaaaatactttcagcaaaaattaataaaacttaaagaaagatatcctaaaattataaaagaagtaagaggtcaaggtttattgattgggttagcgctttataagaatcaaacagatttcataaataaattattgaagcaaaaattactcactgttaaagcatcagaaaatgttgtcagacttttgcctcctttaaacgttacaaagaaggaaattaatttagctttaaaaatccttaataatgtatgtgagaattataaatgaa

SEQ ID NO: 246050 - DNA, 409 bp, Unknown
  Bacterial polypeptide expressing nucleotide sequence isolated from the Sargasso Sea
atgcccacatattctccgacaattgtattagaaaaaggagttggtcttaaggtttgggataaggatggaaaagaatatttagattttacatctggcatagccgtaactaatttaggacatagtcatcccaatataactaaatccatatcaaaacaggctgataaaataattcattcatcaaatttattttttaatgaaatacagccttttttagcagaagccctggttgaatgttcggagctcgataatggaaaatgttttttttgtaattccggagctgaggctaatgaaggaatgattaagctcgctagaatgtgggggcataatcaaaatcgatatgaaattatcacgatgaagaaatctttccacggtcgaacacttgctaccctcacagcaacaggtcaggata

SEQ ID NO: 246051 - DNA, 841 bp, Unknown
  Bacterial polypeptide expressing nucleotide sequence isolated from the Sargasso Sea
atgaaaaactataatcctttaccagttagtttcgttaaaggcgaaggctcatggctgatagatgatcgtggggaacgttatttagatgcattgggaggtatagcggtttgcgcgttggggcattcacacccctctttgagcgaggtaatctcagagcaatcggcaagtttaatgcatacctcaaatatttatcgaattgcatctcaagaggagttagcaaaaaaacttgttattcattctggtatgagcaatgtatttttttgtaattctggtgccgaagcaaatgaagcagccataaaattagcacgtctttatgcaagtaaaagaaaaatatctaatccgcatatagtagttatggaaaatagctttcatggtagaactatggcaactctaagcgcaactggcagtaaaagagtgcatcagggttttgctcccctagtgcctggatttaagcacataccctataataatatcgaagttttaaaatccactgttgatgcagaaaaaaatattgttgccgtgatgatcgaaccgattcaaggagagggaggtattattgtccctgataagaattatttaaaaaagataagaacgatttgtgatgaaaataatcttttaatgattgttgatgaggtacagacaggaatgtgtcgtacgggcaaatggtttgcatttcagcatgaaaatattttgccagacataataacaattgctaaagcattaggaaacggtgttccaattggggcttgtttagcaagaggtgaatcctcaaaactatttcaaccaggcagtcatggctcaactttaggcggcggcccatttgtttcgagtattgcattga

SEQ ID NO: 246052 - DNA, 610 bp, Unknown
  Bacterial polypeptide expressing nucleotide sequence isolated from the Sargasso Sea
cattaaagtaattccagactggtgtttaaaagatttgagaaaactttgtgataagaaaaaaatattattgattttagatgaagtgcaatgtggaatttcaagatcaggaaattttttagcctttgaaaaatctaagataaaacctgacatagtaccaattgcaaagggaattggaggtggatttcctattggggcagttttaatgaataaaaaagtggctaaaagtatgattcccggaacacatggttcaacttttggagggaatccattagccatggcttgtggaaatacagtcatggatatagtaacaagcaaaaaatttttgaagaatgtaaacactttgtcaaaatattttctatcaaacttaaatcagataaaggaaaaatttccaaaaatcatcaaggaaataagaggcagaggtttattaattggtatccagttacataacgatcaagcaaaatttataaaaaaagtaatggataaaaaattattgacaattcgagcagcagagaatgttgttaggatcttaccacctctcaatgtaaaaaaatctgaaattaattatgcaattaaaattataaatcaagtttgtaaagagttggaaaaatga

SEQ ID NO: 246053 - DNA, 678 bp, Unknown
  Bacterial polypeptide expressing nucleotide sequence isolated from the Sargasso Sea
gatgagctcaacactaaacacttataatagaaaaaaaatttcctttaaaaaaggtaagggttgttatttgtattcaacaaatggaaaaaaatacttagattttgttcaaggtatcgccgtaaattctcttggccatgctaacgatcatcttataagagctataaacaaacaatcaaaaaaagtttggcatgtatccaacgcttttataattccagagcaagaaaaattagctaaaagattaacgcaaaaaacttttgcagactatgttgcctttcaaaattcaggtgctgaagcaacagaggtagcaattaaggttgcaagaagatacttctattcaaaaggccaacctaagaaaaatagaatactttgtttaaataatagttttcacggaagaaccttagcaactatttttgcgagtaataataaaaaatctactgaaggattttttccgaaagttgaaggatttgatcattttaattttggaaatcacaaagaattagaaaaaaaaataaccagtaaaactgcagctataatggttgaaacaattatgggtgagggtggaattaaagtaattcctgacttttgtcttagaggtttaagaaaaatttgtaatagaaaaaaaattcttcttattcttgatgaggttcagtgtggaatcggaagaacaggtaaattttt

SEQ ID NO: 246054 - DNA, 647 bp, Unknown
  Bacterial polypeptide expressing nucleotide sequence isolated from the Sargasso Sea
agcagcgatcatggttgaaaccattatgggtgagggtggcattaaagtaattccagattggtgcttaaaagaattaagaaaattgtgcaataagaaaaaaattttgttaattttggatgaagtgcaatgtggaatagcacggtctggagatttttttgcttttgaaaaatctgaagtaaaaccagatatagtaccaattgcaaaaggtattggtggtggatttcctattggcgctgttttaatgaataaaaaagttgctaaagttatgacaccaggtactcatggttctacttttggtggtaaccccttagctatggctgttggaaatactgtaatggatatagtttctaataagaaatttcttaacaatgttaaaaaatcttcaaaatatttttttacaaatttgaacaaattaaaggaaaaatacccaagtataatcaaagaaataagaggaaaaggtttattgattggagtgcagcttcatacaaatcaaacaaagtttattaaaaaattaatggataatagattactaaccatccgtgcggcagaaaatgttgttcgaattttacctcccttgaacgtaaaaaaaaacgaaatagatttagcgataaaaattattgaaaaggtctgttcacagataaaataat

SEQ ID NO: 246055 - DNA, 760 bp, Unknown
  Bacterial polypeptide expressing nucleotide sequence isolated from the Sargasso Sea
tatgcaagtgggttcaaaaaaaatgacagaaggttttggaccaaaggtaaatggatttgatcattttgaatttggtaatcatacttctttaaaaaaaaagatttcaaaaaatacagcagctataatgatagagacaattatgggagagggcggaataaaagtagtacctgattggtgtttaattgagctaagaaaaatttgtgaccaaaaaaatatattgttaattttagatgaagttcaatgtggaataggaagatcaggtgacttttttgcttttgaaaaatctaaagtaaaaccagatattgtgccgattgcaaaaggaattggaggcggatttccaattggtgcagttttaatgaataaaaaagttgcttcaggaatgatagcaggaactcatggctctacttttggaggaaacccacttgcaatgtctgttggtaatacagtattggacatcattcataataaaaagtttttaggcaatgtaaaaagaatttcaaaatattttttacttaatcttaattttatcaagaaaaagtatcctaacgttataaatgagatcaggggtaaaggtttattaattggaatacaacttaaggtagatcaaacaaaatttataaaaaaactaatggataatagattattgactattagagctgctgaaaatgtagttagagttttgccaccgctaaatgtaaaaaaaagtgaaataaatcaagctttaaagataatcaataaagtttgttgggaaatgaattaa

SEQ ID NO: 246056 - DNA, 976 bp, Unknown
  Bacterial polypeptide expressing nucleotide sequence isolated from the Sargasso Sea
agaaaatttctttcaaagaggaaagggaagttttctgtactcaaataatggaaaaaaatatcttgatttcgttcaaggtattgcagtcaattccttaggtcatgctaatccatatttaattaaagctatgcataaacaggcaaataaggtttggcacgtatcaaatgcatttataattccagaaggagaaaggcttgcaaaaagacttacacagaaaacttttgcagattacgttttatttcaaaactctggcactgaagcaacagaagcagcaataaaggttgcgagaagatatttttattcaataggaaaaccaaataaaaatagaattttatgtgttaaaaattcatttcatggaagaaccattgctgcaatttttgcaagtggatcaaaaaaaatgacagagggttttggtccaaaagttgaaggcttcgaccattttaaatttggagatcataaatctcttaaaaaagctatttcaaataaaacagcagcaattatggtggagcctataatgggagaaggtggtattaaagttattccagactggtgcttgaaagaactaagaaaaatttgtaataagaaaaaaatacttttaatattagacgaagtgcaatgtggcataggaagaacaggaaacttctttgcatttgaaaaatctaaagttaaacctgatattgttcctatcgcaaaaggaataggtggtggatttccaattggtgcagttttaatgtcaaaaaaagttgcatcttcaatgatcccagggagtcacggctcaacttttggaggaaatcctttggcaatgagcgttggaaatgctgttttggaccaaatttttaaaaaaggattttttaataatttaaaaaaaatatcaaaatatttttataaagaattagataaacttaaaaatgattatccaaatataattaaagaaattagaggtgaaggtttattaattggagtacaattacatttt

SEQ ID NO: 246057 - DNA, 586 bp, Unknown
  Bacterial polypeptide expressing nucleotide sequence isolated from the Sargasso Sea
atgacagtcaatcgcgaattatttgatcacgtaatggttcctaactacgcaccttcaagcgtaattcctgttcgaggcgaaggctctcgcgtatgggatcaacaaggcaaagagtttatcgactttgctggtggtattgctgttaactgtcttggccactgtcaccctgctttagtaggtgcattaaaagaacagggcgaaaaaatttggcatttatcaaatgttatgactaatgagccggcgcttcgcctcgctaaaaaaatggttgatgccacttttggtgaaaaagtttactttgctaactctggcgcagaagcaaacgaagccgcacttaaattagcgcgtcgttttgcacttgataagtttggcccagaaaaatcacaaattattgcatttaacaaaggtttccacggtcgtacattctttactgtaactgttggtggccaagcggcatactcagatggttttggtcctaagccgggtgacatcgtacattgtgattacaacgatctagccgcgtttgaagcgctaattagcgaccaaacatgtgccgtaatgatggaaccactgcaaggtgagggcggta

SEQ ID NO: 246058 - DNA, 916 bp, Unknown
  Bacterial polypeptide expressing nucleotide sequence isolated from the Sargasso Sea
aaaactctcattcatacatcgaatgcatttcaaatagatacgcaaaaaaatctagctactagattgtgcaagttatcaggtatgacaaacgcattcttctgtaattcaggagcagaatctgtagaaacagcaattaaaattgcaaggaagtatggtaatgatcacaatatttctacgccaaagattttagtaatggaaaacagttttcatggcagaacacttgctgctttatctgctacaagcagcaaaaaatcacatgagggatttacaccccttgttgagggttttgtaagagctccttttgattctgtagagaaaatagagttagctctccacaatcatgaagatatcgtagcgctattaaccgagccaattcagggagagggtggtataaaaattccaaaaccaggatacttaaagaaattgagagatatatgtaatgataaaaacttattatttatggtagatgaagttcaatcgggtttttgtagaacagggaagtggtttggatatcagcacgaccacatcactccggatgttgtaatggttgcaaaggctcttggaaatggagttcctattggagcatgtcttgcttctggaaaagcttcaaatcttcttaaaccaggctctcatggctcaacatttggaggaaattatttgtcaacatcggtaggacttcaagttttggatattatgagagatatgaacctttgtagaaatgccagagaaatgggagactatttttcaaaaaaactcaacgagaggcttgcgaataaaaaaagagtgaaagaaattagatcaaaaggactaatgataggaattgagcttgatgaggaatgcacagatattgttataatggctttggataatgggttagtattaaatgttacaaaagatagaattataagaatgtgcc

SEQ ID NO: 246059 - DNA, 871 bp, Unknown
  Bacterial polypeptide expressing nucleotide sequence isolated from the Sargasso Sea
atgaaggagctttcaaaattagcaagaaaatggggtaaaaagaaattaaatggtgcttttgagataataacaacactaaattcctttcatggaagaacccaagctatgatggcagctacaggtcagcctcattaccaagataattggagacctttgatgccaggatttataaatgttgattacaacgatattgataaaatcaaagaagcttataatgaaaatgtctgtgctgtaatgattgaacctttacaaggtgaaggaggggtaaatgttcccaatgatggatacctcaaagaagttcaagacttttgtaagtcaaaaaatattttatttatcctagatgaagttcaaacagggatgggtcgtttaggaacactttttggttatcagagatttgaaggagttgaacctgatgttatgactcttgctaaagctctcggttccggagctcctcttggagctttttgttctaaggaattttgctcagttttagagccaggagaccatggttctacctttggtggaaatgctttaactacagcagcaggagctgctgcagcgaaatatatggttgaaaataatattccagaattagcattatcttcaggtgattatatgaaagaaaaattatctctattgaaagaagacttctctttcataactgaagttagaggaatgggattacttataggattagaaatgaacgaggattattcctcacaaatagtaggcgagtctctagaaaaaggattactaataaatgcagttagacctaatatgataaggtttatgccccctttgaacgtgtcaaaagacgaaatagatcaagctattgaaataataagatcaattttagaaggaattaagtaat

SEQ ID NO: 246060 - DNA, 838 bp, Unknown
  Bacterial polypeptide expressing nucleotide sequence isolated from the Sargasso Sea
tgctgaagctacagaggcagcaataaaagttgcaagaaaatatttttatactattggaaaaccaaataaaaatagaattttatgtattaaaaattcttttcacggcagaacaattgctgcaatttttgcaagtggatcaaaaaaaatgacagagggatatggcccaaaagtttctggatttgatcacattaattttaaagatacaaaaccaagatttccaaacttaagaagcaaaattaagaaaaatacagctgcaataatggttgagacaatattgggagagggtggcatcaaacaaatacccgataaatgtcttaagtatttaagaaaaatttgtgataaaaaaaaaatattattaattttagatgaagtgcagtgtggagtcggtcgtagtggtaatttttttgcattcgagaaatcaaaagtgaagccagatattgttccaatagcaaaaggtattgggggtggtttccccataggtgcagttttaatgaataaaaaagttgctgttggaatgactcctggttctcatggctcaacttttggaggtaatccattagcaatggctataggaaatacagttatagatatagtttcgaataaaaaatttttaaacaatgttcaaaaatcctcaaaatatttttttttcaagttaaattatttaaagaaaaaatatcctacaatcattaaagaaataagaggaaaaggtttactgattggaataaaactttataaagaccaaggaaaatttatccagaaattaatggataaaaaattacttactattcgtgctgcagaaaatgttgttcgtattttacctccattgaatgtaaaaaaa

SEQ ID NO: 246061 - DNA, 829 bp, Unknown
  Bacterial polypeptide expressing nucleotide sequence isolated from the Sargasso Sea
taataaaacatttgctgattatacaatgtttcaaaatagtggaacagaggcaactgaagcagcgattaaagttgctagaagatattttttttcaattggaaaaccaaaaaaaaatagaatcttatgtataaaaaattcctttcatggaagaacattggctgcaatttatgctagtggatcaaaaaaaatgacagagggatttttaccaaaagtaggaggttttgatcactttaaatttggggatcataagtcactaaagaaaaaaattactagaaatactgcagctattatggttgaaactataatgggagagggtggtattaaagtaatacctgattggtgcttaagagaattaagaaaaatatgtaataaaaaaaatatattacttattttagatgaggtgcaatgtggaatttcaagaacaggagacttttttgcatttgaaaaatcgaaagtaaaaccagatattgtgcctatagctaagggtattggaggaggttttcctattggagcagttttgatgaataaaaaagttgcatcaggaatgacaccaggaactcatggctccacatttggtggtaatccgctagccatggctgttggaaatacagtgattgatattgtttcaagtaaaaaatttttaaaaaatgttaaaaatgtttcaaaatactttttattaaaacttaataaaattaaagatgaataccctaatttaattaaagcaataagaggcagaggtttattgattggaatacaactacatactgatcaagcaaaatttataaaaaagcttatggacaataaattattaactataagagcagcagaa

SEQ ID NO: 246062 - DNA, 814 bp, Unknown
  Bacterial polypeptide expressing nucleotide sequence isolated from the Sargasso Sea
aacggaaagaaatatttagatttcgttcaagggattgctgtaaactgtcttggccatgctaataatcatttaattaaatcaataaataaacaatcaaaaaaattatggcatgtttcaaacgtattcactattcctgagcaagagagattagcaaaaagattagcacaaaaaacatttgcggattacgtaacttttcaaaattctggtgctgaggcaacagaggcagctattaaatttgctagaagatatttttattcaaaaggtcagccgagaaaaaatagagtcctttgcattaataacagtttccatggaagaactatcgcagctatatttgcaagcaatagtaaaaaagctattgaaggttttaaacctaaagtagatggttttgatcatttcaacttcggtgatcataaaggtttagaaaaagcaataactagcaggacagctgctatcatggttgagacaataatgggggaaggaggcattaaagttattccagatttttgtcttaaaggcttaagaaaattatgtaataagaaaaagattttattaattcttgatgaagttcaatgcggtattggaagaagtggtaaatttttcgcttttgaatatgcaaaaattaaaccagatattgttccaatagcaaaagggattggtggtggctttccaataggtgcagttttagttaataaaaaagtagcctcaggtatgaagccaggaacccatggatcaacatttggtggaaaccctttagcaatgagcgctggaaacgcagtaatggatgtgatgtttaagaaaaggtttcttaaataat

SEQ ID NO: 246063 - DNA, 964 bp, Unknown
  Bacterial polypeptide expressing nucleotide sequence isolated from the Sargasso Sea
atgagtgctattttacaaacatataacagaaaaaaaatatcttttaaaagaggtaaaggttcttatctttattcaaataatggaaaaaaatatttggattttgttcaaggaattgcggttaatagtttgggtcatagccacccacacttaatcaaagctataaattctcaatcaaaaaaactttggcatgtttcaaatgcatttaatattccggaacaggagaaacttgctaaaaggttaacccaaaaaacatttgcaaattttgttgcctttcaaaattcaggagcagaagcgaccgagctagcaattaaaatagcgagaaaatattttcattctaaaggaaaaccaaacaaaaatagaatactttgcataaataacagttttcatggaagaactttggctacaatttttgcaagtaatagtaaaaagatgacggaaggttttggtccaaaagttagtggcttcgatcactttgcatttggcaatcatagagatttagaaaaaaaaattacaaaaaaaactgcagcagtattggttgaaacaataatgggagaaggtggaatcaaagtaattccagatttttgcttaaaaggtttaagaaaactttgcaataagaaaaaaatacttttaattttagatgaggtacaatgtggaataggtagaactggtaaattttttgcattcgaatatgcaaagatcaagccagatattgtaccgattgcaaagggtatcggtggaggtttcccgataggagcgtgcctggtaaataaaaaggtcgcttcaactatgaaaccaggttcacatggaactacgtttggaggaaatcctctagcaatgagtgttggaaatgctgtattggacgttatttttaaaaaaaattttttaaaaaatgttagaaatgtaagcaattatttcaaaacaaaattaaacattattcattacgaaaatcaaaaaataataaaag

SEQ ID NO: 246064 - DNA, 1219 bp, Unknown
  Bacterial polypeptide expressing nucleotide sequence isolated from the Sargasso Sea
atgtcagagttgttggcagtgacacgtgaagtgtttgatgaagtgatggttcccaactatgcgcccgccaagatcatcccggtgcgtggtgaagggtcacgtgtctgggatcaggaaggccgtgagtatgtggatttcgccggcgggatcgccgtcaatggcctgggccattgccatcccaagctggtcgaggccctgaaaacccagggcgagaagctgtggcacctctccaacgtgatgaccaacgagccggccctgcgcctggccaagaagctggtcgccgcgaccttcgccgacaaggtctatttctgcaactccggtgccgaagccaacgaagccgccctcaagctggcccgtcgctacgccatcgagaagttcggtgcccacaagacccagatcatcgccttccaccagggcttccacggtcgtaccttctttaccgtcagcgtcggcggccaggctgcctactccgatggtttcggtcccaagcccgcggacatcacacacgtggcttacaacgatctggcggagctggctgccgtcatctccgacaatacctgcgccgtggtgatggagccgctgcagggcgagggcggcatcattcgtcccaccgacgagtttgccaaaggggtgcgcgagctgtgcgaccagcacaacgccctgctgatctatgacgaagtgcaatccggcgtcggtcgtaccggcgatctgtttgcctacatgggtctgggcgtcacgccggatatcctcaccagcgccaaggcactgggcggcggcttccccatcggcgccatgctgaccaccaccgaaatagcctcccacctgaaagtgggtactcacggctccacctacggcggcaacccgctggcctgcgcggtggcagaggcagtgatcgacgtggtcaacaccccggaagtgctcaatggcatcaagcagcgcgaacagctgttccgcgaagggatcgaggccattaacgccaagtaccactgcttcagtgaagtgcgcggcaagggtctgctgctgggcgccgtgcttaacgacgactacaagggccgctcccgcgacttcctgctggcctccatcgaccagggtctgatggcgctggtcgccggcaccaacgtggtgcgttttgcgccgtccctggttattccggaagcggacatcaaggaagggctggtacggttcgaaaaagcggttgcccaggtggttaacgcctgat

SEQ ID NO: 246065 - DNA, 781 bp, Unknown
  Bacterial polypeptide expressing nucleotide sequence isolated from the Sargasso Sea
atgagttatttaaccaataattataatagaaaaaaaatttcttttgtgcgaggcaagggcagttatctttttacctcatctggcactaaatatttggattttgtacaaggaattgcagttaactctctaggccacgctcatccgaaattaataaaaataattaacaatcaatcaaaaaaactttggcacgtatctaatgcttttgaaattccagagggagaattgttagcaaaaaaattagtaaagaaaacttttgctgattatgttatgtttcaaaatagcggcacagaggcgaccgaggctgcaattaaagtagccagaagatacttttactcgataggaaaaccaactaaaaatagaatactttgtgttaaaaattcctttcatggaagaactctagcggctattttcgcaagtggatcaaaaaagatgacagagggctttggtcccaagataagtggatttgatcattttaattttggagatcatagatctttgaaaaaaaaaataaataagaacactgctgcaataatgatagaaactattttaggagagggaggcataaaagtaattcctaattggtgtattagagaattaagaaaattgtgtaatcagaagaagattttgctcattttagatgaagttcaatgcggtgttggtcgttcaggtgatttttttgcttttgatagttcaaatgtgaagccagacattgttccaatagctaaaggattaggagggggttttccaataggtgctgtgttaatgaataaaaaaggttgca

SEQ ID NO: 246066 - DNA, 1045 bp, Unknown
  Bacterial polypeptide expressing nucleotide sequence isolated from the Sargasso Sea
ggcattaggccattcacatccgaaattagttaaaacaataaatactcaatcaaaaaaattatggcatgtttcaaatgcttttcaaatcccagagggagaaaagttagccaaaaagttgtgccaaaagacttttgctgattatgttatgtttcaaaattcaggagcagaagctaccgaagcagccataaaagttgctagaagatatttttattctattggaaaaccaaataaaaatagagttttatgtattaaaaactcttttcatggtagaacaattgcagctatttttgcaagtggatcaaaaaaaatgacagaaggttttggacccaaagttcctggatttgatcattttgtttttggaaatcacaaatctttaaaaaaaaagattaccaaaaatacagcagctattatggtcgaaccaattatgggggaaggtggaataagagtaatacctgatttttgtcttaaagaattaagaaaactgtgcaacaaaaaaaaaattttattgatagtggatgaggtgcaaacaggagtttcacgttcaggtgatttttttgctttcgaaaaatctaaaattttacccgacatagtcccgattgctaagggtttagctggtggatttcctgttggagccgttttgatgaataaaaaagttgccgctggaatgactccaggcacacacggatcaacttttggaggtaatccgctagtttgcagtgtagctaattctgtcatggatatagtttcaactaagcaatttttaaataatgtaaaaaaatcctctaaatattttctttccaatttaaataaacttaaagaaaagtaccctaaaattattaaagaaataagaggaagaggtttattaattggaattcaactttataaagatcagccaaagtttatcacaaaattgatggataataaattattaaccataagagcagctgacaaagttgtacgtattttacctccactcaatgtcaaaaaaaaagaaatagatcaagcacttaaaattatcaataaagtttgttcagaacttaaataa

SEQ ID NO: 246067 - DNA, 952 bp, Unknown
  Bacterial polypeptide expressing nucleotide sequence isolated from the Sargasso Sea
ggggagaagttagcaaaaaaattatgtcaaaaaacttttgctgattatgtattattccagaatagtggcgcggaagccacagaagcatctattaaagttgctagaagatatttttactcaattggaaaaccccataaaaacagaatattgtgtgtaaaaaattcttttcatggaagaactatcgccgcaatttttgcaagtggatcaaaaaaaatggtagagggttttggacctaaagttccaggatttgatcattttatttttggaaaccacaaatccttgaaaaaaaaaatcactaaaaataccgcagctataatgatcgagccaattatgggagagggaggaattaaagtaatccctgattggtgtttaaaagaattgagaaaattatgtactaaaaaaaaaattttattgatagcggatgaagttcaaacaggaatttctagatcagcggattttttggcttttgaaagctcaaaaataaagccagatatcgtccctattgcaaaaggaataggtgggggatttcctataggtgcagttttaatgaataaaaaagtagcttctggaatgacaccaggtacacatggctcaacttttggtgggaatcctttagcaatggctgttgggaattcagttatagatatagtttcaaatagaaaatttttaaataacgtaaaaaaattgtcaaaatatttttttataaatttgaatcttttaaaaaaaaaatatcctatgattattagagaaataagaggcaaaggtttgttaattggagttcagctttacaaagatcagtcgaagtttattacgaaattgatggaaaataaattactaactatacgtgcagcagagaatgttgtccgtattttacctcctctaaatgtaaaaaaaacagaaattaatcaagcattaaaaatcattgataatgtatgctcaaaaatgaattaag

SEQ ID NO: 246068 - DNA, 1183 bp, Unknown
  Bacterial polypeptide expressing nucleotide sequence isolated from the Sargasso Sea
aatgggtgcattagctaaaaattataatagaagaaagatagcatttaaaaaaggtaaaggaagctttctttattcaacaaatggaaaaaaatacctagattttgtgcaagggattgcggtgaattcattaggacatgctaatccaaggctaatcagagcaatacaaaaacaatcaagaaaaatttggcatgtttcaaatgcttttttaattcctgagggagaaagattagcaaaaagattaacaaataaaacatttgctgaaaatgtaatttttcaaaactctggaacggaagcaacagaggccgcaataaaagttgcaagaagatacttttatgtaaaaggaaaaccaaaaaaaaataaaattttatgtattaaaaattcttttcatggaagaactattgcagcaatttatgcaagtggctcaaaaaaaatgactgaaggttttgggcctaaagttacaggtttcgatcatatcgaatttaaagattttaagccaagattcccaaacttaaaaaataaaataaaaaaaaatacagctgcaataatggtagaaactgtaatgggtgaaggtggtattaaacctataccagtaaaatgtttaaaatatttaagaaaaatttgtaataaaaagaaaatcctgttaattcttgatgaggttcagtgtggaataggtagatccggaaaattttttgcctatgaatatgccaatataaaaccagacattgtaccaattgcaaaaggtttgggaggtggattcccaatcggagctcttttaatgacgaaaaaagttgcttcaagtatgattccaggaacacacggaagtacatttggaggaaacccattagcaatgagtgttggaaatgcagttttagatgaaatatttaaaataggatttttaaaaaatgtacaaaaaatttcaaaatattttcatttagaattaaataaaattaaaaatgattatcctcatgtaattaaagaggtaagaggcttaggtttgctaattggtttaaaactttttaataaccaaaataaatttataaataagttagagtacaacaagttgcttacaataaaagctgcagataatgtagtaagaatattaccaccccttaatgtaaaaaaatcagagatcaatcttgctctaaaaattatcaaaaaagtttgtaaagattttaatacataa

SEQ ID NO: 246069 - DNA, 1120 bp, Unknown
  Bacterial polypeptide expressing nucleotide sequence isolated from the Sargasso Sea
atgagcagtttgacgaataattataatagaagaaaaatttcttttgtaaaaggaagaggtagttttttatatgataaaaatggaaaaaagtatctcgattttgttcaaggtatagctgttaattccttgggtcattcaaatccctatttaacaaaagaaatgattaaacaagcaaaaaaagtttggcacgtttcaaattcatttttaatacctgaaggggaaaaattagcaaaaagacttactaaaaaaacttttgctgatcgagttatgtttcagaatagtggtgcagaggcaactgaagcagcaataaaagttgcaaggagatattttttttctaaaggacaaaaaagaaaaaatagaattttatgtattcagaattcttttcatggaagaactctagctaccatttttgctagtggttcaaaaaaaatgacatatggatttggtccaaaggttgacggttttgatcattttaaatttggtgatcacaagtctcttaagaaagctatatctagaaaaacagcagctattatgattgaacctgtaatgggtgagagtggaataaaagttataccaagttggtgtttgaaagaactacgaaaaatatgtaataaaaataaaatacttttaatactggatgaagtgcaatgcggagtaggtagatcaggaaagttttttgcctttgaatattcagagataaaacctgatattgttccgattgccaaaggaattggtggaggatttcctttaggagcagtattaatgacaaaaaaggtggcttcatgtatgaaacccgggtctcatggaagtacttttgggggaaacccacttgctatgagtgtaggaaacgcagttcttgataagatttttaaaaaaggttttcttgagaatgttcaaaaattatcaaattattttttcatagagcttcaaaaattaaaaaaagattttccaggagttattaaagaagttagaggtttaggtttgcttatagggttacaattacacaaaaatcaatcaaaatttattaaacaattaatgaatgaaaaacttttgacaataagagctgctgagaatgtagttcgtattttaccaccattaactgtaaagatagaggaaataa

SEQ ID NO: 246070 - DNA, 766 bp, Unknown
  Bacterial polypeptide expressing nucleotide sequence isolated from the Sargasso Sea
gcattatcagcacaaaataatccaacttattcgaatggctttgaacctttattgcctggatttattcaagcgccttttgaagatattgaatccttaattaaaatgattgactctacaacagctgctatactaattgagccaattcaaggtgagggtggtataagaccagctaacctaaattttttaagaaaaatttataagatttgtaaagataacgatattttattattttttgacgaggttcaaagtggatttggaagatctggaaaactattttcatatgaatgggcaaatatagaacctgatattattgctgtagcaaagggtatgggatctgggtttccaataggcgcctgcttagctactagtaaggcttcaatagcaatgactaaaggtactcatggatctacttttggaggtaatcctttggctatttcagtaggaaaagttgtcttagaaacaattttgaaacaaaattttttaaattcagttgatctagttgcaaggcatttatggaatagattgaaacagttagaaaagaagcatgaagaaattttagagataaggggagcaggtcttttactaggtataaaaactaaacaaaaaaattctaaagttgctttagaatttaagaaaaataaactattaagcgttactgcagctgataatattatcagattagcacccccacttgtggtaactattgaagaagttaatacggctataaaaattattgataaaacattggacaacataaatgattaaa

SEQ ID NO: 246071 - DNA, 1168 bp, Unknown
  Bacterial polypeptide expressing nucleotide sequence isolated from the Sargasso Sea
atgagctcgttagccaaaaattataacagaagaaaaattgcatttaaaaaaggtaaaggaagttttctttactcaacaaatggaaaaaagtatttagattttgttcaaggtatagcagtcaattccttgggtcattctaatccatatttaattaaagctataaataaacaggcaaagaaggtttggcatgtatcaaatgcatttataattccagaaggtgaaaaacttgcaaaaagacttactcagaaaacttttgcagattacattttatttcaaaattcaggcacagaagcaacagaagcagcaataaaggtagcaagaagatatttttattcaataggaaaaccaaataaaaatagaattttatgtgtgaaaaattcttttcatggaagaactattgctgcaatttttgctagtggatcaaaaaaaatgacagaggggtttggtccaaaagttggaggttttgaccactttaaatttggagaccatcaatctttaaaaaaagctattacaaataaaacagcagcaatcatggtggaacctataatgggagaaggcggcattaaagttattccagactggtgtttaaaagaactaagaaaaatttgtaataaaaaaaaaatacttttaatattagacgaagtgcaatgtggtataggtagaactggaaatttttttgcatttgaaaattctaaagttaaacccgatattgttcctattgcaaaaggaataggtggtgggtttccaattggtgcagttttaatgacaaaaaaagttgcatcttcaatgacgccagggagtcacggatcaacttttggaggaaatcctttggcgatgagtgttggaaatgctgttttggatcaaatttttaaaaaaggatttcttaataatttaaaaaaagtatcaaaatatttttataaggaattagataaaataaaaaaagattatccaaatattattaaagaaattagaggcaaaggtttattaatcggaatacaattacattttgatcaaacgaaatttattaaatctttagaaaaaaattatttattaacaatcagagcagcagactatgtgataagagttttaccacctttaaatgttaaaaaaaatgaaatcgatttagccttgaagataataaagaaagtttgcagagaatataaataat

SEQ ID NO: 246072 - DNA, 680 bp, Unknown
  Bacterial polypeptide expressing nucleotide sequence isolated from the Sargasso Sea
tcacaaaggtttggaaaaagcgataactagtagaacagcagctatcatggttgagacgataatgggagagggtggcattaaagttattccagatttttgtctccagggtcttagaaaactatgtaacaagaaaaaaattttattaattcttgatgaggtacaatgcggtattggaagaagtggtaaattctttgcattcgaatatgcaaaaattaaacctgatattgtcccaatagcaaaagggattggcggtggttttccaataggtgcagttttggttaataaaaaagttgcttcaggcatgaagcctggaacccatggatccacatttggcggaaatcctttagcaatgagcgctggtaatgcagtgatggatgtaatgtttaaaaaaggtttcttaaataatgttagcaaaaatggaaaatatttcataagtcaacttgataaaattaaaaataaatatcccaaagttattaaagaagtaagaggaaaaggactactcattggacttagtcttcatgtaaatcaagctagatttattcaaaaacttttagataataatttgttgacagtgagagctgctgaaaatgttgtcagacttttgcctcctttaaatgtaacaaagaccgagataaacttatgtttaaaaataatagagaaagtttgcaaaaaattttaaa

SEQ ID NO: 246073 - DNA, 1168 bp, Unknown
  Bacterial polypeptide expressing nucleotide sequence isolated from the Sargasso Sea
atgagtgcaattttaaatacatataatagaaagaaaatttctttttctaaaggaaaaggggcttttctttatggaacaaatggaaaaaaatatttagactttgttcaaggaatagccgtaaattgtttaggtcacgcaaataattatttgattaattctgttacgaaacaagctaaaaaactttggcatgtttcaaatgcttttataattccagaacaagaaaaattagctaaaagattaaaacaaaagacttttgcagattatgttttttttcaaaattcaggtgcagaagcaacagaggcagcaataaaatttgctagaagatatttttattctaaaggtcaaaaaagaaagaatagaattttatgtattaataatagttttcatggaagaacgcttgcaacaatatttgccagtaatagtaaaaaagctacagagggatttggaccaaaagtagatggatttgatcattttaattttggtgatcataagggattagagaaagctattacaagtagaacagcagcaataatggttgagaccattatgggagagggtggaattaaagttattccagattattgcctaaaaggtctaagaaaactttgtaataaaaaaaatattcttcttatattagatgaagttcaatgcggtattggaagaagtggaaagttttttgcttttgaacatgcaaaaataaaacctgatattgtccctatagcaaaaggaattggtggaggctttccaataggtgctgttttggtaaataaaaaagtagcatctggaatgaaaccaggaacacatggttctacatttggaggaaaccctctagcaatgagtgcaggcaatgctgttatggatatcatgttcaaaaaaggatttttaagtaatgtgactaaaaacggaaaatactttttaaaagaattaaataaacttagagaaaaatatccaaaaataattaaagaagttagaggtaaaggacttctagttggtttatgtcttcataaagaccaaacgaaatttattaaaaagttattagaaaacaatctattatctgttagagctgctgaaaatgtagtcagacttttgcctcctttaaatgtcacaaaagcagaaataaatttaggtttaaaaataatagataaggtttgtaaaaattacagatgaa

SEQ ID NO: 246074 - DNA, 946 bp, Unknown
  Bacterial polypeptide expressing nucleotide sequence isolated from the Sargasso Sea
ctgatcgacgccacctttgcagagcgcgtgttcttctgcaactccggcgccgaagccaacgaggccgccttcaagctggcccgtcgcgtggcgttcgaccgttttggcagtgagaagtacgagatcatcgccgcgctgaacagcttccatggccgtaccctgttcaccgtcaacgtcggtggccaatcgaagtactccgatggtttcgggcctaaaatcaccggcatcacccacgttccttataacgacctggctgcgctgaaagcggcagtgaccgataagacctgcgccgtggttctggaaccgatccagggtgaaggcggcgtactgccagccgaactggcttacctgcaaggcgcccgcgaactgtgcgacgcgaacgacgcgctgctggtgttcgacgaagtgcaaaccggcatgggccgcagcggccatctgtttgcctaccagcattacggtgtgaccccggacatcctcaccagcgccaagagcctgggcggcggcttcccgattgcggcgatgctgacccgtgaagacctggccaagcacttggtggtcggcacccacggcaccacctacggcggcaacccgctggcgtgcgcggtagcggaagcggtgatcgacgtgatcaacaccccagaagtgctggcgggtgtgaatgccaagcacgacctgttcaaggcgcgcctggagcagatcggcaagcagtacggcatcttcacccaagtgcgtggcatgggcttgttgatcggttgcgtactcagcgatgccttcaaaggcaaggccaaggacgtgttcaacgcggccgagaaagaaaacctgatgatcctgcaagccggccccgacgtggtgcgttttgcgccgagcctggtggtggaagaggcggacatcaatgaaggcctggatcgttttgagcgtgctgtgaagacgttgacgcaagcctgat

SEQ ID NO: 246075 - DNA, 1174 bp, Unknown
  Bacterial polypeptide expressing nucleotide sequence isolated from the Sargasso Sea
atgagtgcattagccaaaaattataatagaagaaaaattgccttcagtagaggaaaaggaagctttttatactcgagcaaaggtcaaaaatatttagattttgttcaaggaatagctgtaaattctcttggtcatgcaaacagctacttaacaaaagctataaataaacaatcaaaaaaagtttggcatgtttcgaatgcttttataattccagaaggtgaaaaattagctaaaagattaagacaaaaaacctttgctgattacgttatttttcaaaatagtggcgctgaagcaaccgagctagcaataaaagcagctagaagatatttttataaaatcggtaaaccccaaaaaaatagaatactttgtattaaaaattcatttcatggcagaacgcttgcaaccatatttgcaagtggatcaaaaaaaatgaccgagggatttgagccaaaagttcctggttttgatcatttcaatttcggtgaccacaaagcccttaaaaaatctattacaaaaaagactgcagcaataatggtagaaactgcaatgggggagtcaggaataaaagttattccagactggtgtttaagagaactaagaaaactttgtaataaaaagaaaattttattaattttagatgaagtccagtgtggtatcggtagatctgggaaattttttgcctttgaatatgctaaaattaaaccagatatagtgccaatcgccaaaggtattggcggaggttttcctatcggagctgttttgatgaataaaaaagttgcgaaaggtatgacacctggttcacatggaagtacttttgggggcaatcccttagcaatgagcgttggtaatgcagttttagatcaaatttttaaaaaaggttttttaacaaatgtacaaaaatcctcaaaatattttatggaagaattaaatgacattaaaaacgaatacccaaatattatcaaagaagttagagggataggattattaatcggtctgcagcttcatgaggatcaaaataaatttattaaaaaattagaagacaacaaattacttacaatgagagcaggtgaaaacgtagtcagaatcctgccgcctttgaatgttaagaaaaacgaaatagacattgcaattaaaataataagaaaagtttgtaatgaaatggatagtatatgaa

SEQ ID NO: 246076 - DNA, 1168 bp, Unknown
  Bacterial polypeptide expressing nucleotide sequence isolated from the Sargasso Sea
atgacgtatttagcaaaaaattataatcgaaaaaaaatttcctttaaatatggtaagggaagttatttgttttctacagataacaaaaaatatttagattttgttcaaggtattgctgtaaattcgttgggtcatgcacaccctaagcttgctaaaacgattagcacccaagcaaaaaaattatggcatgtttcaaatgcctttcaaattccagaaggagaaaagttagctagaaaattgtgtaaaaaaacttttgccgattatgtgatgtttcaaaatagtggtgcagaagctactgaggctgcaattaaagttgctagaagatatttctattcaattggtaaaactaataaaaacaaaatattatgtgttagaaattcttttcacggaagaactttggctgcaatttatgcaagtggatcgaagaaaatgactgagggatttggtccaaaagtaagtggatttgatcattttgtcttcggagatcacaagtctttaaagaaaaaaattaccaaaaatacagctgctattatggtggaaacgattatgggcgagggtggaattaaagtaatacctgattggtgtttagtggaattgagaaagctatgtaatcaaaaaaaaatattactaattttagatgaggttcagtgtggtatagcaagatctggtgacttctttgcatttgaaaaatctaaagtaaagccagatattgtgccaattgcaaaagggattggaggtggatttcctatcggagcagttttaatgaataagaaagttgctgctgggatgacaccaggaacacatggttcaacttttggtggcaatccattagcaatggctgttggtaatagtgtgatggatatagtttcaaataaaagatttctaaaaaatgttaaaagtatttctaaatattttttattaaaattaaacaatttaaagaatgtttatccaaatataattaaaaatataagaggcaaaggacttttaattggtattcagctacatacagatcaaacaaaatttataaaaaaacttatggacaataagttattaactatacgtgcagcagaaaatgtggtcagaattttaccgccactaaatgttaaaaaaaacgaggttaatcaagctttgaaaataataaataaagtttgtaaagaattaaattaaa

SEQ ID NO: 246077 - DNA, 622 bp, Unknown
  Bacterial polypeptide expressing nucleotide sequence isolated from the Sargasso Sea
aatgggggagtcgggtattaaagtaataccagattggtgtataagagatttaaaaaaaatatgtaataaaagaaaaattttattaattttagatgaagttcaatgtggaataggtagatctggaaaattctttgcttttgaacacgctaaaataaaacccgatattgtacctatcgcaaaaggcataggaggaggtttcccaataggagcagttttaatgaataaaaaagtagcatatgcaatgaaacctggatctcacggtagtacttttggaggaaatccattagctatgagtgttggcaatgcagtgttagaccaaatattcaaaaaaggctttttaaaaaatgtacaaaaatcatctaaatactttatttctgaattaagaaaaataaaagaagactatccagagactataaaagaagtcagaggaattggtttactgataggattacagctttataatgatcaaacaaaatttattaaaaagctagaggataataaattgctgacaattagggctggggagaatgttgtcagaatcctgccccctttaaatgttaaaaaacaggaaattgatcttgcaattaaaattataagaaaagtttgtagtcaattaaattaa

SEQ ID NO: 246078 - DNA, 1156 bp, Unknown
  Bacterial polypeptide expressing nucleotide sequence isolated from the Sargasso Sea
atggatacatataagagatacccaatatctttttcgaaaggcgagggttcttggttgtacgataatgatggtggaaagtatttagattttgcagcaggtattgccgtaaatgttttgggtcatggtcatccagaaataaaaaaggtaatgcatgaggctattgataatgtttggcatgtttcgaatttatatcatattccggaacagcaaaaattagctaaaaaattatgcgatataagttttgccgataaagtatttttttgtaattcgggagctgaagctgttgaaggagcaattaaaacctcaaggaaatatcattttgaaaaaggtgataaagataggacagacatcattacttttaagaatgcgttccatggaaggactttagctactttagcagctggagcaaatcccaaacatactgaaggatttggacctcttccttctggtttcgaaaatatagagctatcccaacaacaattggaagaaaagatctctaataagacagctgcagtgcttattgagccaatacaaggtgaggggggaataaggctcacaccaaaagaagacttacaaatgattagagatctaacaagtaaacatggcgtattaatgattcttgatcaggttcaatgtggtttaggaaggactggggattttttctcgcatgaatgggctggagttgaaccagatataattactcttgcaaaaggtttaggagcaggttttccaataggagctatattggcttcaacagatgcatcatctggaatggtccatggctctcatgggtcgacttttggtggtaatccgctagcttgttcagtagcgcttaaagttcttgaaattattgatgaagaaaaaatcctttcaaatgttaagtcattatcagaattcctattggcgggaataaatgacattatagaaaatcataaggataaaattacttcagtgagaggaagaggttttatgcttggtataaaatgtgaagtcgaaaatacattgatagccgaaaccgctttaaataatggtttattattggtaccagctgctgacaatataattagattgttaccacctttgaatactgagaaaaatgatattgaggagtttttcaacttactaaatatcacactagaaaatttacctagataga

SEQ ID NO: 246079 - DNA, 919 bp, Unknown
  Bacterial polypeptide expressing nucleotide sequence isolated from the Sargasso Sea
agtctactttgccaattcaggagctgaagcgaacgaagccgccttaaagctggctcgtcgctgggctaaaaatgaagtgggtgaacataaaacccaaattatcgccttcaaacaaggtttccacggccgtactttctttactgtaactgtaggtggccaacctgcctattcagacggttttggtcctaaacctgccgatatagtgcatgctgaatacaacaacctggcaagtcttgaagcactgatttctgacaacacctgcgcagtaatgttagagccgttgcaaggtgaaggcggtatcattacgccaacctctgaatttattcagggtgtggctgctttatgtaaaaagcacaatgcattgatgatttttgacgaagtacaatctggtgtaggccgtaccggtcagttgtacgcttacatgggtttaggcgtagtacctgatattctgaccacggccaaagccttaggtggcggtttccctataggtgctatgctgaccaccactgctatcgcaaaacatttagtcgtaggtacacacggttctacttatggtggtaatccactggcttgtgctgtaggtattgctgcttttgatacggtgaatacgcctgaagtattaaatggcgtaaaacagcgcgagcaattgttccgtgaaggtttagcagctattaatgctaaatacgatgtgttcagtgaaattcgtggtcagggcctgttattaggtgcggcactgaatgacaagtatcagggtaaagcccgtgactttatgctggctgcagctgatgaaggtttaatgatgttagtcgcaggctacagtgttattcgtatgactccgtcactaatcattccggaagctgacatagctgaaggtttcaaacgtcttgaaaaggctgtagctaaaatggtacaggcttaa

SEQ ID NO: 246080 - DNA, 1219 bp, Unknown
  Bacterial polypeptide expressing nucleotide sequence isolated from the Sargasso Sea
aatgagcgttgatatgaagttgaatcgtgcccagtttgatgcggttatggtgcctaactatgcgcctgctgccgtgatccctgtacgtggcgaaggaagccgagtatgggatcaagagggtaacgagtttatcgattttgccggcggtatcgcggtaaattgcttaggtcactgtcatcccgccttagtgaatgccttaaaaacgcaaggcgaaaaattatggcacctgtctaacgtgatgaccaacgagccagcgcttgagcttgcgactaagttggttaacagcacttttgctgagcgtgtgtattttgccaactcaggcgccgaagcgaacgaagcggcactgaaattggcccgtcgttatgccttagaaaaattcggcgcagagaaagatgaaattatcgccttcgataaagccttccacggccgtactttcttcaccgtgagcgttggtggtcaagcggcctattcagatggttttggtccaaaaccgcaaagtatcacccacttaccctataacgatgttgccgcattagaagcggccgtatcggataaaacctgcgccattatgcttgagccactgcaaggtgagggcggtattatcgatgccgatcctgcattcttaaaagcggttcgcgaattggccaataagcacaacgcactggtgattttcgacgaagtacaaaccggtgtcggccgtactggtgaactctacgcttacatgggcaccgacatagtgccggatatcctgaccacggctaaagcgttgggtggcggtttccctatcgccgctatgttgactaccgctgaaattgctgagcacctgaaagtgggtactcacggttctacttatggtggtaacccattagcttgcgctatcggtaacgcagtattagacgtggttaacacaccagaagtcttgaacggtgtgaaacatcgcgagcagttattgcgcgatggtctgaacaaaattaatgaaaaatatcatgttttctctgaaattcgcggtaaaggcttgctgttaggggcggttctaaacgaacagtaccaaggtcgttcacgtgactttttagtagcgtctgttgcggaaggcttaatgagcctgatggcgggtgctaacgtggtacgttttgctccttcactggtgatccctgaggcagatattgcagaaggcctggcacgttttgagcgtgctgtggcgagcatcgctgctgcctaa

SEQ ID NO: 246081 - DNA, 1144 bp, Unknown
  Bacterial polypeptide expressing nucleotide sequence isolated from the Sargasso Sea
atgacatttttagcgaataattataatagaaaaaagatttcttttaaaaaaggcattggaagctatttagttgccacaaatggtaagaaatatttagatttttgctcaggaattgcagtcaatagtttaggtcacgcaaatccaagattagttaaagcattgtataaacaagcaaaaaaagtttggcatgtttcaaacgcttttaccattccagagggagagatgttagcaaaaaaattggtcaaaaaaacttttgcagactcggtgatatttcagaattctgggactgaagcaacagaggttgctataaaagtggcaagaagatacttttactcaataggaaaaccaaaaaaaaatagaatactttgtgtaaaaaattcatttcatggtcggactatagctgcaatttttgccagtggatcaaaaaaaatgacggaaggttttggcccgaaagtaagtggtttcgatcattttacttttggggatcacaattctttaaaaaaaagaatatcaaaaaatactgcagctattatggttgagacaattatgggtgaaggtggaataaaagtaatacctgattggtgtttaagagatttgagaaagttatgtaacaagaaaaaaatattacttatacttgatgaagttcaatgtggcattggaagatcaggagatttttttgcttttgaaagctcaaaagtaaaaccagatattgtgcctattgcaaaaggaatcgggggtgggtttcctataggggcagtattaatgaataagaaggtcagtaaagcaatggtgcctggaacccacggatctacatttggaggcaatcccttggctatgtctgttggaaatgaagtaatggatataatttcaaataaaaaatttttgaataatgtcaaaaatttatcaaaatattttttagaaaagttaaatgacataaaagataaatatccaaatataattaaacaaattagaggaaaaggtttgttaataggtattcaattacataaagatcagactttattcataaaaaatctaatggaaaataaactattaactattaaagcagctgaaaatgtaattcgtattttaccacctttaaatgtaaagaagagtggaaatcgatattgcattaaaagttattaat

SEQ ID NO: 246082 - DNA, 509 bp, Unknown
  Bacterial polypeptide expressing nucleotide sequence isolated from the Sargasso Sea
aatggatacatataagagatacccaatatctttttcgaaaggcgagggttcttggttgtacgataatgatggtggaaagtatttagattttgcagcaggtattgccgtaaatgttttgggtcatggtcatccagaaataaaaaaggtaatgcatgaggctattgataatgtttggcatgtttcgaatttatatcatattccggaacagcaaaaattagctaaaaaattatgcgatataagttttgccgataaagtatttttctgtaattcgggagctgaagctgttgaaggggcaattaaaacttcaaggaaatatcattttgaaaaaggtgataaagatagaacagaaatcattacttttaagaatgcattccatggaaggactctagctactttagcagctggagcaaatcccaagcatactgaagggtttggaccgcttccttctggtttcgtaaatatagagctatcccaaaaacaatggaagaaaagatctctaataaaacagc

SEQ ID NO: 246083 - DNA, 1156 bp, Unknown
  Bacterial polypeptide expressing nucleotide sequence isolated from the Sargasso Sea
aatggatacatataagagatacccaatatctttttctaagggcgagggttcttggctgtatgatagtgatggtagaaaatatttagattttgcagcaggtattgccgttaatgttttgggtcatggtcatccaaaaataaaaaaggtaatgcatgaggctattgataatgtttggcatgtttcgaatctgtatcatattccggaacagcaaaaattagctaaaaagttatgcgatataagttttgccgataaagtatttttttgtaattcgggagctgaagctgttgaaggggcaattaaaacttcaaggaaatatcattttgaaaaaggtgataaagatagaacagacatcattacttttaagaatgcattccatggaagaactttagctactttagcagcgggagcaaatcccaaacatactgaaggatttggacctcttccttctggtttcgaaaatatagagctatcccaacaacaattgaaagaaaagatctctaataagacagctgcagtgcttattgagccaatacaaggtgagggcggaataaggctcacaccaaaagaagacttacaaatgattagagatctaacaagtaaacatggcgttttaatgattctagaccaggttcaatgtggtttaggaaggacaggagattttttctcacatgaatgggctggggttgaaccagatattattactcttgcaaaaggtttaggagcaggttttccaataggggctatattggcttcaacagatgcatcatctggaatgatccacggttctcatgggtcgacttttggtggcaatccgttagcttgttcagtagcgcttagtgttcttgaaattattgatgaagaaaaaatcctttcaaatgttaagtcattatcagaatttctattgacgggaataaatgacatcatagaaaatcataaggataaaattacttcagtgagaggaagaggttttatgcttggtataaaatgtgaagtcgaaaatacattgatagccgaaaccgctttaaataatggtttattattggtaccagctgctgacaatataattagattgttaccacctttgaatactgagaaaaatgatattgaggagtttttcaacttactaaatatcacactagaaaatttacctagatag

SEQ ID NO: 246084 - DNA, 1168 bp, Unknown
  Bacterial polypeptide expressing nucleotide sequence isolated from the Sargasso Sea
atgagttatttggcaaaaaattataatagaaaaaaaatttcctttaaatatggcaaaggtagttatctgtattccattaataaaaaaaaatatttagattttgtacagggaatagcagttaattctttaggtcatgcaaatcctaaattaataaaaactataaaagatcaatcaaaaaaattatggcatgtatctaatgcatttcaaattccagagggagaaaaattagctaaaaagttatgtaaaaaaacttttgctgaatatgtaatgtttcaaaatagcggaactgaagctacggaagcagcaattaaagttgcaagaagatatttttactcaataggtaaaccaaataaaaataggattttatgcatcaaaaactcgtttcacggaagaactttagcggcaatttttgctagtggatcaaagaaaatgactgaaggatttggtccaaaagtaacagggtttgatcacttcagttttggcgatcataattctcttaaaaagaaaattaacaaaaacacggctgcaattatggttgaaacaattatgggtgaagggggtataaaagttattcctgattggtgcttgaaagaattaagagcattatgtaataagaaaaaaatactattaatcctagatgaagttcaatgtggaataggaagatctggtgatttctttgcttttgaaaaatctaaagtaaaaccagatattgtaccgattgcaaaaggaataggtggaggatttcctattggagcagttttaatgaataaaaaagttgcctcaagcatgacaccaggtactcatggatccacatttggaggcaatcctttggctatgtctgttggaaatactgttatggatattatatcaaataaaaaatttttaaataatataaaaagtttatcaaaatattttttattaaagcttaataaaattaaagaaaaatatccaaatgttattaagcaaataagaggaaaaggctttttgattgggatacagttatataaagatcaaactgtatttataaaaaaattgatggataataaattattgactattagagctgcggaaaatgttgttcgaattttacctccattaaatgtcaaaaaaaatgaactagatttggcattaaaaattattgaaaaggtctgttcacagataaaatgat

SEQ ID NO: 246085 - DNA, 1186 bp, Unknown
  Bacterial polypeptide expressing nucleotide sequence isolated from the Sargasso Sea
atgcccctgaacgattatccgatcgactcgctgatgtacatcacgaaccgccccgacatcgtgtttacgcacggcaagggttcgtggctctacgatcacacgggcaagcgctatctggacttcatccagggctgggccgtcaacagcctcggccattgcaacgaaggcatcgtcgacgcgctgaagacgcaggcagaaaaactgctgaacccgtcgcccgcgttctacaacgagccgatggcgaagctcgcgggcctgctcacgcagcacagcgtgttcgacaaggtgttcttcacgaacagcggcgcggaagcgaacgaaggcgcgatcaagctcgcgcgcaagtggggtcgcaagttcaagaacggcgcgtacgagatcatcacgttcgaccacagcttccatggccgcacgctcgcgacgatgtcggccagcggcaagccgggctgggacacgatctacgcaccgcaggtgccgggcttcccgaaggccgagctgaacgacatcaactcggtcgagaagctgatcaccgacaagaccgtcgcggtgatgctcgagccgatccagggcgaaggcggcgtgattccggccacgcgcgaattcatgcaggcgctgcgcgcgctgacgaagcagcacaacctgatgctgatcgtcgacgaggtgcaaagcggctgcggccgcgcgggcacgctgttcgcgtacgagctgtccggcatcgagccggacgtcatgacgctcgcgaaagggatcggcggcggcgccccgctcggcgcgctgctgtcgaaagccgagttcgcggtgttcgaggccggcgaccagggcggcacgtacaacggcaacccgctgatgacggcggtcggctattcggtgatctcgcagctcgtcgcaccgggcttcctcgaaggtgtgcgggcgcgcagcgaatacctgaagcgcaagctgctcgagctgtcggaagagcgcggcttcgaaggcgaacggggcgaaggcctgctgcgcgcgctgctgctcggcaaggacatcggcccgcagatcgtcgagaaggcgcgcgacatgcagcctgacggcctgctgctgaacgccgcgcggccgaacctgctgcgcttcatgcccgcactgaacgtgacgaccgaggaaatcgaccagatgatggcgatgctgcggtcggtgctcgacacgctctaag

SEQ ID NO: 246086 - DNA, 889 bp, Unknown
  Bacterial polypeptide expressing nucleotide sequence isolated from the Sargasso Sea
aataaaaaatcaagccaaaaaagtttggcatgtttcaaacgcatttataattccagagggagaaaaactcgctaaaagattaacccaaaaaacttttgctgattatgtaatatttcaaaatagcggtgcagaagcaacagaggcagctataaaggctgctagaagatatttttattcaattggaaaacccaaaaaaaatagaattctttgtataaagaattcttttcatggaaggactttagctacaatttatgcaagtggttcaaaaaaaatgaccgaaggatttggaccgaaagtacctgggtttgatcattttaactttggagatcataaaggcttgaagaaggctattaaaaaaaacacagctgcaataatgtgtgaaacagcaatgggagagtcgggcatcaaagtcatacctgattggtgtctaagagagttaagaaaaatttgcaataagaggaaaattttattaattcttgacgaggttcaatgtggcataggcagatctggaaaattttttgcttttgaatattcgaaaataaaaccagatatagtcccaatagctaaaggaataggtggtggtttcccaattggagcagttttaatgagcaaaaaagtagcatcggcgatgacaccaggttcacacggaagtacttttggtggaaacccactagctatgagcgtagggaatgcagtattagatcaaatatttaaaaaaggttttttaaaaaatgttcagaaatcatcgaaatattttatttctgaacttaataaaataatgcaggattatccaaatataattaaggaagtcagaggagttggtttgctcattggtttacaactttatactgatcaaaccaaatttattaagaaattagaggataataag

SEQ ID NO: 246087 - DNA, 823 bp, Unknown
  Bacterial polypeptide expressing nucleotide sequence isolated from the Sargasso Sea
aatgccaacttatgggaataaaactcttgaatttgcaaaaggcaaaggatcttatttatactctagtcaaaataaaaaatatttagattttgcaagtggaatagctgtaaattctcttggtcattgtcatcctaaacttatagaggtgcttaataagcaatcgaaacaactctggcatgtttcaaacttatataaaattaaaaaacaagaacaatttgcaaaattactttgtaaaaattcttttgcagacaaggtcttttttactaattcaggagctgaatctattgaatgtggaattaaaataataagaggatatcattcacatcacaagactaacaaaacagagattattacttttgaaggtgctttccacggaagaacttatggagctctttcagcacaaaaaaacaataaatattccagaggttttggccctatgcttaaaggctttaaaaaaattgaatttaataatgaaaaaaaattaatatcggcaataaataaaaaaacagctggtattattattgaaccaattcaaggagaaggaggtattcgtcctgccaatctaagttttttaaaatttttaagaaaaatctgtaatgaaaagaaaatcttacttttttttgatgaggttcagtgtgggtttggaagatcaggtaaattattttcatatgaatgggctaaaataaaacctgatattatatctgtagcaaaaggtattggatcgggttttccactcggagcttgtatgtcaacaaacaaagcatgtattgcaatgactaaaggcagtcatggatcaacctatggcggtaatcctttagcaatg

SEQ ID NO: 246088 - DNA, 1171 bp, Unknown
  Bacterial polypeptide expressing nucleotide sequence isolated from the Sargasso Sea
atgagcgctttagttaaaaattataatagaagaagaattgcctttaaaaagggcaagggaagttttttgtactcaaccacaggtaaaaaatatctagattttgtccagggaatagcagttaattccttaggtcattcaaattctaaattaattaaagcaatacaaaaacaatctaagaaggtttggcatgtttcaaatgcatttgtaattccagaaggagagagattggcatatagattaaaaagtaaaacatttgcagacaatgtcatttttcagaattctggcgctgaagctacagaggctgcaattaaaatagcaagaaggtatttttattcactaggcaaacctaataaaaatagaattttatgtgttaaaaattcatttcatggtagaactttagccactatatttgctagtggctctaaaaaaatgactgaaggatttggccctagagttaatggatttgatcattttgattttggtaaccataaatctttaaaaaaaaaaattagcaagaatacagcagcaataatggtggaaccagttatgggagaaggagggattaaagtaatacctcattggtgtttaaaagaattgagaaaaatttgtaacaaaaaaaaaattttactaattttggatgaagttcagtgcggtgtaggaagatcaggaaagttttttgcctttgaatatgcgaacgttaagccagatatagttccaattgcaaaaggtattggtggcggttttccaatcggtgcggttttaatgacaaaaaaagttgcgtcatgtatggttcctggatctcatggcagtacatttggagggaatccgttagcaatgagtgttggtaatgcagttttagaccaaatatttaaaaaagggtttctaaaaaatattcaaaaaatatctaaatattttcataaagaattaattaaaatcaaaaatgattatccaaaaataattaaagacgtaagaggcttaggtctgttaattggtttaaaactttttaataatcaaacaaattttataaaaaagttagaaaataataaattacttacaattaaagctgctgaaaatgttgtacgaattcttccccctttaaatgttagcaaaatagaagttgatctagcaataaaaattataagaagagtttgcaaacaaacaaaagtttgat

SEQ ID NO: 246089 - DNA, 582 bp, Unknown
  Bacterial polypeptide expressing nucleotide sequence isolated from the Sargasso Sea
taagagaacttagaaaattatgtgataagaaaaaaattcttttaattctggatgaagttcaatgtgggataggtagatctggagatttttttgcatttgaaaaatctaaagtaaaaccagacatagtcccaatagctaaagggattggaggagggtttccaataggagcagttcttatgaataaaaaagtagctgcaggcatggtgcccggaactcatggatctacatttggcggcaatccattagctatgtcagttggtaataaggtaatggatatagtttcaaataaaaagtttttaaataatgtaaaaaaattatctaaatatttcttatcaaatcttaataaaattaaagaaaaatatcccaatatcattaaacaaataagaggcagaggttttttaattgggatacagctacatcaagatcagacaaattttgttaaaaaattaatggaaaataaattattaacaatacgtgctgcagaaaatgttgtacgaattttaccaccactaaacgttaagaaaaatgagattgatgaagctttaaagattataaataaagtttgcagcaaatttaaataat

SEQ ID NO: 246090 - DNA, 1075 bp, Unknown
  Bacterial polypeptide expressing nucleotide sequence isolated from the Sargasso Sea
atgccaacttatggcaataaaactcttgaatttataaaaggtaaaggatgttacctatacactagtcaaaataaaaaatatttagattttgcaagtggaatagcagtaaattctcttggtcattgtcatcctaaacttattgaggtactttataaacaatcgaaacaaatatggcatgtttcaaatttatataaaattaaaaaacaagaacaatttgcaaaattactttgcaaaaattcttttgcagataaagtcttttttactaattctggaactgaatctattgaatgtggaattaaaataattagagggtatcattcatatcacaagactaaaaaaacagaaattataacgtttgaaggtgcttttcatggaagaacttatggtgcactttcagcacaaaaaaacaaaaaatactcttctggctttggtcctatgctaaaaggttttaaacaaattgaatttaataatgaaaaaaaattaatatcagcaataaataaaaaaactgctggtattatgattgaaccaattcaaggagaaggaggtattcgtcctgcaaatttatattttttaaaattattaagaaaaatctgtaacgaaaatgatatcttacttttttttgatgaagttcagtgtggatttggtagatctggtaaattattttcgcatgaatgggcaaaaattaaacctgatataatgtctgtagcaaaaggtattgggtcaggttttccacttggagcttgtatgtcaacaaacaaagcatgtgttgcaatgactaaaggtagtcatggatcaacctatggcggtaatccgctagccatgagtgtaggtttagaagttttaaaaattatctctaataaaaaatttctttcaaaagttgacaaaacagcaagatatttttggaaaaatttaaaaatattagagaattcatcaaatattatttcagaggttagaggtgcaggatttttattgggaattaaaacaaatattagcaatatagatttttctgaacaacttaaaaaaaataaattactaaatgtacctgctgcagataatacagtaagactagcaccac

SEQ ID NO: 246091 - DNA, 1150 bp, Unknown
  Bacterial polypeptide expressing nucleotide sequence isolated from the Sargasso Sea
atgccaacttatggtgaaagagatttaatatttgcaaaaggcaaaggttgttatttatatactcactctggaaaaaaatatttagattttgcagcaggtatagcagtaaactcacttggtcattgtcatccaaaattagtaagtattttaaaaaaacaatcagaaatactatggcatacatcaaacttatataaaaacaacaatcaagaattatttgctaaagaattatgcaaaaaaacatttgctgataaggttttttttactaactctggtgctgaagcaatagaatgtggtttaaaggttataaaaacttattggaatcttaaaaataaagataaaaaaaatattattacttttaaaggagccttccatggcagaacatttgcagctctatctgctcaaaaaaacaaaacttattccgaaggttttaaacctctactaagcgggtttaagaatataccattcaatgataaacaggcattggtgaaaagtattaatgaaaaaactgcagcaattttaattgagcctattcaaggtgaaggcggtattcgacctgcatcaattcaatttctaaaatttattaaagagatttgtagaaaaaatgacattcttctttttttagatgaagttcaatctggctttggaagatctggcaaattatacgcgcatgaatgggcaaaaattaaaccagatattttagcaacagcaaaagggataggatcaggattccccttaggcgcttgtttagcaacaacaaaagcatcttttggtatgagtagaggaaaacatggctctacttatggtggaaatccactagctgtatcagttggaagagaagtgttgaagattatatctaataaaaaatttttaaaaaacgtagatacgatttctagatatttatggaaaaacctaaaaaaattagaaagtcattataatgaaattattgatgttagaggggcgggactgttacttggtataaaaacaaaacaaaataatataatgatatctaatagattgaaaaaaaataaattattaagtgtgccagctggagataatgtaattaggttggctcctccattaataattaataaaaagcatgtagacgaggcaataaatataatagatgaaactttaaaaaatttatcatgaa

SEQ ID NO: 246092 - DNA, 1210 bp, Unknown
  Bacterial polypeptide expressing nucleotide sequence isolated from the Sargasso Sea
atgaacgtaactcgcgctacatttgatgatgtaatggttcctaactataacccagcaggtatggtacctgttcgaggtgaaggttcacgcgtatgggatcaagatggagctgagtacatcgactttgcaggcggtattgcagttaacgttttaggtcactgtcacccagagcttgtgaaagctcttaatgaacaaggcagcaagctttggcacttaagcaacgttttcactaacgagccagcccttcgtttagctaaaaagctaaatgacgcaacgttttcagatagagtttacttcgcaaactcaggcgcagaagcgaacgaagcagcattgaagctagctcgtcgctgggcgctggacaagcacggtgaagacaaaaaccaaatcatcgctttcaacaaaggtttccacggccgtaccttctttaccgtaacagtaggtggtcaagctgcttactctgacggttttggtcctaagccaggcgctgttgaccactgtgactacaacgatttagctgcctttgaagcgctaatttctgacaaaacctgcgcggtaatgatggaaccgcttcagggtgaaggcggtattattccacctgatgtagatttcgtaaaaggcgttcgcgaactttgtgacaagcacaacgcattacttatttttgacgaagttcagtcgggtgttggtcgtactggtcacctttatgcctacatgggtcttggcgtaacacctgatatcctaacaaccgcaaaatctcttggtggcggctttccaattggtgccatgcttaccacagcagacatcgctgcacaccttaagccaggtacccacggtagtacttacggcggtaacccactagcctgtgctgttgcggaaaaagcgttagatatcgtgaaccagccagaagtgcttgaaggtgtacttaagaaagaagccctattccgtgaactactaggtgctatcaatgaaaagtacaacgtatttgaagaagtacgtggtcaaggcatgctgttaggttgtgcgttgaatgagaaataccaaggccgtgcacgtgacttcatgatggctgcaacgaaagagaaccttatgtgtcttgttgctggcatgaacgttattcgttttgcgccttcactggttattcctgatgaagacattaaagaaggtcttgcacgttttgaacgcgccgttgctgccgttgtaaacgccgaataat

SEQ ID NO: 246093 - DNA, 591 bp, Unknown
  Bacterial polypeptide expressing nucleotide sequence isolated from the Sargasso Sea
atttttgcctaaagggtcttagaaaactttgtaataagaaaaaaatacttttaattttagatgaagttcaatgtggagtaggaagatcaggtaaattttttgcttttgagtacgcaaacataaagccagatatagtaccaattgctaagggtataggcggtggatttccaattggtgcgtgtttagtaaacaaaaaagttgcgtctacaatgaaaccaggttctcatggcacaacattcgggggaaatcctcttgctatgagtgttggaaatgctgttttagacgtaatttttaaaaagaattttttaaaaaatgtcagaagtattagtaaatatttcaaaacaaaattaaatattattcacattcaaaatcaaaaagttattaaagaggtaagaggaactggtttattactaggattacagctcaaagtaaatcaagcaaaatttatagaaaaattaatgaaagaaaaattactgacgataagagctgcagaaaatgtagtaagaatattgcccccattgaacgtatcaaaaaaagaaattgatcaagcagtgacaattataaataaagtatgtaaaagttataaatgaa

SEQ ID NO: 246094 - DNA, 1018 bp, Unknown
  Bacterial polypeptide expressing nucleotide sequence isolated from the Sargasso Sea
ttaattgcaactataaataaacaatcaaagaagctttggcatgtatccaatgcttttcaaattcctgagggagagaaattagcaaaaaaattatgccaaaaaacttttgcagattgcgtaatttttcaaaatagtggtgcagaagctactgaggctgcaattaaagttgcaagacgatattttttttcaataggtaaaccaaataagacaagaattttgtgtgtaaaaaactcgtttcatggaagaactttagctacaatttttgcaagtggatccaaaaaaatgactgaaggatttggacatgtgggtggtttcgaccattttatttttggagatcataaatctttaaaaaaaaagattaccaaaaatacagctgcaattatgatagaacctataatgggtgagggtggtattaaagttgttcctgactggtgtttaaaagaattgagaaaattatgtaataagaagaaaatattgcttattttagatgaagtacaatgtggtatttcaagatcaggtagtttttttgcatttgaaaattcaaaatgtatcccagatatagtaccaattgcaaaaggtattgggggtgggtttccaattggagcagttttaatgaataaaaaagttgctgcgggaatgtctccaggaactcacggctctacttttggaggaaatcctttagcaatggcgattggaaatactgtaatggatatagtttcaagtaagaaatttttaaataacattaataaattatctaaatactttttttcaaatttaaatattattcagaaaaagtatcccaaagtaattaaagatattagagggagaggttatttaataggaattcagctttacaaagatcaatcaaaatttattcaaaaacttatggataaaaagttattaaccattagagcagcagaaaatgttatacgtattttacctccgttaaatgtcaaaaaaaatgagttagatcaagctctaaagattatcgacaaagtttgtgctgaactaaaataaa

SEQ ID NO: 246095 - DNA, 957 bp, Unknown
  Bacterial polypeptide expressing nucleotide sequence isolated from the Sargasso Sea
tatgccaacttatggcaataaaactcttgaatttgtaaaaggaaaaggatgttatttatacactagtcaaaacaaaaaatatttagattttgcaagtggaatagctgtaaactctcttggtcattgtcatcctaagctgataggggcacttaataaacaatcaaaacaactttggcatatttcaaatctatatttaataaaaaaacaggagcaatttgcgaaattactttgtaaaaaatcttttgcagataaagttttttttactaattctggaactgaatctattgaatgtggaattaaaataattagaagttatcattcataccataatacaaagaaaacagagattattacttttgatggagcttttcatggtagaacttacggcgcactttctgcgcaaaaaaataaaaaatattctcatggttttggacctcttttgaaaggatttaaacaaattaaattcaatgatgaaaaaaaattaaaactagcaataaataaaaaaactgcaggtattattattgagcctattcagggagaaggaggcattcgtcctgccaatttaagttttttaaaatcattaaggaaaatttgtaatgaaaatggtattttactattttttgatgaagttcaatgtggttttggtagatctggtaaattattttcccatgaatgggcaaaaattaaacctgatattatgtctgtagcaaaaggtattggatcgggttttcctcttggagcttgtatgtcaacaaacaaagcttgtattgcaatgaccaagggtagtcatggatcaacctatggaggtaatccattagctatgagcgtaggcttagaagttttaaaacttatctctaataaaacatttctttcaaaagttgataaaactgcgagatatttctggaaaaatttaaaaaaattagagaatacatctaatattatttcagaagttagagg

SEQ ID NO: 246096 - DNA, 1168 bp, Unknown
  Bacterial polypeptide expressing nucleotide sequence isolated from the Sargasso Sea
atgacgtatttggcaaaaaattataacagaaaaaaaatagcctttaagtatggaaaagggagctacttatattcaattgataataaaaagtatttagattttgttcagggaatagcagttaactccctaggacacgcgcatccaaaattggtaaaaacaataaacgaacaatcaaaaaagctctggcatgtttcaaatgcctttcaaattcctgaaggagaaaaactagctaaaaagatatgccaaaaaacattcgcagcttttgtaatgtttcaaaatagtggagcagaggctacagaagcagcaataaaagtagctagaagatattttttttctattgggaaaccaaataaaaacagaattttatgtataaaaaattcatttcatggcagaacattagccgcaatttatgctagtggatcgagaaaaatgacagaaggatttggcccaaaagttggaggatttgaccattttagatttggagatcataaatctctaaaaaaaaagattacaaaaaaaacagcagctataatgatcgaacctataatgggcgaaggaggcattaaggtaataccagactggtgtttaaaagaattaagaaaattatgtaataagaaaaaaatactattgattttagatgaagtccagtctggtatttcaagaactggcgcctttttttcatttgaaaaatcaaaaattaaacctgatatcgttccaattgcgaaaggaataggtggtggatttccattaggtgctgtcttgatgaataaaaaagttgcttccggaatgatacctggaacgcatggctctacttttggtggcaatcctttggctatggctgttggtaatgctgtaatggatatagtttcaagtaaaaaatttttaaaaaatattgaaaatttatcaaaatattttttatttgaattaagaaatattcaagaggcatacccaaatataatcaagagtataagaggaaaaggttttttaattggagttcaactttataaagatcaaacgattttcattagaaaactcatggaaaataaactgcttacaataagagcttctgaaaatgttgttcgtatacttcctccgttaaatgtaaaaaaaagtgagttggatctttctttaaaaattattaataaggtttgtaaagagcttaattaaa

SEQ ID NO: 246097 - DNA, 1084 bp, Unknown
  Bacterial polypeptide expressing nucleotide sequence isolated from the Sargasso Sea
gatgacaacaactgattggaaaaaattagaatcaacttattacatgcaagtagtaaacagattgccacttgtgcttgttaaaggaaaaggcactattgtatgggacgaagaaggaaaaaaatatttagattttacttctggttgggcagttgtaaatttgggccactctcatccagctgtctcaaatgctattaaataccaagttgataatattatgcagatgactaatctctattacacaattcctcagcttaagttagcaaaattactaattgataattcttgttttgatagagtttttttctcaaatagtggagctgaagcaaatgaaggagcatgtaaattagcaaggaaatggggcaaagaaaagcttgatggagcatatgagataatcactatggataattcatttcatggtaggacattagctatgatggctgcaacaggacaaaaagaatatcaagacaagtggcagccactgccagatggctttgttaatgtagaatataataattttgaagccttaaaaaaagctaccaagaaaaatacctgtgctgttttattagaagttgttcaaggggaaggtggggtaaatgtgcctgatcatagttacttaatcgatgttcaagagtggtgtcatcaaaataatattttattcatggttgatgaagttcagactggaatgggaagactcggcactttatttggatatcaaaaatttggactagacccagatgtaatggtcttgggaaaggcactcggagcagggactccattgggggcatttctatgtaaagaaagattttctgtattagagcctggtgatcatggaagcacatttggaggaaatgctttaactactgctgcaggctgggcagcacttaaatatattattgacacagatataccatctcaatgttcagatgctggaaaataccttaaatcaatgcttgatggattggcatctaggcatagtaatgtattagaaataagaggatacggactattaattggactagaaatatcaaaaaataaagctcctgaagtaatgaagttgtgtttagaaagaaggactactaattaa

SEQ ID NO: 246098 - DNA, 1054 bp, Unknown
  Bacterial polypeptide expressing nucleotide sequence isolated from the Sargasso Sea
tatgagctatttagcaaaaaattataatagaaaaaaaatttcctttatttatggaaaaggaagttacttatattctacagataacaaaaaatatttagattttgttcaaggtatagctgtaaactctttaggacacgcccatccaaaattagttaaagctataagaaatcaatctaaaaaaatttggcatgtttctaatgcatttcaaattccagagggagaaaaattggcaaaaaagttgtgtcaaaagacttttgctgattatgttatgtttcaaaattcaggagcagaagctacagaggcagctataaaagtagctagaagatatttttactctattggcaaacctcacaaaaatagaattttgtgtgtcaagaattcatttcatggaagaacactagctgcaatttttgcaagtggttccaagaaaatgacagaagggtttggtccaaaagtcccaggatttgatcattttgtttttggggatcataaatcattaaagaaaaaaataacaaagaatactgcagcaattatggttgaaccaatcatgggggaaggtggaattcgtgtaatacctgacttttgcttaagagagttaagaaaattatgtaacaagaaaaagatattacttattttggatgaagttcaatgtggaatttcacgtacaggtgattttttcgcatttgaacaatccaaaataaaacctgatattgtaccaattgcaaagggtataggtgggggatttcctattggggcagttttgatgaataaaaaagttgcagaaggcatgacaccaggtacacatggttcaacttttggtggtgcaccacttgcttgtagtgtggcaaatgcagtgatggatatagtttctactaagaaatttctaaataacgtaaaaaaatcttcaaaatattttttttctaaattgaataagctaaaagaaaaatatccaagaactattaaagagataagaggaagaggtttattaattggaattcaactttatgcagatcaaactaagtttattaaaaaattaatggacaataagttatta

SEQ ID NO: 246099 - DNA, 1168 bp, Unknown
  Bacterial polypeptide expressing nucleotide sequence isolated from the Sargasso Sea
gatgagtgcaattttaggaacatacaacagaaaaaaaatatcttttaaaaaaggtaagggagcgtatttatatgcccataacggaaaaaaatatttagattttgtatctggaattgctgttaattcattgggacattgccatagccatatggtcagagcaattcaaaaacaatcaaaaaaattaatacatgtttcgaatgcttttgagatacctgagcaagaaaaactagccaaaagactaaccaagaattcatttgcagattttgttgtttttgttaattcaggtgccgaagccacagaagcaagtattaaaattgcaagaaaatatttttttgaaaaaggtatgcccgaaaaaaatagaattataacgttcaaaggagcttttcatggaagaactcttgctgctttatttgcagctaacaataaagatcatacaaagggatttgggccaagagttgaaggctttgatcaagtaccgtttggggaccatgaagctttgaacaaagcaattactaataaaactgcagctataatggttgaaactattttaggagagggaggaataaaagtcattccgaatgaatgtttagtaggattaagaaaaatttgtgatgaaaaaaaaatacttctaatattggatgaagttcaatgtgggattgggagatcaggaaaattatttgcttttgattatgcaaagataaaaccagatatagtacctattgcaaaaggtattggtggaggttttcctctaggagcttgcttagtaaataaaaaagcatctgaaggtatgaagccaggtacacatggaagtacatttggaggaaatccattagcaatgtcagtcgggaatgcagttttggatattattttgaaaaaaggttttcttaaaaatgtagagagaaacgggcaattttttaaagatgaattagttaaattaaagcacaaatataaaaataaaattttagatgtaagaggcaagggactattggttggcgtaaagttatcgattaataataataaatttttagaacatatgtttaaaaataaattattagcagtaaaagctgcggataacgtaattagattattgccaccattaattgtgaaaaaagaggaaattaaaaaagcaattaatataattgataaatccttaaaggaattcaaatga

SEQ ID NO: 246100 - DNA, 817 bp, Unknown
  Bacterial polypeptide expressing nucleotide sequence isolated from the Sargasso Sea
gatgccgaattattcctttccagacttggtaccagaaaaagcttcaggttccaaactttgggatgaaaatggaaaagaatatattgattttggtggtggtatcgctgttacttctttgggccactgtcatcctattctcatgaaatccatggaagaacaatccaaaaaactttggcatgtaagtaattatcttctaagcaaacctgcaaaagaactaggacaaaaaatagcttcaaaaagttttgccgataaagttctttttagcaactcaggcaatgaagcaaatgaagctgcaatcaaattagctagaaaatatttctttgaaaaaggcgatgaagaaaaatatgagattttatcgtttacgaattcatttcatggaagatctcttgcaaatattactttaggagattcagaatttcatcaaactggctttggtccattaccaaaaggatttattaaagctgaattcaataatattgatgatgttaagaagaaaatctctaataaaactgcagcaataatagttgaattaattcaaggtgaagcaggagtaataagcgcacaaaatgatttcattgaggcgcttagaaatatctgtaatgaaaataatattcttcttatttttgatgaagttcaaagtggaattggtagaacaggaactttatttgcttatcaaggttatggagtaattccagacatagttacattggcaaaagggcttggaggtggtttgcctattgctgcaacaattaccacaactgatatagctaattgtatgcaacctggaactcacggaagcacatttggtggtaatcca

SEQ ID NO: 246101 - DNA, 1219 bp, Unknown
  Bacterial polypeptide expressing nucleotide sequence isolated from the Sargasso Sea
atgagcgttgatatgaagttgaatcgtgcccagtttgatgcggttatggtgcctaactatgcgcctgctgccgtgatcccagtacgtggcgaaggcagccgtgtatgggatcaagagggtaacgaatttatcgattttgctggcggtatcgcggtaaattgcttaggtcactgtcatcctgccttagtgaatgccttaaaaacccaaggtgaaaaattatggcacctgtctaacgtaatgaccaacgagcctgcactcgagctggccactaagttagttaatagcacatttgctgagcgtgtctattttgccaactctggcgccgaagccaacgaagcggcactgaaattagcccgtcgttatgctttagaaaaatacggcgtagagaaagatgaaatcatcgccttcgataaagccttccacggccgtactttcttcaccgtgagcgttggtggtcaagcggcctattccgatggttttggtccaaaaccgcaaagcattacccacttaccttataacgatgttgcggcattagaagcggccgtatcggataaaacctgcgccatcatgctagagccactgcaaggcgagggcggtattattaatgctgatcctgcgttcctcaaagcggtgcgtgaactggcaaataaacacaatgcactggtgattttcgacgaagtacaaaccggtgttggtcgtacaggcgaactttatgcttacatgggcaccgacatagtgccggatattctgaccacggctaaagcacttggcggtggtttccctattgcagctatgctgactaccgcggaaattgctgagcacctaaaagtggggactcacggttcaacctatggtggtaatccattagcttgtgctatcggcaacgcggtattagatgtggttaacacgccagaagtgttgaatggtgtgaaacatcgcgagcaattattacgcgatggcttgaacaaaattaatgaaaaatatcacgttttctctgaagttcgcggtaaaggcttactgttaggggcggttcttaatgaacaatatcaaggtcgttcacgtgactttttagtggcatctgttgctgaaggcttaatgagcctgatggcgggggccaacgtagttcgttttgcaccttcactggtgatccctgaggcagatattgcagaaggtctggcacgttttgaacgtgccgtggcgagcatcgccgctgcctaag

SEQ ID NO: 246102 - DNA, 784 bp, Unknown
  Bacterial polypeptide expressing nucleotide sequence isolated from the Sargasso Sea
ttgagtgctactggacagcccaaatatcaaaaaggtttcgaaccgatgattcaagggttcaaattttttaaatttaacaattttgattcggtaaaaaaattatttgaagagtgcgaaaataataatcaaaaaatttccggcgttttagttgaaccaatacaaggagaaggtggcgtaattcctggaaataaaatattttttagaagcctgagagatatatgtgataaatataattctcttctcattttagatgaggtccaaagtggagtaggtcgtactgggaaaatgtggggttatgagaatttgggaattgaacctgatggattcacccttgctaaaggattaggaggaggccatgcaattggagcattattagtaaaagaaaaagccaacattttttctccaggagatcatgcaagcacttttggggggaaccctttcgcctgtaaagctgccataacagtattagaagaaatcaatagaagaaatcttatcaataatgtttatctaagaggagaacaattaagtgctggatttgaagaattgtcaaaaaaatttcctaatattattaccgggaaaagaggtttaggtttaatacaaggtcttgtgatcaatgatgaatatgctgatgcaaaaacaattacattaaaagcttttgataaaggattactggtagttcctgcaggaggaaacgttgtaaggattgtcccaccattagttatatcgcgaagagaaataaatattcttttgaataagctaaattcaatttttgaagagttatagc

SEQ ID NO: 246103 - DNA, 1168 bp, Unknown
  Bacterial polypeptide expressing nucleotide sequence isolated from the Sargasso Sea
tatgagtgccttagcaagaaattataatagaagaaaaattgcatttaaaaagggaaaaggaagctttctttatgcaacaaatggaaaaagatatttagactttgtacaaggaatagcagttaattcactaggtcatgctaatccaaatctaattagagctataaataaacaagctaaaaaagtatggcatgtatcaaatgcatttataattcccgaaggagaaaaacttgctaaaagactcacccaaaaaacgtttgctgactatgttatttttcaaaattcaggaactgaagcaactgaagcagcaataaaagttgcgagaagatatttttactcaaagggcaaaccacataaaaatagaattttatgcgtaaaaaattcatttcatggaagaactatcgcagcaatatttgcaagcggatcaaaaaaaatgacagaaggatttggaccaaaagtttcgggttttgaccactttaaatttggagatcacaaatctttaaaaaaatctattacaaaaaagacagcagcaattatggttgagcctataatgggagaaggtggcattaaagtgatcccagattggtgcttgagagagctaagaaaaatttgtaataaaaaaaaaattcttttaatattagacgaagtgcaatgtggaatcggtagaactggagatttttttgcatttgaaaactctaaagttaaacctgatatcgtccctattgcaaagggaattggaggtggatttccaataggggcagtattaatgacaaaaaaggtcgcgctctcaatgtcacctggtacacacggctctacctttggaggcaacccactggcaatgagcgttggaaatgctgttttggatcaaattttaaaaaaaggatttcttaacaatttaaaaaaaacatcaaaatatttttaccaagaattaaataaaattaaaaaagattatcccaatattattaaagaaattagagggaaaggtttattaattggaatacaattaaattttgatcaatcgaagtttattaaatttttagaaaaaaattatttattaacaatcagagcggcagaaaatgttataagaattttaccacctttaaatgttaaaaaaaatgaaatcgatttagctttaaagattatagataaagtttgtaaagaatataagtaa

SEQ ID NO: 246104 - DNA, 856 bp, Unknown
  Bacterial polypeptide expressing nucleotide sequence isolated from the Sargasso Sea
atggttcaaaattcaacatatataatgccaacatacggtgaaagagaacttgaatttaaagaggggaagggatgttttttaacttctataaacgataaaaaatacttagattttgggagtggtatatcagtcaattctttaggccattgtcatcctagattggttaaagctctacagcaacaagcttctaaactgtggcatacatccaatctttatcgtaactcaatccaagatgagtatgcaaaacttttatgtatgaatagttttgctgaaaaaattttttttactaattcgggtgttgagtcaatagaagctggaataaaagttataaaaagttttcattattatcataacaacttagatcaaaagaatataattacttttgaaggtgcatttcacggtagaacttttgctgctttatcagctcaacaaaatgaaaaatattcaaaagggtttgagccattattacctggatttattaagattccttttaatgatattgaatctgttaaaaaaaatattaacaaaaatacagctgctataatgatagagccgattcagggtgagggaggcattagaccagctgatttaaaatttttagaagagataaaaaaaatttgtgaaaaaaataatctattattatttttagatgaggtgcaaagtggttttggaagatcaggcaaattgtttgctcatcaatgggcaaatttagagccagacatagtagctacagcaaaaggtataggttctggttttcctatgggagcatgtttagctactaataaagcatgcataggtatgtccaaaggtgttcatggctctacttttgctggcaatcctctagctatgtcagtag

SEQ ID NO: 246105 - DNA, 600 bp, Unknown
  Bacterial polypeptide expressing nucleotide sequence isolated from the Sargasso Sea
ttctgcaaggtgtacgtgatttatgtaatcaatttaatgcactgatgatttatgacgaagtgcaatctggggtgggccgtactggtaaattgtatgcttatatgcacacgaatgtagtgcctgatattctgaccacagctaaatctttaggcggtggcttccctattggcgctatgttgactaccactgagattgccagtcatttaaaagtcggcactcatggcagtacttatggtggtaatccactggcttgtgccgtagcagaagctgctttagataccattaatcagcctgaagtcttaaatggcgtgttggagcgggaaaaactgttccgccgcgaattagctgcgatcaacgaaaaacataatgtatttagtacagtgcgtggtcagggcatgttgttaggcgctgtgttaaacgatgagtttaaaggtcgttcgcgcgacttttttctggcttctgccgatcagggcttgtttgctctggtggctggtccggacgtgatccgttttgctccttcattagtgatccctgaagcagacattattgaaggcatgaagcgttttgagaaagcagtagcacaagtgaaacaaggctgaa

SEQ ID NO: 246106 - DNA, 775 bp, Unknown
  Bacterial polypeptide expressing nucleotide sequence isolated from the Sargasso Sea
ctgggacaaccaaaatatcaaaaaggtttcgaaccaatgattcaagggttcaaattttttaaatttaacaattttgattcggtaaaaaaattatttgaagagtgtgaaaataatgatcaaaaaatttccggcgttttagttgaaccaatacaaggcgaaggcggcgtaattcctggaagtaaaatattttttaaaagcctgagagaaatatgtgataaatataattctcttctcattttagatgaggtccaaagtggagtaggtcgaactggaaaaatgtggggttatgagaatttaggaattgaacctgatggattcacccttgctaaaggattaggaggaggtcatgcaattggagcattattggtaaaagaaaaagccaacattttttctccaggggatcatgcaagcacttttggagggaacccatttgcttgtaaagctgccctaactgtattggaagaaataaatagaagaaatattatcaataatgtttatctaagaggggaacaattaagtaatgggtttgaagaattgtcaaaaaaatttccaaatattattatcgggaaaagaggtttaggtttaatacaaggtcttgtgatcaatgatgattatgctgatgcaaaaaaaattacattaaaagcttttgataaaggattactggtagttcctgcaggaggaaatgttgtgagaattgtcccaccattagttatttctcgaagagaaattaatattcttttaaataagctaaattcaatttttgaagagttatagc

SEQ ID NO: 246107 - DNA, 1189 bp, Unknown
  Bacterial polypeptide expressing nucleotide sequence isolated from the Sargasso Sea
atgatcccgtctgtccttccgacctataaccgtgcgcccctgaccttcgtcaagggcgagggaagctggttgatcgaagatgacgggcgccgatttctggatctgggggccggaatcgcggtgaatgcgcttggccatgcaaaccctgcccttgtcgaggccctgaccgagcaggcgggcaagctgtggcacacctcgaacctttacgatatcccgcagcaacaggccttggccgataagctggtcgatgcgacctttgccgatacggtcttcttcaccaactccggcaccgaggcctgtgagttggcggtgaagatggcgcgcaagtatttctatgaaaagggccagcccgagcgcatcgagatcatcgccttcgaagggtctttccatggccggtcccacgcggcaatcgccgctgccgggtccgaaaagatgaccaaggggttcggcccgctgttgcccgggttcaagcatgtcgcctggggcgatcacgacggtctgcatgcggcgatcaacgagaacaccgccgccatcctgatcgaacccgtgcaaggtgaggggggtattcgcccgctttccgatcaagacctgaaggcgttgcgtgacctgtgcgatgagcatggcatcctgttgatcctcgacgaagtgcaatgcggcatgggccggacaggcaaactgttcgcgcatgaatgggccgggatcgaaccggatatcatgatggttgccaagggcatcggcgggggctttccactgggggccgtgctggccacggaagaggccgcaagtggtatgaccgccggaacacatggctccacctatggcggtaatcctctggcctgtgccgtgggatcgaaggtgatggatatcgtggccgacccggcgttccttcaggacgtgaaccgcaaggcagggcagttgcgccaagggcttgagggcctggtttcttcccatccggaggtgttcgaggctgtccgggggcagggcttgatgctggggatcaaatgcaaggcccccaacacagacgttgtaagtgcaggctatgatgcgcaggtcaccacggttccggcggctgataacgtggtgcgcctcttgcccgcgcttaatatctccgacgacgacatcaacgaggcactgaaacgcctcgatgccgcagccacccaagttgaaaaagcgatgcaaaaggcgtgac

SEQ ID NO: 246108 - DNA, 913 bp, Unknown
  Bacterial polypeptide expressing nucleotide sequence isolated from the Sargasso Sea
aatgtcatacttagcaaaaaattataaaagaagaaaaatttcatttaataagggaaaaggaagctttttatattcttcgaaaggtgtcagatatttagattttgttcaaggtatagcagtaaactctcttggacattcaaaccctaatttaaataaagccttactgaaacaatcaaaaaaggtttggcatgtttcaaatgcttttgaaatccctgagggagaaagacttgcaaaaagacttacaaaaaatacttttgctgactatgttttatttcaaaactctggtgccgaggctactgaggctgctgtcaaagcagcaagaaagtttttttatgtaagaaataaaccatttaaaaatagaattctttgcattaaaaactcatttcatggaagaacacttgctgcaatttatgcgagtggatcaaaaaaaatgacagagggttttggtccaaaagttccgggctttgatcactttgaattcggagatcatgaagcactcaaaaaagctattaccaaaaaaaccgcagcaattatggtagaacctgtgttaggtgagggtggtattaaagtaattccaaaatggtgtttgaaagctttacgaaaaatttgcaaccagaaaaagatactattaattattgatgaagtgcaaagtggtataggtcgatctggaaaattttttgcttttgaatattcaggaattaagcctgatattgttccaatagcaaaaggtataggtggaggctttcctataggagctgttttaatgaataaaaaagttgctaaaggaatgaccccaggaagtcatggatccacatttggagggaatccattagccatggaaataggtaatgctgttttagatcaaattttaaaaaaatactttctgaaaaatgttcaaaaaaattcaaagtac

SEQ ID NO: 246109 - DNA, 700 bp, Unknown
  Bacterial polypeptide expressing nucleotide sequence isolated from the Sargasso Sea
cacttcagctttggcgatcataattctcttaaaaaaaaaattaataaaaacacagctgcaattatggtggagactattatgggcgaaggtggcataaaagtgataccagattggtgcttaaaagaattaagagcattgtgtaacaagaaaaaaatattattaatcctagatgaagttcaatgtggaataggaagatctggtgatttctttgcttttgaaaaatctaaagtaaaacctgatattgtgccgattgcaaaaggaataggtggaggatttcctattggagcagtgttaatgaataaaaaagttgcatcggggatgacgccaggtactcacggatcaacatttggaggaaatcctttggcgatggccgttggaaacaccgtaatggatatcttatcaaataagaaatttttaaataaagtaaaaaatctatcaaaatattttttactaaaactaaatgaaattaaagaaaagtatccaaatgtgattaagcaaataagaggaagaggttttttgattgggatacaattatacaaagatcaaaatgaatttattaaaaaattgatgaataatcagctactcactattcgagcagcagaaaatgttgttcgtattttgcctccattaaatgttaaaaaaaatgaaatagatctagcaataaaaattattgaaaaggtctcttcacagataaaataat

SEQ ID NO: 246110 - DNA, 1180 bp, Unknown
  Bacterial polypeptide expressing nucleotide sequence isolated from the Sargasso Sea
atgacttccaaatatatcatgaacacatatgctccctccgatttaacctttgatagaggtttaggaagttggctgtttgatgataaaggtcataaatatttagattttgcatctggaattgctgtaaattctgttgggcattcgcaccctaacgttgtgtctgcaattcaaaaacaagctgctaaattaatacatacctcaaatttatataatatttcacagcaggaaaagcttgcgaaaaggctttgtgacttaagttttgctgattgtgtttttttttctaattcgggagctgaagctaatgaaggagctgtaaaagtagccagaagatatatgtttgaaaagggaaaacctgagcgaaatgtgatactttgcgttgacggatgctttcatggaaggacaatttctatgctctcagccacatcaaaaaaagagaatagaaccggttttggtcctctgcctggaggtttcaggcatattgcatttaatgatttaaattctctagctgagcaatttgctgccaaagacgtggctgcaatcatgattgaaccagttttaggagagggtggtgctaaatcaatatccaaagaattcttcaaaaaagcccaaaaattagctaataataataattgcttggtaatatcagatgaagttcaaactggtataggtagattaggaacattatttggttatgaaaaaactgatcttaaacctgatattatggcaatagcaaaaggtcttggcggtggtgtgccaataggtgcagttttggcaagcaaaaaagttgcatccgcaatgaaacctggaagccatggatcaacatttggtgggaatcctctggttactgcctctgcaaatgctgtcctcgatatagttgcagaaaaagattttttaaaaatccttgggcataaaattgattatctatctaaggagctgaataaactaatgaatcaatatccaaaatttgtagcagaggttagagggcaaggatttttaagaggcctaagattatttgatccagttaatgaaatccaaaatgaacttaagaaaaataaggtattatttgtagctgctgcagagaatgttcttagacttttaccgccattgactgtctccattgaagaaattgatatagctatttctgctttaaggaaagtagcttgtaagggaattaaataat

SEQ ID NO: 246111 - DNA, 643 bp, Unknown
  Bacterial polypeptide expressing nucleotide sequence isolated from the Sargasso Sea
gctgctatcatggtcgagacaatcatgggagaagggggcattaaagttattccaggatttttgtctcaaaggcttgagaaaattatgtaataagaaaaaaattttattaattcttgatgaagttcaatgcggaattggaagaagtggtaaattttttgcttttgaatatgcaaaaattaaacccgatatcgttccaatagcaaaagggattggtggaggttttccaataggtgcggttttagtaaataaaaaggtggcctcaggcatgaagccaggaacacacggttcaacgttcggaggaaaccctttagcaatgagtgctggaaatgctgttatggatatcatgtttaaaaaaggtttcttaaataatgtaagtaaaaacggaaaatatttcataaatcaacttgataaaataaaagataagtatccaaagattattaaagaagtcagaggtaaaggcctgctcatcggactctgtcttcacgtaaatcaagctaaatttattcaaaaacttttagataataatttgctgtcagtaagagctgcagaaaatgttgtcagacttttgcctcctttaaatgtaacaaagagcgagattaacttaggtttaaaaataatagagaaagtttgcaaaaaattttaa

SEQ ID NO: 246112 - DNA, 988 bp, Unknown
  Bacterial polypeptide expressing nucleotide sequence isolated from the Sargasso Sea
tatgaataattctgaatggattgcaattgaaaacaaatattatgctcaaactgtaaggcgccagccagtagttatcgagaaaggcttaggggctaaagtttgggatgctgaagggaaagaatatttagattttgtggctggctgggcagtggataatttaggtcattctaatccagttatatctcaagctataagggatcaagccgatactttactccagacatcaaatcagttttacacgataccacagctaaagctagcagaattactaattgaaaatagcgctatggataaagtcttctttggtaatagcggggcagaagctaatgaaggtgctattaaattagcccgaagatatggaatgcttaacaaagatggagcttatgaaattatcacggcattgaattcattccatggtaggacattaggaacggtagctgctacgggacaacctcactatcaagaaaattttgctccattgttgccaggatttgttcatgttgattacaacgatgtggatgcaattattaatgctactactgataggacagcagcaattatgctagagccagttcaaggagaaggaggggttatagttccttctgatgactatctccctagagtcagagaatggtgtgataaaaataatatattgttgattttagatgaagtacagacaggaattggacgattaggtagtttattcgggtatcaagagtacggcatagagccggatgttatgactttggccaaaggtttaggatttggtttgccaattggcgcgtttttgtctaaggaatactgcatggctctagttcctggagatcacggttctacttttggaggaaatgcattaactacggcggtagcttttgcgggaacagatcatttgctgagtagtggagtattgcaaaatgtgaaagacatggaaatttatttcatgaatgcgttaaatcagcttaaagaaaaatatggattcatcaacgaa

SEQ ID NO: 246113 - DNA, 567 bp, Unknown
  Bacterial polypeptide expressing nucleotide sequence isolated from the Sargasso Sea
gaagaatatgtaatgaaaaaaaaattttattaatattagatgaagtgcaatgtggaattggaagatcaggtaaattttttgcttttgaatattcaaaaataaagccagatattgtacctattgcaaagggaattggaggtggatttccaattggcgctgtattaatgaatagaaaagttgcttcatcaatgacgccaggaagtcatggttcaacttttggaggaaacccattagcaatgagtgtaggaaatgcagttttagatcaaatatttaaaaaaaattttcttaaagatatagtaaaaaattctaaattttttcataaacaacttaaagatattcaaatggagtatccaagtataataaaagaggtaagaggaattggattgctaattggattacaactttataaagatcagtctagatttattaaaaaattagaagataataaattattaacaataagagcagctgaaaacgtagtaagaatattacctccacttaacgtaaaaaaatcagaaataaatcttgctttaaaaataatcagaaaagtttgtaaagcattttaat

SEQ ID NO: 246114 - DNA, 1165 bp, Unknown
  Bacterial polypeptide expressing nucleotide sequence isolated from the Sargasso Sea
atgagcgctttagcacctaactacaaaagaaaaaatttatcatttataagaggaaaggggagctttcttataacagcagatggagataagtatttagattttgttcagggtattgcggtaaattctcttggacatgccaacaaaaaactcataagcgcaattaacaaacaatcaaaaaaactttggcacgtatcaaatgcattcagaattccagagggcgaaaaactagccaaaaaattagtaaaaaaaacttttgcagacgcaataatttttcaaaatagtggtgctgaagcaactgaaacggctatcaaagttgctaggagatacttttattcgataaacaaggagcataaaaatagaattatttgtattaaaaattcttttcatggcagaacaattgcagcaatacatgcaagcggttcaaaaaaaatgacagaaggttttgggccaaaagttccaggttttgatcattttgaatttggtgatcacaaaaaacttaaaaaattaattaaaaaaaatacagcagctattatgattgaaacggtcatgggtgaaggaggtattaaagtaattccaaattggtgcataaaagctattagaaaaatatgcaatcaaaaaaaaatacttttaattcttgatgaagttcagtgtggcattggaagatcaggaaaattttttgcttttgaatactcgaaggttaaacctgacatagtccccatagcgaaaggaattggaggcggttttcctattggtgcagtcctgatgacaaagaaagttgcgaaagctatggtgccaggtacgcacggttcaacatttggtggaaaccctcttgcaatggcagttggtaacgctgttttagatcaaataaataagaatttattattgaatgtaaacaaaatgtcgaaatattttattaatgaacttaataaaataaaaattaaatatcccaaagtaattaaagaagtcagaggtgtagggctattaattggcttacaactttttaaggaccaaactgagtttataaaaaaattaatggaaaataaattattgactattagagcagcggaaaatgtcataagaattttacccccattaaatgtaacgaaaagagaaattgatatagctttaaaaattattagcaaagtttgtaaccaaataaaatgaa

SEQ ID NO: 246115 - DNA, 910 bp, Unknown
  Bacterial polypeptide expressing nucleotide sequence isolated from the Sargasso Sea
gatgaaagaagaaaaaaaattacttgaaacatatcaaaaagttatggtgccaaattatttgccagctgactttattcctaaaagcgctaaaggatcaagggtttgggattctaatgataaagaatatatagatttaggtggtggtatagctgttaattctctcggtcatgcaaatgatgaactgattgaagtactatcagctcaatctaaaaagttatggcacttaagtaattttgttgcttcagaggaggcaataaaactaggagagaagttaactgataatacgtttgcagataaggttttcttttgcaattcagggtctgaagcaaatgaagcagcaataaaaattgttagaaagtttcattcttcaataaatcaagataagaccgagataatttcgtttaataattcctttcatggaagatctatcttaaatataactttaggtggatcagaagaatctggaaaagaattttctccattaatagaaagaattaaacatgcaatatttaatgacattaactctgttaaaaacttaatttcagatagaactgcagcaataatcattgagcccattcaaggcgaaacaggaattgttgaagcaaataaagaattccttaaagagataaaaagcctgtgtgattctaattccataagtctaatttttgatgaggtgcagagtggagttggaaggactggtcatttatatgcttatatgaaatatgaaatagaaccagatattcttaccactgctaaagggcttggaggtggatttcccataggagcaactttggtaagtgataacctagctcaaactcttcagccaggtactcatggaagtactttcggtggtaatcatttagcctgtgctgtagcaaataaagttctggatataataaattgccctgat

SEQ ID NO: 246116 - DNA, 1011 bp, Unknown
  Bacterial polypeptide expressing nucleotide sequence isolated from the Sargasso Sea
catgaatttcaatgagtacccgatcgagtcgctgatgtacatcacgaaccggcccgaaatcgttttcacgcacggcaagggctcgtggctctatgacaataacggcaagcgatatctggacttcatccagggttgggcggtcaatagcctcggccactgcaacgagggcatgatcgaagcgctgaacaagcaggcgcaactattgttgaatccgtcgccggccttctacaacgaaccgatggcgaaactcgcgggtctgctcacgcagcacagctgtttcgacaaggtgttcttcgcgaacagcggcgccgaagccaacgaaggtgcaatcaagctcgcgcgcaagtggggcaagaagttcaaggacggcgcgttcgaaatcatcacgttcgatcacagcttccatggccgcacgctcgccaccatgtccgccagcggcaaaccgggctgggacacgatctacgcaccgcaagtgccgggtttcccgaaggcggatctgaacgacatcgcatcggttgaaaaactcatcaacgcgaagaccgtcgcggtgatgctcgagccgattcagggtgaaggcggcgtgatccccgccacccgcgagttcatgcagcaactgcgcgcgctgaccaaacagcacaacctgctgctgatcgtcgacgaagtgcaaagcggttgcggccgcgccggcacgctgttcgcgtacgaactgtcgggtatcgaacccgacatcatgacgctcggcaagggcatcggcggcggcgtgccgctcgcggcgctgctctcgaaggctgaaatcgccgtgttcgaagcgggcgaccagggcggcacgtacaacggcaatccgctgatgaccgcggtcggctactcggtgatttcgcagcttaccgcgccgggtttcctcgaaggcgtgcgcgcgcgcggcgaatatctgcgcgcgaagctgctcgagctgtcgaaagaacgcggcttccaaagcgaacgcggcgaaggcctgctgcgcgcgctgctgct

SEQ ID NO: 246117 - DNA, 1237 bp, Unknown
  Bacterial polypeptide expressing nucleotide sequence isolated from the Sargasso Sea
atgaacgacctgactgtgacacgccagaccttcgacgaagtgatggtgccggtgttttcgcccgccgggttcgtgccggatcgcggtctcggctcacgcgtctgggatacgcaaggccgcgactatatcgacttcgccggcggcattgccgtgaccgcgctcggtcacgcgcatcctgagctgctgaaggtcctgcacgagcagggcggcaagctgtggcacatcggtaacggctacaccaacgaaccggtgttgcgtctcgccaaacgcctcgaagcgctgaccttcgccgaccgcgcattcttcgccaactcgggcgcggaagcgaatgaagcggcgctgaagctggcgcgccgcgtcgcgttcgatcgtcatggcgcggacaaagccgaaatcatctcgttcacgcaatcgtttcatggccgcacgttcttcaccgtgagcgtcggcggccagccgaagtattcggagggcttcggcccggtgccggcgggcatcacccatctgccgtacaacgacatcgaagcggcgaagaaggcaattggcgcgcaaacctgcgcggtgatcgtcgagccgattcagggcgagggcggcgtgatcccggcggatccggccttcctgaaggcgctgcgcgaagcctgcgatcagcacggcgcactgctgatttttgacgaggtacaaacgggggtgggccgcagcggctatttctacgcctatcaggaaaccggcgtgacgccggatatcctgaccaccgcgaaagcgctcggcaacgggttcccgatcggcgcgatgctgaccaccaacgaactggccgcgtacttcaaggtcggtgtgcatggcacgacctacggcggcaatccgctgggctcggcaatcgcggagaaggtggtcgagctgatcagcgatccgaagctgctggaaggcgtgcacgcgcgcagcgaagcgctgaagggccagttggcgaagctcaacgatcgcttcggcatcttcaaggaagtgcgcggcaagggtcttctgatcggtgcggagttgaccgaagcattcaagggtcgcgcgaaagacttcgtcacggctgccggcaagcatggcgtgatcatgcttatggcgggtccggacgtgttgcgcttcgtcccgtcgctgatcatcccgctcgacgacatgtacgaaggtttcgcgcgtctggctaaggcgatcgacgaagtggtcggcgcaaccgctgaagcggccgcccgttaat

SEQ ID NO: 246118 - DNA, 1234 bp, Unknown
  Bacterial polypeptide expressing nucleotide sequence isolated from the Sargasso Sea
atgacgacctcgaccgtgacccgccagacattcgacgaagtgatggtgccggtattttcccccgcgccgttcgtgccggaccgtgcagagggctcccgcgtgtgggacacggctggccgcgagtacatcgacttcgcgtgcggcatcgcggtcacgtcgctgggccacggccacccggaactgctgaaagtcctggacgaacaaggccgcaagctctggcacatcggcaacggctacacgaacgagccggtgctgcgcctcgcgaagcgcctcgaatcgctgaccttcgccgaccgcgcgttcttcgcgaactccggcgcggaagcgaacgaagccgccctgaaactcgcacgccgcgtcgcattcgaccgccacggcgccgacaaatatgaaatcgtgtcgttcgtccagtcgttccacggccgcacgttcttcacggtcagcgtcggcggccagccgaagtactcggaaggcttcggcccggtgccggaaggcatcaagcacctgccgttcaacgacatcgaagccgccaaggccgcgatcggcccgcaaacctgcgcggtgatcgtcgagccggtgcagggcgaaggcggcgtgatcccggccgatccggccttcctgaaggcgctgcgcgaagcctgcgacgcgaacggcgcactgctgattttcgacgaagtgcaaacgggcgtcggccgcacgggccagttctacgcctatatggataccggcgtcacgccggacatcctgacgaccgccaaggcgctcggcaacggcttcccgatcggcgcgatgctgacgacgaacgagctggccgcgcacttcaaggtcggcgtgcacggcacgacttacggcggcaacccgctcgcatcggcaatcgccgacaaggtcgtcgaactgatcagcgacccggcactgctcgaaggcgttcgtgaacgcagcgtgcgcctgaagggcgcgctcgagcgcatcaacgcgcgcttcggcatcttcaaggacgtgcgcggcaagggcctgctcgtcggcgccgaactcaccgccgcattcgacggccgcgcgaaggacttcgtcaccgccgccgccgagaacggcctgatcatgctgatcgccggcccgaacgtgctgcgcttcgtgccgtcgctggtgatcccgttcgaccagctcgacgaaggcatgaagcgcttcgagaaggcagtcgagcaggtgctcgcggcccaggaagccaccgcgcgctgat

SEQ ID NO: 246119 - DNA, 875 bp, Unknown
  Bacterial polypeptide expressing nucleotide sequence isolated from the Sargasso Sea
aatgaaaaattataaaccttacccaatttcttttgaaaaaggaaagggtatctatttatatacaaaaaaaaacgaggagtacattgatgctatctctggtattggtgtgtgttgcttaggacatggtgataaaaaaattacaaaagttatttctaatcaagcaaataaattattacatacctctaatatatatgaaattaataaacagaaagaattagcaaaaaatttatgtaaaatttcatcaatgaagtcagtatttttttgtaactctggttctgaagcaaatgagactgctatgaaattagcaagacttcatgcaaataaaaataatcttaaaaatcctaaaatgattgtatttaaaaatggttggcatggaagaagttttatgacgcttgcagcaacaagtagtgaatctgcaaagaaagggttttctccgttaccaggaggatttattaccttaccactaaacgatattaatgaaatacataaagttattaagttaaagcaagtatcagcaattatgattgaggttattcaaggtgaaggtggaatcaatattagtgaaaaaaattttcttaagaagttaagggacatcacaaaaaagaaagatatattacttataatagatgaagttcaaacaggtattggaagaactggaaaatggtttgcttatcaaaactttggcattatccctgacatagtgacttcagctaaaggacttggtaatggtgttcctataggagcttgtatgggtaatcaaaaagtatcaaagctttttgaacccggatcacatggtagtacatttggtggaaatccgtttgttagcacaatttccttagaagtattgaaaattataaaggaaagaaatttattag

SEQ ID NO: 246120 - DNA, 856 bp, Unknown
  Bacterial polypeptide expressing nucleotide sequence isolated from the Sargasso Sea
gttgctagaagatactttttattcaaaagggaaacctgaaaaaaatagaatactttgtataaagaattcttttcacggtagaactttggctgcaatttttgcaagcggatctaagaaaatgactgaggggttcgggcccaaagtaccagggtttgatcattttgactttgctgatcacaaaggtttagaaaaagctattacaaaaaaaacagcagcgataatgtgtgaaactgcaatgggcgagtcaggaataaaagttatacctgattggtgtttaaagggtttaagaaaactctgtaataagaaaaaaatactcttaatccttgacgaagttcaatgtggagtaggtagatctggtaaattcttcgcatttgaacatgctaaaataaagcctgatattgttccaatagccaaaggtattggtggtggttttccaattggcgcagttttaatgaataaaaaggtggcacccgcgatgacagctggatctcatggaagtactttcggtggaaatcctttagcaatgagcgttggaaatgctgttatggatcaaatgtttaaaaaaggatttttacaaaatgtacaaaaattatcaaaatattttattaatgaattaaacctaataaaagaagattacccagatataattaaagaagtaagaggtattggattattgatcggattacaactttttgaagaccaatcaaaatttattaaaaaattagaattaaacaaattacttacaataagagcaggagaaaatgtagtcagaattctgcctcctttaaatgttaaaaaacaagaaatagatcttgcagtaaaaataattagaaaagtttgcgaaaattataattaa

SEQ ID NO: 246121 - DNA, 481 bp, Unknown
  Bacterial polypeptide expressing nucleotide sequence isolated from the Sargasso Sea
cttgccagatataatggccatagcaaaaggtctgggtggaggatttccaataggggcttgcttggcaactaataaagcagctagtggaatgaccaaaggtacacacggatcaacttttggtggaaaccctttagcttgcgctgtagctagggccgttttggatgaaattataagtcctggttttttagaagaagtgcaacggaaatctaaaatttttatgcaagaactttcaaggattctagatcagtattcagatatttttgaagaattaaggggggagggattaatgttaggcctcaaatgtaaagtggataatatggaattaatagaaactggttatgaccaaaagctcttattaatacctgccgcagacaatgttattcgcattttgcccgcgttaaatattaccgataaagagattagggaagggataaataggatagagactatagctgcttcatttcaagagaaaattaaatag

SEQ ID NO: 246122 - DNA, 569 bp, Unknown
  Bacterial polypeptide expressing nucleotide sequence isolated from the Sargasso Sea
aaaactttgtaatcaaaaaaaaatattacttattttagatgaagttcagtgtggaataggtcgtagtggtaatttttttgcatttgagcagtcaaatgttaaaccagatattgttcctatagcaaaaggaatcggcggaggttttccaataggtgcagttcttatgaacaaaaaagttgcagctggaatgacacctggcacacatggttcaacttttggaggaaatcctttagccatggccataggaaatactgtaatagatatagtctctgataaaaagtttttgaataatgttaaaaatttatcaaattattttcttataaaattaaatcatttaaagaaaaaatatcctaatatcataaaagagataagaggaaaaggtttgttgattggcatacaacttcacatagatcaaacaaattttatcaaaaaattgatggataataaattacttactattcgtgctgccgaaaacgtagttcgtgttttaccccccttaaatgttaaaaaaaatgagttagataaagctattaagatcatagataaagtttgtgttgagattatataag

SEQ ID NO: 246123 - DNA, 1144 bp, Unknown
  Bacterial polypeptide expressing nucleotide sequence isolated from the Sargasso Sea
atgcaaacctataataggaaaccagtatcatttgttaaaggtgagggggtttatttgtgggataataatgggaaaaagtacattgatgctctatgtggacttgccgttacaagccttgggcattcgaatgagttaataagcaatgttctgtcaaaacaatcaaaaactctcatccatacatcgaatgcatttcaaatagatacgcaaaaaaatctagctactagattgtgtaagttatcaggtatgacaaacgcattcttctgtaattcaggggcagaatctgtagaaacagcaattaaaattgcaaggaagtatggtaatgatcacaatatttctacgccaaagattttagtaatggaaaacagttttcatggcagaacacttgctgctttatctgctacaagcagcaaaaaatcacatgagggatttacaccccttgttgagggttttgtaagagctccttttgattctgtagagaaaatagagttagctctccacaatcatgaagatatcgtagcgctattaaccgagccaattcagggagagggtggtataaaaattccaaaaccaggatacttaaagaaattgagagatatatgtaatgataaaaacttattatttatggtagatgaagtttcatcgggtttttgtagaacagggaagtggtttggatatcagcacgaccacatcactccagatgttgtaatggttgcaaaggctcttggaaatggagttcctattggagcatgccttgcttctggaaaagcttcaaatcttcttaaacctggctctcatggctcaacatttggaggaaattatttgtcaacatcggtaggacttcaagttttggatattatgagagatatgaacctttgtagaaatgccagagaaatgggagactatttttcaaaaaaactcaacgagaggcttgcgaataaaaaaagagtgaaagaaattagatccaaaggactaatgattggaattgagctggatgaggaatgcacagatattgttatcatggctttggataatgggttagtattaaatgttacaaaagatagaattattagaatgttgccaccattaataatcaataaatctcaaattgatgaaatagtgggtattcttgataaaataatatgat

SEQ ID NO: 246124 - DNA, 1174 bp, Unknown
  Bacterial polypeptide expressing nucleotide sequence isolated from the Sargasso Sea
aatgagtcatttagtcaaaaactataatagaaggaaaatagcttttaaaagaggaaaggggagctatttatattcgaccaatggaaaaaaatacctagattttgtccaaggaatagccgttaattcttttgggcattctaatccatatttatctaaagcaatcaacaagcaaactaaaaaagtttggcatgtctctaacgcttttattatccccgaaggtgaaaaacttgccaaaagattgacacaaaaaacttttgcagactacgtgctctttcaaaatagtggagccgaagcaacagaggctgctattaaagcagctagaagatacttctatgcaattggaaaacctcacaaaaatagaattctttgtattaaaaactcatttcacggaagaactttgggagcaatatttgcaagcggttctaaaaaaatgaccgaaggatttggacccaaagtacctggttttgatcattttaaatttggtgatcacaatggtttaaaaaaagcaatcaccaaaaatacagcagcaattatgtgcgaaacagccatgggtgaatcaggcataaaagttatacctgagtggtgtttgaaggaattaaggaaaatttgcaacaaaagaaaaatattattaattttagatgaggttcagtgtggagtaggaagatcaggaaaattctttgcatttgattacgccaaaataaaacctgatattgtacctattgctaaaggaattgggggcggctttcctttaggagctgttttaatgaataagaaagtagcgtctactttaacagcaggatcccacggtagtactttcggaggcaatcctcttgctatgagtgtaggcaatgcagtaatggatttaatttttaaaaaaggcttcttaaaaaatgttcaaaaaatatctaaatatttcatggttgaactaaaaaaaattaaagaagattatccagaaataataaaagaggttagaggaattggcttgctactgggcttgcaacttcacggagatcaaactaagtttataaaagaactagaaaaaaacaaattacttactattaaagcgggtgaaaatgttattagaattttacctcctttaaatgtaagaaaacaagagatagatttagcaattaaaattattagaaatacctgtaatcaggaaagtaacttatga

SEQ ID NO: 246125 - DNA, 1171 bp, Unknown
  Bacterial polypeptide expressing nucleotide sequence isolated from the Sargasso Sea
atgaacaatatattgccaacatacccaaggtctgaattaacgtttactcacggcgaaggtagttatttatatgaaaaatcaggtgaaaaatacttggactttgggacaggtatagcagtaaattcattaggatactcacatccatatttaaatcaaaaactcagagaacaatcagaaaagctctggcatctttcaaatgtttaccaaatcccggagcaagaactattagcttcacgtttgtgcgatttatgttttgccgactatgccttcttttgtaactctggtacagaagcagtagaggcaagtattaaagttgctagaagatattttcacaagactaaaaactctaaagtgaaaaaagaaattattagttttagtggttcttttcatggaagaaccataggtgcgcttgcagctcaaggacctgaaaaaatggaaacatttaatactgctgtaaatgattttaagtttcttgagtttggtgatcatgaattgttaaagagctcaattaatgaaaatactgcagcggtaattatcgaacctatacaaggtgaggggggagtaagagaagtccctacgttttgcctagaggcaattaggaaattgtgtgatgaaaacgaagttttgcttatattcgatgaagtgcaatgtgggatgggtcgaacaggcaaaatgttcgcttatcagtggtcaaacatagaaccagatataatgactatagcgaaagcaattggtaatggctttccaataggagcatgtttaacttcaaaaaaggttggtgatgctatggagtttgggtcacatggatctacctttggtggaaaccctctagcatgcagtgttggaaatgcggtgctagatttgatgacttcacctaaattctttagtgaagttgttacagtttctgagaaattattattagacctaaataaagttgcaaatgattatccagatattattgagggcataagaggcaagggttttattctaggattaaaatgtaacataaataatgaggatttcgttaaacaagcgcgtaaaaacttcattttaacagttaaggcttcagataatgttgtaaggcttcttccgccaataaatttatctaattcagaatgtgatgaagcaattgataaaattagatcaacttgcaaagaactgacttcatgaa

SEQ ID NO: 246126 - DNA, 1189 bp, Unknown
  Bacterial polypeptide expressing nucleotide sequence isolated from the Sargasso Sea
ttgtcgcacaaagtctaccttccgacctacccccccaaacccatggtgctggagcgcagccggggtgcagtgatctgggacctcgagggaaaagactacatcgatttcggtgccggcatcgccgtcagcagtctcggccatcaggacccggaactgctgcttgccatctcggaacaggcctcaaaactctggcacaccagcaacctttttctcaccgaacctccggtcagactggccgcagaactggtcgatgcttcctttgcggatcgggtctttttctgcaactccggagcagaggcaaacgaagcggcgattaaactggtgcgaaaatacgcttacctggaacatcctgaagataaacgcgagattctcagttttgatggatcgttccacggcagaaccctggctacggtgaccgctacttcgcagccaaaataccaggagggattcggcccccttccgggaggcttccgctatgcagcctacaacgatttcgaagaagccgaaaaagccatcgggccccagacctgtgcagtgctcgtagaaccgcttcagggtgaaggcggggtaaaccctgcccgtcccggctttctcaaacatctccgggaactctgtgaccgccatcaggcccttttgatcttcgatgaaatccaatgcggaatgggccgaaccggaaaactctttgcccatgaatgggaggagggagtcgttcccgatgtgctgaccctggccaaagcccttggctgcggacttcccatcggcgccatgctctgcagcgaaaaagtctcccaggctttcaaaccgggggatcacgggacgaccttcggaggaaacccgatcgtcgcctccgttgcccgtgctgccttgaaaaagatcaacacaccgcagatgatggcacatgtcatcaaacagggggaagccatccgcggaagattgcattccctcaacgatgaactcaatctttttggtgaaatccgtggtaagggactgatgctcggcggtgtgctccacgaggcgtggaaaggtcgggctggagaaatcgtctcgtctgcactgaatcatggggtactgatcctggtcgccgggccggacgtggtgcggctcgttccgcctctcaccatcaccggagacgaagtccagaccggactggaaagactcacgaaagccctcaaagaactcgcaccataaa

SEQ ID NO: 246127 - DNA, 1177 bp, Unknown
  Bacterial polypeptide expressing nucleotide sequence isolated from the Sargasso Sea
gatgaaaaattatttaatgaacacttacaatagaaaaaatatttcttttgttaaaggtaagggttcttatttatgggaccaaaatggtaaaaaatatctggatgcactttgtggactagcagtaacaagcttgggccattctaatgctaaaatttcagaggtaatttcaagtcagtcaaatacacttattcatacatccaatgcttttgtaatagatcagcaagaagaattagcaaaaaaactttgccaactctctggcatgtcttcagcgtttttctgtaattctggtgctgaagcagtcgaggcgtctattaaaatagcgagaaaatatggaaatgataataatattgataatcctaaaattatagttatggaaaatagttttcacggaagaactatggctgccttgtcagcaacaggatctggaaaagcacataaaggcttctatcctttgctagatggtttgttaagagtaccgtttgataatgtagagcaaattaaattattggcagaaaaacattctgatatcgttgctatattgttagaacctattcagggcgagggaggtataatcatacctagcaatgattatcttaaccaacttagaaaaatatgtgatgataacaaatggctactaatgatagatgaagtgcaatctggattctgtaggacaggcaaatggtttgcttatcagcataatgaaattattcctgatgttgtaacagttgccaaagcacttggaaatggtgtgcctattggcgcatgccttgctgcatcaaaagcatctaaaatacttattccgggaagtcatggttctacatttggtggtaactttttatccgcaagtgtaggtctaaaagttattgaagtaatgagagatatgaatttatgtctaaatgctaggacttgcgggaattatataaaatcagaattaataaatgccctggaaggtttacccattgtcaaagagataagatgcaagggacttatgattggtatagaattaaaagtgaaatgtatagacttggttgaaaaagctttagataatggcttggttataaatgttacaaaagaaaaaatcattagaatgttgccaccattaataattactagagaagaatctgacgagattgttaaaataataaagaagatagtgggtgaagtagagtatgaataa

SEQ ID NO: 246128 - DNA, 424 bp, Unknown
  Bacterial polypeptide expressing nucleotide sequence isolated from the Sargasso Sea
atgaattctgtagctaacaactataacagaaagaaaatagttttttctcatggtaaaggcatctacctatttaccaataagggggaaaagtatatcgatctcgcggctggaattgctgtaaatcttcttggtcattccaataaggatcttataaatgctctaaatgtgcaatcgcgaaaactttggcatgtatcaaacttatatgaaatagaagaacaagtaacactcgccaataaactgacaagttgttcatttgcgcataaagtttttttctgtaattcaggagctgaagcggttgaatgcacaattaaagcagcaagaagatatcacttttcaaaaggtaaaccagaaaaaaccgagataataacgtttaaaggttcttttcacggtcgaacgcttgggaacaatcgcagctgcaagtaat

SEQ ID NO: 246129 - DNA, 1048 bp, Unknown
  Bacterial polypeptide expressing nucleotide sequence isolated from the Sargasso Sea
gatgtccgttcagcacgatgcggtgcaacgcgccgatttcgaccagttcatggttcccaactacgcccctgccgccttcgtgcccgtgcgtggtctgggttcgcgagtctgggatcagagcgggcgagagctgatcgacttcgccggcggcatcgcggtcaacgtgctgggtcattgccacccggcgctggtcgcggctctgaccgagcaggccaataccctgtggcacatctccaacgtgttcaccaacgagccggcgctgcgcctgggcaagaagctggtcgaggcgaccttcgccgagcgcgtgttcttctgcaactccggcgccgaggccaacgaggctgcgttcaagctggcgcgtcgcgttgcccatgaccgcttcggcccggaaaagcacgagatcatcgccgctaccagcagcttccacggccgcactctgttcaccgtcagcgtcggcggccagccgaagtactccgacggtttcgggccgaagatccagggcatcacccatgtgccgtacaacgatctggaggctctgaaagccgcgatttccgacaagacctgcgccgtggtgctggagcccgtgcagggcgagggcggcgtgctgccggccgaaaaggcctatctgcaaggcgctcgcgaactgtgcaacgcacacaacgcgctgctggtgttcgatgaagtacaaagcggcatgggccgtaccggcgagctgttcgcctatatgaattacggcgtggtgccggacattctctccagcgccaagagcctgggcggtggtttccccatcgcggcgatgctcactaccaccgatctggccaagcacttctcgcccggcacccacggcacgacctacggcggcaacccgctggcctgtgcggtcggtgaggcagtgctggatatcgtcaacacccgccagaccctggacggtgtgaagaccaagagcgaacagttcaagacgcgcctgttggctctgggcaagcagtacggtctgttcgagcaggtacgaggcatgggcctgctgctcggctgcgtactcaacgaggcg

SEQ ID NO: 246130 - DNA, 760 bp, Unknown
  Bacterial polypeptide expressing nucleotide sequence isolated from the Sargasso Sea
ccaaactcaaaagatgactttggaccacatacgcccggttttgtctctgtagaatttggttccagtcaagccgtagaagaagcaataaataaaaatactgcggcagttttgtttgagccaatccaaggcgagggaggaattatagagcctcccgataattggttaccagatgtcagggagatctgtgataaaaacaatgtcttaatgatcctcgacgaggttcaatccggcctaggaagaacgggtaagttatttgcttatgagcattcaaatatcaggccagatggactgattttaggaaaagctctcggaggcggtttcatgccagtttcagtatttctatcttcagaggaagtgcttcaatggatgaatcctggatcgcatggctctacatttggtgggaatcctttgggctcagccattgccaaaagatccttggaactcctagaggaagagaatttgattgaaaacagtcgaatcatgggagaatactttaaaaattctttactggacctgaattctggcattatcaaagaaatcagaggaaaaggattgtggctaggcgttgagattgatccggaatacattgaaggaaaagcgctttctaaattacttctctctaaaggaatactatgcaaagaaacccgtgaaaccacgattcgatttgcgcctcccttgattattacaaaagaagagattgactgggcagttgaaatcattggagacactctcaaaacaatcgagagaaaagaaaaataga

SEQ ID NO: 246131 - DNA, 1153 bp, Unknown
  Bacterial polypeptide expressing nucleotide sequence isolated from the Sargasso Sea
tatgccaacttatggcaataaaactcttgaatttgtaaaaggaaaaggatgttatttatacactagtcaaaacaaaaaatatttagattttgcaagtggaatagctgtaaactctcttggtcattgtcatccaaaactaatagaggcactgaataagcaatcgaaacaactctggcatgtttcaaacttatataaaataaaaaaacaagaacaatttgcaaaattactttgtaaaaattcttttgcagacaaagtgttttttactaattctggaactgagtctattgaatgtggaattaaaataatcagagcatatcattcatattacaagacaaaaaaaacagagattattacttttgatggtgcctttcatggaagaacttacggcgcactctcagcacaaaaaaataaaaaatattctaatggctttggccctatgcttagaggctttaaacaaattgaatttaataataaaaaaaaattaatatctgcagtaaataaaaaaacagccggtattattattgaaccaattcaaggagaaggtggtattcgtcctgctaatctaagttttttaaaactattaagagacatctgtaatgaaaacaaaattttacttttttttgatgaagttcaatgcggatttgggagatctggtaaattattctctcatgagtgggcaaaaataaaacctgatatcatgtctgttgcaaaaggtataggatctggttttccacttggagcttgtatgtcaacaaacaaagcatgtgttgcaatgactaagggtagtcatggatcaacctatggtggtaatccgttagctatgtgtgtaggtttagaagttttaaaagttgtctctaataaaaaatttctttcaaagattgataaaaccgctagatatttttggaaaaatttaaaagaattagagaatacatctaagattatttcagaggtaagaggtgcaggacttttattgggtatcaaaacaaatattagcaatatagaattttctgaacaacttaaaaaaaataaattactaaatgtacctgctgcagataatacagtaagattagctccaccacttattgtatcttataaagagattgataaatcaatttcaataattaaaaaaagtatgaaagaattatctaaatga

SEQ ID NO: 246132 - DNA, 739 bp, Unknown
  Bacterial polypeptide expressing nucleotide sequence isolated from the Sargasso Sea
aatgattcaagggtttaaattttttaaatttaacaattttgattcggtaaaaaaattatttgaagaatgtgaaaataatgatcaaaaaatttccggcattttagttgaaccaatacaaggagaaggtggcgtaattcctggaagtaaaatattttttaaaagtcttagagatatatgtgataaatataattctcttctcattttagatgaggtccaaagtggggtaggtcgaactggaaaaatgtggggttatgagaatttaggaattgaacctgatggtttcacccttgctaaaggattaggaggaggtcatgcaatcggagcattattagtaaaagaaaaagccaacattttttctccaggagatcatgcaagcacttttggggggaaccctttcgcctgtaaagctgccctaactgtattggaagaaataaatagaagaaatcttattaataatgtttatctaagaggggaacaattaagtgctggatttcaagaattgtctaaaaagtttcctaatatcattaccggaaaaagaggtttgggtttaatacaaggtcttgtgatcaatgatgaatatgctgatgcaaaaaaaattacattaaaagcttttgataaaggattactagtagttcctgcaggaggaaacgttgtaaggattgtcccaccattagttatatctcgaagagaaattaatattcttttggataagctaaattcaatttttgaagagctttag

SEQ ID NO: 246133 - DNA, 844 bp, Unknown
  Bacterial polypeptide expressing nucleotide sequence isolated from the Sargasso Sea
tatgagcgcaatattaaacacttataatagaaaaaaaatttcttttaaaagaggaaaaggaagctttttatacgccacaaatggaaaaaaatatttagattttgttcaaggtatagcagtaaattgcttaggacattcaaatgattatttaaataaagctatacaaaaacaatctaaaaaagtgtggcatgtttcaaatgtatttacaattcccgaacaagaaaaattagcaaaaagacttaaacaaaaaacttttgcagattacgtcgcttttcaaaattcaggagcagaagcaacagaggccgcaataaaatttgcaagaagatatttttattcaaagggtaaaccaaaaaaaaatagaattatatgtatcaacaatagttttcatggaagaactttagcaactatttttgctagcaatagcaagaaagctactgaaggtttttatcctaaagttgatggatttgatcattttaattttggtgaccacaaaggattagaaagagctatcactagtagaacggcagctattatggtcgagactataatgggtgaaggggggataaaggtaattcctgattactgcttaaaaggattaagaaaattgtgtaataaaaaaaagatactattaatactagatgaggttcaatgtggaatagggagaaccggaaagtttctagcttttgagcatgctaaaataaaacctgatattgttcctatagctaaaggaattggtggaggttttccagtaggagcagtattagtaaataaaaaagttgcctctggaatgaaacccggaacacacggatcgacttttggaggaaatcccttagcaatgagcgta

SEQ ID NO: 246134 - DNA, 1123 bp, Unknown
  Bacterial polypeptide expressing nucleotide sequence isolated from the Sargasso Sea
tttaagaggtaagggaagttttctctacgcatcaaatggaaaaaagtatttagattttgtacaaggaattgcagttaattctttaggacatgcaaatccacacttagttaaagcaatacataaacaatcaaaaaagctttggcatgtatctaatgcatttaagatacctgaaggcgaaaggttagcaaaaagattaactcaaaacacatttgctgaatcggtaatttttcaaaatagtggtgctgaagctacagaagctgctattaaagttgctaaaaggtatttttattctattggcaattcaaggaagaatagaattctttgtataaaaaattcttttcatggaagaactattgcaacaattaatgcaagtggttcaaaaaagatgatggagggttttggacctaaagtaaaaggatttgatcattttgaatttggaaatcataaaaaacttaaaaaaatgattactaaaaaaacagcagcagtaatggttgaaccaataatgggagaaggaggcataaaggtaattcctgattggtgtttaagagatctaagaaaaatttgtaataaaacaaaaacactattaattttagatgaagttcaatgtggtataggaagatctggcaaattttttgcttttgagcatgcaaaagttaagcctgatattgtgcctatagctaaaggtattggaggaggttttcctataggtgcagttttaatgacaaaaaaagttgcctctggaatgacacctggaactcatggttcaacttttggaggaaatccattagctatgtcagttggaaatgcggttttagatcaaatatttaaaaaggaatttctcaaaaatgtaaaaaaattatcaagatattttcattttgaattgaataaactcaaagaagaatttccaaaaattatcaaagaagttagaggtattggttttttaataggattacaattgtttaataatcaatcaaagtttattcaaaagttgatggataataatttactcacaattagagcttcagaaaatgttgtaagaatattacctccactaaatgtaaaaaaaaaagaaatagatttagctcttaaaattataaaaaaagtttgtttaacttataaataa

SEQ ID NO: 246135 - DNA, 1198 bp, Unknown
  Bacterial polypeptide expressing nucleotide sequence isolated from the Sargasso Sea
aatgacgtcaaccaaagaatataaagatcttgaaaaaaaatattatatgcaagttgtaaatagaatggctcctgtactagttagtggtaaaggtacagttgttacagataatgatggtaatgattatttagattttactgctggttgggcagttttaaatttaggccattctcatgattcagtaactgaagctataaaagatcaagcaggaaagatactacaaatgagtaatctttattacacaactcctcagctttctttggcaaaaaccattgtagataattcagatgttgatagagttttcttttgtaattctggagctgaagcaaatgaaggtgcagctaaattagccagaaaatggggtaagatgaaattgaatggtgcttttgaaatcataaccacattaaactcatttcatggacgaacacaggctatgatggcggctacaggacaacctcattaccaagataactggagaccattaatgcctggttttgttaacgttgaatacaataatttgcaacaaattaaagatgcatataacgataatacttgtgcagttcttatagagccagttcaaggtgaaggtggagtaaatgtacctgactcagattatttaagatctgttcaagaattttgtaaatcaaagaatattctttttatgcttgatgaagttcaaacaggaatgggaagactaggtacactatttggttatcaaagatttcagggtgtagagcctgatgttatgactttagctaaagctttaggatcaggagctcctttaggggccttttgttctaaagagttttgctcggttttagaaccaggtgatcatggttctacctttggaggtaatgcacttacaacatctgcaggagctgcagcagcagaatttatggtgaaaaataatattccaaatatggctttagaatcaggtaaatatatgtttgaaaaactaagtgaattaatgaaaaagtttaatttcataacagaagtaagaggaatgggattattaataggacttgaaatgaataaagatttatcaggagaaattgttggtaaagctctagaaaaaggactactaatcaatgctgtgcgaccaaatatgatcaggtttatgcctccattgaatgtttctaaagatgaaattgatcaagctgttaaagtaatagatgaaatattagaggaatctaaataa

SEQ ID NO: 246136 - DNA, 752 bp, Unknown
  Bacterial polypeptide expressing nucleotide sequence isolated from the Sargasso Sea
aaagaaaatgacagaaggatttggaccaaaggtaggaggatttgatcattttaaatttggaaatcatgcggattttaaaaaaaaaattacaaatagaactgctgcggtaatgattgagccaataatgggagaaggaggcattaaagtaatacctacatggtgtttaagggaaataagaaaaatctgtaaaaagaaaaaaatacttctaattttggacgaagttcaatgtggtatagggagatctggaaaattcttttcatatgaatatgcaaatataaaacctgacatagtaccaatagccaagggaattgggggtggatttccaataggagctgttttaatgacaaaaaaggtttctaaagccatggtaccgggcacgcacggttctacatttggtggaaacccattggcaatgtcagtaggcaatgctgttatggatgaaatttttaaaaaaggttttctttcaagagttaaaagtaattcaaggtactttatttcagagctaaataaaattaaaactaaatttccaaaaattattaaagaaattagaggtgtagggctaattttgggaatacaacttcatcatgaccaaaccaaatttattgatgatttacttaaaaataaattgttgactattagagcgggtgaaaatgtaataagaattttaccacctctaaatgtaaacaaaaaagaaattgatatggctttgaaaatcataaataaagtttgcaactcttataaaaataaatgaa

SEQ ID NO: 246137 - DNA, 1150 bp, Unknown
  Bacterial polypeptide expressing nucleotide sequence isolated from the Sargasso Sea
catgccaacttatggtgaaagagatttaatatttgcaaaaggaaaaggttgttatttatatactaactctggaaaaaaatatttagattttgcaggaggtatagcagtaaactcacttggtcattgtcatccaaaattagtaaatattttaaaaaaacaatcagaaatactatggcatacatcaaacttatataaaaataataatcaggaattatttgctaaagaattatgcaaaaaaacatttgctgataaggttttttttactaactctggagttgaagcaatagaatgtggtttaaaggttataaaaacttattggaatctaaataataaagataaaaaaaatattattacttttaaaggagcttttcatgggagaacctttgcagctctatctgctcaaaaaaacaaaacttattccgaaggttttaaacctctattaagtggatttaagaatatatcattcaatgatgaaaaggccttgatggaaaatattaatgaaaaaactgcagcaattttaattgagcctattcaaggtgaaggtggtattcgacctgcatcaatcaaattccttaaattcattaaagagatttgtaaaaaaaatgacattcttctttttttagatgaagttcaatctggttttggaagatctggcaaattatattcacatgaatgggcaaaaattaaaccagatatcctagcaacagcaaaaggtataggatcgggattccccttaggtgcttgtttagcaacaacaaaagcatctgttggtatgagcaaaggaaaacatggctctacttatggaggaaatccgctagctgtatcagtaggaagagaagttttgaagattgtatctaataaaaaatttttaaaaaacgtagatgcgatttctagatatttatggaaaaacctaaaaaaattagaaagtcaatatgatgaaattgttgatgttagaggggcaggacttttactaggtataaaaacaaaacaaaataatataatgatatccaatagattgaaaaaaaataaattattaagtgtgccagctggagataatgtaatcaggttagctcctccattaataattaacaaaaagcatgtagacgatgcaataaatataataaatgaaactttaaaaaatttatcatga

SEQ ID NO: 246138 - DNA, 1165 bp, Unknown
  Bacterial polypeptide expressing nucleotide sequence isolated from the Sargasso Sea
atgagctcagttttaaaaacatataatagaaaaaaaatagcttttaaaaaaggaaaaggaagctatttatattccacaaaaggaaaaaaatatttagactttgttcaaggtatagctgtcaattcgctaggacattctaacaaagctctcattaaagcagttaataatcaatcaaagaaattatggcatgtttctaatgcatttgtaattcctgaacaagaaaagttagcaaaaagactaactcaaaaaacttttgctgactatgtgctatttcaaaattctggtgccgaagctacagaggccgcaataaaaattgctagaaaatacttttattcaatcggaaagccacaaaaaaatagaataatttgtgtcaataacagttttcacggaagaactttagctacaatttttgctagtggaaataaaaaatttacagatggattttatccaaaagttgaaggttttgatcattttaattttggtgatcatgatgcgctagaaaaaaaaatcacaaaaagaacagcagcaataatgattgaaacaattcttggtgagggaggtattaaggttgtaccagatttttgtcttaaacatttaagaaaactttgtaataaaaaaaatattttattaatcctggatgaagtgcagtgtggaattggaagaactggtaaattttttgcttttgaacacgcaaatataaaacctgatatcgttccgatagcaaaggggattggtggaggttttccagtgggagcttgccttatgacaaagaaagttgctaaatgcatgtcatacggttctcatggatcaacttttggaggaaatcctttagccatgagtgttggaaatgctgttttagatgagatttttaaaaatggttttttaaaaaaagttgaagaaatttctaaatactttctagcagaactctataaaatccaattcgaatatccaaagattattaatgagataagaggaaaaggtttattgctcggcatacaacttaacgtcaaccaagcaaattttattaagaaattaatgaataacaacatgctagtagttaaggcatctgaaaatgtagttagattattaccacccttgaatgtaacaaaaaaagatattgatctcgcagtgacaatattaaaaaaagtttgtaaaagttattaat

SEQ ID NO: 246139 - DNA, 1042 bp, Unknown
  Bacterial polypeptide expressing nucleotide sequence isolated from the Sargasso Sea
atagggcattcaaatcaagttgttgctgatgctattgaacacaaatcaaaaactttacttcagacttctaatgttttttacactattccgcaacttaagttagcagaaatattaatagaaaatagtgttttggataagatatttatttgtaatagcggagcagaagcgaatgagggggcaattaagcttgccagaaaatggggcaaaattaataaaaatcgagctagcaaaattttaactgcttataattctttccatggaagaacaatttcaacattggcagcaacaggacagcctaaataccacgaaacttttatgcccgtgactgagggatttgattattttgagttgaataatatagattcccttaaagacaaaatagatgatgacacagtgggcattatgattgaggtggtgcaaggtgaaggaggtgtaaatatctgttctcaagattttataaaaagtatacgtaaaatatgtgatgaaaaaaatatcataatgattatagatgaagtgcaaactggaataggtcgactaggatcattttatgggtatgaaaaatttggaattgaacctgatgttataactttagcaaaaggtttaggagcaggtgtacctattggggcaatattggcaaaagatgaatattcggtatttgtacctggagaccatggttccacttttggtggaaatgcgctaacctctgctgcagcatacgcttctagtaaatttatacttgaaaatgatatttctaataatgtaaataaattaaactcttattttacaagtaaattaaacgaattaatgagtaaatttgaaatcatatcggaagtaagaggaatgggcttattaatcgctttagaatttagtatggatattgctgcagatatgattactgaatgtaataaaaatggattgttagttaatgctgtcagacctaatgccttaagatttatgccacctcttacagtcactgaagatgagatagatcaagcaattagcaaattacaaaaatctttggaaaatgtactgtctaagtaat

SEQ ID NO: 246140 - DNA, 1144 bp, Unknown
  Bacterial polypeptide expressing nucleotide sequence isolated from the Sargasso Sea
atgcttcctaattattcccctgcaaacttcatacctaaggaagcaagagggtcaaggatttgggatcaagataacaaagaatacatagattttggtggaggaatagcagtaaattcattgggtcactctcatccagatttgataaaagcgctttctgaacaatctaagaaattctggcatcttagtaattacctgagtaatgagccagctatcaatttagctaagaaactaactgatctaacatttgcagaaaatgttttcttaagcaattctggtacagaagcaaatgaagccgctataaaaatagcaaggaaatttcactcttcgaaaaataatcaaaggaatgaaatagtttcatttcaaaattcttttcatggtcgctcattactaaatatctctcttggaagttctgagatgcatagaagcggttttgaaccactaatgcctggaattaagcatggagaatttaataatgtctctaatttaggaagtctgattactaaaaaaactgccgcagttattgttgaacctgtacaaggggaagctggtgtatataccgccagcaaagaattcttaaaaaaattaagagaagaatgcacaaaacaaggtgctttgttgattattgatgaagtacaaagcggaataggaaggatggggagcctttatggctatatgcaatatgacattaaaccagatattgtaacttcagctaagggattaggtggaggtatacctatcggagcaaccctcacatctaaagttatcggtgaatgtatgcaacccggaactcatggatcaacttttggaggtaatccaatgtcgtgcgcggtagctaatgaagtggtgagcattgtaagtgagaaagattttcttaacgatgttttagaaaaagaacaattattccttgatttgctatctgagttcaaaacaaaaggaattttttctgaagttaggtcagcgggactttggataggttgcgatttaattgataaaactgcaaacgaagtattagatcaagcttacgatgctggtctaataatggtttcagcgggttcaagctgtctaagattggctccggctctgaatataactaatgaggaaatagaacaaggcataaatctcttaaaagaggtactattgtaaa

SEQ ID NO: 246141 - DNA, 1009 bp, Unknown
  Bacterial polypeptide expressing nucleotide sequence isolated from the Sargasso Sea
ctcaaactttggcacaccagcaaccttttttctcaccgaacctccggtcagactggccgcagaactggtcgatgcttcctttgcggatcgtgtctttttctgcaactccggagcagaggcaaacgaggcggcgattaaactggtgcgaaaatacgctttcctggaacatcctgaagataaacgcgagatcctcagttttgatggatcgttccacggcagaaccctggctacggtgaccgctacttcgcagccaaaataccagaagggattcggcccccttccgggaggtttccgctatgctccctataacgatttcgaagaagcagaaaaagccatcgggccccagacctgtgcagtgctcttagaaccgctccagggcgaaggcggggtgaaccctgcccgtcccggcttcctcaaacacctccgggaactctgtgaccgccatcaggcgcttttgatcttcgatgaaatccaatgcggaatgggccgaaccggaaaactctttgcccatgaatgggaggagggagtcgttcctgatgtgctgacgctggccaaagcccttggctgcggacttcccatcggcgccatgctctgcagcgaaaaagtctcccaggctttcaaacccggggatcacgggacgaccttcggaggaaacccgatcgtcgcctccgttgcccgtgccgccctcaaaaagatcaacacaccgcagatgatggcccatatcctcaaacagggggaagccatccgcggaagattgcattccctcaacgatgagctcaatctttttggtgaaatccgtggtaagggactgatgctcggcggtgtgctccacggggcatggaaaggacgggcaggagaaatcgtctcgaccgcactgaatcatggggtgctgatcctggtcgccgggccggacgtggtgcggcttgttccgcctctcaccatcactggagacgaagtccagaccggactggaaagactcaccaaagccctcaaagaactcgcagaataa

SEQ ID NO: 246142 - DNA, 1024 bp, Unknown
  Bacterial polypeptide expressing nucleotide sequence isolated from the Sargasso Sea
attactgaagctataaaaaaacaatctcaagaattaatacacacatcaaatgcatttcaaattgatagccaagagaagttagcaaaaagactatgtcaactcacaggaatggaaaatgcctttttttgtaactcaggtgctgaggcagttgaagcagcaataaaaatagcaagaaagcatggtcatgacagaggttatgaaaatccaaagataattgtaatgtcaaatagtttccatggtaggacaatgggagcaatgagcgtaacatctaatgaagcttctcatctagcatttggacctattttagaagggctcgtaagagtaaaatttaatgatattaatgagatcaaagatgtcctaacagcacataaagatattgcggcaattctattggaacctattcaaggtgaagggggtatcatttcttgtagtgatgattacatgaaagaactcagtgatatgtgcatagctaacaaaatactccttatggctgatgaagttcaatctggtttttgtagaacagggaaatggtttagttatcaacattttaatgtattacctgatgttgtcatggtagcaaaagcacttggaaatggtgttccgataggagcttgtctggctagaggagatgcagccaaagtgttaagtgcaggtatgcatggctcaacatttgggggaaattatttatctacatctgtcggattatgtattctagatattatgagagatgaacacatatgcaatcatgtaagagctataacttcaacgatgaaaaatgctatacattcaaaaataaaagatcttaaagctgtatcagatattaggattcatggaatgatgattggtatagaactagattgcaactgtacggaactagttgtgaaagcactagaaaaaggtttagtattgaatgtaaccaaagatagaataattagattacttccgcctctaatatgtgaagacaaacatattttgaatattgttgatattatcgaacagctaatcaaagaaaattatgaataaa

SEQ ID NO: 246143 - DNA, 997 bp, Unknown
  Bacterial polypeptide expressing nucleotide sequence isolated from the Sargasso Sea
aaacaatctgaaaaattatggcacacatcaaatctttataaaaacaataatcaagagttatttgcaaaagagctttgcaaaaatacatttgccgataaagttttttttgcaaattccggtgcagaagcaatagagtgtggtttgaaagtagttaaaagttattggaatttaaaaaataaaaacaaaaaaaatataattacttttaaaggagcatttcatggtagaacttttgcagcattgtctgcccaaaaaaataaaaaatactcaaatggatttactccactaatgagtggtttcaaaaatattcctttcaatgatgagaaggcattgaagaaaaatattaatcaagagactgcagcaatactaattgaacctattcagggagaaggtggaattagaccagcatcacttaaatacttaagatatataagaaatatttgtaacaaaaataacattttgctttttttagatgaagtacaatcaggttttggcagatctggtaaattatattcttatgaatgggcaaagattaaaccagatattttagccacagccaagggtattggctcaggttttccccttggagcttgtttagctacaaaacaagcaagtattggaatgacgcaaggtaaacatggttcaacatatggggggaatcctcttgcagttagtgttggaagagaagttttaaaaatcatttctgaaaaaaattttttgaaaaaagtagattcaatatcaaggtatttatggaaaaatttaaaaaaattagaaagccattacaatgaaattgttgaaattagaggagctggattattactaggtataaaaactagacaaaataatataatgatttcaaataaattaaaaaaaaataaattattaagtgttccagctggagataatgtaattagattagccccaccattaataattaataaaaaacatgcagatgaagcaattagtataataaatcaaacttttaaaaaaattatatgaa

SEQ ID NO: 246144 - DNA, 185 bp, Unknown
  Bacterial polypeptide expressing nucleotide sequence isolated from the Sargasso Sea
caacacagacgaagattctgatttggcttgggagatctgtctaaaatttagagacaacggattattggcaaaaccaactcatggaaataaaattagattagctccgcctttggttatgactgaagatcagattaatgaatgtcttgagattatcgagaaatctttgaatgagtttagaaattaat

SEQ ID NO: 246145 - DNA, 484 bp, Unknown
  Bacterial polypeptide expressing nucleotide sequence isolated from the Sargasso Sea
cctgatattctaatcttagcaaaagctttaagtggggggacctatccaatatctgccgtcctatgtgatagtgaaattatggaagttattcaaccaggtcagcatggaagtacttatggtggaaatccttttgcagcatcaatagcaaaaaaatccttagagattcttattgaagaaaagctacctgaaaatgctaagaaacttggtgaaatatttagatcaaaaatcaacgattatattaaaacaagtaatattgttaaactggttagagggaaaggattattaaatgcaatagttatagatgatcattctgaaagtcaaactgcttggaatatttgtttaaagcttagagataatggcctactagctaaacctactcaaggaaatataattagattcgcaccgccattagtaatgacagaagatcagcttaatgagtgtatagaaattattacttcaactttagttgattttgagaaataac

SEQ ID NO: 246146 - DNA, 221 bp, Unknown
  Bacterial polypeptide expressing nucleotide sequence isolated from the Sargasso Sea
aattgtaagaggaaaaggtcttttaaatgcaattgtaattgattcatctgttgaaagtgatatggcatggaatatttgtttaaaattaaaagacaatgggctactagcaaaacctactcatggaaatattataagatttgctcctccattagtaattaaaagagaagagcttgaagagtgttgtgatattatagaaactacaataaaaagttttgagtaat

SEQ ID NO: 246147 - DNA, 409 bp, Unknown
  Bacterial polypeptide expressing nucleotide sequence isolated from the Sargasso Sea
tgatgacatcatgttatgtattaaacctggtgagcatggttctacttatggaggtaaccctctcgcttgtcaagttgcgatggcagcacttcaagtaattcttgatgaaaaactggcagaaaattcatttaagctaggtaatctctttcgagatgaaattaatcattttattgattctaataacttagtaagtaaagttaggggaaaggggctattaaacgctattttaattaatgattctcctgagagtagtactgcgtgggatatttgtatgaaattaaaagaaaatggtttattagcaaaaccaacacatggtaatattattagattagcaccaccattaatcattaatgaacaccaattgcttgaatgtgttagtattattaagagcactattagtaatttttaa

SEQ ID NO: 246148 - DNA, 267 bp, Unknown
  Bacterial polypeptide expressing nucleotide sequence isolated from the Sargasso Sea
ttagatctgaaatgaataaatatatcaaatcaagtaaaatagttaaactagttagaggtaagggacttttaaatgcaattgtaataaacgattctcaagacagtcaaactgcctggaatatatgtcttaagttaagagacaatggtttactcgctaagcctacccatgggaatgtaataaggtttgcacctcctcttgttatgactgaagatcaattgtatgattgtgttaatatcatcatttccactattaaagaatttgaataaa

SEQ ID NO: 246149 - DNA, 664 bp, Unknown
  Bacterial polypeptide expressing nucleotide sequence isolated from the Sargasso Sea
aggggtttatgtgccgtctgaagggtatttgaaagctgctaaagaactatgcgaagagcataatgttctttttattgctgacgaagtacaaacaggaatcgcacggaccggtagacttttggcgacctgtggtaattgttcttgttcagataaacattgtagtggcactcctgaggtaaaacctgatattttgatattggggaaagcattgtctggaggagtttatcctgtgtctggtgttttggccaatgatgacatcatggaggtcattactcctggaagtcacggtagtacttttggaggtaatccagtggctgcggccgtaggtatggcagcattacaggtcatcaaagacgaagaactggctcagaatgcctatgaactcggtgagcttttcagagaagaattgggaaagtttatagaaacttctgatttggtggtcaaagtacgagggaagggccttttaaatgccattgtaattaatgatacggaagaaagttccacagcatgggatatttgtatggcattgaaagaaaatggactgctggcaaaaccgacgcatggaaatattattcgttttgctccgcctctggttatgaccaaagaagaattgctggattgcgtttctatcataataaaaacgctcacagaattcaaaaaatag

SEQ ID NO: 246150 - DNA, 868 bp, Unknown
  Bacterial polypeptide expressing nucleotide sequence isolated from the Sargasso Sea
tatgaaaataatcataggtgctcataattacaaaccaatacctgtagtattatctaaggggaaaagtgtctatttatgggatgttgacgggaaaaaatattttgactttttatctgcctattcggctgtaaatcaaggccattgtcatccaaagattattgaggttttaaattttcaagctaataaattaactctgacctccagagctttttataatgatattttgggtgtatatgaaaaatttataacaaatatttttaaatatgataaagttctccccatgaacacaggagttgaagcaggagaaacggctattaaattagcaagaaaatgggggtatttaaaaaagaaaattccaaacaataaagctcgaataatttttgcaaacggtaacttctggggaagaactttagctgctatttcaagttctgatgaccctctctcttttaagggttttggcccctacatgccaggttatgatattattccatataatgatttacaatctttagaaaataagttaaaaaatcatgaaacagctgcttttatgatagaacctatacaaggggaagctggggtcatagtgccagatcaaggatatttatcaaatgttagaaatttatgtacaaaatataatgttttattaatagttgatgaagttcaaactggtttaggaagaacaggaaaaatgttggcttcagattatgaagaagttcgtccagatattttaattttaggaaaagcactttctggtggtgttattccagcatctgcagttttagctaacaatgacataatgttatgtataaaacctggtgaacacggatcaacctttggaggaaaccccttggcatcatcaatttgcctt

SEQ ID NO: 246151 - DNA, 784 bp, Unknown
  Bacterial polypeptide expressing nucleotide sequence isolated from the Sargasso Sea
tgctcatcctcaaccgatccagactgttttgaagattatggcccgtttatgccaggatttgaaattataccttacaatgatttaagttcccttaaaaatgcgctaaaggatgaaaatgtagcaggttttatggttgaacctattcaaggtgaggcgggggttattgtcccagatgaaggatatttgaatgaagcatacaatctttgtaaagaaaataacgttctatttatagctgatgaagttcaaactggattggggagaactggaaaaatgctatgcagcgattatgccaacattaaaccagatattctaattttaggcaaagccttatcgggtggaattttgccaatatccgcagtgctaagctcagatgaaattatgttaactataaaaccaggtcagcacggttcaacgtatggaggaaatccactagcttgtagagtagctcaagttgctcttgaagtaattatagaagaggggttacctgaaaatgcatttcaactcggtaagttatttagagaagagatgaataagataattcaaaaaagtgatcttttaaatattgttagaggcaagggtcttttaaatgcattagtggttaatgactcacctttaagttcaacagcactagatatttgtcatgctttaaaagataatggattgcttgctaagccaacccatgggaatataattagatttgctcctcctctaaccattaaccagtcagagctgctggaatgctgcaaaattattgagaaaacaattttaagttttaaaaattaaa

SEQ ID NO: 246152 - DNA, 408 bp, Unknown
  Bacterial polypeptide expressing nucleotide sequence isolated from the Sargasso Sea
gatgacaagaagcgaagaacttatagaaatggaacaccgatatggagcacacaactaccatccactaccagctgttctagaacgtggcgaaggcgtttatctttgggattgcgaaggaaaaaaatattttgattttctttctgcgtattctgcagtcaatcaaggacattgtcatcctaaaattataaaggctcttaacgaccaggcctctacccttacccttacctctcgtgcatttcacaatgacattcttggagagtacgaaaaattcatgaccgatttatttggatacgacaaagtgctcccaatgaacaccggtgtagaaggtggggaaacggcaaacaaacttgcccgaaaatggggatacctaaaaaagggtattgccgaaaacaaagcccgaataatttt

SEQ ID NO: 246153 - DNA, 493 bp, Unknown
  Bacterial polypeptide expressing nucleotide sequence isolated from the Sargasso Sea
tacctatgttagacccgatatactaatcctaggaaaagcactaagtggaggaacatacccaatatctgctgttttatgtgattctgaaataatggaagttattcagccaggtcaacacggaagtacctttggtggaaatcctcttgcttcaagtattgcaaaaaaagctctagagataataattgacgagaaattatcacagaatgcaagagtacttggtaagatattcagatctgaaatgaataaatacataaaaacaagtaaaatagtaaaacttatcagaggtaaaggtctactcaatgcgattgttattaatgatactaaggatagtaaaaccgcatggaatatctgtcttaaacttaaacataatggactacttgcaaaacccactcacggaaacattataagatttgctcctcctttagttattacagaagagcaaatatatgactgcataagtattattatatcaacacttaaagaatttgaataa

SEQ ID NO: 246154 - DNA, 1166 bp, Unknown
  Bacterial polypeptide expressing nucleotide sequence isolated from the Sargasso Sea
aatggctcaagaaattttaaatgatttatcgcattatcacttagatctagagaagaaatatggtgctcatgattatcatcctttacctgtagttttagctaaaggagagggtgtttatttgtgggatgttaacggaaaaaagtattatgactttctctcctcttattcagctgttaatcaagggcattgtcatccaaaattggttgagcttataaaggaacaagctgagatcctaactttaacatcaagagcttttcacaataataaacttggtgaatacatggaatacacaactaagttgtttggttacgatcagttactccctatgaatactggggcggaaggagttgaaacgtcaattaaaatttcaagaaaatggggttatcttaaaaaaaagatagatgataataaagctaaaattattgtttgtgataataattttcatggaagaacaactactgttatatcattttcctccgactctggatcaaaagattactttggccctcatacacctggatttatccatgtgcctcataatgatttagatgccttagagaatattttaaaaaatgagaaagatgttgtttcatttctatttgaaccaattcaaggtgaagctggcgttaacgttccagatgataactatattaaaggtgtaagagatctttgttctagatataatgtgttgatgattgctgatgaaattcaaactggacttggaaggactggatcacttttagcttcatgtggtcattgtagttgtagctcatcatgtgaaaaacaagactcatatgttagagcagatattttaatattagcaaaagcattaagtggtgggacctatccaatatcagctgtactatgtgatagtgaaattatggaagttattcaacctggtcaacatggaagtacttatggtggaaatccttttgcggcatccatagcaaaaaaatcattagagataattatagatgaaaaactatctcaaaatgccagacatcttggcaaaatttttagagatagaatgaatgactatattaaaaaaagtaaaattgttaaatcagtcagagggaaaggtttattaaatgctatagtcataaatgataatccagaaagtaaaactgcatggaacatttgtttaaagctcagagataatggccttc

SEQ ID NO: 246155 - DNA, 889 bp, Unknown
  Bacterial polypeptide expressing nucleotide sequence isolated from the Sargasso Sea
aaagtggatgagaatcagcaaaaaattgttgtttgtaacaataattttcatggaaggacaacaactgtaatttcattttctactgaccctggatctaaagatttttttggccctcatactcctggatttattcatatacctcatggagaaattagtgctttggaaaatgaatttaaaaaagataaaaatatagtagcatttttggttgaacctattcaaggtgaggcaggtgttaatgtgcctgaacctgaatacttaaaaaaagtcagaagcttatgttcagaatataatgtccttatgattgctgatgaaattcagacaggtcttggaagaactggttctttgcttgcatcttgtggtaattgtagctgtgaatcttcctgtcaacagcaatcaacttatgttagaccagatatattaattcttgcaaaagcattgagcggaggaacttatcctatatcagctgttctttgtgactctgaaataatggaagttattcagcctggccaacatggcagtactttcggtggaaatccttttgcagcaagtattgcaaagaaggctcttgaaataataattgatgaaaaattagctcaaaatgcaagagttcttggtgaaatatttagatccgaaatgaataaatatatcaaatcaagtaaaatagttaaactagttagaggtaagggtttattaaatgcaattgtaataaacgattctgaagatagtcaaactgcttggaatatttgtcttagtctaagagacaatggtttactcgcaaaacctacccatggaaatgtaataaggtttgcacctcctcttgttatgactgaagatcaattgtatgactgtattactatcataacctcaacaattaaagaatttgaataaa

SEQ ID NO: 246156 - DNA, 610 bp, Unknown
  Bacterial polypeptide expressing nucleotide sequence isolated from the Sargasso Sea
atgatgaaagcattggtatgtaaaaattttggtcctgttgatgatcttgtctgggaagaagtaacagatccaatcccaaaaaatggtgatgtagttgttgatatcaaagccgcagcactgaattatccagataatttgatagtgcagggtttatatcaattcaaaccaaattttccattctctccaggatctgaaggtgctggaataattagcgctcttggagaaaatgtacatgattttaaaattggggataaagtttcttttttatcccaatggggttcctttgctgaaagaatttcaattaatcaaaaacaactaattaaaatgccagaaaatatgaattttgaattggcttcagctattcagttgacatatggaacaagttatcatgcattaatacaaagaggtagattaaaagatgaagatgaagttctaattctaggatgttctgggggagttggtttagctgctttagacatcgcaaaagcatacaatattcgagttgttgctgcagtatcttcagaagaaaaagctgatttatgtaaacaatatggcgcagatgaagttgtgatttacggttctaataaattagatacagaagatcaaaaac

SEQ ID NO: 246157 - DNA, 689 bp, Unknown
  Bacterial polypeptide expressing nucleotide sequence isolated from the Sargasso Sea
tgaggtgcgtaaaaatacaggcggcgttgaggaagttaggagtcgtgaaaaactcgatatgatgactggaaatcttggcattgcccataccagatgggcaacacatggcggagtcacgacggaaaatgctcacccccatctctcccaaaatggtgagtttgcaatcgttcataacggtatcatttcaaattatcagaaactgagagaacgtcttattggggaaggactccaattcagatcaactacggacaccgaagtttttgtgaacctggttgaggaagcctttgcccagaaaaatgatgttttaggggcattcctgaaagcattgaaacaaattcagggaacctattccatcgttttgctgtcttcgcatgatccagaaaatctttactgtgttaaacaagactctccgctgatcatagggctgggagaaggttgcaattacatcggctctgacattaatgcttttcttgaacatacccgaaaagcagtagttttggatgatggggaatttgctgtcatcagcagggagcgatatgagatttcggatgtcgggaagcgagaagaaagggaaaaatcaattctccaaattgattgggatacagagaccacaaaaaaaggtggtttttcccactacatgataaaggaaatttttgacgaaccccaaactgcacgacaggctttggatg

SEQ ID NO: 246158 - DNA, 207 bp, Unknown
  Bacterial polypeptide expressing nucleotide sequence isolated from the Sargasso Sea
cgccgcgctcggcccgtaccagcacttcatgcaaaaggagatcttcgagcagccgaaggcgatcgccagcacgctcgacggcatcgacacgatttcgccggcgttgttcgacgccgccgacggcacgcgcgcgctgctgtcgcgcgtgaggaacgtgctgctgctcggctgcggcaccagctactacgcgggcgaaatcgtgtcgat

SEQ ID NO: 246159 - DNA, 857 bp, Unknown
  Bacterial polypeptide expressing nucleotide sequence isolated from the Sargasso Sea
catgaagatactgcattgtaatgagtatggaccaatagaaaatcttgaatgggttgatatagattcaccaacaccaaatgttgatgaagttttaattacagttaaggcagcagctttaaattatccagattatttaattgttcaaggactttatcagtttaagccttcactaccttttgcacctgggaatgaaggtgcaggcattatcaagaaaatcggtaagaacgtaaaaaattttaaacaaggggatcgagtctatttcatggcaccttatggtgcttttgctgaagaaatttgtgttaatgcatttggtgtctctcacatacctacagatatatcatttgaaattgcagcgtcatatcaaatggcctatggaacaagttaccacgccttaatccaaagaggtcaaatcaaggagggtgacgagttattagttctaggtgcatccggtggtgtagggcttgcagcattagatattgcaaaagctaaaggtgcgagggtggttgcagcagtttcaactgatgaaaaagcaaaaatatgtcttgaatataaagctgacgacaccgtagtctatggtagaggccccaaggataaaaaagagtcaaaagcgttttcaacagagttaaaatcaaaaagtttgaaaggaggttatgatctaatttatgacccaataggtgattgctatgcagaacctgcctttagatctattggttggaaaggtagataccttgtcgttggttttgctgcaggtgaaatcccaagactaccgattaatctggctttattaaaaggagcttcaatagtaggagtgttttggggttcatttactggtagagaaatgaacgtaaatcatgaga

SEQ ID NO: 246160 - DNA, 280 bp, Unknown
  Bacterial polypeptide expressing nucleotide sequence isolated from the Sargasso Sea
catgtgcggaattagcggcatcattgaccaaaagccggtgactcgcaatttggttacgtcaatcgccaatctggaatatcgaggttatgactcctgcggaatggcgatgctcaatggtaaaggaattgaggttcgtaaaaatatcggcggcgttgaggaagttaggattcgtgaaaaactcgatatgatgactggaaatcttggcattgcccataccagatgggcaacacatggtggagttacgaaagaaaatgctcacccccatctctcccaaaatggt

SEQ ID NO: 246161 - DNA, 262 bp, Unknown
  Bacterial polypeptide expressing nucleotide sequence isolated from the Sargasso Sea
aatgtgcggtattgtaggttatataggtaataaagatcctgtccctattctattgaaagggttgaaacgattagaatatagagggtatgattcttctggaatcgctcttcttgaggaagacaatctaacccatatcaaaaaagcaggaaaagtttcagatttgcaacagttagttgatgattcttctataaaaggaaattgtggtattgcgcatacacgatgggcgacgcatggagctccaaacgatattaacgcacacccc

SEQ ID NO: 246162 - DNA, 290 bp, Unknown
  Bacterial polypeptide expressing nucleotide sequence isolated from the Sargasso Sea
aatgtgtggcattgtaggttatataggcaataaagatcctgtccctattctattgaaagggttgaaacgattagaatatagagggtatgattcttctggaatcgctcttcttgagcaagacaatctaacccatatcaaaaaagccggaaaagtttcagatttgcaacagttagttgatgattcttctataaaaggaaattgtggtattgcgcatacacgatgggcaacgcatggagctccaaacgatattaatgcacacccccatttggatcatactgggagcattgctc

SEQ ID NO: 246163 - DNA, 949 bp, Unknown
  Bacterial polypeptide expressing nucleotide sequence isolated from the Sargasso Sea
tctctattttggaggcacctatgaggagcaggatgcaggaatttttgaagacctgatgttgaaagagatattcgatcaaccagtttctttgacgaatgtcctaagtggacgtgtttcctcggatgggcttcgcgttgagcttggtggattggatctcaatccagaagaaatacaatctctagaaaggattaaccttgttgcttgtgggacggcattttttgctgctaagatcggtgcaacgataattagaaaacactcagacgtaactgtagaggcatttaggggtagcgaattcccagcaaggaaggtttgcggaccaaacacccttacagtcgggatttctcagtctggagagaccaaggatacgctagatgctcttcaagaggccagaatcgccgggagcaaaataacttcgttctgcaacgtgatagggtcgacgatccctagacttactgggaatggggcatatctttatgcgggcccagagtatgcagttgcgtccacaaaggtcttcacaaatatggtcgcaatcactcttcttttctcactttccttttccaagatgtcttctctggaaagaacttcaatagcacaagatttacgtgagctacctaacaagattgcattatatctccgagaatcagaaggatcactcgatgaagcagtctcattgttggaaaatgcaagtagtgcaatcttcatcggcagggggatttcagcacctttagtcgaagaaggcgcgttgaagatgatggaagtagcatacctgccttgtctcgcatacccaggtggtgaactgaagcacggtccgattgctttgatagaggaagggacgccagtgatcgcagtcgccccctcctgcgatgaattgggctttatggaatcaagcattagggagtggcaggcgagaggggcaaaagtaatcctcatcaccgataatgagggggca

SEQ ID NO: 246164 - DNA, 757 bp, Unknown
  Bacterial polypeptide expressing nucleotide sequence isolated from the Sargasso Sea
aatggcgatgctcaatggtaaaggaattgaggttcgtaaaaataccggtggcgttgaggaagttaggagtcgtgaaaaactcgatatgatgaccggaaatctaggcattgcccataccagatgggcaactcatggtggagttacgacggaaaatgctcacccccatctctcccaaaatggtgagtttgccatcgttcataacggaatcatttcaaattatcagaaactgagagaacgtcttatcggagaaggactcgaattcagatcaacaacggacaccgaagttttcgtcaacctgattgaggaagcctttgcccagaaaaatgatgttttaggggcattcctggaagctttgaaacaaattcagggaacctattccatcgtcttgctgtcttcgcatgatccagaacatctttactgtgttaaacaagactcaccgctgatcatagggctgggagaaggttgtaattacatcggctctgacattaatgcttttcttgagcatacccgaaaagcagtggttttggatgacggtgaatttgctgtcatcagcagggagcgatatgaaatttcggatgtcgggaaacgagaagaaagggaaaaatcaattctccagattgattgggatacagagaccacaaaaaaaggtggtttttcccactacatgatcaaggaaatttttgacgaaccccaaactgcacgtcaggctttggacgttcctcaagagcagatcaaacagttggctgagatgtttcaa

SEQ ID NO: 246165 - DNA, 280 bp, Unknown
  Bacterial polypeptide expressing nucleotide sequence isolated from the Sargasso Sea
atgtgcggaatcgtcggagcaagcggcctgaacaatcaggtgccgcaactggtcaatgcgctgagcaggctcgaatatcgcggctacgattcgtgcggcattgccgtacaggacgacggccgcctgcgcagcgaacgcacgttgcgtcgcgtgaccgacctgcaggcccgcgtgctgacgctgggcctcgaagcgcagacctgcatcgcgcatacgcgctgggcaacccatggcgcaccgtccgaaatgaacgcgcatccgatcatgtccggcgacacga

SEQ ID NO: 246166 - DNA, 676 bp, Unknown
  Bacterial polypeptide expressing nucleotide sequence isolated from the Sargasso Sea
atagactggggcgctacggccttaacatataatgcagaagaagtgtcggcagaagaagcaagttctttgtacgtttttgctgatccgaaatttcagggacgagtttctataattgacaatgtggatgatgcttacgcacttggttacttggctgttggcgttatggattggacaaaatcgacagatgcagactttaagaatgcctctgatttcctaagaaaagtgcataagaatgtacgacagtatcacgcagatggtgctgaaggggcggccctaatgaagagtggagagattcttcttgaatggacatggaatgaagtggcttttacgctcggctgggaagaggatgcaccagaaactgtattcaaaagggatacaaaagagggatcctcaacttgggtatgtggctatacaatgatgaaagatgcaccaggttcagaacaaaaagcatatgattttcttgatgcgtggctgtctgatgcatctgccgagtacattgttaccgagtggggttacgggcatactaataaagaagtaatggctaccgttggtaaggaaaatggatgggaaccactagcaagttataccgagggttctttattccaaaagccgtcagatccggcgcttagggagcgaatgatcaaagaatgggaactgatcaaaagtggtttataag

SEQ ID NO: 246167 - DNA, 889 bp, Unknown
  Bacterial polypeptide expressing nucleotide sequence isolated from the Sargasso Sea
atacagagaagagataaaatgaaaaaaattatatgtaaagaatttgggccagttgataatttggtttgggaagatacagaggaccatgaacctctccctaatgaggttgtagtagatattaaagctgcagcactgaactttccagattacttaattgttcagggtttgtatcaatttcaaccgcctcttccctttactcctggaaatgagggagctggaataatcaaaaaaattggaagcgaagtaacaaagcataaagtaggtgatagggtatcttttatgtcagctattggtgcatttgctgaggaaattgtcttggatcaaaacttggtattcaaaatgcaggatgatatgtcatttgaagtggctgcatcatatcaattagcttatggaacaagctaccatgcattagttcaaagagggaatctttctaaagatgatgaagtcttagtattagggggttcaggaggtgtagggctcgcagcaattgacatagcaaaagcagttggtgcaagggttgtagcagcggtatcttcacaagaaaaagctcaaatatgctctgattatggagccgatgatgttgttttatatggatcctcaaaacttgagaaagagcagcaaaaaacttttacatcggagttaaaggcaaaaagcataaaaggaggttttgatttaatttacgacccaataggagattgttttgcggaaccatcattccgatcaattggttggggaggaagatatcttgtaattggctttgcagcaggagagataccaaaattaccattgaatctaacattactaaaaggtgcttcaattgtgggtgtgttctggggtacattcacagcactgaaccagaaacaaataaaaacaatatcaagaaactcaa

SEQ ID NO: 246168 - DNA, 685 bp, Unknown
  Bacterial polypeptide expressing nucleotide sequence isolated from the Sargasso Sea
aatgattgcaatttccgctgaaaataatttatccgaaacagcatttgttgacctaactacagatccattttttattcgctggtttacacccaaggtagaagtcaatttgtgtggacacgcaaccttggctgcggcgcgtatcttatttgacgaatacttaccaggtgaggttgaccgcgttgaattcaactcaaaaagtgggaggctgagtgcaacacgagaagaaaacctgatctatttaaattttcccatcgatgagcccaaaaaaatcaatgaaaatacactaatagagcaagctttggggcacagaccggttgatctactcaaaggcaaggatgacatcttggcagtttttgatgatgaagcaattataaaaaaaataactccagattttgaaaaattaacgcagcttgaatcgaggggattaattattagttcgaaaagtactagcttcgattttgtatcgagattctttgctcctcaatcaggtattaacgaagacccggtaacgggttcggcgcacactgtgttaactccctattgggcaaaaagacttggtaaagataaaatgattggctttcaatgctcggcgcggggcggggaattgcaatgttggttgaaaaaagacagggttatgatcggtggatccaccgcaagatatatggatggaaccatacgtctctaa

SEQ ID NO: 246169 - DNA, 892 bp, Unknown
  Bacterial polypeptide expressing nucleotide sequence isolated from the Sargasso Sea
agttcataatggtattgttgagaattatgatgaattatttcaacatttttctctaaacaaaaaaaatattaaatcagaaactgattcggaagtagtagcagaaatatacaacaaattattaaataaatttaataatccaatagaagctattaaagatttaaacaaaaaaattgtaggaactttttcttttgtttttttagtacgtggtactaattcaatttatgcaacaagaagggggagccctttagttttgggtatatctgaaaattttaatgccgttagttcagatgttttgggcttaccagatgagacaaaagaaattatttttttagaagaggatgatttagtatcaattaatgaatcaaaagttacaatattcaataaaaaaaatgataaaattgaaagagaaaagcacaaatttgttgccaaaaaggattttaaaataaagggtaattttaaacactttatggaaaaagaaatttttcatcaatctacaagtattgaagataccattttaaattttgctgataaaaaaaatcaaaaagtacttcttcctaaaacaaatattaactttaataagttttcaaatttaattttaattgcttgtggtacagcatatcattcttgtatgataggcaaatattggcttgaaacattatctaattttaatgtatcgatagatattgcatcagaatttagatataaaaaaattaacattaataaaaattctataggaattgtagtttcgcaatcaggcgaaactatggatacattaaaatgtataagtaaatttaaagaatatggaataccaactatttcgattgtgaatgttttaaatagttctattgcaagattgagtgattttattttgcctactatagctggaccagaa

SEQ ID NO: 246170 - DNA, 427 bp, Unknown
  Bacterial polypeptide expressing nucleotide sequence isolated from the Sargasso Sea
cctttttcttggaagagatttatgtatccggtagctatggaaggtgctttaaaaatgaaagaggtttgttatattcatgcagaagcatatcctgctggagaaatgaaacacggagtaaatgccttaataggcgaaaaaatgccttcactagttatggctccaacaggaatttcatttaataaaatgttgagcactataaatgaaattaaagcaagggatggtgaggtaataggattgacagataatgatagtaatgagttcacatcattattaagtaattacttaataatagacagttataattataatttagacgtaattctatattcaattaatttacaattactgtctttttatacgtctctattattaaaaattaatccagacaggcctagaaatctggcaaaaacagtgactgtagagtaat

SEQ ID NO: 246171 - DNA, 247 bp, Unknown
  Bacterial polypeptide expressing nucleotide sequence isolated from the Sargasso Sea
atgtgcggtatcgttgcttatataggaaaggaagaagcattccccatcatattaaaaggtcttaaaagattggaatatcgaggctatgatagttcaggtgtagccttgttaaatggagacattaaactttataaaaaacaaggaaaagtgagtgtattggaagaatacacagctgcgaaatccagagaagcaaaagtaggaataggacatactagatgggcaacacatggtgccccaaacgatataa

SEQ ID NO: 246172 - DNA, 811 bp, Unknown
  Bacterial polypeptide expressing nucleotide sequence isolated from the Sargasso Sea
ctggcctacgacggaactgaactacccgtccgaacagacgagataacaaccgccgatatcaccacacgagacatcgaccgaggtgacgcacctcattttctcttaaaggaaatccaagaagcacccgaatcagtccacaaaaccctccgcggaagaatcatcgaaaccgatggcaagctgctggtccatctcggtactgagaccatccccgctgcgatccagaatgcgtttgcgaacaaacaaataaaaagaatcattgctattggccaaggaaccgccgcagtagctgcgcgaaccatcccccaatttctgagcccattaatagaagaccaagaactaacagtcgaagctcaacttgccactgaactaagcggattttctatggcagccgatatgtcggacacattggtcgttgcagtcagccagtcgggtaccacaacagacaccaaccgtaccgttgacctaattcgtcaacgaggcggtcacgttatcgccatcgttaaccgtcgaggtagcgacctcaccgataaatctcacggcgttctctacacatcggatggtcgagatgttgaaatgtcggttgcctccactaaggccttttatgcacaggtcgttgccggtgtcctgctcagtagcgcgttagcgaacctaatcgacacagctcgaaaccaaaccgagatactcagcgccttacgccaactcccgaaatccatggaacaggttttaacaacacgtccgtccatagcgatcgctgcgcaacgccacgcacacccaaaaacgatattgggcagtagtaggaaacggtcctaac

SEQ ID NO: 246173 - DNA, 492 bp, Unknown
  Bacterial polypeptide expressing nucleotide sequence isolated from the Sargasso Sea
attgttctcaggtgcagcatttgcagaggacagtgaattggtagtttttgactggggcggatatgaagaccctggtttctttcaagcctatattgataaatatggcgatgcaccaacatattcattcttttctgacgaagaagaagcttttcaaaaagtaagagctgggttccgagctgatttagggcacccttgctcgcaatcggttgttaagtggaggaatgcaggcattatcgtacctatagatacttctcgtctttcaaattgggacaaagtaatgcccgaatttgcaaacatggaaggttggaatgttgatggaaaacagtgggccgtaccaattgattggggtgcaaccgctttaacttacaatactgaagaagtgagtgctgaagaagcttcgtctctgtatgtatttgcagatccaaaatttcaagaccgagtatcactagttgataatgttgacgatgcttatgcattgggctttttagctgt

SEQ ID NO: 246174 - DNA, 333 bp, Unknown
  Bacterial polypeptide expressing nucleotide sequence isolated from the Sargasso Sea
ctctattgctgtaatcgacacagaggaaaaaggaaaaatatttgcagccaaacaaaaaagcccgcttttagttggaaaagggatagaggaaaattttatcgcctcagacccgctcgctatagcgggccttgccgaatctttctatctacttgaagaaggcgactttgcagaaataaccaaagaagaaattaaaattgttggcagcaacggtgaggcgctctcaagagaagagaccataatagacacaagcgggaaggaggcatcaaaagaaggttacaaacacttcagggaaaaagaaatatatgagcagccaaaagcaataacaaaggctat

SEQ ID NO: 246175 - DNA, 655 bp, Unknown
  Bacterial polypeptide expressing nucleotide sequence isolated from the Sargasso Sea
ctgcattgtaaagaattcggtccggttgaaaatcttgtttgggagaatattgactctcctgagcctggggacgatgaagtactaatatcagttaaggctgcagctcttaacttccctgactatttaattgttcaaggcctttatcaatttaagcctgaatttccttttgcaccagggaatgagggagcaggcgtaataaaaaaaattggaaaaaatgtaacaaaattcaaagagggtgatcgtgtttattttatgtctgcatatggagcttttgctgaagagatttgtatgcatgaacttgggacttttgcaattgaagaagacacatctttcgaaatggctgcatcataccaaatggcatatggcaccagctatcatgcccttatgcaaagaggtgaactcaagaaagatgatgaattactagtattaggagcgtctggtggcgtgggattagctgctgtagatattgcagttgcgaaaggagcaagagttgttgcaggtgtatcaaacgaagaaaaggctcaaatttgtcgtgattacggtgctgccgatgttgttatatatggagagggtcccaaagataaagatgaatcaaaaaaactatcattagagcttaagtcaaaaagtctaaaaggtggatttgatattatttatg

SEQ ID NO: 246176 - DNA, 142 bp, Unknown
  Bacterial polypeptide expressing nucleotide sequence isolated from the Sargasso Sea
atggtaaaccctagtacggtaaatgcacacccacattcatctgaaacagtttcagtcgttcacaacggtattatcgaaaattcaacaattttaaaaaaagttttagagaaaaaaggatataattttaaatctcaaacatgat

SEQ ID NO: 246177 - DNA, 487 bp, Unknown
  Bacterial polypeptide expressing nucleotide sequence isolated from the Sargasso Sea
tctgcattgtaaagaattcggtccggttgaaaatcttgtttgggagaatattgactctcctgagcctggggacgatgaagtactaatatcagttaaggctgcagctcttaacttccctgactatttaattgttcaaggcctttatcaatttaagcctgaatttccttttgcaccagggaatgagggagcaggtgtaataaaaaaaattggaaaaaatgtaacaaaattcaaagagggtgatcgtgtttattttatgtctgcatatggagcttttgctgaagagatttgtatgcatgaacttgggacttttgcaattgaagaagacacatctttcgaaatggctgcatcataccaaatggcatatggcaccagctatcatgcccttatgcaaagaggtgaactcaagaaagatgatgaattactagtattaggagcgtctggtggcgtgggattagctgctgtagatattgcagttgcgaaaagagca

SEQ ID NO: 246178 - DNA, 899 bp, Unknown
  Bacterial polypeptide expressing nucleotide sequence isolated from the Sargasso Sea
gagaatatataactatcgagagttacgctcagagctagaacctctaggttattgtttcaggtctgagactgataccgaagttgttttatgcgcccttgaccattgggggatagatgcgctcattcgtttcaatggtatgtttgcgttggcgctctgggacagaaaaggtaaaattctacttattgctcgtgaccggtacgggataaaaccgctttattatgcaaaacagggagaacagtttttatttggctcagaacagaaagccattaaagcattcccagattttcagcgtaaactaaatgctcctgcattattggagtatatgactttccaaaatatttttacggatcaaacccttttacaggatataaaattactttctcctggattttatggggttgtaagttttaaggatagaacatttagacaaactcgttattgggattattgttttagggaatcaaaaggagcttatcccccaagagaagaatatgcagaagagctagatcgactttttttgcaagctgtaaaccggcaactagttggagatgtggaaataggttcttacctaagtggtgggatggatagcggatcaattacagccatcgcttctcaaaatttcccaaacttaaaaacatttacttgtggattcgatttgagttctgcttcaggtatcgagttaggttttgatgaacggtttgaagctgaagcaatgtctgccaagtttaaaacagaacattatgaaattgtacttaaatcaggtgacatggagcgttgtttgccaaaattagcatggcatcttgaagaacctcgcgttggccaaagctatccaaattactacgtggcacaacttacgagtaaatttgttaaggtagtgttgtctggtagcggaggagatg

SEQ ID NO: 246179 - DNA, 169 bp, Unknown
  Bacterial polypeptide expressing nucleotide sequence isolated from the Sargasso Sea
aaaaaaaatggaatgaaaacctgtgcagtcgtaaatgttattgaaagctctatagcaagagtctcggagtttgtttcgcctattcattgtggaacagaaattggggtagcatcaacaaaggcattcctaggtcaaatattaatactatatatcttatctttaaaactag

SEQ ID NO: 246180 - DNA, 202 bp, Unknown
  Bacterial polypeptide expressing nucleotide sequence isolated from the Sargasso Sea
tattactttacagataagttaggttataaaaaaattaaaaaattttcacattctacattcattttaccagatacaaaatcatatagtgcgccaataatatacagtataccagtacaactaattgcatatcatttggctgtatttttaggtacagatgtagatcagccaagaaatttagctaaagcagttactgttgaataaa

SEQ ID NO: 246181 - DNA, 243 bp, Unknown
  Bacterial polypeptide expressing nucleotide sequence isolated from the Sargasso Sea
gatgtgttcaattataggctattctggaagtgaaattgcagctccaattattgtaaaaggattgaaaagaatggagtatagaggatatgacagtgtaggagttgcaacagaatcagaaaatcaaattgagttaaaaaaaggaactggtaaagtaactgaagtaaattcaaaatttcaactagatacactaccaggcagaataggcataggtcatactagatgggcaactcatggaaaggtcac

SEQ ID NO: 246182 - DNA, 551 bp, Unknown
  Bacterial polypeptide expressing nucleotide sequence isolated from the Sargasso Sea
gttggaaaattatttaattaaaaacttagaaaatggtcaatatcaaattaactatccatttgatactaagttttttgaatcaattgagagagttgaaattattgcttgtggcacgagtaaacatgctgcaatggtgggcagctttttattagaacaattctcaggaatacctacgaatgtcttttatgccagcgaatttagatattccccgcctccactactgccaaatacattaactattggagtcacgcaatctggagaaactgcagacacaattgcagctatcgatatggaaatcaaaagaaggtcatcaattaaagataaaaaatttaagcctaatgtaatagctataacaaacagaaaggagagctctataggaaggcaggtttcaaatataattgatatttgtgcaggaatagaagtgggagtggctgcaacaaaaaccttttttgcccaattactgtctttttatggattagctataaaatttgcacaaattaaaggtagtcaaagtgctgatgaaattgacaaattaatagcagaactcataa

SEQ ID NO: 246183 - DNA, 657 bp, Unknown
  Bacterial polypeptide expressing nucleotide sequence isolated from the Sargasso Sea
cattaacatataatgctgaggaagtatccgcagaagaagctagctctttgtacgttttcgctgatccaaaatttcaagggcgcgtgtcaattattgacaacgtagacgacgcctatgccctaggttatctggctgtaggagtgatggattggactaaatctacggacgaagattttaaaaaggcttcagattttttaagaaaagtgcacaaaaacgttcgacagtatcatgctgacggtgctgaaggtgctgcgcttatgaagagtggagaaattcttttagaatggacgtggaatgaggttgcatttactctcagttgggaagatgacgcaccagagactgtcttcaaacgagacaccaaagaaggctcttcaacttgggtatgtggctatacaatgatgaaagatgcgcctggctcggaacaaaaagcctacgattttcttgatgcttggctttctgacgcttctgcagaatatatcgttactgagtggggttatggacatacgaataaagaagtcatggcaactgttggtaaagagaatggatgggagccattagccagttatactgagggttctttattccaaaaaccttctgatcctgcacttagggaaagaatgattaaagaatgggagctcattaaaagtgggttctaat

SEQ ID NO: 246184 - DNA, 1003 bp, Unknown
  Bacterial polypeptide expressing nucleotide sequence isolated from the Sargasso Sea
atgaaagctattatttgtaagaagtttgcgccggtttcagatcttgtttgggaagaggtggcagaccctgttgccggtccgggcgaggtcgttgtcgacataaaggcggctggcctaaattatcctgacaaccttattgttcagggcctttatcaatttcagccagaaaggcctttttcgccgggacatgaaggtgctggggttgtttcttcggttggagagggtgttgatgtgcatagcgttggggatagtgttgctttttttaaaggctttggcgcttttgcagaaaagattgtgttacctgcacagatggcattcccaattcctgaaagctttcctttccacattgcagctggtgtttttatggtttatggcacaagctatcatgcccttgttcaaagggcggacatcaacaaggatgatgaagttctaattttgggggccgccggtggtgttggtttggctgctgtagacattgcaaaatcttttggggctagggttgtggccgctgtttctactaaagaaaaggctgaggtgtgtgctgggtatggcgttgacgatgttgtcgtttatggtgaagaaaaacttaacaaagagggtcaaaaagcgtttacaaaagagctaaagtccaagagcgttcgcggcggtttttcaataatttacgatccaataggcgactgttttgctgagccggctttaagatctattggttggggaggaacatatcttgttgttggttttgctgcgggaaaaattccgtcttttccaaccaaccttatgttgttaaagggttgtgctgtctctggcgtctttatagggcgctttcagcaggaggagccgaaacaaaacgctcaaaacctaaaagaaataggtgagcttttgggggctggaaaactaactccctttatatctgaaaccatcccaatgtcggactctgttgcagcaattgaaagaattgctaggcgtggcgttgttggtaaagttgtttttgttaacagctagc

SEQ ID NO: 246185 - DNA, 850 bp, Unknown
  Bacterial polypeptide expressing nucleotide sequence isolated from the Sargasso Sea
atgaaaattttacattgcaaagagtatgggccggtagaaaatcttgtttgggaagatattgattcacctgaaccaggagataacgaagtcattgtaaccataaaggctgcagcattaaattttccagactacttaattgtgcaagggctataccaattcaaacctgaagttccttttgctccaggcaatgaaggtgcaggtgttattaaaaaagttgggaagaatgttactcgtgttaaagagggagatcgagtttcttttatgcttccctatggcgcttttgctgaagaggcatgtacgcatgaatttggagtatttccaatttctgatgacattacatttgaaatggcagcttcatatcaaatggcttacggcacaagctatcatgcgttaatgcaaagagggcaacttacagaacatgatgaggttttagtgcttggcgcatcaggaggagttggtttagcggctgttgatatagctaaggctaaaggcgctagagttgtagctggagtctcgaccgaagagaaagcaaaaatttgccgtgactatggagttgatgatgttgttatctatggtgatgggccaaaagataaagatgaatcaaaagcttttgctgctgaacttaaatctaagagcacgcatggtggatacagtattatttatgaccctattggtgactgttatacggagcctgcatttagatctatcggttggaaaggcagatacctcgtggttggttttgctgctggacagatacctaaattacctattaacttaactcttttgaaaggggcatctcttgttggtgtgttctggggtagttttactgctcttgaagcagaaaccaatc

SEQ ID NO: 246186 - DNA, 1003 bp, Unknown
  Bacterial polypeptide expressing nucleotide sequence isolated from the Sargasso Sea
atgaaaattttacattgcaaagagtatgggccggtagaaaaccttgtttgggaagatattgattcacctgaaccaggagataacgaagtcattgtaaccataaaggctgcagcattaaattttccagactacttaattgtgcaagggctctaccaattcaaacctgaagttccttttgctccaggtaatgaaggtgcaggtgttattaaaaaggttgggaagaatgttactcgtgttaaagagggagatcgagtttcttttatgcttccctatggcgcttttgctgaagaggcatgtacgcatgaatttggagtatttccaatttctgatgacattacatttgaaatggcagcttcatatcaaatggcttacggcacaagttatcatgccttaatgcaaagaggacaacttacagaacatgatgaggttttagtgcttggcgcatcaggaggggttggtttagcggctgttgatatagctaaggctaaaggcgctagagttgtagccggtgtctcgaccgaagagaaagcaaaaatttgccgcgactatggagttgatgatgttgttatctatggtgatggaccaaaagacaaagatgaatcaaaagcttttgctgccgaacttaaatctaagagtacgcatggtggatacaatattatttatgaccctattggcgattgttataccgagcctgcatttagatctatcggttggaaaggtagatacctcgtagttggttttgctgctgggcagatacctaaattacctattaacttaactcttttgaaaggggcatctctagttggtgtgttctggggaagctttactggtcttgaagcagaaaccaatcaacaaaatattgctgacataaataaaatgttagctgaaggtaaaattaagcctctaatttcagagacattcccaatggaaaaagctgttgatgctattcaaatgatcggcaatagaaaggttatgggaaaagttgttctagttaatagttaat

SEQ ID NO: 246187 - DNA, 871 bp, Unknown
  Bacterial polypeptide expressing nucleotide sequence isolated from the Sargasso Sea
aatgagaaaaattttaagttacctggtggctgcaactgcattttcattcggtgcttctgcatttgcagcggacagtgaactggtggtgttcgactggggtggatatgaagacgaaatgttcttccaagattatatgaaaaaatacggcgatgcgccaacttattctttcttttcagatgaggaagaagcttttcaaaaagtgcgtgcaggttttcgggctgacttagggcatccctgttcgcagtcagtagtaaaatggcgaaacgcaggaattataaaaccaattgatacttctagactgtcaaactttgacaaggttgatccgggatttgctggaatggagggctttcaagttgatggagttcaatgggcacttccgatagattggggcgcaacagcattaacatacaacgctgaggaagtatctgcagaagaagccagctcgttgtacgtctttgctgatccaaaatttcaagggcgtgtgtcaatcattgataacgtagacgatgcctatgcactaggttatctggccgtaggagttatggattggaccaaatctacggatgaggattttaaaaaggcttcggattttttaagaaaagtgcacaagaacgtcagacaatatcacgctgacggtgctgaaggtgctgcgcttatgaagagtggagaaattcttttagaatggacgtggaatgaggttgcatttactctcggttgggaagaagacgcaccggagacagtcttcaaacgagataccaaagaaggctcttcaacttgggtatgtggatatacaatgatgaaagatgcacctggttcagaacaaaaagcatacgattttcttgatgcttggctttctgacgcctctgcagaa

SEQ ID NO: 246188 - DNA, 1003 bp, Unknown
  Bacterial polypeptide expressing nucleotide sequence isolated from the Sargasso Sea
atgaaaattttacattgcaaagaatatgggccggtagaaaaccttgtttgggaagatattgattcacctgaaccaggagataatgaagtcattgtaaccataaaggctgcagcattaaattttccagactacttaattgtgcaagggctctaccaatttaaacctgaagttccttttgctccaggcaatgaaggtgcaggtgttattaaaaaagttgggaagaatgttactcgtgttaaagagggagatcgagtttcttttatgcttccctatggcgcttttgctgaagaggcatgtacgcatgaatttggagtatttccaatttctgatgacattacatttgaaatggcagcttcatatcaaatggcttacggcacaagttatcatgccttgatgcaaagaggacagcttacagaacatgatgaggttttagtgcttggcgcatcaggaggggttggtttagcggctgttgatatagctaaggcaaaaggtgctagagttgtagccggtgtctcaaccgaagagaaagcaaaaatttgccgcgactatggagttgatgatgttgttatctatggtgatgggccaaaagataaagatgagtcaaaagcttttgctgccgaacttaaatctaagagcacacatggtggctatagtattatttatgaccctattggcgattgttacaccgagcctgcatttagatctatcggttggaaaggtagatacctcgtggttggttttgctgctggacagatacctaaattacctattaacttaactcttttgaaaggggcatctcttgttggtgtgttctggggtagttttactgctcttgaagcagaaaccaatcaacaaaatattgctgacataaataaaatgttagctgaaggtaaaattaaacctctaatttcagaaacattcccaatggaaaaagctgttgatgctattcaaatgatcggcaatagaaaggtgatgggaaaagttgttctaattaacagttaat

SEQ ID NO: 246189 - DNA, 1354 bp, Unknown
  Bacterial polypeptide expressing nucleotide sequence isolated from the Sargasso Sea
taaagaaatcccaaaaactatttttggatttactacaaattcttcaggaggattagttgttggtgaaaaagataattatcgctttctaagtagtgactcttatgccctggaaaatttttgtgattcagtcagctttaccagtaaagatgatcttgtaattatttcaaataatactctgaaaataatagatcaaaataatttaccaacctctcctaaaaatataaatctaattaaagatacgaaagataataatcatgaaattaaagatttgcaaacaaattttataattgaaaaagagatatcagagcaagatattgccttaaagaaattaatcacgaaaagaattctagataaaccacaagaggccttccctgaaataaatcgccatagattattatcttcacgaaaaataatttttacgggtatgggttcttcttatcacgctgctcaatatggatctttactttttgaagatttgcttgaaattgattcaaaggttgaattttcatcggagctaaaaaataaaaaaataatttctcctgaccaaactactgtttttgctattacccaatcaggagaaacagcagatacaattgaagccataagaaatgctaagcagcaaggcgcatatgtagtttcaattgttgaggaatcaaatagtaaagctgctattaattctgattcatatttacttttagaaacaggtaaagaaatttcagttgctgcgacaaaaactttttcctctactttattaatgtgtaactctatttgtatttatattgcaagcttgttagataaaaataatcaacttatcactaaacttaaagaagattttatgaatgtagatagtaatatcaaaaaagttcttgattgctgtgattatgattatctaaaagtctctaaatttatttcagatagtgaaaaggttttttttattggaaaaaatttatcttttccaatagtaaacgaaggttcattaaaaattcaagaaatttctaaaataaactccaactcatttatagaaggagagctgaagcatggtccaaatgctttattagataaaaattcgacagttatttccattattggtcctgatgaaaacattaagaaatctataagttctcttagagaaattgcttctagaaatgcaaatattattactattagttttgttgaaaatagcgaaatacaagagttgtcaaattataactttgttatagagaacaacaataaatatatatttccaattttatcggttattcctttgcaaaaattggcatttatgtcagctttgaatctcggattagatccagatagaccccaaaatctggccaaaacagtaactgttgaatag

SEQ ID NO: 246190 - DNA, 376 bp, Unknown
  Bacterial polypeptide expressing nucleotide sequence isolated from the Sargasso Sea
aatgtgcggcattgtaggttatataggcaataaagatcctgtccctattctattgaaagggttgaaacgattagaatatagagggtatgattcttctggaatcgctcttcttgaggaagacaatctaacccatataaaaaaagcaggaaaagtttcagatttgcaacagttagttgatgattcttctataaaaggaaattgtggtattgcgcatacacgatgggcaacgcatggagctccaaacgatattaatgcacacccccatttggatcatactgggagcattgctctagtacataatggaatatttgaaaactatgaagcgatcaaacaacttcttatgaataggaatatccaatttactagtgatacagat

SEQ ID NO: 246191 - DNA, 1003 bp, Unknown
  Bacterial polypeptide expressing nucleotide sequence isolated from the Sargasso Sea
atgaaagctgttgtctgtaaaaaatttgctccggtttcagatttggtttgggaagaggttgctgatcctgttgcaggtcctggagaaattgtcatcgatgtaaaagcagctgggctaaactatccagacaatcttattgtacagggcctttaccagtttcgaccagaaagacccttctcgccaggacatgagggcgctggtattgtttcgtctgttggagagggtgtcaaaacacacaaggttggtgataacgttgctttcttcaaaggttttggcgcctttgcagaaaaaattgtgttgtctgaagctttcgcgttctcaattcctgacaactttccgcaccctgttgcggctggtgtgtttatggtttatggtacaagctatcacgctctagttcaaagagcaaaaataaccaaggatgatgaggttttggtgttgggtgcatcaggcggcgttggtttggccgctgttgatattgcaaagtcatttggtgcaagggttgttgttgctgtgtctaccaaagaaaaagctgacgtttgcaagcgttatggtgttgacgatgttgttgtttatggaaaggaaaaactagaccaagagggtcaaaaaatatttacaaaagaattaaaatcaaaaagtacgcgtggtggtttttcaattatttatgatccaataggcgactgttttgcagagcctgctttaaggtctattggttggggaggtacatacctcgttgttggttttgctgcaggaaaaattccatcgtttcctacaaacctaatgctattaaagggttgtgctgtttccggcgttttcattggaaggtttcaacaagaagaaccaaaacaaagtgctcaaaatataaaagaaattggtgatcttctaagctcgggaaaactaactccctttatatccgaaaccatacctatggcaaagtcaattgatgcaattgaacgaatcgctaagcgcggagttgttggtaaagttgtttttgtgaacaactaac

SEQ ID NO: 246192 - DNA, 1045 bp, Unknown
  Bacterial polypeptide expressing nucleotide sequence isolated from the Sargasso Sea
aaccacacattaaaaaacttaataaataaaagaatgtctgacaaatctcaagatgcttttcctgaaattaatagacatagattgctatcttcgaaaaaaataatttttacaggtatgggttcttcctataatgctgcacagtacggatcgttactctttgaagatttacttgaaatagatacaaaagtagaattttcttctgaattgaaaaataaaaaaataattgatcctcatcaaactactgtttttgctataactcaatcaggagaaactgctgacacaattgaagctattaggaatactaaagaacaaggtgcttatgttgtttcaatagttgaggaaccaaatagtaaagctgcaattaattctgattcatatttactattagaaactggtaaagaaatttctgttgctgctacaaaaactttttcatctactttattaatgattaattctatatgtatgtatgtagcaagcttattagaaaaagataatctaactatcaataaagtaaaagaagattttacaaatatagataataatgttcagaaagttcttgattgttgcgattatgattatcttagagtttctaaatttatttcagaaagtgaaaaagtttttttcattggtaaaaaactatcttttccaatagtcaaagaaggatcattgaaaattcaagaaatttcaaaaataaattctaactcatttattgaaggtgagttgaagcatggacctaatgctttattagataaaaatacaactgttgtttcaataattggacctggagacaatatcaagaaatcaattagttgccttagggaaatttcttcaagaaatgccaatattattactattagttttactgaaaacgaagagttaaatgaattatcaaaatataattttgttatagaaaataataataaatatatttttccaattttagctgttattcctttgcagaaactcgcatttatgtctgctttgaatctaggattagatccagataggcctcaaaatcttgctaaaaccgttacagttgagtaaa

SEQ ID NO: 246193 - DNA, 1003 bp, Unknown
  Bacterial polypeptide expressing nucleotide sequence isolated from the Sargasso Sea
aatgaaaattttacattgcaaagaatatgggccagtagaaaatcttgtttgggaagatattgattcgcctgaaccaggtgataacgaagttatagtaacgataaaggctgcggccttaaattttccagactatttgattgtacaagggctttatcagttcaagcctgaggttcctttcgctccaggtaatgaaggtgcgggtgtaattaaaaaaattgggaagaatgtcactcgtgtcaaagaaggagatcgagtttcttttatgcttccttatggcgcttttgctgaagaggcttgtacgcatgagtttggagtgtttccaatttctgatgatattacatttgaaatggcagcttcatatcaaatggcttacggcacaagttatcatgccttgatgcaaagaggacaacttacagaccatgatgaagttttagtgctgggagcatcaggaggtgttggtttagctgctgttgatatagctaaggctaaaggtgcaagagttgtagctggagtctcaaccgaagagaaagcaaaaatttgccgcgactacggggtcgatgacgttgtgatatatggtgagggaccaaaagacaaagatgaatcaaaagcttttgctgccgaacttaaatctaagagcacacatggtggatacagtattatttatgatcctattggcgattgttacactgagcctgcatttagatctattggttggaaaggcagatacctcgtagttggttttgctgctgggcagatacctaaattacctattaacttaactcttttgaaaggagcatctttagttggtgtgttctggggtagttttactgctcttgaagcagaaaccaatcaacaaaatattgctgacataaataaaatgttagctgaaggtaaaattaagcctctgatttcagagacattcccaatggaaaaagctgttgatgctattcaaatgatcggcaatagaaaggtgatgggtaaagttgttctaattaacagttaa

SEQ ID NO: 246194 - DNA, 994 bp, Unknown
  Bacterial polypeptide expressing nucleotide sequence isolated from the Sargasso Sea
ctgcattgtaaagaattcggtccggttgaaaatcttgtttgggagaatattgactctcctgagccgggggatgatgaagtactaatatctgttaaagctgcagctcttaatttccctgactatttaattgttcaaggcctttatcaatttaagcctgaatttccttttgcaccagggaatgagggagcaggcgtaataaaaaaaattggaaaaaatgtaacgaaatttaaagaaggtgatcgtgtttattttatgtctgcttatggagcttttgctgaagagatttgtatgcatgaacttgggacttttgcaattgaagaaaacacatctttcgaaatagctgcatcataccaaatggcatatggcaccagctatcatgcccttatgcaaagaggtgagctcaagaaagatgatgaattgctagtattaggagcatctggtggagtgggattagctgctgtagatatcgcagttgcgaaaggagcaagggttgtagccggcgtatcaaatgaagaaaaggctcaaatttgtcgtgattacggtgctgccgatgttgttatatacggggaaggtccaaatgataaagaggaatcgaaagcactatcattaaatctaaagtcaaaaagtctaaaaggtggattcgatattatttatgacccaattggtgattgctacatggaaccagcatttaggtccattggttggaaaggaaggtatttagtggttggatttgcagctggacaaatacctaaattacctataaatctttcacttttgaaaggagcttcattagttggagttttttggggttcttttactggacgtgaacctgatttaaatactaaaaatctaagtgaaattaatcaaatgcttaaagatggtgaaattaaacctctagtttcaaaaacatttccaatggagagagccgttgaagcaataaatcttattggaaatagaggtgtaataggaaaagtagttcttacaaatgaataaa

SEQ ID NO: 246195 - DNA, 693 bp, Unknown
  Bacterial polypeptide expressing nucleotide sequence isolated from the Sargasso Sea
ttagtgtttttcccatccctgaagatattacttttcaattagctgcttcatatcagatggcttatggcacaagctatcatgcacttgtacaaagaggtgctctatccagtgatgtcgaagttttaatattaggggcctcaggcggtgtaggtcttgctgctctcgatatagctaaagcaaaaggggctagagtcgttgttggggtctcaactgaagaaaaagcgcaaatatgtcgagactatggggctgatgatgttgttatttatggttcaggaccaacagacaaagaagaggcaaaagcattttcggctgaacttaaagctaaaagcgctaaaggtggttacgacattatttatgatccaataggtgactgttatgctgaaccagcatttagagccataggttggaaaggtaaatatttagttgttggttttgctgctgggcaaattccaaaactcccaattaacctaactttattaaaaggtgcttctgttgtgggtgtcttctggggtgcttttacaggaagagagtttgaagaaaatcaaaagaacatatctgatattaatgagatgttgggcaaaggacaaattaagcccttaatttctaaagaaattccaatggagaatgcagtagaagctattaagctgattggcagcaggggtgttgttgggaaggtggtcctggtaaattaaa

SEQ ID NO: 246196 - DNA, 964 bp, Unknown
  Bacterial polypeptide expressing nucleotide sequence isolated from the Sargasso Sea
tgcggctgtggcgacgacccacggctgcgacggttcctcgacctccagctcaagctgtattcccaggagcccgcagaccggaccgcggctctctacggcgccacggtgctgcagatggcgcaggcaccgctgggtctctggcatctgcatggctcgatgcaagtgctcagcgatcagctggtgcaggcgatcgaaaaccagggcggccgcgtgctgatgcgccatcgggtcaccggcctcgaacccaccgacgagggctggcgcgtcgtcgtggacagtccctccggccgggatcagatccacacagccgctgatctgatctgcagcctgccgccccaatgtctgttggatctgatccccgaagcggtgatgcccaggggataccggcaacgcctgagccagctgccggagcccagtggcgcactggtgctctatggcgccgtgcgacgggaggcgttacccagctcctgcccgggccatctgcaacggggggctgacgatccgggctctctgttcgtctcgatcagccgggagggtgacggtcgggccccgaaaggtcaggccaccgtgatcgccagcgtgttcacacccaccgcggactggtgcagcctcgaggaggagccctaccaggcccgcaaaagcaagcgcctggacgccatgcgccgggagctcaaccactggcttgatctgaagccccaggactggttgcacgtggaactggctacgcccaggggattcgccggttggaccggtcgcccgcggggcatcgtggggggactcggccagcatccgagccgtttcgggcccttcgggctggcggggcggacgccgatgccaggcctttggctctgcggcgacagcctccaccccggcgagggaacggcgggcgtcagcctctcagccctcaatgcctgccggcagctggtggcagcgcggggcggagagctgcaacttaggggttgaa

SEQ ID NO: 246197 - DNA, 307 bp, Unknown
  Bacterial polypeptide expressing nucleotide sequence isolated from the Sargasso Sea
gcatggacctcttgcattaatggatacagacgtttttgtaattgtcattaatccaaatgattcaacatataccgacacattaacgagtgcacgagaaattaaagctcgtggagcaaagattattggagtctcagatattgaaagtgacgtttatgattattggataaaaattccaaaaattaatgaaatcctatatccaatttcagagatcattccaatacaattactaacatactactcagctttggaaaaagatgcagatccggactatcctagaaatttagcaaaatcagtaactgtcaagtag

SEQ ID NO: 246198 - DNA, 196 bp, Unknown
  Bacterial polypeptide expressing nucleotide sequence isolated from the Sargasso Sea
gatgtgtggcattgtaggcatcataagtactcaaagtgttacgaaaagaattctgacttctttgaaaagattagaataccgtggttatgactctgcgggtatttccgcgattaagaacagaaaaatagagcgttgcagagctgcaggaaaactaagcaatttagaacgagcgttagttaagcaacccatatcaggg

SEQ ID NO: 246199 - DNA, 247 bp, Unknown
  Bacterial polypeptide expressing nucleotide sequence isolated from the Sargasso Sea
catgtgtggaatagtaggaatagtaagcaataaatccgtatcctcaagtattattaatgctcttaaaaagttagagtatagaggatatgactctgcaggaatatctactttgaataatggatttattgatgaaaaaaaatgttccggaagagttgaaaatttagaaaaaattttatttcaaaatccttcaataggggatttgggtataggacatgtccgttgggctacacacggtgtaccaaatcaa

SEQ ID NO: 246200 - DNA, 166 bp, Unknown
  Bacterial polypeptide expressing nucleotide sequence isolated from the Sargasso Sea
gatgttaaatcttggaaaactagtccatatgcctgaatgtgatttctttatgacgccaattgtttataacatcccacttcaaattctttcatacgaagttgcccttttaagaggaacagatatagatcaaccaagaaatctagctaagtcagtcacggtggaatag

SEQ ID NO: 246201 - DNA, 134 bp, Unknown
  Bacterial polypeptide expressing nucleotide sequence isolated from the Sargasso Sea
tatgtgtggaatagttgctgttactggttataaaaaagctctaccattgttactaaatggtttagaaaaacttgaatacagaggctacgattccgcaggtattgctgtaatcaactctgaaacaaaaaatatta

SEQ ID NO: 246202 - DNA, 227 bp, Unknown
  Bacterial polypeptide expressing nucleotide sequence isolated from the Sargasso Sea
tatgtgcggaattattggtgtagtaggaaaaaataaagcagaaggtcttttattagaaggtctgagaagattagaatatagaggttatgattccgcaggtatagctactttagttgataataaaatagaaaaaagaagagctagcggtaaaatttctaatttaactaaattattaaaagagaatcctttgcctggttcaacaggcattgctcatactagatgggcta

SEQ ID NO: 246203 - DNA, 226 bp, Unknown
  Bacterial polypeptide expressing nucleotide sequence isolated from the Sargasso Sea
tatgtgcggaatagtaggaataacaagctcaaagccagtatcctctttaattttaaattcgttacgaaaacttgaatacagaggttatgactcagctggcatagctacattaaatgaagggtttataaatgaaattaaatgtgaaggaagagtagatagtttagaaaaaaatatagaaaaaaataatttatttgggaatgttggcataggtcatgttaggtgggcg

SEQ ID NO: 246204 - DNA, 446 bp, Unknown
  Bacterial polypeptide expressing nucleotide sequence isolated from the Sargasso Sea
tatggcaggagatttagttgaagccctgaacaaaactttatcagaaattgaaggtatatttacgatagctgtaatacatgagaatcatcccgatgaaattgtagcagtcagaaatgaaactcccttgattatcggcgttggtaattcagaaaatttcatagctagtgatatttatgcagtattaaagtatactcaacagattatttatcctgaagatagtcaagttgttagagtcacatcagaatctattgaaatttttgattcaaaattaaaacccataagttatgagattgaaacagtagagaaatatactgaagttgctgaaaaaggtggatatgagcattttatgctaaaagagatatttgaacaacctaaggttctacaagattcattaactgagttattggttgattctccgcttgaacatttgggacttaattggaaaa

SEQ ID NO: 246205 - DNA, 355 bp, Unknown
  Bacterial polypeptide expressing nucleotide sequence isolated from the Sargasso Sea
aaaattagaatacagagggtatgattcttcaggtatagccaccaaagaagataaattagttatttgtaaaaaagagggtcctatttctaacatggaagaaattttacccgaatcaaaatcaaccttaggtatagcacatactcgatgggctacacatggagtaccatctgattctaatgctcaccctcatggagatgatgataactctgttgcagtagttcataatgggacaattgataattatttagatcttaaggaaaacctagagaaagaagggtacaaatttaaaagtgaatcagattcagaagttctacctattttaatatctaaatattatggcaggagatttagttga

SEQ ID NO: 246206 - DNA, 148 bp, Unknown
  Bacterial polypeptide expressing nucleotide sequence isolated from the Sargasso Sea
aatgtgtggaataattggaataataagttctaaagaagtttctagtagaatagttaactcactcaaaaaactagaatatagaggatacgactctgcaggcatagctactttggttgatggaaatattaatgaagtaaagtgtgaggga

SEQ ID NO: 246207 - DNA, 271 bp, Unknown
  Bacterial polypeptide expressing nucleotide sequence isolated from the Sargasso Sea
atgtgtggaatagtaggaataacaagtaataaagaagtaacaacacgaatagttaattcattaaaaaaattagaatatagaggatatgattcagctggaatagcaacccttaatgatggttttataaaagaagttaaatgcgaaggtagagttgaaattttagaaaaaaatataacaactttaaatttacaaggcgaaattggaataggtcatgttagatgggcaacacatggcagaccaagtaccataaatgctcatccacattcatccg

SEQ ID NO: 246208 - DNA, 702 bp, Unknown
  Bacterial polypeptide expressing nucleotide sequence isolated from the Sargasso Sea
tatgtgtggcatcagcggtatagtgcatacagaaaattttggtagaaatttacttaattccataagaaatcttgaatatcgaggatatgattcttgtggagttgctgttatacagaatggcaagattgatttaagaaaaaatataggcggtattgatgatgtcaatctgaaagaacgtttggaccagatgcagggaaagattggcattgctcatactcgttgggcaacccatggaagtgtcactcaggaaaatgctcatcctcatctttcagaaaatcgaaaatttgcggtcgtccataacggtataatatctaattatcagcaacttagggatgtaatgcttagtgaaggtgtttgttttgagtctttgactgatactgaggtttttgtgaaccttttggaaaaatcctataatgaaagaaatgatttggaacaggctttcctagcagcacttcagcagatagaaggttcattttcaattgtcatgctttcttcacatgatccagagcatttgtattgcgtaaaaaaggagtcccccttattgttggggttgggcgaagaatgtaattttgttgggtctgatataaatgcctttctggaatatactaggaaagcaattgttttagatgaaggagaatatgtaattttaggtcctaatgactaccaagtccgcagtttaaaaaatggtaaaaaactaaagaa

SEQ ID NO: 246209 - DNA, 249 bp, Unknown
  Bacterial polypeptide expressing nucleotide sequence isolated from the Sargasso Sea
tatgtgtggaatagtaggtatagcaagcaatagcaattgtattaatgctttaattgaaggacttaaaaagctagcttatagaggttatgactcagctggtcttgctaccttaattaatcaggaaatagtaaaaagagtagcgctagggaaaatagggaacttagaaataacaataaaagaaagacctatagaaggtaatattggtatagcacacactagatgggcaacgcatgggtccccaaatgagct

SEQ ID NO: 246210 - DNA, 252 bp, Unknown
  Bacterial polypeptide expressing nucleotide sequence isolated from the Sargasso Sea
tatgtgtggaattattgggataaatagcaacaaacctgtatcagcaacaattattaattctttaaaaaaattagaataccgaggttatgactctgcaggaattgcaactctttcaagtggattaattaatgagataaaatctgagggaagagtagataatttagaaaaaaattctcttgttcaaaatatggaaggaactattggtattggccatgttagatgggcaactcatgggtcaccaaatagtattaa

SEQ ID NO: 246211 - DNA, 211 bp, Unknown
  Bacterial polypeptide expressing nucleotide sequence isolated from the Sargasso Sea
aggggaggaactctttatgtattttctgatccatcgatttctatggatttaaagtctggaagactcatcaatatgccgaaatgcgattttcttttgactccgatcatttatacgatacctcttcaaatactttcttatgaagtggctttgttaagaggaactgatattgatcagccaagaaatttagcaaagtcagtgacggtggagtaag

SEQ ID NO: 246212 - DNA, 146 bp, Unknown
  Bacterial polypeptide expressing nucleotide sequence isolated from the Sargasso Sea
aatgtgcggaattataggaatagcaagcaataaaccggtttcaattaatattataaattcattaaagaagctagaatatagagggtatgactcagctggtttagccactttaagtggtaataaaatagatgaaaaaaaatgctctg

SEQ ID NO: 246213 - DNA, 121 bp, Unknown
  Bacterial polypeptide expressing nucleotide sequence isolated from the Sargasso Sea
atgtgtggaataataggtattaacagtaataaaccagtgtcatctacaataataaattctttgaaaaaattagaatatagaggatatgactctgctggaattgcaactctttatagtggtt

SEQ ID NO: 246214 - DNA, 262 bp, Unknown
  Bacterial polypeptide expressing nucleotide sequence isolated from the Sargasso Sea
aatgtgtggaataataggtatagctagcaacaaatctgtaacctcaaatataattctgtctctaaaaaaattagaatacagaggttatgattcagcaggaatagctactattgttgatggtgaaatagatgaaaaaaaatgtacaggaagagtagataatctagaaaaaatattatttaaaagtccatcaaaaggatctttaggcataggtcatgttagatgggctacacatggaataccaagtcaagtaaacgctcatccc

SEQ ID NO: 246215 - DNA, 181 bp, Unknown
  Bacterial polypeptide expressing nucleotide sequence isolated from the Sargasso Sea
ggagatccccaggcgaagtcctttctggattatgctgttgaacttccccaagtcccctctttgattgctccctttgttcaaatgattctggctcagatgtttgcctattacactgccctcgatttaaaacgcaacatcgacaagcccaggaatcttgccaaatccgtcacggtaggttgat

SEQ ID NO: 246216 - DNA, 340 bp, Unknown
  Bacterial polypeptide expressing nucleotide sequence isolated from the Sargasso Sea
aatgtgtggaatagtcggaataacaagcaccaaatcagtaacctcaatgattataaattctttaaaaaaacttgaatatagaggttatgactcttctggtattgcaacattacataatggaaatatcaacgaagttaaatgtgaagggagagttgatattttagaaaaaaatttaaataaatctaatttgtcaggaaacgttggcattggacatgttaggtgggctacccatggaatacctagcacaataaatgcacatccacattcatcagaaaatgtttctgtagtgcataatggaattattgaaaattctactatattaaaaaaaatatttagttaa

SEQ ID NO: 246217 - DNA, 343 bp, Unknown
  Bacterial polypeptide expressing nucleotide sequence isolated from the Sargasso Sea
tatgtgcggaatcgtcgccctcgtggggtcccagcctgcagcgccacagttgctcgagggtctgcggcaactggagtaccgcggttacgactctgctggcttggcgacggtgaccagcgagggacggctcacctgcttgcgggccaaaggcaagctcgtcaatctcagtcagcgtgtggcgtccctgggggcccccgggcagtgcggcatcggccacacccgttgggccacccatggcaagcctgaggagcacaatgcacatccccatcgcagtgtcgatggcggggtggccgtggttcagaacggcatcatcgaaaaccaccggcagctccgggatggcctc

SEQ ID NO: 246218 - DNA, 919 bp, Unknown
  Bacterial polypeptide expressing nucleotide sequence isolated from the Sargasso Sea
gttacgtcaatcgccaatctggaatatcgaggttatgattcctgcggaatggcgatgcttaatggtaaaggaattgaggttcgtaaaaataccggcggcgttgaggaagttaggagtcgtgaaaaactcgatatgatgactggaaatctaggcattgcccataccagatgggcaacgcatgggggagtcacgacggaaaatgctcacccccatctctcccaaaatggtgattttgccatcgttcataacggcatcatttcaaattatcagaaactgagagaacgtcttattggggaaggactccaattcagatcaactacggacaccgaagttttcgtcaacctggttgaggaagcctttgcccagaaaaatgatgttttaggggcattcctggaagcgttgaaacaaattcagggaacctattccatcgtcttgctgtcttcgcatgatccagaacatctttactgtgttaaacaagactcaccgctgatcatagggctgggagaaggttgcaattacatcggctctgacattaatgcttttcttgaacatacccgaaaagcagtggttttggatgacggggaatttgctgtcatcagcagggagcgatatgagatttcggatgtcgggaagcgagaagaaagggaaaaatctattctccagattgattgggatacagagaccacaaaaaaaggtggtttttcccactacatgatcaaggaaatttttgacgaaccccaaactgcacggcaggctttggacgttcctcaagagcagatcaaacagttggctgagatgtttcaaaatgcccctcgtgcctacctgatgggggttggaacgacttttttcatctgccaaatggcccaataccttttcagttcactttccaaaagatatttttcctgccatcagttctgat

SEQ ID NO: 246219 - DNA, 322 bp, Unknown
  Bacterial polypeptide expressing nucleotide sequence isolated from the Sargasso Sea
atgtgtggaataattggaatagttagtaataaatctgtatcggcaagtataataggagctttaaaaaaacttgaatatcgaggttacgactccgcaggcatatcaacaataagcaatggacaaattaatgaacaaaagtgtacaggaagagtggataatttagaaaaaattctttttcaaaatccatcaaacggagatcttggtattggtcatgttagatgggcaactcatgggatgccaaatcaaattaatgctcatccacattcgtctgaagtagtttctgttgttcataatggaattatgaaaactcagataaattaag

SEQ ID NO: 246220 - DNA, 863 bp, Unknown
  Bacterial polypeptide expressing nucleotide sequence isolated from the Sargasso Sea
tctggaatatcgaggttatgattcatgcggaatggcgatgctcaatggtaaaggaattgaggttcgtaaaaataccggcggcgttgaggaagttaggagtcgtgaaaaactcgatatgatgactggaaatctaggcattgcccataccagatgggcaacgcatgggggagtcacgacggaaaatgctcacccccatctctcccaaaatggtgagtttgcaatcgttcataacggcatcatttcaaattatcagaaactgagagaacgtcttatcggggaaggactccaattcagatcaactacggacaccgaagttttcgtcaacctggttgaggaagcctttgcccagaaaaatgatgttttaggggcattcatggaagcattgaaacaaattcaggggacctattccatcgtcttgctgtcttcgcatgatccagaaaatctttactgtgttaaacaagactccccgctgataatagggctgggagaaggttttaattacattggctctgacattaatgcttttcttgagcatactcgaaaagcagtggttttggatgacggcgaatttgctgtcatcagcagggagcgatatgagatttcggatgtcgggaagcgagaagaaagggaaaaatcgattctccaaattgattgggatacagagaccacaaaaaaaggtggtttttcccactacatgatcaaggaaatttttgatcaaccccaaactgcactgcaggctttggacgttcctcaagagcagatcaaacagttggctgagatgtttcaaaatgcccctcgtgcctatctgatgggggttggaacgacttttttcatctgccaaatggcccaataccttttcagtt

SEQ ID NO: 246221 - DNA, 730 bp, Unknown
  Bacterial polypeptide expressing nucleotide sequence isolated from the Sargasso Sea
aatatttttacaccatcagagtttaattatttccataaaccaaattcaaaaactttatatatatttatatctcaatcaggagaaacagctgatacatgtgatttattagagtcaaataaaagatactttataaattcattgtcgttagtcaacaatagtgattccagacttgtgaacaatactaaatatagtttaaatcttgatttaggtattgaaaaaggtgttgctgcaacaaaaacttttacagctgaactaatatatctatattttttatcaataatattctcccaaaaaagtcaaaaatttaaatacacaaattttaaaaagaattttccaaaagtttttcagttagaaaaggaaattaaaaaaatagctagaagtctatacagatcagataatatatttgttttaggaagaaattataattatccagttgctctagaagcagctttaaagataaaagagatttcttatatacacgcagaagcttccttgtcttctgaaatgaaacacggtccgattgctctacttgattcaaatttccctattatctacttgatatctaacaacaaggattcaattttaaaggaaataacaaatatgtatgaagctagcacaagaacaaataaaattattctactcgccactccacaaacattagcaaaaatagaaaaaaagtttatagacaaaattcaagtaataaaaattcctgatgttgaggagaattttt

SEQ ID NO: 246222 - DNA, 499 bp, Unknown
  Bacterial polypeptide expressing nucleotide sequence isolated from the Sargasso Sea
atgacaaataaaatcacatatcttgacgatggtgaattttgtataattaaaaaagaccaagttcttttttttaatgaggatggaaagaagataaataaaaaaattctagaactttcatcaaatgaggctagttacgaaaaaggtgattttaagcattttatggcaaaggaaattgaggagcaaccaacatcagttaaaactggaataaaagaatatgtagataaaacgaattcagaaattaatatctataatttcccatggaaaattagtgaaataaattcaattacattaataggttgtggaaccgcttatcattcctgtctaatggctaaatattggtttgaagagttaactcaacttgatgtctctatagatattgcatcagagtttaggtatagaaaaaatagatttaaaaaagatactttatatatatttgtttctcaatgtggagaaacagcagatacttacgcagcactagatcttttaacaaaaataattg

SEQ ID NO: 246223 - DNA, 791 bp, Unknown
  Bacterial polypeptide expressing nucleotide sequence isolated from the Sargasso Sea
aaatcaattagttacaattaaagcaactggcccaattaaaaacctgaaaagcaaattatataagttacaaggtataacgacaggcatctcgcatactagatgggcaacacatggacagccaacgttaaaaaacactcatcctcatttgtcaggtaatatttgtaccgttcacaatggaattatagaaaactatatagatcttagatcatatcttaaaaagaagagctttatatttaagagtgatactgactcagaggtaatttgtcatttaataaattattactttagtaaatcagctaatatgcaatctgcaattatctcaacagcaaattcacttgaggggagttatgcactagctgctattaatacccagactccacacactatttattctgcatgtaagggcagtccaattattctaggtaaagatattgcatctaattatatttcttcagacatgactccaatagttgatcacactaaaaattatatacccatggatgacaatgaatttgcagaaataagctcttctgatattaaaattttcaacaaaaataaaagagtactttcaaagccaactaaaatatcaaaaatcaataagaaccaagcatcgctaatgggacataagcatttcatgcacaaagagatttatgaacaaaaagctatcatagaagatatgataaatcgttatgttggtaaggataaaatattacctaatatctttggtcatagcacagataaacttctagaaaatattaagcacatacattttatagcttgcggaaaatagt

SEQ ID NO: 246224 - DNA, 166 bp, Unknown
  Bacterial polypeptide expressing nucleotide sequence isolated from the Sargasso Sea
agtgaaaatatcagatttaaatttcaaataccaaaaaccaattcctcaattaattcatttcttttaacaatacctatacagtttttagcctatcacgttgctttattaaagaattgcgacatcgataaaccaagaaatttggcaaaatctgttactgttgaataat

SEQ ID NO: 246225 - DNA, 197 bp, Unknown
  Bacterial polypeptide expressing nucleotide sequence isolated from the Sargasso Sea
ttcaatcactgataaaattaataattcactaaaaaaattatcagattttgtattaatagcacctcagacacataaatatgtatttccaataacgtgttctataattttacaaatgttagcatatgaacttgcagtttgtagaaaatgtgaaattgatcaaccaagaaacttggcaaagtcagttactgtggaatagt

SEQ ID NO: 246226 - DNA, 864 bp, Unknown
  Bacterial polypeptide expressing nucleotide sequence isolated from the Sargasso Sea
attaacgctgccaagaagatcaatcaaagaaaagtaaaaggcaaacttgataatttgatttacgctcttcagaaagatcaatttgatggcaatacaggaataggtcatactcgttgggctactcatggagaaccttctgataaaaatgctcacccccattcatcaacctctgtatcgcttgtacacaacggaattattgaaaatgctgcagagttaaaaaaattaaaggaagtaaaagattatcattttgagtctgacactgactctgaagtaattactgcgttattaactttttatctaaaggagggtctgagccatcttgagagtgttcaaaagactatttcttctctagagggatcatacgcactagcaattatttttagtgatagtgaagacactatttatggagctaagaatggaagtccacttgttgcaggtacaaatggagttggcaattcaataggatctgattcgattgcactaagctcagttgctaataaagtatgttacttggaagacggggatataacagtattaaacaaagagagtatagaaatttataacctggagggtgaaagagcgaatagagaatttgttgaaataggaataaacgagtcagaagtttcaaaaggtccttataaacattttatggagaaagaaatacatgaacaccctcatgcagtcggtgaaacatttcgacaatttatagattatgataagggcacaatcgcaatttcaaatattaatttgaattttgataaaatttcaaagatttatctgattgcttgtggaacagcttattactcatgtttggtgggaaaatattattttgaacaatatgcaaggacaccagttgaatgcgat

SEQ ID NO: 246227 - DNA, 124 bp, Unknown
  Bacterial polypeptide expressing nucleotide sequence isolated from the Sargasso Sea
catgtgtggaatcgtaggcgccatcgctgagcgcaatatcaccgctgttctggtggaaggcctcaagcgcctggaataccgcggctatgacagcgccggtgtggcgctgctgaccgagcagggt

SEQ ID NO: 246228 - DNA, 246 bp, Unknown
  Bacterial polypeptide expressing nucleotide sequence isolated from the Sargasso Sea
caatttcaaacatacaagaagttattgctcgtggaggtaaaatattaatgataacagacgatgaaacattggagtcaaattctgaaaatatttgggaagtttttcgtttaccaaaatgccccaaatcaattgaggcaatcgtttattcagttccaattcatatgcttgcctattacacagcggttgagcttggtaatgatgtcgatcagccaagaaatcttgctaagtctgttactgtagaataat

SEQ ID NO: 246229 - DNA, 719 bp, Unknown
  Bacterial polypeptide expressing nucleotide sequence isolated from the Sargasso Sea
tatgtgcggaattgtcggtgttgtcgggctggaagcttgttccgaaaccattctggattccctcaagcggctcgaatacagaggctatgacagttcgggaatcgtcacccagtccagcggtgcgttccagatgaaccgggccgtcggcaaactacgcaacctgtccgaagtgatgcgcgaggccccgcttgacgggcagtcgggacttggtcatacgcgctgggccacccatggtggtgtgtcggagcgcaatgcccatcctcacatggtcggcgacaaggtcgtgatcgtccataacggcattatcgagaaccatgtggctttgcgtgcagagctggaagccaagggacacagtttttcgagcgagaccgattcagaagtgctggcgcacctgtttctggaggcattcaataacgggctgtccccgcagcaggcgggcaagcaggtcatggcaaggatcgagggaacattcgcgcttgccgccatgcatgccgaccatccggacatgatgatcgtggcccgcaatgcctcgccgcttgccgttgggctcggcgagggggccagcttcatcggatccgatgctgtggccctgtcgcacctgacgcgcgatgtgatctatctgaaagacaatgactatgctgtcatccgtcccgagggcgccgaggtgttcgacgcagagggcacgccagtcaatcgcgaggttgtgatcgtcgccgcca

SEQ ID NO: 246230 - DNA, 825 bp, Unknown
  Bacterial polypeptide expressing nucleotide sequence isolated from the Sargasso Sea
ttattaaccccccttggaatagaaatatatgactcaaacaacgagagacaatatcgaaatcctgtttccttaaaagtttcagagcaaataattgataagatgaattttaaacatttcatgttaaaagagatatatgatcagcccgatactgcaaaaaactggttgaaaaactatgttattaaaaatctagaaaatggccaatatcaaattaagtatccttttgatacaaagttttttgattcaattgaaagaattgaaattattgcttgcggaacaagtaaacacgctgcaatggtaggttgctttttattagagcaattttcaggtattcctacaaatgtttattatgctagcgaatttcgttactcacctcctccactactcccaaacacattaactattggagtttcacaatctggagaaactgctgataccattgcagcaattgatatggaaataaaaagaaggtcttcaattaaagatgaaagatttaaacccaaccttattgcaataactaatagaagagagagctctataggaaggcaggttccaaacataattgatatttgtgcaggaatagaagtgggagttgctgcaacaaaaactttttttgcacaattactttctttttatggattggctatacactttgctcaaattaaaagtagtcaaagtccagatgaaattgaaaaattaataacagaacttattaaacttcctccattactagaagatttacttcataaacatgatcaatcatcagaaaagctagcacatgacttttttaatattaaagatgttatttttttaggaagaggcataaat

SEQ ID NO: 246231 - DNA, 103 bp, Unknown
  Bacterial polypeptide expressing nucleotide sequence isolated from the Sargasso Sea
aatggcaatacctttacaaaagcttgcattttattcagcattagaaaaaggttacgacatagataaaccaagaaatttagcaaagtcggtgacggtcgaataa

SEQ ID NO: 246232 - DNA, 145 bp, Unknown
  Bacterial polypeptide expressing nucleotide sequence isolated from the Sargasso Sea
cgtatcgctaacaagcaagtgctcgacacggcttttggtgataatgcaggtgagtttttaaaagatatcaaacacgtgcaaatcattgcctgtggtactagttaccatgcaggtatggcggcgcgttattggttagaggattggg

SEQ ID NO: 246233 - DNA, 184 bp, Unknown
  Bacterial polypeptide expressing nucleotide sequence isolated from the Sargasso Sea
atgtgtggaattgttagttacattggtgatcaagaccctgtaccgatactaattaaagggttaagaagactagaatatcgtggatatgattctgctgggttggcacttttagatggtggtgaccttagttcgatcaagaaagctggaaaagtatctgagctttcagacccagatatcttctaac

SEQ ID NO: 246234 - DNA, 211 bp, Unknown
  Bacterial polypeptide expressing nucleotide sequence isolated from the Sargasso Sea
agaggcgggactctatatgtgttttctgatccctcaatctcaatggatttaaaatctggcagattaataaatatgcctaaatgtgattttcttttaactcctattatttacacaattcctcttcaaatactttcttatgaagttgcattacttagaggaactgatattgaccaacctagaaacttagcgaagtcagtcacggttgaataat

SEQ ID NO: 246235 - DNA, 172 bp, Unknown
  Bacterial polypeptide expressing nucleotide sequence isolated from the Sargasso Sea
atgtgtggaattatagctgctgcctcaaatcgtaacgttggtaagttattagttcaagggctccataaaatggaataccgtggatacgattctgctggcatagcacttcatcaaaaagatcaaatagcccatttaagaaccttaggcaaagttaaattgcttgaagaaaaga

SEQ ID NO: 246236 - DNA, 142 bp, Unknown
  Bacterial polypeptide expressing nucleotide sequence isolated from the Sargasso Sea
atgtgcgggataataggcataaatagcaacaaacctgtttcatcagcaattataaactcattgaaaaaattagaatatagaggctatgactcagcgggtatagcaacactttctagtggtcaaattaatgaagtaaaatctg

SEQ ID NO: 246237 - DNA, 94 bp, Unknown
  Bacterial polypeptide expressing nucleotide sequence isolated from the Sargasso Sea
ccacttcaaaaattagcttactttacagctttaaaaaaaggtttcgatattgataaacctagaaacctagcaaaatcagtaactgtagagtaat

SEQ ID NO: 246238 - DNA, 135 bp, Unknown
  Bacterial polypeptide expressing nucleotide sequence isolated from the Sargasso Sea
cagaaattgatccattgttatcacccgtagtaactgtcgttccgcttcagttacttgcatatcatatgcacaaaaaacgaggattagacattgatcagcctagaaatttagcaaaaacagttactgtggaataaa

SEQ ID NO: 246239 - DNA, 102 bp, Unknown
  Bacterial polypeptide expressing nucleotide sequence isolated from the Sargasso Sea
tatgtgtggaatagttgctgtaactggatataaaaaagctttaccattattaataaatggtttagaaaaacttgaatacagaggttatgattctgcaggtat

SEQ ID NO: 246240 - DNA, 235 bp, Unknown
  Bacterial polypeptide expressing nucleotide sequence isolated from the Sargasso Sea
catgcaggaggtaattgccagaggtgctaaagttttattaattacaaataaaagcaaagatgaaataatttctgaaaatatttgggagcaaatagaggtagataatttagatgaggaactaactccgtttttaacctcattacctttacaaaaattagctttttactctgcattggagaaaggttatgatatagataaaccaagaaacttagcgaaatctgttactgttgaataa

SEQ ID NO: 246241 - DNA, 232 bp, Unknown
  Bacterial polypeptide expressing nucleotide sequence isolated from the Sargasso Sea
gcaagaagttatagccagaggagccaaagtattattaattacaaataaaaataaagatgaaattatttctgaaaatatttgggaagttatagaggtagaccagttagatgatgaattaattccttttttaatgacaattcctttacaaaaattagctttttattcagctcttgaaaaaggatatgatatagataaacctagaaatctagctaaatcagtaacagtagaataa

SEQ ID NO: 246242 - DNA, 163 bp, Unknown
  Bacterial polypeptide expressing nucleotide sequence isolated from the Sargasso Sea
aatgtgcggcataataggaatagctagtaataaatctgttacttcaaatataataaattcattaaaaaaattagaatacagaggatatgattcagctggaattgctacaatagttaatggaaatatagatgaaaagaaatgtacaggaagagtagataattta

SEQ ID NO: 246243 - DNA, 103 bp, Unknown
  Bacterial polypeptide expressing nucleotide sequence isolated from the Sargasso Sea
tacgcaatcccgtcacagcttattgcatactatacagcgttattgaaaggtacggatatagaccaacctaggaatttagcaaaatcagttactgtggaataga

SEQ ID NO: 246244 - DNA, 269 bp, Unknown
  Bacterial polypeptide expressing nucleotide sequence isolated from the Sargasso Sea
tatgtgcggaatagttggttacttagggaaaaaagattcagtacctataatattagatggtttacataggcttgaatatagaggctatgattctgctggtattgctgtaatggaagaaggggagattcaattcattaaaaatgcaggaaaagtatcagatctgtccagattgattgatgattctgttttaaagggatccataggtattggacatacaagatgggcgactcatggtgaacctaatactgttaactctcatcctcattttg

SEQ ID NO: 246245 - DNA, 256 bp, Unknown
  Bacterial polypeptide expressing nucleotide sequence isolated from the Sargasso Sea
gaacttgtggaaaaacttttatctaacctcgaagaagttaagtcaagaggggggaccctttatgtctttggaaatgcaacctccaagataaaaattgaaaaaggaaagttcatgaatatgccgaagtgtggttattacaatgcacccatcgtttatacaatacccctgcaaattttggcatatgaagttgcatgctcaataggaacagatctagatcaacctagaaatctcgcgaaatcagtgacggttgagtaga

SEQ ID NO: 246246 - DNA, 89 bp, Unknown
  Bacterial polypeptide expressing nucleotide sequence isolated from the Sargasso Sea
gcaaatgttggcttatcatgttgctttacttaagaattgtgatatcgacaaacctagaaatttagcaaaatcagttacagttgagtaag

SEQ ID NO: 246247 - DNA, 283 bp, Unknown
  Bacterial polypeptide expressing nucleotide sequence isolated from the Sargasso Sea
tatgtgtggaattattggcatcaatagcaataaatcggtttctgcctcaattattaattctcttaaaaagttggaatataggggctatgactcagcaggtatcgcaactcttcatgctggatctattaatgaggtaaaatcagaaggcagagttgacaatcttgaaaaaaattcagtggttcaaaatatggtaggtacgatcgggatcggtcacgtaagatgggcaacacatggtctacctaatagtataaatgctcatcctcactcttctcaaaacgtttca

SEQ ID NO: 246248 - DNA, 143 bp, Unknown
  Bacterial polypeptide expressing nucleotide sequence isolated from the Sargasso Sea
tatgtgtggaatagttggaatagtaagcaataaatcagtatcagcaagcataattggtgcgttaaagaaattagaatatcgcggctatgactcagctgggatttcaacattaagcaataatcaaattaatgaacaaaaatgtt

SEQ ID NO: 246249 - DNA, 111 bp, Unknown
  Bacterial polypeptide expressing nucleotide sequence isolated from the Sargasso Sea
cttttttgaccactatacctttacaaaagttagcttattactctgcactagataaaggatacgatatcgataaaccaagaaacttagctaaatctgtcactgttgaataaa

SEQ ID NO: 246250 - DNA, 211 bp, Unknown
  Bacterial polypeptide expressing nucleotide sequence isolated from the Sargasso Sea
atgtgtggaataattggtatagctagcaacaaacctgtttcgattaatattataaattctttaaagaaactggagtacagaggttacgactcagctggtattgctacattagataaaaacagaataagtgaaaaaaaatgttctggtagagtagaggagctagaaaagattttatttaagacaccatcagacggtaacttaggtatcggac

SEQ ID NO: 246251 - DNA, 337 bp, Unknown
  Bacterial polypeptide expressing nucleotide sequence isolated from the Sargasso Sea
tgcagcagaaatgaagcatgggcctattgcattgatagatgaaaaaatgcctgtagtttttattgcatctaatgatgaaacttatgcgaaggttttatcaaatattcaagaagttaaagcaaggaatggtattgttattactttaacagatcacgtttctaatgaaattaaaaaaatatctgattttataattgaggttcctaaatctagacacccaagaatttttcctattttggcttctatatctttacaattattagcatatgaattagctgttttaagggaatgtaatatagatcgtccaagaaatttagctaagagtgttacggtcgaatag

SEQ ID NO: 246252 - DNA, 228 bp, Unknown
  Bacterial polypeptide expressing nucleotide sequence isolated from the Sargasso Sea
ttgaagaagtaaaagctagaggcgggactctatatgtgttttctgatccctcaatctcaatggatttaaaatctggcagattaataaatatgcctaaatgtgattttctcttaactcctattatttacacaattcctcttcaaatactttcttatgaagttgcattacttagaggaacagacattgatcaacctagaaacttagcaaagtcggtcaccgtagaatgag

SEQ ID NO: 246253 - DNA, 600 bp, Unknown
  Bacterial polypeptide expressing nucleotide sequence isolated from the Sargasso Sea
agggtatgactcagcaggaatggtaacagtcaaatcaaataaccttaagcttataaaaaaagaagggaagctaaagtctttagccccagagctgggggaacttccaaaagagacttcttgtggaatgggacacacgcgttgggcaacccatggggaggctacctcctataatgcccatccacactcttataaagggctcagtcttgttcataacggaattattgaaaactacttggacttaaaaaatgaactcccccacatgggagaagaactcctttcagaaacagatagtgaagttttactccatcttatctcttcctcttatgaaaaaacaaaagatatttttataagtctgcaagaagtacaaaagaaaataaaaggctcttatgctttctgtcttcttgtttcaagtgaagatgaaacactttatctttgtaaaaaaagctcccctcttgttctagcttgtggaaagaagaatacttttttttcaagcgatccaattgctttacttcatcacagcaagcagtttatttatcttgaagataatgatattgcaaaattaactaagacttcatttgagatttataaccaaagtggtat

SEQ ID NO: 246254 - DNA, 766 bp, Unknown
  Bacterial polypeptide expressing nucleotide sequence isolated from the Sargasso Sea
ttggtatacgccaaagaaagtggtgcaaaaaccgcagccatagttaacgtgatgggttcagcgattagtatgatggcagatcaggtaataatgcaggggtcagggcctgaaatatgtgttgtttccacaaaggcggcattggcacaaactttcataatggtacgtgtagctttagagttgggacttattaggaaaaaaattaaacaaaaagattacaaaaaatttcagatggagatgcaggaattttctgaaattatagaaatagtacttaatgaacagtctggatttgttcgcaatattgcccgagatacaagtcacgttaaacattggttgtttctgggatgcggggtctattatccggtggccatggagtctgccttaaaaatgaaggaggttacttatcagcatgctgaaggtatgcccgcaggttttcttaaacatggaactttatcaatggtagaaccctccttacatacattattttttgtacccccccctgaacaaaaagaacttcataagcgtacacttattgccatggaacaggttaaatcgcgcggaggtactgtgattgcgattgtctttcagggagatgaactcgctcaaaaacttgcttcccaatctataaaacttcctattgtaagttctttatttgctccttttttgcagatgattattgcacaaatgtttgcttattatgccgccttagaccttggtcggaatatagataagcctaggaatttagcaaaatcagtaactgtcggctgat

SEQ ID NO: 246255 - DNA, 293 bp, Unknown
  Bacterial polypeptide expressing nucleotide sequence isolated from the Sargasso Sea
aatgtgtggaataattggaattactagtacaaaacaagtttcttcagcaataattaattctttaaaaaaattagaatatcgtggatatgactcagcaggcatagcaacattaaatgatggatttattaatgagattaaatgcgagggaagagtagatggtttagaaaaaaatgtaacgaaaattaatttgcttggcaatgttggaataggacatgtaagatgggcaactcatggtatcccaagtactataaatgcacatccacattcatccgaaacagtttcagttgttcata

SEQ ID NO: 246256 - DNA, 322 bp, Unknown
  Bacterial polypeptide expressing nucleotide sequence isolated from the Sargasso Sea
aatgtgcggtgttgttgcagtaattggaaaacaaaatgcaagcgaactcgttattgaaggcttgaaaaaacttgaatatagaggatatgactctgcaggtattgcttcagtatctaatgggactctacatactattaaatcagagggtaaactagtaaatttaattgataagttaactgatgcatctcattctaatttacaatctattactgcattagctatgggtcatacaaggtgggctacacatggtaatgttagtgttgaaaatgctcatccattaacaagtcaaaataaaatagccgttgtccataaggaattatcg

SEQ ID NO: 246257 - DNA, 212 bp, Unknown
  Bacterial polypeptide expressing nucleotide sequence isolated from the Sargasso Sea
tagaggcgggactctatatgtgttttctgatccctcaatctcaatggatttaaaatctggcagattaataaatatgcctaaatgtgattttctattaactcctattatttacacaattcctcttcaaatactttcttatgaagttgcattacttagaggaactgatattgatcaacctagaaacttagcgaagtcagtcacggttgaataat

SEQ ID NO: 246258 - DNA, 235 bp, Unknown
  Bacterial polypeptide expressing nucleotide sequence isolated from the Sargasso Sea
atgtgtggaattataggaataataagttcaaaagaagttcctagtagaattgtgaactcattaaagaaacttgaatatagaggatacgattctgcagggatagccacacttgtaaatggaaatataaatgaagttaaatgtgagggtagagttgatgtgttagaaaaagacatatctaaattgaatcttaaaggagatatcggtattggtcatgttagatgggcaactcatggta

SEQ ID NO: 246259 - DNA, 118 bp, Unknown
  Bacterial polypeptide expressing nucleotide sequence isolated from the Sargasso Sea
tatgtgtggcatcattggaatttcaagtaacaagcctgtatctgcaaatatcattagttcacttaaaaaacttgaatacagaggttatgactctgctgggatagcaactcttttttga

SEQ ID NO: 246260 - DNA, 192 bp, Unknown
  Bacterial polypeptide expressing nucleotide sequence isolated from the Sargasso Sea
aatgtgcggaataattggtattgcgagcaataagtctgttacctcaaatattatcaattctttaaaaagattggaatatagaggatatgactccgctggtattgcgacaatctctaaaaaaaatcttaatgaaaaaaaatgctctggaagagttgaagagcttgaaaaaatattatttaattctccagctca

SEQ ID NO: 246261 - DNA, 103 bp, Unknown
  Bacterial polypeptide expressing nucleotide sequence isolated from the Sargasso Sea
aatgtgtggaataatcggaataacaagtaataaaccagtttcagtgtctattattaattctttaagaaaattagaatacagaggctatgattcagcgggtata

SEQ ID NO: 246262 - DNA, 151 bp, Unknown
  Bacterial polypeptide expressing nucleotide sequence isolated from the Sargasso Sea
aatgtgtggaatagttggaattacaagctccaaagaggttactccaagaattataagttcgttaaaaaaacttgagtatagaggctacgactccgcaggtttagcaactctttcaaatggaaatataaatgaggtcaaatgtgagggtaga

SEQ ID NO: 246263 - DNA, 481 bp, Unknown
  Bacterial polypeptide expressing nucleotide sequence isolated from the Sargasso Sea
tatgtgcggaatagttggatatataggaaaagaaaatgcttcaaaaatattaattgatctaacaagatctctggaatatagaggatatgatagtgcgggcatagctatatacgacagtaaagaaaacaaattcttaattaagaaaactacaggtacgatagataggataaagcaagaaattcttaacgagatagatggtactactggcatctctcatactaggtgggctacgcatgggaagattaatgaaaaaaatgcacaccctcaaataagttcaaacagcaagattttaattgttcataatggaatagttgagaactatcaagaaattaaaaataacttaataaaaagtggttacaattttacttctgaaacggattctgaaattatagccaatttaatagaattcaacctagcagaatcagaaataaaaaatgcattagagaagaccatggattctataacaggatcatcttcaatt

SEQ ID NO: 246264 - DNA, 94 bp, Unknown
  Bacterial polypeptide expressing nucleotide sequence isolated from the Sargasso Sea
ttcctctccacttttagcttatcactgcgctgtgctaaggggatgtgatgtagacaagccaagaaacctggcaaaatctgtcactgtggagtaa

SEQ ID NO: 246265 - DNA, 211 bp, Unknown
  Bacterial polypeptide expressing nucleotide sequence isolated from the Sargasso Sea
ggtaaaatattaatgataacagacgatgaaacactggagtcaaattctgaaaatatttgggaagtttttcgtttaccaaaatgccctaaatcaattgaagcaatcgtttattcagttcccattcatatgcttgcctattatacggcagttgagcttggcaatgatgtcgatcagccaagaaatcttgctaagtctgttaccgtagaataat

SEQ ID NO: 246266 - DNA, 145 bp, Unknown
  Bacterial polypeptide expressing nucleotide sequence isolated from the Sargasso Sea
tatgtgtggaattgtaggcgcagtcgctaaaaaagatatttgtcctgtattgcttgaaggtttacaaaggcttgagtatcgaggttatgattctgcaggatttgcggtgattgatagcgacaaaaaacttcaaagaattcgcatt

SEQ ID NO: 246267 - DNA, 175 bp, Unknown
  Bacterial polypeptide expressing nucleotide sequence isolated from the Sargasso Sea
aagaaattaaaagacatatcaaataattacattgcacttcctgaaacaagtgaaatgctgtcgactattatatcgattatccctctacagttcattgcttatcatgtagctaatttaaatggcgagtcaattgaccagccaagaaatttagctaaatctgtaactgttgaataaa

SEQ ID NO: 246268 - DNA, 103 bp, Unknown
  Bacterial polypeptide expressing nucleotide sequence isolated from the Sargasso Sea
tatgtgtggaatagttgctgtaactggttataaaaaagctttaccattattaatgaatggtttagaaaaattagaatatagaggatacgattccgcaggcatt

SEQ ID NO: 246269 - DNA, 217 bp, Unknown
  Bacterial polypeptide expressing nucleotide sequence isolated from the Sargasso Sea
atgtgcggcataattggaatagcaagcaacaaatctgtaagttctaatattattcaatccttaaaaaaattggaatacagaggttatgattctgctggaattgcaacaatagttgatggaagtatagatgaaaaaaaatgcgccggaagagtcgatagtctagagaaaattttatttaaaaatccatcaaaaggcattttaggtattggacatgtta

SEQ ID NO: 246270 - DNA, 139 bp, Unknown
  Bacterial polypeptide expressing nucleotide sequence isolated from the Sargasso Sea
tatgccaaagtgcgacttccttttgacgccgatcatatatacgatacctcttcaaatactttcttatgaagtagctttgttaagaggaaccgatattgatcaaccaagaaatttagcaaagtcagtcactgttgagtag

SEQ ID NO: 246271 - DNA, 286 bp, Unknown
  Bacterial polypeptide expressing nucleotide sequence isolated from the Sargasso Sea
tatgccagttattgctttagctccagagagtgaaattgcagaaaaattaatctctaatcttgaagaggttaaagctagaggcggaaccctttatgtttgtgctgacccatcagttaatatggatgttaagtctggaaaactaatacatatgcctgaatgtgactttttcatgtcacctattgtatataacatcccattacaaattctttcgtatgaagttgctctcctgagaggaacagacattgaccagccgagaaatctagcaaaatcagtcacggtggaataa

SEQ ID NO: 246272 - DNA, 316 bp, Unknown
  Bacterial polypeptide expressing nucleotide sequence isolated from the Sargasso Sea
tcctttagccttaattgaaaataatatacccgttattcttttagctccttttgatgaaaattattctaaattactctcaaatatacaagaggttaaagctagaggtggaagaattattatgattacagatagggatggtgcaaaaaaagtaaaaaaatattgtgatcaaattgtaataataccaaaaacaaattttttaacatccccaatattatattcgataccagtccagttaattgcttattatttagcagtttttcttggaacagatgtcgaccaaccaagaaatttagcgaaatctgttacagtggagtag

SEQ ID NO: 246273 - DNA, 171 bp, Unknown
  Bacterial polypeptide expressing nucleotide sequence isolated from the Sargasso Sea
tatgtgtggaattataggggtagcatcaaaccagccatcagttgataagcttgtaataggcttgttgcgccaagaatacaggggttatgattccgcaggtctggccatctttgacgaatctgaagaaataaaagtttataaaagcaccggcaaggtttctgagctccaaag

SEQ ID NO: 246274 - DNA, 138 bp, Unknown
  Bacterial polypeptide expressing nucleotide sequence isolated from the Sargasso Sea
tatgtgtggaattattggaatatcaagtaataaacccgtttcagcaaatataattaattctttaaaaaaattagaatatagaggatatgactctgctggcatagccacactttcagatggtgaaattaatgaagtaaa

SEQ ID NO: 246275 - DNA, 452 bp, Unknown
  Bacterial polypeptide expressing nucleotide sequence isolated from the Sargasso Sea
tataggagttgcgtcaaccaaagcatttataggtcaaatgctagtactttatttattatgtttaaaattagccaaggataaagaagatattaaaaaagatatttttcttaaaaaaattaaatcattaaatacactttcagaattaattaagaaaactttatcaactgaaaatgatattcaattagtttgcaattcatttgttgaagcaaaaggatcaatgttcttaggaagaggttattcatttcctattgctttagaaggtgcgttaaaattaaaagagttagcttatgttcatgcggaaggttatccagcaggagaaatgaaacatgggccgctagctttaatagaagagggcatgccagttgttgttttagccccaagagataattattataaaaaaactatttcaaatatgcaggaagtgattgcgagaggggctaaagttctcctaa

SEQ ID NO: 246276 - DNA, 170 bp, Unknown
  Bacterial polypeptide expressing nucleotide sequence isolated from the Sargasso Sea
gatgtgtggtataataggtataaacagcaataaaccagtttcaggaacaatcataaattctctgaagaaattagaatataggggttatgactctgcaggtattgcaactctttcaagtggccaaattaatgaagttaagtctgaaggtagagtagataatcttgaaaaga

SEQ ID NO: 246277 - DNA, 936 bp, Unknown
  Bacterial polypeptide expressing nucleotide sequence isolated from the Sargasso Sea
gtgattgcggatttagagggatcttatgctttggcggttttatggtctggagctcctacttctttagtagtcgcaagaaaacaagcacctttgattgtaggtttgggagaaggagaatttatatgtgcaagtgataccccagctatcgcaaacttcactaataccgttttgcctttggaggatgaagatattgcgttattaacccctctaggaatcgaaatatatgactcaaataatgagaaacaatatcgaaatccaatttctttaaaagtttcagagcaaattatagataagatgcatttcaaacatttcatgctaaaagaaatatatgatcagcctgagactacaaaaaattggttggaaaattatttaattaagaacacagaaaatggccaatttcatattaactatccctttgatacaaagttttttgaatcaattgagagaattgaaattattgcttgtggtaccagtaaacatgctgcaatggtaggcagcttcttattagaacaattttctgatattcctacaagtgtttattatgcaagcgaatttcgatattcaccacctccactgctgccaaatacattaactataggagttactcaatctggagaaactgctgatactatcgcagctattgatatggaaattaagagacgttctataattgaagataaaaagtttcaacctaatttaatagcaataacaaatagaaaagagagctcgataggaaggcaggtttcaaatataattgatatctgcgctggaatcgaagtaggagttgcagcaacaaaaactttttttgcacaattactttctttttatggattagctataaaatttgctcaagttagaggtagtcaagatcaacaggaaataaataaattaatcacagaacttacaaagctgccttcattactggaagatctttta

SEQ ID NO: 246278 - DNA, 92 bp, Unknown
  Bacterial polypeptide expressing nucleotide sequence isolated from the Sargasso Sea
acttcaaaaattggcttattattctgccttacaaaagggttacgacatagataagcctagaaatttagctaaatcagtcactgttgaataaa

SEQ ID NO: 246279 - DNA, 877 bp, Unknown
  Bacterial polypeptide expressing nucleotide sequence isolated from the Sargasso Sea
ttatgggctggtgcaccaacctctttggtagttgctagaagacaagcacctttgataattggtttaggtgaaggagaatttatttgcgcaagtgatactccagctattgcaaacttcacaaacattattttgccgatggaggatgaggaaatagctttattaactcctcttggcatagaaatctatgactcaagcaacgagagacaatttcgtaatccaatttctttaaaagtctcagagcaaataatagataagatgaatttcaagcactttatgttaaaggagatatatgatcagccaggtactgcaaaaaactggttggataattatttaattaaaaacttagaaaatggtcaatatcaaatcaactatccctttgatacaaggttttttgaatcaattgaaagaattgaaattatcgcttgtggtacaagtaaacatgctgcaatggtgggtagctttttattagagcaattttcaggtatccctacaaatgtcttttatgcaagtgaatttagatattcaccacctccacttttgccaaatacattaactattggagtcactcaatctggagaaactgctgacaccattgcagctattgatatggaaattaaaaggcggtcgttaattgaagataaaaagtttaaacccaatcttattgcaataacaaataggaaagagagctcgataggaagacaggtttcaaatataattgatatctgtgcaggtatagaagtgggagttgcggcaacaaaaactttttttgcacaattactttctttttatggattagctataaaatttgcccaaattaaaggcagccaatgtccagaagaaataggtaaattaataacagaacttataaaactgcccc

SEQ ID NO: 246280 - DNA, 807 bp, Unknown
  Bacterial polypeptide expressing nucleotide sequence isolated from the Sargasso Sea
tttaaacaatgaaagcgaagctatccaactaaaaacacttggcaaagttgccaatctagaagatctaatgatcgaaaaaaaacccagagcccaatcaggcatagctcacacaaggtgggctacacacggagagccatctcaaaaaaatgctcatccacacacatcaaacggaaccatttatattgttcacaacgggataattgaaaaccatgatgagcttagagaaagactatcaaataatggctataagattgaatcagaaacggattcagagcttattgcacacttggttcattccaacaaggaaaacggtaaaagcacactagaagctttaattgagacaacaaaagaacttgacggagcatactcaatcgccgtggttgacacagaacaaaaagggaaaatattcgcagccaaacaaaaaagcccccttttggttgggaggggtatagaagaaaatttcgtagcctcagacccactagcaatagcagggcttactgaatcattctaccttttagaggatggggactttgcagtaattactcaagatgaaatcaaaattgttggctctgacaatgagccggtcttaagagaagaaaccattatagacacaagcgctaaagaggcatccaaagacggttacaaacacttcatggaaaaagaaatatacgaacaaccaaaagccatagcaaatgccattgagggaagaactacagacggggatgttctagacaatatatttggcttaggatcatctaaatcattcaagggcgtaaaaaggattcagtttgttgcctgtgggacacg

SEQ ID NO: 246281 - DNA, 304 bp, Unknown
  Bacterial polypeptide expressing nucleotide sequence isolated from the Sargasso Sea
ttgaaaaaggacttccctgttgtttgcatagttccatcaggaccgttatttcataaaacaatttcaaatatccaagaagtaattgcaagaggtggtaaaatcttgatgattacagacgatagttcattgcagtcagagtcagaaaatatctggaaaatatttcgtttaccagacgtagatccaattttagaaactttaatttataccattccaatccaaatgctcgcatattacacagctgttgagcttggtaatgatgttgatcagcctcgtaatcttgcaaaatcggtcaccgtagaataaa

SEQ ID NO: 246282 - DNA, 945 bp, Unknown
  Bacterial polypeptide expressing nucleotide sequence isolated from the Sargasso Sea
aagaaaatatcggatttacagataaaagttccaaaaactgaaaaatctaaaataataataggccacactagatggcaaacacacggcaagccatcaattaaaaattcccaccctcatattatgaaagatttagcaatagttcataacggtgttattgaaaattttgatgacttaaaaaaagataaacatttgtcttcttatgaattcaaaaccgaaactgatacagaattaattttattgttaatccaccatttttgtaaaaaattatctttaaaagactcagtgttaaaaacatcaaaactcataaaaggttctaatgcttttatttgctctaaagtaaattctgataaaaaagaaatgattgcttataaaaataacactccactttatttcggaatcaaattaaatggagagagagttttttcatctgatttaaatagtatcaagaagaatttaaagggatattattatttagaaaataatgaaattttccatttagaggagaatagggagtctttgttcacaaaagattcaaaaaagaagaagattcatttaaataatgttgaggtcaaaaaaagaacaagcaagaaaaaaattaaagactctattacttactccgaaataaaagagcaaaagtcttacattcttggatttgaaaaaataatattaaaaattcaaaaaaaaattaatgcaatcacaaaaccttctgaaatagtgatcataggatgtggatcatcatataatgttggtaatcttggtaagatttttattgaaaaaaactcaaagattccagtatctgttttcagaccatctgaatattttccggttagcgataataaaaatagattattcatttttatttctcaaagtggtgaaactgctgatgtatgttcactcttagagtcagaccaattacattttaaaaactcattatcaatagttaat

SEQ ID NO: 246283 - DNA, 772 bp, Unknown
  Bacterial polypeptide expressing nucleotide sequence isolated from the Sargasso Sea
aaagaaaaaggcaaaagcacactagaggccctaattgattcaacaaaagaactcaatggagcatattcaatcgcagtcattgacatagatcaaaaaggaaaaatatttgcagccaaacaaaaaagccctcttttagtaggaaaaggcatagaagaaaattttgtagcttcagatccactagcaattgccgggcttgccgaatcattctacctgctcgaagacggcgattttgcagagatcacacaagatgaaatcaaaattgttggcattgataatgagcctgtagtaagagaggagaccttaattgacacaacagttaaagaggcatccaaagagggctataaacacttcatggaaaaagagatctatgagcaaccaaaggccatagcaaatgccattgagggaagaacaacagatggcgatgttctagacaatatatttggcctgggttcatctgagtcattcaaaggggtaaaacgaatacagtttgtggcatgcggtaccagcctccatgcagcgaagactgcaagaaagtggtttgaagagctctctgaaacgccatgctacatagattttgcgagcgaatacagataccgaaaccctttggttgaggacgatactttattcgtctgcatttcgcagtcgggagaaacagcggacaccatggcggcattgaattatgcgaaagaagaaaaatatttaggcattgtaacgatttgcaatgttcccacaagcaccatggcaagagagtccgattggaaaatatttacaa

SEQ ID NO: 246284 - DNA, 442 bp, Unknown
  Bacterial polypeptide expressing nucleotide sequence isolated from the Sargasso Sea
tatgtgtggaatttttggttgcgttggagaaagtgacgttacaaattttttaatagacggattaaaaagattagagtatagaggttatgattcagcaggactttgtattcaaactgaagatagaaatatagaagtaataaagtcttctgattcaacttatccagtggacgtacttagaaaatctttagaaaaatcaaaaataaaatcaaatgttggaattggacacacaaggtgggctactcatggaccgataaataatattaatgctcatccccatttttcttacagcaataatatttctatagtacacaatggaatagtggaaaattatgactttcttaagaaatttttgataagaaaaggtgtaattattaatagtcaaacagattctgaattaatagctcatatgattgattttatgttgtgtagtatgggtaattta

SEQ ID NO: 246285 - DNA, 859 bp, Unknown
  Bacterial polypeptide expressing nucleotide sequence isolated from the Sargasso Sea
ggaaattaaaaaacaacttttaaaagaaaatagatcgttcctatcatccactgatagtgaagtaattgcccatttatttgataaagagttaaaaaatacttctgacctcaaaatagctatacttaatgtacttaagaaacttgaaggagcttttgcattcgtagttcttttgcttgattttcctgatactctagtagcagcaagacaagcttcacctttggctgtgggtaaagggaataatgtctgtgctgtagggtctgacgctatcgctttggcaggagttacaaatgaactaatgtttttggaggatggtgattttgcaattatcaatagaaaagatttaacaatttataataatcttggattagaaattaatcgaaaaattatacctaatattattgaagcttcatcaattggtaaaggtaactaccgccatttcatgcaaaaagaaatttttgaacagcctgaaacaattgcacattcaatttcaggtatgtattcatcaagtggaaagttatcaaaagagctcatagaacttgtttcgacacctcctaaatctataactatattagcagctggaacatcacattatgctggattggttggaaaatattggatagagtcattagctaatatacctgtaaatgttgaaactgctgctgaatatagatacaggtcaccctaccaagatccaaatagcctagctcttgtaataagtcaatcaggagaaagcttagatactctgatggctatgcgacatgctgcagaagcaggtatgaaaacagtttctatagtgaataatataggaagtacaatagatagagaatcaaagtattctttatatactagacgctggtgc

SEQ ID NO: 246286 - DNA, 195 bp, Unknown
  Bacterial polypeptide expressing nucleotide sequence isolated from the Sargasso Sea
tatgtgtggtattttcggatgcatttccgaagaagcagcaaccatgactctagagggactaaaaaagctggaatacaggggctatgactctgcagggctagcagcaatttttcccggtcacagcggtccaatagagaccgagagaaccgctggattcgtttctgatttagttactaaggcaaatgaaaggttcga

SEQ ID NO: 246287 - DNA, 151 bp, Unknown
  Bacterial polypeptide expressing nucleotide sequence isolated from the Sargasso Sea
atcaatgaaatttcatcagtaattttaattggatgtggaacagcatatcactcttgtattgttgcaaagtattggtttgagcaaaatacaagtttagatgtgagtgttgatatagcttctgaatttagatatcgaaattcagaagctatat

SEQ ID NO: 246288 - DNA, 241 bp, Unknown
  Bacterial polypeptide expressing nucleotide sequence isolated from the Sargasso Sea
aatgtgcggaataatcggaatagctagcaacaagtcagtttctatgaatatcattaattcattaaagaaattggagtatagggggtatgactcagccggaatagccactcttaccaataacacaataaatgaaaaaaaatgttccgggagagtagaggagcttgaaaaaattttattcaaaaaccaatcagaaggtaacgttggcataggacatgtacgatgggcaacaccatggaatacc

SEQ ID NO: 246289 - DNA, 791 bp, Unknown
  Bacterial polypeptide expressing nucleotide sequence isolated from the Sargasso Sea
ttagagctgcacttcaaagagtagatggagcttatggaattgttgtattaaataggaaagaaccagatatgatgattgctgctagaaaaggaagtccgctagttttaggaatcaaagataatgaattttttgtaggtagtgatatttctccaattattaaacatactcagcaaattatatatcttgaagattcccagatggcaattattaaagataatgaatataaaataacttcaattgataaagatgtcagccttccaaaaaaagttgaaaaaatagatatcaaaattgatgattatgataaagggaagtttaaatactttatgcataaagaaatccacgaacaaattgatacaatcagaaatactattacaggaagagcaaaaaaagatagagtctatctaaatggattacttgattattgggctcaaatcaaagaagcagataaaatatttattactgcttgtggtacctcttggcatgctggactcataggtaaaaatttaattgaaagatttgcaaagatacctgttcacgttgaatatgcttctgagtttagatataataaaactttagttgataataatagtgttgtaattgctatttcacaatctggtgaaacagctgatactctcgctgcaataaaaaaagctaatgagaatggagcaattacagtcggtatttgtaatgttcctggtagttcagtgtctagagaaacaaattgtggagtttttacaagatgtggccatgaagtgggagttgcatcaactaaagcattactgcacaaataa

SEQ ID NO: 246290 - DNA, 184 bp, Unknown
  Bacterial polypeptide expressing nucleotide sequence isolated from the Sargasso Sea
aacaaagatgaaataacctcagaaaatatctgggaaaaaatcgaagtagacaaacttgaagaagaattaattccttttttaatgacaatacctttgcaaaaactagctttttactcagctttggaaaaaggttatgatatagataagcctcgaaacttagcaaaatcagtaaccgtcgagtaac

SEQ ID NO: 246291 - DNA, 137 bp, Unknown
  Bacterial polypeptide expressing nucleotide sequence isolated from the Sargasso Sea
aatgtgtggaataattggaataatcagtaatcaagaagtttctagtagaatattaaattcattaaaaaaattagaatatagaggatatgactcagcaggaattgcaactctagttgatggaaatataaatgaggtaa

SEQ ID NO: 246292 - DNA, 784 bp, Unknown
  Bacterial polypeptide expressing nucleotide sequence isolated from the Sargasso Sea
agttcatctcatgaaggctataattgtttcatggaaaaagaaataatgcagcagcctaaaagcataaggggtgctatgctaggaagaataaacgaagagttatcgtctatacgttttggcggcataaatttagagcgagatttattaaaggacgttaagagaatccttttccttggctgtggaaccgcttatcatgctgggttagttggtaaatacatgattgaaaacatagcaaatattccagcttcagcagagttagcatccgaatacaaatataaaaataaccccaccgaagatggaacgctagtcatagctataacacaatctggagaaacaatagatacattggcggctctcaaagaggctcagaataaagggctagattgtattggaattactaatgtggtttctagcagtatagccagacaagccggaaagggaatatatcaacacgcaggaacagaagtctctgttgcgtctacaaaagcttttacttctcaagtgactatacttttaatgctcgctgtacttttaggaagaaggaaaggtttaagcgtgctggacgctaaaaaacatatcgagcaacttaaaaatttaccgtcccttgcggaagaatgtttaagtgtcccttatttgcgccagtttgagttagctgcggccaaatatagggataaaaagaagtttatttttctaggcagacaaaccatgtatcctattgctcttgaggcggcgttaaagcttaaagaaatatcttatttagatgccccaaggttatgctgctggc

SEQ ID NO: 246293 - DNA, 121 bp, Unknown
  Bacterial polypeptide expressing nucleotide sequence isolated from the Sargasso Sea
tttaatgctccaattgtttacaccataccccttcagatattggcttatgaggtagcttgcctaaggggaacagacttagaccaaccaagaaatctagccaaatcagttacggtggaataag

SEQ ID NO: 246294 - DNA, 259 bp, Unknown
  Bacterial polypeptide expressing nucleotide sequence isolated from the Sargasso Sea
tatgtgtggaattattgggatatctagcaacaaacctgtttctgcaaatattattaattcattaaaaaaattagaatacagaggatatgactctgctggaatagctacactttcagatggtgaaattaatgaagtaaaatcagaaggtagagtagataatttagaaaataattttgatttaaaaaatttaagaggcaatataggcataggacatgtaagatgggcaacacatggcattcccaatagtataaatgctcat

SEQ ID NO: 246295 - DNA, 132 bp, Unknown
  Bacterial polypeptide expressing nucleotide sequence isolated from the Sargasso Sea
atacagaaaacgatctttttccttttttaataactataccacttcaaaaattagcttattattctgctctaaaaaaaggctatgacatagataagccaagaaatttagctaaatctgtcactgttgaataat

SEQ ID NO: 246296 - DNA, 843 bp, Unknown
  Bacterial polypeptide expressing nucleotide sequence isolated from the Sargasso Sea
attttgaaagcaaatttaaagaattaattttaaataaaaaagtaatttttgtcgggtgtggcactgcatatcatgcctgtttagttggagagtattatttcaataaatatactaatttagacacttcatcagaattagcctctgaacttcgctataaaaaaattaatcaagatgaaaaaatattatttatctttatttcacaatctggcgaaacaatggataccttgatggctttaaaatacattagagaaaataaacattcctctattgtgataactaattctttacaaagtagtatggtaagagaggctgatgtaactataccaacatatgccttaaaagaagtcggggtagcctcaactaaagcattttcatgccaaatattgagcttagctaacctctctattgaaataggaaaaatgacaaattcaatatcaaaaaaggattacaataaaaatttaaaaattttaaaattacttccgatcaaaataaaaaaattaatcaaaaattttacaccagaggcaaaaaagattgcaaaaaaattaagccaatctgatacatgttatttcataggtagaaatattgtctatccaatagcattagagggatctttgaaattaaaagagatatcttacatgcacagcgaaggatttcccgggggggagatgaaacacgggccaattgcattaattgataaaaaatcattaacaatatgtttgtcccctaataataaactgtatgaaaaatctatttctaatgctgaggaaattgcagcaagaaacggcaaggttataattttatcaagtgctaaaatccacagaaaatcaccaaaatatatttaat

SEQ ID NO: 246297 - DNA, 427 bp, Unknown
  Bacterial polypeptide expressing nucleotide sequence isolated from the Sargasso Sea
atgtgcggcattgtaggttatataggcaataaagatcctgtccctattctagtgaaagggttgaaacgattagaatatagagggtatgattcttctggaatcgctcttcttgaggaagacaatctaaaccatatcaaaaaagcaggaaaagtttcagatttgcaacagttagttgatgattcttctataaaaggaaattgtggtattgcgcatacacgatgggcgacgcatggagctccaaacgatattaacgcacacccccatttggatcatactgggagcattgctctagtacataatggaatatttgaaaactatgaagcgatcaaacaacttcttataaataggaatatccaatttactagtgatacagatactgaggttattgttcaattaatttctgaattatactataataataatgaaa

SEQ ID NO: 246298 - DNA, 157 bp, Unknown
  Bacterial polypeptide expressing nucleotide sequence isolated from the Sargasso Sea
atgtgtggaataattggaataaatagtaataaatctgtctcatcatcaatcataaattctttaaaaaagttagaatacagaggatacgactctgctggtatagcaaccctttccgatggtcttataaatgaagtgaaatctgagggtagggttgata

SEQ ID NO: 246299 - DNA, 158 bp, Unknown
  Bacterial polypeptide expressing nucleotide sequence isolated from the Sargasso Sea
aatgtgtggaattgtaggaattaccagcaataaagaagttactaatagaatagttaattctttaaaaaaattagaatatagaggatatgattcagcaggtattgcgaccctgaaagacggattaataaatgaagttaaaagcgaaggaagagtagaaa

SEQ ID NO: 246300 - DNA, 545 bp, Unknown
  Bacterial polypeptide expressing nucleotide sequence isolated from the Sargasso Sea
aatgtgttcaattatcggctattccggaaatgaaattgcagccccaattatcgtaaagggattaaaaagaatggagtatagagggtatgacagtgttggagttgcaacagaatcacaaaaccaaattgaattaaaaaaaggaacaggaaaagttactgaggtaaattctaaatttcaactagatactttaccaggcaaaataggcataggtcataccagatgggctactcatgggaaagttacagatctcaatgcacacccacatccaagtaattcgggaaaaattgcaatagtgcataatgggataatagaaaattttgaagaactaaaaaagcaactaaaggatgacgggtatagtttcaagagtgaaacagatagtgagataattgcaaatttactccaaaaaaattacgaatctacaaagaatgttagagatacaatcatgaaaacagtttctgagataaaaggtcattatgcatttgtagcaatgtttgaaaatggtcaacttgctgcagcaagatttcatgaaccattgataattggtg

SEQ ID NO: 246301 - DNA, 183 bp, Unknown
  Bacterial polypeptide expressing nucleotide sequence isolated from the Sargasso Sea
tatgtgtgggatttttagtatttactcaaatgagattatcaaaccctcctattttgttaattctttaaaagaacttgagtatagaggttacgattctgctggcgtagctttttttcagaagggcaaccttaatattcttaaaacgacttcaaagataaaagatttggaattaaaattgaaaaa

SEQ ID NO: 246302 - DNA, 101 bp, Unknown
  Bacterial polypeptide expressing nucleotide sequence isolated from the Sargasso Sea
aacaattcctttacaaaaattagcttattattcagcattaaaaaaaggtttggacatagataagccaagaaatttggctaaatctgttaccgttgaataaa

SEQ ID NO: 246303 - DNA, 566 bp, Unknown
  Bacterial polypeptide expressing nucleotide sequence isolated from the Sargasso Sea
tctaaaggacacaaatttaaatctcaaactgacacggaggtgatagttcatttaattacagagttattaaaagataatgatttaaaaaattcaattttaaaaatgttaaaacagttaagtggtagtttcgctctagcaataatttttaaagatcaacctgatttaattgtaggcgctagaagagggtcacctttagcagtaggctatggacctaatgaaaattatttaggctctgactcttacgcattaaagtctatgacaaataaaatatcatatttaaatgatggagaattttgtattgtcaaaaagaatcaagttgaattttttgatgagagtggaattaagcttaataaaaaaattctaaaactatcttcaaatgaagaaaattacgacaaaggtgattacaaatattttatggcaaaagaaattgacgaacaacctacaacaataaaaaattgtattaaggaatatattgacaatattaataatgatataaatatttataattttccatggaaaacaaatgatatttcttcaatatgtttaattggttgcggaacagcata

SEQ ID NO: 246304 - DNA, 297 bp, Unknown
  Bacterial polypeptide expressing nucleotide sequence isolated from the Sargasso Sea
ttgatgaaatgacacctgttgtggcgttggccccagaggatgagctggtagaaaagcttctatcaaaccttgaagaggttaagtcaagagggggaaccctttacgtctttgggaatgcgacctcgaagatcaaaattgaaaagggtaagttcatgaatatgcctgagtgtggttattacaatgcgccgattgtttatacaatccccttacaaattttggcatacgaagttgcatgctcaataggaacagacctagaccaacctagaaatttggcaaaatcagtcactgttgaataaa

SEQ ID NO: 246305 - DNA, 796 bp, Unknown
  Bacterial polypeptide expressing nucleotide sequence isolated from the Sargasso Sea
atatcaggtttgcaggcattagagtacagaggatatgactcctcaggtatagcttgtagtattaacaataatttaaattataaaaagagtgttggaaaaatctctaatttaattcatgaattaaatctcgacaaattacaaggaaatacctctattgctcatacccgctgggcaactcatggaaaaccaagtaaagtaaatgctcacccttttgtaaaagaaaattgtgctttagttcataatggtattgtagaaaattatgatgatctaattaaattattttctttagatgcaaataaattagagtctgatactgatactgaagtcgttgctgcaatatattcaaaactattaacccaatatgaacctttagatgctttgataaacttaacaaataaaattcaaggtacatatgccttcgcctttttggtaaagggatcggattctatttatgcagttagaaagggaagcccccttgtaataggaatatctgatgagtcaaaatctataagttctgatatattaggattaccaaattcagtaacgcagacaatttttcttgaagaaaatgattttgttgaaattaattcctcctcttgttcaatatataataagcaaggtagacaagtagatcgcagaatacatcctcatgtaagtacaaatgattttaacactaaaggaaagtttaagcactttatgcaaaaagaaatataccatcaaccaagtagcatagaagatactgttttaaattattgtgataaaaaaaccaataaggttctacttccaagatatgatg

SEQ ID NO: 246306 - DNA, 950 bp, Unknown
  Bacterial polypeptide expressing nucleotide sequence isolated from the Sargasso Sea
aggatcttatgctttagcagttttatggtctggtgcaccaacttctttggtagttgcaagaagacaagcgcccctgataattggtttgggtgaaggagaatttatttgtgctagtgatactccagccattgcaaactttacgaatattattttgccaatggaggatgaagaaatagctttgttgactccgcttggaattgaaatatatgactcaagtaacgagagacaatatagaaatccagtttctttaaaagtctcagagcaaataatggataagatgaattttaaacactacatgttgaaagagatatatgatcaaccacagacggcaaaagactggctggaaaattatttaattcagaacttagataatggtcaatatcaaatcaattatgcatttgatacagaattttttgagtcaatagaaagaattgaaattattgcttgtggtacaagtaaacatgctgcaatggtgggcagctttttattagaacaattttcaggtatccctacaaatgtcttttatgcaagtgaatttagatattcaccaccacctctattgccaaatacattaactattggagtcactcaatccggagaaactgctgatacaattgcagctatcgatatggaaattaaaagacgttcttcaattgaaaataaaaaatttcaacccaatcttattgcaataacaaatagaaaagaaagttctataggaaggcaggtctcaaacataattgatatctgtgcaggaatagaagttggagttgcagcaacaaaaactttttttgctcaattactttctttttatggattagccataaaatttgctcaaattaaaggcaatcaaagtcctgatgaaatagataaattaataaacgagcttataaaacttcctccattacttgaagatctcttagagaaacataataagtctcagaaaagctagc

SEQ ID NO: 246307 - DNA, 901 bp, Unknown
  Bacterial polypeptide expressing nucleotide sequence isolated from the Sargasso Sea
aaacaaaatgcattttcttgtaataaagcagaaggaaaactcaagaatttaaaaagtaatcttagtgatcacaatattcctggaactgtcggtataggtcataccagatgggcaactcatggaaagcctgaggttaaaaatgcacatcctcacactgatagttcgggaaatatagcagttgttcaaaatggcattattgaaaatttccaagatttaaagaataaattagagcaagagggtattatttttaactctgatacagataccgaggtaattccccatctaattcaaagagagctaaatacattaggtaaacttaatcttgagaataatggttcaacattattagtagctgtgagaaatgtaatatctgatttagaaggatcttatgctttagcagttttatggtctggtgccccaacctctttggtagttgccagaaaacaagcgcccttgattattggtttgggtgaaggagaatttatttgtgctagtgatactccagccattgcaaactttacgaatattatcttgcctatggaagatgaagaaatagctttattaactccgcttggaattgaaatatatgattcaagcaacgagagacaatatcgaaatccagtttctttaaaaatctcagagcaaataatggataagatgaacttcaaacactatatgttaaaagaaatatatgatcagccacagactgcaaaaaactggttggaaaattatttaataaagaacttagataatgggcaatatcaaatcaactatccctttgatacagagttttttgaatcaatagaaagaattgaaattattgcttgtggtacaagtaaacatgctgcaatggtgggcagctttttattagaacaattttcaggtatccctacaaatgtct

SEQ ID NO: 246308 - DNA, 267 bp, Unknown
  Bacterial polypeptide expressing nucleotide sequence isolated from the Sargasso Sea
tatgtgtggaattgttgcttataaaggtcataaaaattgtcatcctattttattaaacggattgaaaaggttagagtacagaggatatgattcagctggtattgcttgcattaattcaaatgataaattagttgttacaaaacgcaagggtaaagtaagtaaacttgaatcggcattatctaaatcagagatttataatttaggaatagctcatacaagatgggctactcatggtaagcctaatcagccaaatgcccatccacatct

SEQ ID NO: 246309 - DNA, 868 bp, Unknown
  Bacterial polypeptide expressing nucleotide sequence isolated from the Sargasso Sea
gcagatcgatttaagaaaaaatataggcggaattgatgatgtcaatctgaaagaacgtttggatcagatgcagggaaaaattggaattgctcacacgcgttgggcaacccatggaggtgtaactcaggaaaatgctcatcctcatctttctgcaaaccgaaaatttgccgtcgtccataacggtataatatctaattatcagcagcttagggatgtaatgcttagcgaaggtgtttgttttgagtcattgactgatactgaggtttttgtgaaccttttggaaaaatcctatactgaaagaaatgatttggaacaggctttcctagcagcacttcagcagatagaaggttcattttcaattgttatgctttcttcacatgatccagagcatttgtattgcgtaaaaaaggagtcacccttattgttggggctgggcgaagaatgtaattatgttgggtctgatataaatgcctttctagaatataccaggaaggcaattgttttagatgaaggcgaatatgtaattttaggtcctaatgactaccaagtccgcagtttaaaaactggtaaaaaactcaagaaaaatattctgcatattgactgggacttagagaccagtaaaaaaggtggattttctcattatatgctcaaagaaatatttgatgagccagaaactgtccggcaggcaatgcagataccaaggcagcaaatcgttagtatggccgaaatgtttgctgattcttcacgttcattcatgatgggtgtgggtacaacctattatgttgccagtatcagtcaatattatttttcttatcttgcagactgttattattctgcattgagttctgatgagttttctgtagttgat

SEQ ID NO: 246310 - DNA, 154 bp, Unknown
  Bacterial polypeptide expressing nucleotide sequence isolated from the Sargasso Sea
aatgtgcggtattgttggaattttaggtgaccacgaagttgggccattattagtaaatgccttgaaaaggctcgaatatagagggtatgatagcgctggtattgcgacccttaataatgggaacctgggacgccggagatcgcttggaaattag

SEQ ID NO: 246311 - DNA, 106 bp, Unknown
  Bacterial polypeptide expressing nucleotide sequence isolated from the Sargasso Sea
attattatctatacccctgcaaatgttagcttatcatgttgccttgatgaaaaattgcgatgtagataaacctagaaatctcgcaaagtcagttacagttgaataa

SEQ ID NO: 246312 - DNA, 265 bp, Unknown
  Bacterial polypeptide expressing nucleotide sequence isolated from the Sargasso Sea
aatgcacatccacattcatctcaaaatgtttctgtagttcacaatggaataatcgaaaattcaactttattaaaaaaatttttagttggcaaagttcataaatttaaatcacaaactgatactgaagttatagttcatttgattacagaaaatttaaaaactaaaaatattgtaaattccattaaaaaaactttaaaatctttacatggaagttttgcacttggaattatatttaaagatcaaccagatttaattgttggagcta

SEQ ID NO: 246313 - DNA, 140 bp, Unknown
  Bacterial polypeptide expressing nucleotide sequence isolated from the Sargasso Sea
agttgaaaatactaatgatgacttattgccattccttttaactattcctcttcaaaaactggcttattactcagctttaaaaaaaggttacgacattgataagcctagaaatttggctaaatctgtcactgttgaataaa

SEQ ID NO: 246314 - DNA, 106 bp, Unknown
  Bacterial polypeptide expressing nucleotide sequence isolated from the Sargasso Sea
gtttatacgatccccttgcaaattttggcatatgaagttgcatgctcaataggaacagacctagaccaacctagaaatttagcaaaatcagtgacggtggaataga

SEQ ID NO: 246315 - DNA, 946 bp, Unknown
  Bacterial polypeptide expressing nucleotide sequence isolated from the Sargasso Sea
aatggaattattgaaaattttcaagacttaaaaactaaattacaggaagagggcattgttttcaattctgatacagataccgaagtaattcctcatttaattcaaagagaattaaacacattaagtaaacttaatcttgagaataacggttcaacatttttagttgccgtgagaaatgtaatatctgatttagaaggatcttatgccttggcagttttatgggctggtgccccaacgtctttggtagttgcaagaagacaagcacctttaattattggtttaggtgaaggagaatttatatgcgcaagtgatactccagctatcgcaaactttaccaatattattctgcctttggaagatgaagaaatagctttattaacccctcttggaatagaaatatatgactcaaataacgagagacaatatcgaaatccagtctctttaaaagttgcagagcaaattatagataagatgcatttcaaacactttatgttgaaagagatatatgatcagcccgagactgcaaaaaattggttggaaaattacttaattaaaaacttagaaaaagaccaatatcaaataaactatccctttgatacaaagttttttgaatctatcgagagaattgaaattattgcttgtggtaccagtaaacatgctgcaatggtcggtagctttttattagagcaattctcaggaattcctacaaatgtttattatgcaagcgaatttcgatattcaccacctccactattgccaaatacattaactattggagtaactcaatctggagaaactgccgatacaattgcagctatcgagatggaaattaaaagacgttcatccactgaagataaaaaatttaaccccaatcttattgcaataacaaatagaaaagagagctcgataggaaggcaggtttctaatataattgatatctgtgcag

SEQ ID NO: 246316 - DNA, 634 bp, Unknown
  Bacterial polypeptide expressing nucleotide sequence isolated from the Sargasso Sea
agactactgtaaagatgctaaggttagaactctcagtattgtaaatgttatgaatagctcaattgcacgcgaaagtgattattgtttatatacgaaagcgggagcagaaatcggcgtagcttccacaaaagcatttacggcacaattgtcagtgctgttatcaatggcactgcattgtggtactaagaataacaatattacaattgagcagaatagagagatttgcaaagaaattatgcaggctccacaaattttagaaaagacaattaaaagatcttatgaattgaaagaaaccgcaaaagccatcatagactcaaaaggtgtaatgtatttaggaagagggactgcttttcctctagcactagaaggtgcgctaaaatttaaggaaatctcttatatacatgcggaaggttatccagctggcgaaatgaaacatggcccacttgctttaattgaaaaagaccttcctgtagtgtgtattgttccaccaggtcctttatttcataaaacagtgtccaatattcaagaggtcattgctcgaggtggcagaatattaatgattacagatgatgaaagccttgagtccggttctgaaaacatatggaagatttttagattaccaaaaacacgtaaa

SEQ ID NO: 246317 - DNA, 287 bp, Unknown
  Bacterial polypeptide expressing nucleotide sequence isolated from the Sargasso Sea
tatgtgcggaatcgttgctctggtggggtcccgtgaggcggccccgcaacttcttgaagggctgcggcaactcgaatatcgcggctacgactccgccggcatcgcgacggtggatgccaaggccgagggacttcactgtctgagggccagcggcaaactggccaacctcgccaaacgttttgaggagctcggctcaccaggccagtgcggcatcggccatacccgctgggccacccatggcaagccggaagaacgcaatgcacacccgcaccggagcatggatggat

SEQ ID NO: 246318 - DNA, 190 bp, Unknown
  Bacterial polypeptide expressing nucleotide sequence isolated from the Sargasso Sea
atgtgcggcatagtaggtataattagttcaaaagaagttacaggaagaattatcaattcattaaagaaacttgagtatcgtggatatgactcagcaggtatagccacattagttgatggaaatattaatgaggtcaagtgcgagggaagggttgaagcattagaaaaagacataactaaatttaatctaa

SEQ ID NO: 246319 - DNA, 100 bp, Unknown
  Bacterial polypeptide expressing nucleotide sequence isolated from the Sargasso Sea
atgtttctagcatcaatactgaactctttaagaaagttagaatatagaggatatgactcagcaggtattgcaactttagaaagtggcattataaaatgaa

SEQ ID NO: 246320 - DNA, 794 bp, Unknown
  Bacterial polypeptide expressing nucleotide sequence isolated from the Sargasso Sea
tattgagaattatgcagaaatcaagaaagatcttacaaacgatggatttaaatttaattcagacactgacacggaagtcgtagctgtagagttaagcagaaaatggaatggaaatcttttaaaaacagtggtgaatgtagcaaaaacacttgagggaacatatgcccttgttgtaactacaacaaaagaagagggcactattgttgcaggaagattaatgagtcctctagtccttggagttggtgataatgaggtttttctagcatctgattcagcagcaatcttagaacatacaaagaaaatgatatttcttgaaaatggtgattttgtagaaattaaaaatggtaaatataagttgttcgattctgaattaaatgaaatccagagagaaattcaagaaatcgattgggaggtatcagaagcagagaagtcaggttatgaccattttatgtataaagaaatacttgaacaatctgaagtgatcgaaagaactttatctggaaggcttgaagcatcctcagatgaaataccaattaagttaaatgaggcttcaaaatttgaaaaaatttggattgttgcatgcggaacagcctatcatgctggtttgtttgggaaagacctatttgagaaagttcttggagttccggtaagtgttgagcttgcttcagagttcagatatagagaaccaatcgttggaaaaaatgatttaggtattgtaatttcccagtccggagaaactatggacactattgctgctacagaattattaaaggaaaatggttcacatgttcttg

SEQ ID NO: 246321 - DNA, 209 bp, Unknown
  Bacterial polypeptide expressing nucleotide sequence isolated from the Sargasso Sea
taaagtaatattaattactgacaatttaggtgcaaaaaaagctcaaaaatattgtgatgaagttattattttgcctgaaacaaatagtataacttcagctatcatttattctctacctatccaactaattgcttatcacttaggattagcgcttggaactgatattgatcaaccgcgtaatcttgcaaagtctgttactgtagaatgat

SEQ ID NO: 246322 - DNA, 145 bp, Unknown
  Bacterial polypeptide expressing nucleotide sequence isolated from the Sargasso Sea
tatgaacatgccagattgtggttactacaatgcaccaattgtttacacaataccgttacaaatattagcctatgaggttgcatgctcaataggaacagacctagatcaaccaaggaacctagcaaaatcagtcacggtggagtag

SEQ ID NO: 246323 - DNA, 178 bp, Unknown
  Bacterial polypeptide expressing nucleotide sequence isolated from the Sargasso Sea
gatgaagttgtgtcagaaaatattttgggaaactattgaggttgagaatacaaatgatgacttgcttccattcttattgactattccacttcaaaaactagcttattactctgctcttaaaaaaggttatgacattgataagcctagaaatttggctaaatctgtcactgttgaataa

SEQ ID NO: 246324 - DNA, 118 bp, Unknown
  Bacterial polypeptide expressing nucleotide sequence isolated from the Sargasso Sea
tttgaccccaattatttacactattccgcttcaaattttttcttatgaggttgcccttttaaggggcaccgatattgatcaaccaagaaatcttgctaagtcagtcacggttgaatag

SEQ ID NO: 246325 - DNA, 499 bp, Unknown
  Bacterial polypeptide expressing nucleotide sequence isolated from the Sargasso Sea
tatgtgtggcatcagcggcatagtgcattcagaaaattttggcaggagtttgctaaattccatcaaaaatcttgaatatcgaggatatgattcctgtggagttgccgtgatacagaatggcaagatagatttgcgaaagaatataggcggaattgatgatgtcaatctgaaagaaagtttggataagatggagggcaaaattggtattgctcacacgcgctgggcaacccatggaggagtcactcaggaaaatgctcatccccatctttcagcaaatcgaaaatttgccgtcgttcataacggtataatatctaattaccagcaactcagggaaagactgcttagtgaaggtttttgttttgattcattgactgatactgaggtttttgtgaacctgctggaaaaatcctatagtgaaagaaaagatttggaacaggctttcctggcagcccttcagcagatagaaggctcattttcaatagtaatgctctcttcacat

SEQ ID NO: 246326 - DNA, 550 bp, Unknown
  Bacterial polypeptide expressing nucleotide sequence isolated from the Sargasso Sea
tcgactaaagccttcacgagtcagctcgtggccctttcgctcttcacaatgttcatgggtcgccggcgcagtatgtcagcgtcgaggggccatgagatcgcgcagcacttgcagatgctaccggctcaaatccaagaggtatttaagctagaggaggagattagagagttggctcggggttataaagatgcccagaattttctgtatttgggccgtggctatcagttcccagttgctcttgagggagcactcaaactcaaggaagtcagttatatccacgcggaaggttatccggcagcggagatgaagcacggaccgatagctctcatcgatgaagatatgcccgtagttgtgcttgctcccagggatccaatttattccaaggtcgtctccaatatcgaagaggtgaaagcgcgatcaggtaagattattgccgttgtctcggatgacgcgcccgagcttcagggcaaggtcgatcacatgatcaaggtgccacataccttaccgcacctcctgccagtgctcacaacgattcccttgcagctattag

SEQ ID NO: 246327 - DNA, 770 bp, Unknown
  Bacterial polypeptide expressing nucleotide sequence isolated from the Sargasso Sea
tttgaaaaatactattattaaagtattgaaaaaacttcatggcagttttgctttaggtataatttttaaagatagaaatgatttaatgattggcgctagaagaggttcacctttggctgttggatatggaccaaacgaaaactatctaggatcagattcatatgcactgaaatcaatgacaaataaaatttcttatttagatgatggagaattttgtatcattaaaaaagatcaaatagagttttttcaaagtaacggaaaaaaaataaacaaaaaagtaatgaatttatctaaagaggatatccaatatgataaaggtgagtataaatatttcatggaaaaagaaatagatgaacagccgtctactattaatgattgcataaatgagtatgttgataaatttaataaacagataaatatctataattttccttggaatataaattcttttcaatcaatcgtgcttattggctgtggtacagcctatcattcttgtttagttgcaaagtattggctggaacaaaatacaaatctggatgtgggtatagatattgcttcagaatttagatatcgaaaggttaggtttaaaaaggattgtttgtatgtgtttgtttcacaatcaggtgaaactgcagatacttatgcagctttagaattgtgtaaaaaaaataaaatgaaaacttgcgcagttgtaaatgttgttgaaagttcaatagcgcgagatgctgatttagttttacctatttattgtggtcaagaaattggagttg

SEQ ID NO: 246328 - DNA, 310 bp, Unknown
  Bacterial polypeptide expressing nucleotide sequence isolated from the Sargasso Sea
cctcttgctttaatagatgaagaaattccagttattgctttagcgccagagagcgagatagctgaaaaattagtttctaatctcgaagaagttaaagctaggggcggaactctatatgtattttctgatccttcaatttcaatggatttaaagtctggaagactcatcaatatgccaaagtgcgacttccttttgactccaatcatttataccatacctcttcaaatactttcttatgaagtagcattgttaagagggacggacattgatcaaccaagaaatttagccaaatctgttacggtggagtaat

SEQ ID NO: 246329 - DNA, 274 bp, Unknown
  Bacterial polypeptide expressing nucleotide sequence isolated from the Sargasso Sea
atgtgcggtatcgttggcgcggtttccacgcgcaatatcgttcccgtcctgatcgagggcctgcgccgtctggaataccgcggctatgactcgtgcggcgtcgccattcagcgcgatggccagctcgagcgcgcgcgcaccgtgtcgcgcgtggccgatctcgatgcccaggcacagaccagccacctggacggcgccatcggcatcgcgcacacgcgctgggccacgcatggccggccggataccgtcaacacgcacccgcatttctcgggcg

SEQ ID NO: 246330 - DNA, 154 bp, Unknown
  Bacterial polypeptide expressing nucleotide sequence isolated from the Sargasso Sea
ttggcaaaaatagaagttgaaaatacatctgaagacttgataccttttttaatatttatacctttgcagaaactggcttattattctgcttttaaaaaaggttacgatatagataagcctagaaatttagctaaatcagtcactgttgaataat

SEQ ID NO: 246331 - DNA, 265 bp, Unknown
  Bacterial polypeptide expressing nucleotide sequence isolated from the Sargasso Sea
ccagaggatgagctggtagaaaagcttctatcaaatcttgaagaggttaagtcaagaggaggcaccctttacgtctttggaaatgcgacctcgaagattaaaattgaaaaaggcaagttcatgaatatgcctcagtgtggctattacaatgcaccgattgtttatacaatccccttgcaaattttggcatatgaagttgcatgctcaataggaacagacttagaccagcctagaaatttggcaaaatcagtcacggtggagtgag

SEQ ID NO: 246332 - DNA, 454 bp, Unknown
  Bacterial polypeptide expressing nucleotide sequence isolated from the Sargasso Sea
atgtgcggaattagcggcatcattgaccaaaagccggtgactcgcaatttggttacgtcaatcgccaatctggaatatcgaggttatgattcctgcggaatggcgatgctcaatggtaaaggaattgaggtgcgtaaaaacacaggcggcgttgaggaagttaggagtcgagaaaaactcgatatgatgactggaaatctaggcattgcccataccagatgggcaacgcatgggggagtcacgacggaaaatgctcacccccatctctcccaaaatggtgagtttgccatcgttcataacggcatcatttcaaattatcagaaactgagaaaacgtcttattggggaaggactccaattcagatcaactacggacaccgaagttttcgtcaacctggttgaggaagcctttgcccagaaaaatgatgttttaggggcattcctggaagcgtgaa

SEQ ID NO: 246333 - DNA, 247 bp, Unknown
  Bacterial polypeptide expressing nucleotide sequence isolated from the Sargasso Sea
ttcaacatataatgacacactaacaagtgcaagagagattaaggcccgtggtgcaaaaattattggcatttcagatattgaaagtgacgtttatgattattggatggaaattccaaaaattaatgagattctctatccaatttcagagattataccaattcagttactgacatattattcagctttagaaaaagatacagatcctgactatccaagaaatttggcaaaatcagtcactgtcaagtag

SEQ ID NO: 246334 - DNA, 384 bp, Unknown
  Bacterial polypeptide expressing nucleotide sequence isolated from the Sargasso Sea
aatgtgttcaattataggctattccggaaatgaaattgcagccccaattatcgtaaagggattaaaaagaatggagtatagagggtatgacagtgttggagttgcaacagaatcacaaaatcaaattgaattaaaaaaaggaacaggaaaagttactgaagtaaattctaaatttcaattagatactttaccaggcaaaataggcataggtcataccagatgggctactcatgggaaagttacagatcttaatgcacacccacatccaagtaattcgggaaaaattgcaatagtgcacaatggaataatagagaattttgaagagctaaaaaagcaactagaagatgacgggtatagtttcaagagtgaaacagatagcgagat

SEQ ID NO: 246335 - DNA, 173 bp, Unknown
  Bacterial polypeptide expressing nucleotide sequence isolated from the Sargasso Sea
gaagatcaaaattgaaaaaggcaagttcatgaatatgcctgattgtggttactacaatgcaccgattgtctatacaatacccctgcaaattttggcatacgaagttgcatgctcaataggaacagatctggatcagcctagaaatctcgcaaaatcagtcacagttgagtgag

SEQ ID NO: 246336 - DNA, 540 bp, Unknown
  Bacterial polypeptide expressing nucleotide sequence isolated from the Sargasso Sea
tattatagaaaattcaacaattttaaaaaaaatactagagaaaaaaggatataagtttaaatcacaaacagatacagaggtaatagcgcatttagttacagattatttaaaaaaaaataatttaaaaaatacaataattaaagttttaaaaaaattacatggaagttttgcattagggattatttttaaagactatccagatttaattataggtgctcgaagaggctcaccattagctgttggatatggtccaaatgaaaattaccttggatcagattcttatgctttaaaatctatgactaacaaaatttcttatcttaatgatggagaattttgtttaattaaagaaaatcaagttgaattttttgacccaaatggaaaaaaaatcaataaggaaattttaaatctctcacaagatgatcataattatgacaaaggtgattataaacattttatggcaaaagaaatagatgaacaaccaactacaatagagaattgtgtaaatgaatatgtagataaattaaatatacaaattaatat

SEQ ID NO: 246337 - DNA, 111 bp, Unknown
  Bacterial polypeptide expressing nucleotide sequence isolated from the Sargasso Sea
cctttcttttaacaatacctttacaaaaattagcttattattcagctctcaaaaaaggatttgatatagataagcctagaaatttagctaaatcagtaaccgttgaataat

SEQ ID NO: 246338 - DNA, 178 bp, Unknown
  Bacterial polypeptide expressing nucleotide sequence isolated from the Sargasso Sea
gatgaaatttattcagaaaatattttgggaacaaatagaagttgatgctatatctgatgaactcattccttttttgaccactatacctttgcaaaagttagcttattactctgcattagataaaggatatgatatagataaaccacgaaacttagctaaatctgtcactgttgaataa

SEQ ID NO: 246339 - DNA, 280 bp, Unknown
  Bacterial polypeptide expressing nucleotide sequence isolated from the Sargasso Sea
aatgtgtggaattataggcgcagcctcctctagaagcgtaggaaaaattttagtcaatggactaaaaaaaatggagtatcgcggatacgactctgcgggacttgttttgaataaagaaaataaagctgttcagctaaaaacacttgggaaagtctcaaatctagaagagttgatgatccaaaaaaaacccagagccaagtctggaatagctcacacgaggtgggcaacacatgggcagccctctcaaaaaaatgctcaccctcatgagtctaatggcagt

SEQ ID NO: 246340 - DNA, 820 bp, Unknown
  Bacterial polypeptide expressing nucleotide sequence isolated from the Sargasso Sea
agaacttgtagtggcggtttctcaatccggggagacttttgataccaagttttccctaaacgttgcacaagaaatgggcgccaagacggcagccattgtaaatgtgatgggttcaagcatcagtcgtatggtcgatcatgtgatcatgcaggggtccggtcctgagatttgcgtggtttctaccaaggccgcccttgctcaggcattgcttctactgcggacagccctggaactgggctacaaagaaggatgtctggattcgaagtccttccagagtcatcaaaaggagttggaaagttttccggagttgatatcaattcttctcaatgagaaatccggttttatgagaaacctagcccgtatcaccagtagcgtccaaaattggatttttttagggtgcggaatctattatcccgttgccatggaatctgcactgaaaatgaaggaagtgacctatctccatgccgagggcatgcctgccggatttttgaagcatggaacgctttccatgattgaagaatcagtccactcgcttttctttgttcctcctccggctgaagtagatctccacaatcgtaccataatcgctatagaagaaatcaaaacccggggtggtacgctggttgggctttattttgaaggagattcccaggcgaagtcccttctggatcatgctgtcgaacttcctccggtcccctccttgattgctccttttgttcaaatgattctggctcagatgtttgcttattacaccgcactcgatttaaaacgcaacatcgacaagcccaggaatctcgccaaatccgtcacggtaggttga

SEQ ID NO: 246341 - DNA, 450 bp, Unknown
  Bacterial polypeptide expressing nucleotide sequence isolated from the Sargasso Sea
tatgatcagcactatattaccaacatatgcgcgagcggacttagaatttgtgagaggccaaggtgcttggttaacggaagcagacggaagtcactttttagacctagcctctgggattgcagtaaattctttaggccatgctcatcctgatcttgtgaagattataaaatcacaggcagaaaagctttggcacgtatcaaacctttataaaattcctcagcaacgtgccctagcagatgtattagttgcaaactcttttgccgacactgttttttttacaaactctggaactgagtcttgcgaattagccgttaaaatgtctcgaaaatattggtttgaaaagggttatcccgataagtctgaaataattacatttgaaggttcttttcatggtcgctcttccgctggcatagcagcaacggcctctgaaaagatgaccaagggttttgg

SEQ ID NO: 246342 - DNA, 514 bp, Unknown
  Bacterial polypeptide expressing nucleotide sequence isolated from the Sargasso Sea
aatgatttctaaacttctcaatgaaaaatcaggatttctcagaaatttggcgcgaaacactagcagcgttcaaaactggatttttttaggttgtggaatttattatccagtggccatggaatcagccttaaaaatgaaagaagtaacctacctccacgctgaaggaatgcctgcagggtttttaaaacatggaacactttctatggtcgaaagatcagtttattctcttttcttcattccgcctccagcagaagtcgagctctacaaccgtaccatcattgctatagaagaaatcaaaaccagaggaggaactttggttggatttcattttgaaggggattcccaagcggcctcattgctggactatgctttggaattgcctgaagtacccacactattggcaccttatgtggaaatgattctggcgcagatgttttcctattacactgctttggatttgaaacgaaacatcgacaagcccagaaacctcgccaagtcagtcactgttggttaa

SEQ ID NO: 246343 - DNA, 462 bp, Unknown
  Bacterial polypeptide expressing nucleotide sequence isolated from the Sargasso Sea
aatgaatttatctagagaagacattaattacgataaaggagactataaatattttatggaaaaagaaatagatgaacagccgtcaactattaacgattgcataaatgaatatgtcgataaatataataataagataaatatttataattttccttggaagacaaattcgtttcaatcaattgtactcattggctgtggtactgcatatcactcttgtttagtagcaaagtattggtttgaacaaaatacaaatctggatgtaagtatagatatagcatcagaatttagatatcgaaaagtcaggtttaaaaaggattgtttatatgtgtttgtttcacaatctggtgaaactgcagacacttatgcagcattagaattatgtaaaaaaaataaaatgaaaacttgtgcagttgtaaatgttgttgagagttctatagctagagatgctgatttagttttgcc

SEQ ID NO: 246344 - DNA, 136 bp, Unknown
  Bacterial polypeptide expressing nucleotide sequence isolated from the Sargasso Sea
tgaggtaaatggtaaattgaatatacctatcattatgtctataccgctccagcttttggcctatcacgtggcaaaattaaggggaacggatattgatcaaccgaggaacctggcaaaagctgtaactgtagaataa

SEQ ID NO: 246345 - DNA, 250 bp, Unknown
  Bacterial polypeptide expressing nucleotide sequence isolated from the Sargasso Sea
atgtgtggaattataggagcggcatcatctcgcaacgttggtaagctattggtccaaggccttcataaaatggagtatcgtggctatgattcagctgggatagctctccatcaaaaagacagcatttttaatctaagaactttgggcaaagtaagtttgcttgaagaaggaatgattgagcagcgcccaaaaagcaaacttggcattgcccatacacgctgggctacacatggccagccctcagaacaaa

SEQ ID NO: 246346 - DNA, 271 bp, Unknown
  Bacterial polypeptide expressing nucleotide sequence isolated from the Sargasso Sea
cctgcacccagaagatgagctcgtagaaaagctcgtctcaaatctcgaagaggtcaaatcaagaggaggcacgctttacgtctttggaaacgcaacctcaaagataaaaattgaaaaaggaaaatttatgaacatgccagaatgtggttactacaatgcaccaattgtttacacaataccgttacaaatattagcctatgaggttgcatgctcaataggaactgacctagatcaaccaaggaacctagcaaaatcagtcacggtggagtag

SEQ ID NO: 246347 - DNA, 221 bp, Unknown
  Bacterial polypeptide expressing nucleotide sequence isolated from the Sargasso Sea
attgcagaggagccaagttcttttaataactaataaaagcgatgaagaaatttattctgaaaatatttggcaaaaaattgaaatagaaaatacagaagaagatttgtttccttttttaactactataccacttcaaaaattagcttattattcagctttaaaaaaaggatatgatatagataagccaagaaatttagctaaatcagtcactgttgaataat

SEQ ID NO: 246348 - DNA, 200 bp, Unknown
  Bacterial polypeptide expressing nucleotide sequence isolated from the Sargasso Sea
aatgtgtggtattgttagttatctaggtaaatctgattctgtccctattttactaaaagggcttcagcgtttagaatacagaggatatgattcagcaggattagctttaattgatactgataaccttagttgtataaaacaatctgggaaagtatctgagctaaattcaaaaattgaaaaaatatcaataaaagggagtt

SEQ ID NO: 246349 - DNA, 217 bp, Unknown
  Bacterial polypeptide expressing nucleotide sequence isolated from the Sargasso Sea
gcccgtggaggaatagttatttcaatcactgataaaattaataattcactaaaaaaaatatcagattttgtattaatagcacctcagacacataaatatgtatttccaataacgtgttcaataattttacaaatgttagcatatgaacttgcagtttgtagaaaatgtgaaatagatcagccaaggaatctggcaaagtcagtcacggtcgaatagt

SEQ ID NO: 246350 - DNA, 162 bp, Unknown
  Bacterial polypeptide expressing nucleotide sequence isolated from the Sargasso Sea
tatgtgtggaattattggaataacaagcaacaaattggtttcatcaccaattataaattcattaaaaaaattggaatacagaggttacgactctgcgggaatcgcaacgattgactctggcttcattaaagaagtaaatgtgaaggaagagttgagagtttg

SEQ ID NO: 246351 - DNA, 511 bp, Unknown
  Bacterial polypeptide expressing nucleotide sequence isolated from the Sargasso Sea
tatgtgtggtatttttggttgcgtgggtgaaaaagatgtttcaaatctcataattaagggattgaaacgactggaatatagggggtatgactccgctggtttatgtcttgagacagatgatagaaattttgagatattaaaatcatctagttctaattatccagtggatgttcttactaaatctttagaaaaatcaaaaataagttctaatgctggaattgggcacacacgatgggctactcatggtccaattaataatattaatacacacccacatttttcttacagtaaaaatatttctattgttcataatggaatagtagaaaattatgactttcttagcaaattcttaataagaaaaggggttgaaatatatagtcagacggattctgaattaatagctcatttagttgatctaatgttgtgtagtaatggtaatttaaaatctgcaattttttctgtttcaaatatgcttgaaggaaataataccgttgcattgatgagtaaagaa

SEQ ID NO: 246352 - DNA, 82 bp, Unknown
  Bacterial polypeptide expressing nucleotide sequence isolated from the Sargasso Sea
ctgacatattattcagctttggaaaaagatacagatccagattatccaagaaatttggcaaaatcagttactgtcaagtaga

SEQ ID NO: 246353 - DNA, 236 bp, Unknown
  Bacterial polypeptide expressing nucleotide sequence isolated from the Sargasso Sea
tatgtgtggaattataggggcggcctcatctcgcaacgtaggaaagttattagttcaaggccttcataagatggagtatcgtggttacgactcagcaggtatagccctccatcaaaaagacagtatttttaatttaagaactttggggaaagtaagtttgcttgaagatggaatgattgagcatcggccaaaaagcaaaacttggaattgcgcatactcgctgggcaactcatggc

SEQ ID NO: 246354 - DNA, 490 bp, Unknown
  Bacterial polypeptide expressing nucleotide sequence isolated from the Sargasso Sea
atgtgcggtattgtaggttatattgggaataaagatcctgtccctgttctattgaaagggttgaaacgactagaatatagagggtatgattcttctggcattgcccttcttgaggaagacaatctaacccatatcaaaaaagcaggaaaagtttcagatttgcaacagttagttgatgattcttctataaaagggagttgcggtattgcgcatacacgatgggcaacgcatggagctccaaacgatattaattcacacccccatttggatcatactgggaggattgctctagtacataatggaatatttgaaaactatgaaacgatcaaacaacttcttataaataggaatatcaaatttactagtgatacagatactgaggttattgttcaattaatttctgaattatactataataataatgataaattatcttttgaagatgccgtaagagctgcacttcaagaggttgttggtgcttatgggattg

SEQ ID NO: 246355 - DNA, 397 bp, Unknown
  Bacterial polypeptide expressing nucleotide sequence isolated from the Sargasso Sea
atgagaatcttaaaaaagctatcccacgaactcgctttagccagggacgtattatatcttggtcggggcattagctatcctatagctctcgagggagcgcttaagctcaaagaaataacttatattcacgctgaaggttacgcggctggtgaaatgaaacatggtccaatagctcttataaatgatggtgtgcctgtgattgttatagcaccatcaggtccgctctttgaaaaaacagcatcaaacgctcaggaagtcattgcaagaggtgggcgggtcatactattaaccgataagaaggggtcagaggagtttggtaataatgctcagcacattattgctttaccgaaagttgaccagtttgttgctcccattttatatgctattcccagtgcaa

SEQ ID NO: 246356 - DNA, 706 bp, Unknown
  Bacterial polypeptide expressing nucleotide sequence isolated from the Sargasso Sea
gatgtgttcaattataggctattctggaagtgaaattgcagctccaattattgtaaaaggattgaaaagaatggagtatagaggatatgacagtgtaggagttgcaacagaatcagaaaatcaaattgagttaaaaaaaggaacaggtaaagtaactgaagtaaattcaaaatttcaactagatacactaccaggcagaataggcataggccatactagatgggcaactcatggaaaagtaacagatcttaatgcacacccacatccaagtaattcaggaaaaatcgcaatagtgcataatggaataatagaaaattttgaagaactcaaaaagcaactagaggacgagggatatagtttcaaaagcgagacagatagtgagataattgcaaacttgcttcaaaaaaattacgagtctacaaaaaatgttaaagatacaatcatgaaaacagtttctgtcataaaaggccattacgcatttgtagcaatgtttgaaaatggtcaacttgcagcagccagatttcatgaaccattaataattggagttggacaagaaaatattttcttatcaagtgacgtattaggattcattgaatatacggataatgcgatatatatgaaaagtggaaattttgtaattttagagaacaaagaatttgaaatattagattttaatggagaaaaggttcaaacacgaaataacaaa

SEQ ID NO: 246357 - DNA, 145 bp, Unknown
  Bacterial polypeptide expressing nucleotide sequence isolated from the Sargasso Sea
tatcgaagtagaccaacttgatgatgatctaattccttttttaatgacaatacctttacaaaaattagctttctactcagctctcgagaaaggttacgacatagataaacctagaaatttagcaaaatcagtaacagttgaataa

SEQ ID NO: 246358 - DNA, 166 bp, Unknown
  Bacterial polypeptide expressing nucleotide sequence isolated from the Sargasso Sea
tatgtgtggaataattggaataaatagtaatagacctgtttcatcatcaattatcagttctttaaaaaaattagaatatagaggttatgattcagccggcatagcaacgctttcaaacaatggaatcaatgaggtaaaatccgagggaagagttgataaatcttga

SEQ ID NO: 246359 - DNA, 1300 bp, Unknown
  Bacterial polypeptide expressing nucleotide sequence isolated from the Sargasso Sea
aaacaagactctccgctaatcatagggctgggagaaggttgcaattacatcggctctgacattaatgcttttcttgagcatacccgaaaagcagtggttttggatgacggtgaatttgcagtcatcagcagggaacgatatgagatttcagatgttgggaagcgagaagaaagggaaaaatcgattctccagattgattgggatacagagaccacaaaaaaaggtggtttttcccactacatgatcaaggaaatatttgacgaaccccaaactgcccggcaggctttggacgttcctcaagagcagatcaaacagttggctgagatgtttcaaaatgcccctcatgcctacctgatgggggttggaacgacttttttcatctgccaaatggcccaataccttttcagttcactctccaaaagatattttcctgccatcagttctgatgaattcaacggtgttgttccagtgagttcagaagaacttgtagtggcggtttctcaatccggggagacttttgataccaagttttcactcaacgttgcacatgaaatgggcgccaagacggcagccattgtaaatgtgatgggttcaagcatcagtcgtatggtcgatcatgtgatcatgcaggggtccggtcctgagatttgcgtggtttctaccaaggccgcccttgctcaggcattgcttctactgcggacagccctggaactgggctacaaagaaggatgtctggattcgaagtccttccagagtcatcaaaaggagttggaaagttttccggagttgatatcaattcttctcaatgagaaatccggttttatgagaaacctggcccgcatcaccagtagcgtccaaaattggatttttttagggtgcggaatctattatcccgttgccatggaatctgcactgaaaatgaaggaagtgacctatctccatgccgagggcatgcctgccggatttttgaagcatggaacgctttccatgattgaagaatccgtccactcgcttttctttgttcctcctccggctgaagtagatctccacaatcgtaccataattgctatagaagaaatcaaaacccggggtggtacgttggttgggctttattttgaaggagattcccaggcgaagtcccttctggatcatgctgtcgaacttcccccggtcccctctttgattgctccttttgttcaaatgattctggctcagatgtttgcctattacaccgccctcgatttaaaacgcaacatcgacaagcccaggaacctcgccaaatccgtcacggtaggttgat

SEQ ID NO: 246360 - DNA, 124 bp, Unknown
  Bacterial polypeptide expressing nucleotide sequence isolated from the Sargasso Sea
gatgatcttttacctttttttgattacagttccattacaaaaattagcttactattctgctctaaaaaaaggttatgatattgataagccaagaaatttagcaaaatctgtcactgttgaataa

SEQ ID NO: 246361 - DNA, 308 bp, Unknown
  Bacterial polypeptide expressing nucleotide sequence isolated from the Sargasso Sea
tctagccttagttgatgaagaaataccagttattgctcttgctccagaagatagcctagtagagaaacttttatcaaatctcgaggaagtaaaagcaagaggcgggaccctatatgtttttggaaacgcaaactcaactattgaggtaatgaagggaaaatttataaatatgcctaattgcggagactacaatgctccaattatttataccataccacttcaaatacttgcctatgaagtagcatgcctgaggggaacagaccttgatcaaccaaggaatctagctaagtcagtcacggtggaataag

SEQ ID NO: 246362 - DNA, 765 bp, Unknown
  Bacterial polypeptide expressing nucleotide sequence isolated from the Sargasso Sea
aatgaatatttattttgctggaacaccaaatagtgctgctgaaatactcaaatctatagcattaaatgatttatttagtataaagggggtcattacacaaccagataaaaaaggaaaaagaggaaatcagcgaatagagtctcctgtatctttaatggcaaaatctcttaatttacaaactttcaaaccacgtaatttagctaaggaagaaatacaaaatgattttgatataacaaatgctgacgttctggttgttgttgcctatggaaatttaattcctacctggatacttgagagtaacatcaaggcgatcaatattcactattctttactaccaagctacagaggcgcatcccctatacaatcatcgcttctgaacaacgataaaaagactggagtaacatttatgcaaatgtctgaggatttggatgcagggaaagttataaaatgttttgaagttccaataaacaataatgataataaatcaagtcttgaaaaaaagcttactaaattgagtattttaaatttagaaaaagttattacagacttttgctcaaacagaattattcctgttgatcaagatcatgaaaaggcttcctattgtaaaaaaatattaaaagaggattctataattaattttaaagaaagtgctgaaaaaatatttgcaaaattcagagcttacaatgagtggcctggaacatgttttatgcataagaacaaagtcataaaaattcatggtttaaaaataatcttcaagtacaagtc

SEQ ID NO: 246363 - DNA, 190 bp, Unknown
  Bacterial polypeptide expressing nucleotide sequence isolated from the Sargasso Sea
tatgtgcggaattattggaatatctagcaacaaacctgtttctgcgaatataattaattcactaaaaaaattagaatacagaggatatgattcagcaggtatagctacactttcagatggtgaaatcaatgaagtaaaatcagaaggaagagtagatatcttagaaaataattttgatttaaaaaactaa

SEQ ID NO: 246364 - DNA, 238 bp, Unknown
  Bacterial polypeptide expressing nucleotide sequence isolated from the Sargasso Sea
agcaatgtacaagaagttaaggcaagaggagctcatgttattgcaatagggaatagttcatcagaaaaattagaaaatatttcagataagtatattactttgccagatagcaatgaaatattgtcaactgttatatctattatcccccttcaatttattgcttatcatgttgctaataatagaggtgagtctatagaccaacctaggaatttggctaaatctgttactgttgagtaat

SEQ ID NO: 246365 - DNA, 202 bp, Unknown
  Bacterial polypeptide expressing nucleotide sequence isolated from the Sargasso Sea
tatgtgtggaataatagcggctgcttcgaatcgtaatgtaggtaaactgttagtccaaggcttacataaaatggaatatcgaggctatgactctgcaggaatagctcttcatcaaatagacaaaattgctcatttaagaactctaggcaaagttaatttgctagaagaaaaaatgattgctgaaaaaccaaaaagcaaacta

SEQ ID NO: 246366 - DNA, 201 bp, Unknown
  Bacterial polypeptide expressing nucleotide sequence isolated from the Sargasso Sea
ctctatatgtattttctgatccttcaatttcaatggatttaaagtctggaagactcatcaatatgccaaagtgcgacttccttttgactccgatcatttatacgatacctcttcaaatactttcttatgaagtagctttgttaagaggaaccgatatcgatcaaccaagaaatctagcaaagtcagtcacggtggagtaga

SEQ ID NO: 246367 - DNA, 215 bp, Unknown
  Bacterial polypeptide expressing nucleotide sequence isolated from the Sargasso Sea
tatgtgtggaattataggaataaatagtaatagacctgtttcatcaacaattattaactctttaaaaaaattagaatatagaggttatgattctgcgggtatagcaacgctttcaaaaaacgaaattaatgaagttaaatctgaaggtagagttgataatcttgaaaataatctattagttcaaaaaatggaaggaaccattggtataggacatg

SEQ ID NO: 246368 - DNA, 901 bp, Unknown
  Bacterial polypeptide expressing nucleotide sequence isolated from the Sargasso Sea
gccaaatattgggtttgaagagatcacatctcttgaagttgaagcagatatttcatctgaatttaggtatagaaagattagatttgataaaaatgctttgtatatttttgtttcacagtcaggcgaaactgcggatacttacgcagctttagacatttgtaaaaaagaaaaagttaaaacttgttctattgttaatgtagtcgaaagctcaatagctagagcatccgattgtgtattacccatccatgcaggaccagaaattggtgttgcttctacaaaagctttcctaggtcaaatgttagtcttgtatttgcttactttaaaaattggatttctaagaaatgatcttgatcaaattaattacaaaaagaaaataaaagaattaaaaaaaatgcccgaattaatatctgaaactttaaaaaaagaggaaaaaattcaattaattgcaaaagatatttataattcaaaagggtcgatgtttttaggaagaggattgtcatttccaatagctttggaaggagctttaaagttaaaagagctctcataccttcatgcagaaggttacccagctggcgaaatgaaacatgggccactagctcttattgaagatggtttacctgttgttgtaatcgctccaaaagataaatattttgaaaaaactttatcaaatatgcaagaggttatagcaagaggtggaaaagttttaataattacaaactctgtaggcaaagtgataagtgaaaacataagatttcaaattgacttaccagacacagattttgctttgacaccttttttatttacggtcccacttcaacttctttcctatcacgttgcattatttagaaaatgtgacattgataaaccaagaaatttagccaaatccgttactgttgaataa

SEQ ID NO: 246369 - DNA, 279 bp, Unknown
  Bacterial polypeptide expressing nucleotide sequence isolated from the Sargasso Sea
aatgtgcggcattgttggcggaacttcgaacagaaatattctccctattcttgttgaaggactaagaaggctggagtacagaggatacgactccgcaggagtggcttataaagctaatggaaaaatttctctggtaaaaaatgcaggtagagttgaagaccttgctgaaaaactaaatctagaaaagagtaatgcaaaaataggaattgctcataccaggtgggcaactcatggcgttccttcagaaaaaaatgcacacccgcacagctctaaaaataa

SEQ ID NO: 246370 - DNA, 773 bp, Unknown
  Bacterial polypeptide expressing nucleotide sequence isolated from the Sargasso Sea
cgctgacacgttagcggcgcttgagcacgtcgatcctgagcgtgtactcgcccgcctggcgatttgtaatgtggatcacagcgcgattgtgcgcgacagcgagctggtgtacctcacccaagccggcaccgagataggggtggcctcgaccaaggccttcaccacgcaattggttgcgctactgaacctcaccctgtgccttgcccgtcatcatgttgagggcgcgttgtcaggggatgaggtggctgcctcgctcgaggagatggccgatgctgcgggggcggtgctagagtacgacgctcgcatcaaggcgttgtcccatcattttacgaacaaacaccacgcgctcttcttgggccggggcatttattaccccattgccatggagggggccctcaagctcaaagagatttcttatatccatgccgaggcttaccccgctggtgagttgaagcacgggcctttggcgctggttgatgatgatatgccggtagtcgccgtggcacctgatgaccggctcatggaaaagttgcgctccaacctggaagaagtgcgcgcgcgcggtgggcagttgtttgtttttgcgagcgccaacgccggttatgagtccgcacccgattgccaggtgctggaaatgcctagctgcagtgctctggcggggcctgtcgtgttcacgatcgccctgcagttattgtcttatcacgtggccgtggcgaggggcacggacgtcgataagccccgcaacctggctaaaagcgtcacggttgaataag

SEQ ID NO: 246371 - DNA, 802 bp, Unknown
  Bacterial polypeptide expressing nucleotide sequence isolated from the Sargasso Sea
ttgattgttggtgcaagaagaggatctccattagctgtggggtatggtccaaatgaaaattatttaggttcagattcatacgctctaaaggcgatgacaaataagattacttatcttaatgacggtgaattttgtattataaaaaaagatcacgttgaattttttaatgaggaaggagataagataaataaaaaagttttagaattatctttagaagatgaaaaatatgacaaaggtgattacaaacatttcatggctaaagaaatagaggaacaaccaacaacattaaaaaatggaattaatgaatatatagatacattaaataatgatattaatatttataattttccttggaaaattaatgaaatttactcagtaactttaattggttgtggaacagcttatcattcttgtctacttgcaaaatactggttcgaagaattaacctcattagatgttaatgtagatattgcgtcagagtttagatatagaaaaaacagatttaagaaagaaactttatatatattcgtatctcaatcaggtgaaacagcagatacttacgcagcactagatttatgtaatcaaaatgatatgaaaacatgtgcggttgtaaatgtaatcgagagttcgattgctagagactctaaatttgttttaccaatacattgtgggaccgagattggtgttgcctctaccaaagcatttttgggtcaaatacttatattgtacattttagctttaaaaattggattattaagaaaagatttaaaaaaagagctatttaatgaaaaacttaaagacc

SEQ ID NO: 246372 - DNA, 511 bp, Unknown
  Bacterial polypeptide expressing nucleotide sequence isolated from the Sargasso Sea
atgtgcggtatcattggtatagcttctaaagagaatgtgtcctcgaacattataaatgcattaaggaaattagaatatcgtggttacgactctgctggcattgcaataaatactgccaataagatcaatcaaagaaaagtaaaaggcaagcttgataatttgatttacgctcttcagaaagatcaatttgatggtaatacaggaataggtcatactcgttgggctactcatggggagccttctgataaaaatgctcacccccattcatcaacctcggtatcgcttgttcacaatggaataattgaaaatgctgcagaattaaaaaaattaaaggaggttaaagattaccattttgagtctgacactgactctgaagtaatcactgcattattaacgttttatctaaaggaaggtctgagccatcttgagagtgttcaaaagacaatttcttctctagtgggatcatatgcactagcaattatttttagtgatagtgaggataccatttagg

SEQ ID NO: 246373 - DNA, 475 bp, Unknown
  Bacterial polypeptide expressing nucleotide sequence isolated from the Sargasso Sea
atgtgcggcatcattggtatagcttctaaagagaatgtgtcttcgaacattataaatgcattaagaaaattagaatatcgtggttacgactctgctggtattgcaataaacactgctaagaagatcaatcaaagaaaagtaaaaggcaagcttgataatttgatctacgctcttcaaaaagatcaatttgatggcaatacgggaataggtcatactcgttgggctactcacggggaaccttctgataaaaatgctcaccctcattcatcaacctcggtatcgcttgtacataatggaataattgaaaatgctgcagaattgaaaaaattaaaggaagtaaaagattatcattttgagtctgatactgactctgaagtaattactgcgttattaacgttttatctaaaggagggtctgagccatcttgagagtgttcaaaagacaatttcttatctagagggatcatacgcactag

SEQ ID NO: 246374 - DNA, 355 bp, Unknown
  Bacterial polypeptide expressing nucleotide sequence isolated from the Sargasso Sea
aatgtgtggcattgttggaggaacctcgaatagaaatattcttccaatacttgtagaaggtttgagaagactcgaatacagaggctacgattcagctggagttgcttttaaaagtaatggaaaaatttcactagtaaaaaatgctggcagagtagaagatcttgctgaaaaattaaacttaaataaaaacagtacaaaagttggtattgctcataccaggtgggcaacacacggcattccaacagaaaaaaatgcccaccctcataactcaaaaaaaaatatttatgtttgtcataatggaattatagaaaaccacttagcacttaaagaaatgctaaaaaaagagggggctaag

SEQ ID NO: 246375 - DNA, 595 bp, Unknown
  Bacterial polypeptide expressing nucleotide sequence isolated from the Sargasso Sea
atgtgtggcatatatggctgcatttccgatgatgctgcgagcaaggttctggaaggccttagaaagctagaatacagaggttatgactctgcaggactagcagctatattttccagtaccgacatccaagttgaaacagagaggaccattggctatgtttctgacctagtaaccaaggtaaacggacgatttgatggagcaaggatatcaattgggcatacaaggtgggccactcatggtggcgtaacaaatgacaacgcacacccacatagcagtgcagatggtagcataacaattgttcacaatgggattattgagaattctgtagaactttcttctagaatttctaaactcggctaccaactctcttccgagacggacaccgaggtgatagtccacctcctggaccacgagctaaagacacaacctgaaggctttggattcttggaggctttcaatgcggtaatctccacacttgaaggctcgtgggctatagcagtaattgctaccgatctggacgggattcttgtttcccgcccagggagcaccgcttgtaattggaaggggggaaggaaatatatcgatttcatccgat

SEQ ID NO: 246376 - DNA, 1108 bp, Unknown
  Bacterial polypeptide expressing nucleotide sequence isolated from the Sargasso Sea
tgacacagaggttattactttattgttaactgatgaactaaaaaataaaactccattagaagctgttcatgataccttattcaaattagaaggtagttttgcgctaggtataatttttaaaaaatataatgacatgatcataggcgcaagacgaggtagcccattagctgttggttactcaaaaaatgaaaattatatagggtcagattcatatgcgttaaaatctatgacaaacaaaatatcttatctagatgatggtgatatttgtattttaacaaaagataatgttgaattttacgactcaagaaaaaataaaataaataaaaaagttttaactttgtcagatgataaaaatgtagcagacaaaggtgattataaaaattttatgatcaaagagatttttgaacaaccaattacagctaaaaattgtataaatgagtatatagacaaaagtagagatgacattaatttttataatattccgtttgatgtaaaaaaaatcaataaaatagtacttattggttgtggtacagcttatcattcatgcttagtggcaaaatattggtttgaagaattgacttctattgaagttgaaactgatattgcatcagaatttagatatagaaaaattaaatttaacaaaaataatttatatgtttttgtttctcaatcaggtgaaaccgcagatacatcagcagctcttgatttatgtaaaaaaaataatgttaaaacctgttccattataaatgttgtagaaagcactatagcaagaaattcagattgggttttgccaattcatgctggtcctgaaattggtgttgcatctacaaaagcttttatagggcagatgttgttactttatatgttctctttaaaaataggtaatttaagaggagatatagataaaatagactatcaaaacaaaattagaaatttaaaaaaattacctaatttattagaagactgtcttaaaacagaggataaaattcaacttgtagcaaaagattttttagactcaaaaggttcgatgtttttgggaaggggcttttcttttccaatagctttagagggagcattaaaacttaaagaactttcttatctacatgcc

SEQ ID NO: 246377 - DNA, 934 bp, Unknown
  Bacterial polypeptide expressing nucleotide sequence isolated from the Sargasso Sea
aatgaatttttttgttggtagtgatatttctccaattattaaacatactcagcaaattgtatatcttgaagattctcaaatggcaattattaaagacgatgaatataaaataacttcaattgataaagacgtgagccttccaaaaaaagttgaaaaaatagatttcaaaattgatgattacgataaagggaagtttaaatactttatgcataaagaaatccatgaacaaattgatacgatctcaaacactattacaggtagagcaaaaaaagatagggtttaccttaatggattacttgaatattggactcaaatcaaagaagcagataagatatttattactgcttgcggtacctcatggcatgctggactcataggtaaaaatttaattgaaagatttgcaaagatacctgttcatgttgaatacgcttctgagtttagatacaataaaactttaattgataataatagcgttgtaattgctatttcacaatctggtgaaacagctgatactcttgctgcaataaaaaaagctaatgagcatggagcaattacagttggtatttgcaatgttcctggaagttcagtatctagagaaacaaattgtggaatttttacaagatgcggtcatgaagtgggagttgcatcaactaaagcatttactgcacaaataagtattctatatcttttagcgcttaaattagcagcttccaacgatgctattagcaaagcatctcttaggtctcatttagattttagcgagaacataaaaaaaattaaaaatgtgcttaaaaaagaaaatgaaatcaaaaaaattgctttaaaatataaaaatgctaatgattttttgtatttgggaagaggtcttaattttcctatagctttagaaggagcgctaaaattaaaagagatatcttatatccatgcagagggc

SEQ ID NO: 246378 - DNA, 967 bp, Unknown
  Bacterial polypeptide expressing nucleotide sequence isolated from the Sargasso Sea
gagggtaaactcgatgtcttaaaagaacatttagaaaataagcaaattttaggaaatatagggattggtcatacaagatgggcaactcatggagtaccgaatgatgtgaatgcacacccacattcagacaacaatgatgaatttgcaatcattcacaatggcattattgagaattatgcagaaatcaagaaagaacttacaaacgatggatttaaatttaattcagacactgacacggaagtcgtagctgtagagttaagcagaaaatggaatggaaatcttttaaaaacagtggtgaatgtagcaaaaacacttgagggaacatatgcccttgttgtaactacaacaaaagaagagggcactattgttgcaggaagattgatgagtcctctagtccttggagttggtgataatgaggtttttctagcatctgattcagcagcaattttagaacatacaaagaaaatgatatttcttgaaaatggtgattttgtagaaattaaaaatggtaaatataagttgttcgattctgaattaaatgaaatccagagggaaattcaagaaattgattgggaagtatcagaagcagagaagtcagggtatgaccattttatgtataaagaaatacttgaacaatctgaagtgatcgaaagaactttatctggaaggcttgaagcatcctcagatgaaataccaattaagttaaatgaggcttcaaaatttgaaaaaatttggattgttgcatgcggaacagcctatcatgctggtttgtttgggaaagacctatttgagaaagttcttggagttccggtaagtgttgagcttgcttcagagttcagatatagagaaccaatcgttggaaaaaatgatttaggtattgtaatttcccagtctggagaaaccatggacactattgctgctacagaattattaaaggaaaatggttcacatgttcttgctttagtaa

SEQ ID NO: 246379 - DNA, 847 bp, Unknown
  Bacterial polypeptide expressing nucleotide sequence isolated from the Sargasso Sea
atgtgtggaatagtaggaattacaagcaataaagaagtaacaactagaataattaattcactaaaaaaattagaatatagaggatacgattcagcaggcatagcaactcttaaagatggttttattaatgaagttaagtgtgaaggaagggtagaggcacttgaaaaaaatatttccaaaactaatgtgcagggtgaaattggaattggccatgtaagatgggcgacacatggaaagcctagtactataaatgctcatccacattcatcagaaacagtttcggtagttcataatggtattatagaaaattcgacaatcttaaaaaaaattttagaaaaaaaagggtataaatttaaatcccagacagatacagaagtaattgcacatttggttactgattatttaaaaaaaaataatttaaaaaacactattattaaagttttaaataaattacatggaagttttgcattaggaattatatttaaagattatcctaacttaattgtgggagctcgaagaggctcacctttagcagttggatatggtccaaatgaaaattatcttggatctgattcttatgctttaaaatctatgacaaataaagtttcctatcttaatgacggtgaattttgcttgattaaagaaaatcaagttgagtttttcgataccaaaggaaacaaagctaataagaaaattttgaacttatcacaggataaccaaaattatgataagggtgattataagcattttatggcaaaagaaatagatgagcaaccaactacaattaaaaactgtgttaatgaatatattgataaaataagcaaacaaataaatatttataatattc

SEQ ID NO: 246380 - DNA, 847 bp, Unknown
  Bacterial polypeptide expressing nucleotide sequence isolated from the Sargasso Sea
cctattacaataaaaaattgtataaatgaatatatagataaaataaataaagaaataaatattctaaactttccgtggaaaaaaaacgaaatatcttctgtaaagttaattggttgtggcaccgcttatcattcttgtctaattgcaaaatattggtttgaacaattaacactattagatgtagaagcagatatagcttcagagtttagatatagaaaaaatagatttaagaaggattgtttgtatatatttgtctcacaatcaggagaaacagcagatacttatgctgctttagacttgtgtaataaacataaaatgaaaacatgtagcattgttaatgcagtggagagttcaattgcgagagattccaagcttgttcttccaatacattgtggccccgaaataggtgttgcttctacaaaagcttttttaggccaaatgttggtactttatattttatgtttaaaaatttcataccttagaaaagatttagacaaaaaaaaatatcacataaaaattaatagtttatttaatttatcaaaatctgttagtaaatctttaatgacagaagatcaaatccagtcaatttgtaattcatttacaaaggcaaaaggtgctatgtttttgggaagaggatattcttttccaatagcattggaaggcgcacttaaacttaaagagttagcctatattcacgcagaaggttatcccgcaggtgaaatgaaacatggtccacttgctttaattgaagacggtatgccagttgttgtaatagcgccaaaagatgaatattacaaaaaaactatatcgaatatgcaagaagttattgcaagaggtgccaaagttc

SEQ ID NO: 246381 - DNA, 874 bp, Unknown
  Bacterial polypeptide expressing nucleotide sequence isolated from the Sargasso Sea
tttagatgtcaacatagatatagcgtcagaatttagatatagaaaaaatagatttaaaaaagatactttatatgtctttgtttcacaatctggggaaacagcagatacttatgcagctttagatatttgtaacaaaaacagtatgaaaacatgtgctgttgttaatgtaattgaaagctcaatagcaagagattctaattttgttttaccaattcattgtggtcctgaaattggagttgcatcaacaaaagcatttctaggtcaaatacttgttttatatattttagctttaaaacttggatcaatgagaaatgaaattgaaaaaaaagaataccaagaaaaaattaaagacctaaaagctttgcctggcttaatagagaaaacattgcttcatgataatgatatccaagcaatatcttcaacatttaacgaagcaaaaggttcaatgtttttagggagagggtactcatatccaatagctttagaaggtgcattaaaacttaaagagctttcttacgttcatgctgaaggatatccagctggtgaaatgaaacacgggccattagctttaattgaagaaggtatgcctgtagtagttttggctcctagagataattattataaaaaaacaatttcaaacatgcaggaagttatagctagaggagcaaaagtgttattgataaccaataagagtaaagatgaagttgtgtcagaaaatatttgggaaactattgaagttgagaatacaaatgatgacttgcttccattccttttgactattccacttcaaaaacttgcgtattactctgctcttaaaaaaggttatgacattgataagcctagaaatttggctaaatctgtcactgttgaataa

SEQ ID NO: 246382 - DNA, 1009 bp, Unknown
  Bacterial polypeptide expressing nucleotide sequence isolated from the Sargasso Sea
tcttactttttagataaaggcatgacctcaagagaggcattttcaaattctttatcacgtttagagggtgcgtatgcaattgcagtaattttctcttccgaaagtgaaaaaatttatggggctagaagtggcagtccactagctgtaggttggggtgatagcgaaatgtttttaggttcagacgcgtctgctttatctaacgaaactttaaagatatcttatatggatgagggggactgggttgaattaagtaaaaatggtgcaaaattttgggataaagataataatgaggtgactcgtgatgttgtagaaacatcatttaaccctattcaatttgctaaaggaaattttcctcattatatgttgaaagaaatttacgagcagccgactgtgataggcgaaacattaaatactttttttaacccatctgattcagaaattaggttacctgaacttggtgtaaattttaatgagattgataaagttactttagttgcttgtggtagctcgttttttgcaggattagtagcaaaatattggatagagtattatgctaaagttcctgttgaagttgatatttcctctgagtttaggtatcgcgaaccacctcttactaagaatggactaacaatttttatttcacaatcaggtgaaacggctgatactttagctgctttaaggtatgctaaatcccaatctcaacatataatttccttagttaatgttcgtgaaagctccatagcaagagaaagtgatggtttgcttcttataaatgctggtcctgagatcggtgttgcttcaacaaaagcttttacatgtcaattagttactttagctgctttttcaatttcattaggagttgcaaaaaatacgatgagtgtaacaaagtcaaaaaaactatctagagcaatttcagaaataccatcaaaaatatctgatatattgagtgataatttaagtatcaaatcaattgctgaaaatctatctagtatgtcaaacgttttatata

SEQ ID NO: 246383 - DNA, 595 bp, Unknown
  Bacterial polypeptide expressing nucleotide sequence isolated from the Sargasso Sea
atgtgtggaattatagctgctgcctcaaatcgaaatgttggaaagttgcttgttcagggtctacataaaatggaataccgtggctatgattctgctggaattgctcttcatcaaacagaccaaattgctcatcttagaactctaggaaaagtaaagcttcttgaagaaaaaatgattgctgaaaagccaaaaagcaagcttggcattgctcacaccagatgggcaactcatggagaaccatcagaagaaaatgcacatccacatatgtcaaatgaaagagtgtatatcgttcacaatggaataattgagaattatctagatcttaaagattttttaaaaaaagaaggttattctttttcatctcaaacggattctgaattaatagctcaccttcttgaatatttccttaataaaggaaatagcatgttagattcaatgtattttaccaaagaaaagctcgatggcgcttatgcaatagcagctatagacaaagaagacgatcaaaatatcattattgctagatgcaaatctccacttttaataggaattggaatggatgaatttttggctgcatcagacccattggcgattggcc

SEQ ID NO: 246384 - DNA, 417 bp, Unknown
  Bacterial polypeptide expressing nucleotide sequence isolated from the Sargasso Sea
gatgtgtggaattataggcgtagcctcaactaaaccttcagtagataagctactcataggtctcttacgtcaggagtataggggctatgattcggcaggattggctatatttgatgaagcagaccagatacagatttttaaaagcactggaaaagttgctgaacttcaaaactcaattgatcaaaacccagtcaatggtaatgtgggcatagctcacacaaggtgggccactcacggtcttcctactaaaaataatgctcacccgcatcattcaaacaacaatgtttttgtaattcacaatggcattatcgaaaatcataaagaaatcagaacaaccttaaaggctttgggatatgtgtttgaatctgaaactgacactgaagttatagcgcatttaatccatgcaaaaattctcaa

SEQ ID NO: 246385 - DNA, 917 bp, Unknown
  Bacterial polypeptide expressing nucleotide sequence isolated from the Sargasso Sea
agaaaatttaaagacttctgaattagaagaagctatcacaaaaacattaaaacaacttcatggtagctttgctcttggaattgtttttaaagatatgccagatttaatagttggtgccagaagaggatcacccttagctgttggttatggtccaaatgaaaactatctaggatcagattcttatgctttaaagtctatgacaaataaaattacttatcttgatgatggtgaattttgcattgttaaaaaagatcaagttctttttttcaatgaagaaggaaaaaaagttaataaaaaaatattagaactatcatcagatcaagcaaattacgacaaaggtgactttaaacatttcatggcaaaagaaattgaagaacaaccgactacaattaaaactgggattaaagaatacgtagataatttaaataaagatataaatatcttcaattttccatggaaaattaaagatattaaatcaataactttagtaggatgtggaacagcatatcattcatgcttgatggcaaaatattggtttgaagaattaacaactttagatgttaacatagatatagcttccgaatttagatatagaaaaaatagatttaaagatgacagtttatatatctttgtttctcaatctggagaaacagctgatacatatgcagccctagatctttgtaataaaaataagatgaaaacatgcgctgttgttaatgtaatcgaaagctcaatagcaagagattctaattttgttttaccaattcattgtggtcctgaaataggagtagcatcgacaaaagcatttctaggtcaaatacttgttttatatattttagctttaaaacttggatcattaagaaaggaaattgaaaaaaaagaatatcaagaaaagattaaagatctgaaagctttgc

SEQ ID NO: 246386 - DNA, 932 bp, Unknown
  Bacterial polypeptide expressing nucleotide sequence isolated from the Sargasso Sea
gccaaaaagcaaacttggaattgctcatactcgctgggcaactcacggtcaaccttctgaagaaaatgcacacccacacgcatcaagtggagaggttcacattgttcacaacggaattatagaaaattaccttgcgcttacagaaaaattaaaaaaggccggatatgcttttcaatctgaaactgactcagaggtgatagcacacttacttcatcaacacatacaatcaagcggcgatttgctgtcggccatgcatgacgctataaaagagcttgatggcgcttacgccatagcggccattcatattaaaaataaaaacagattagttgttgcaagaaacaagagtccattattgattgggttaggcttagaggaaaattttgttgcttcggatccattagctttatcacaacttaccaatgaatttttatttcttgaagatggcgatgttgcagaaataaccaagcaaagttatcaagtgttcgacggaaagagttctcctgttaaaagagatgtaactgaaatagacatagcagttaatacggttactaaaggaggatattctcactttatggagaaagaaatatatgaacagcctgatgctgttgccaataccataaatgggaaacttggagatgaagacgtattagataatatatttggtttaggttcaacagagctttttagcaagattaaaagaattcagtttgtagcatgtggaacaagcttacatgcaggcaaagtaggaaggttttggtttgagcgaatagctaaaattccatgttatgtagattttgcgagtgagtatagatatagagagcctcttgtagaagaaggcacattgtttgttaccatctcacaatccggagaaacagcagatactttggctgccctcaaatacgcaaaagaaaaagattatttatgcacattat

SEQ ID NO: 246387 - DNA, 436 bp, Unknown
  Bacterial polypeptide expressing nucleotide sequence isolated from the Sargasso Sea
tatgtgtggaataatagctgcagcttctgaacgaaatgttggaaaattgctagtcaaggggctgcataagatggagtataggggctatgactctgctggaattgcacttcatcagaaagatcaaatagcccatctaagaacactcggaaaagtaaaacttcttgaagagaagatgatttctgaaaaaccaaaaagcaaacttgggattgcacatactcgatgggcaacacatggagaaccatcagaagaaaacgcacatcctcacaaatctaacgaaagagtctatattgttcacaacggcattattgaaaactatatagaacttaaaaactttttaaaaaaaaaaggatacaatttttcctcacaaacagattcagagttaattgctcacatgatcgaatacttcctaggccaaggaaacaacatgctagattca

SEQ ID NO: 246388 - DNA, 1090 bp, Unknown
  Bacterial polypeptide expressing nucleotide sequence isolated from the Sargasso Sea
aaatgacgcttttgagatatttgatcatcaaaatgaatttataaatagaaaatctcaaataattgataagaccgttaccttagcagaaaaaggtgtatttaaacactttatgtcaaaagaaattcatgaacagccaagtgttattcaagattctattagtcattttattaataacgaagatttaacagtgaatttaccaaaattcccatttaatattactaatttaaaaaatatcactttagttgcatgcggaagctcatattattctggattagttgcccgtgaatggtttgagaaacttgctcgcgtgaaggttgatgttgaaattgcttctgagtttaggtatcgagaagctccgatggattcaagcggactaactgtatttatttctcaatcaggtgaaacagctgatactttggcagccttgaagcattgtaaaaaacttaatcaaaaaactatttcaatagtgaatgttccaaattcttctatgtgtagaaattcagacacatctcttaaaatttttgctggacctgagataggtgttgcatcgaccaaggcatttacctgtcagcttgttgttttagcatctttagctattcatattggaaggattaacggcaacctatcagatgatgatgaaaataattatgtaaaatcattacttgatattccaagattaatttctaatgttttggatcaggaagaagaccttattaaaattgtaaaagaattaaatccaattaaaaatgctttatatcttggaagagggcaaatgtatcctgttgctcttgagggggcattaaaactaaaggaaatttcttatattcatgcggaaggttatcctgctggagaaatgaagcatggtccaatagctcttttagaaaagggtcttcctgtaataattggtgcgccatcatttaacttatttgataaaacagcatctaatctttatgaagttatcgcaagagatggaaatgttttgcttataactgatcaagaaggtttaaatcatcttggagataccacaaaaaaaataaaatcatttattggtgatgaagctaatattattactgcaccatttatttatact

SEQ ID NO: 246389 - DNA, 500 bp, Unknown
  Bacterial polypeptide expressing nucleotide sequence isolated from the Sargasso Sea
aaaaaacacttactatgtggaaaataaaattaactctattgcaaatatattttctgatgctaaaggatgcatgtttttaggaagaggaagttcatttcctattgcattagaaggagctcttaagttaaaagagttatcctacgttcatgccgaaggttatcccgcgggagaaatgaaacatggtccattggctttaattgaagatggaatgcctgttgttgtattggctccaaaagattcatattataaaaagaccatttcaaatatgcaggaagtaattgctagaggtgctaaagtattacttgttacaaacaaaagtgaagatgatgtgttttcagaaaatatatgggagacaattgaagtagagttgagcaatagtgatctaatcccaattttgttaactatacctctgcaaaaattagcttattattcagctttgaaaaaaggttttgatattgataagcctcgtaatctagcaaaatctgttactgttgaataaa

SEQ ID NO: 246390 - DNA, 328 bp, Unknown
  Bacterial polypeptide expressing nucleotide sequence isolated from the Sargasso Sea
cgagctgaaacacggtccattagcgctgattgacgccgatatgccaattattgtggtcgcgccaaacaacgagctgctggaaaaactgcagtcaaacgtggaagaagtgcgtgcccgtggcggtatcctgtacgtattcgccgacgtggatgctcactttaaatcagacgctactcagcgtgtgatcagcgtgccacacgtgcacccactgattgcaccaatcatctacaccatcccgctgcagttattaagctactatgttgccattatcaaaggcacggacgtagaccagccacgtaacttagccaaaagcgttacggtcgagtaa

SEQ ID NO: 246391 - DNA, 921 bp, Unknown
  Bacterial polypeptide expressing nucleotide sequence isolated from the Sargasso Sea
attagcggtttttagtgatggtaatattatggaaagaaaaactcagggcaaactttataatttgattcaaagactcaaaaatgatcctattgatggtcatgttggtatcgggcatactcgttgggctactcatgggatcccttcagaaaaaaatgcacacccccattcttcatctttagtatcagttgttcataatggaataattgaaaatgcagaagaaattaaaaaagatataaagtcagattataattttctctccgatactgactctgaagtaattacagctctacttactcaaaatctaaataaagaaaatgattattataaagcagttagtctgacagttcagagattagaaggatcatatgcattagcaattatgattaaagacctaaaagatactattattggtgctaaaaaaggcagccctttagttgttggccgtggagaaaagggaagctttgtgggatctgatacaatcgcattaagttcagttgcaactgaggtttgttatcttgaagatggagatattgtcatagttgataatcacaatattcaaatttttgaccagcaagagaaaagtgtaaatagagagtatgttaacctctcaatttctgaagatgatacatcaaagggaacctttaatcatttcatggaaaaagaaatacatgagcagccaaggtctgttggtgatacacttaggcagtttattgactacgataattcaattatatcgaaccccgatttaaaaattaactggcaaaaggtaaataaggtacatcttattgcttgtggtacagcttattactcttgcatgattgcaaaatatttttttgaaaaacaatcacaagttccttcagaatgtgacatggcatcagagtttcgctatagagatccaatcatcagcaaagacactttata

SEQ ID NO: 246392 - DNA, 901 bp, Unknown
  Bacterial polypeptide expressing nucleotide sequence isolated from the Sargasso Sea
actgtcaaagagttagaaggcgctttcgcgcttgctgtaataagcactcacgaacccgataaaattattgttgcaaggtctggctgtcctgttgtgattggtataggtaaaaatgagaatttcattgcatccgatatcgccgcgttgttacctgaaacaaatcagtttatgttcttagaagaaggtgatattgcagttgttgggaaacatagcatacaaatatttgataaagaaggcgttgaggttacaaggaaaatttcacaaagccgattatcgtcagacgcagctgaaaagggtaattttgatcactttatgctcaaggaaatttatgagcaatcaagtgctgttggaaatacactggatcagagaatagccgatggacgagttttacagaatgccttcggtcctgatgcagaaactgtttttgacaaagctcgaagtgttcacatcgttgcatgtggaaccagttatcatgctggattaattgcaaagtattggatagaaagcatatgccaaataccatgcagagttgaaattgccagtgagtatcgatacagaaatccagtggtgatggaggacacattattcattgctataagtcaatctggtgaaacagcagatacattggctgcattaagggcagcaaaagaagctaaatacatatctacgcttgtaatttgtaatgtcccagaaagtacaatggttagagaagccgagttagtaatgctgacaaaagctggtccggaaattggcgtggcatcaaccaaagcattcacaactcaattaaccgctctatctcttttaacaattgtaattgcgaggcgttctggcctggatcaaggcagtgaaaaagagatggttaatcaattactcgagctgccaactttgattgatcaaattc

SEQ ID NO: 246393 - DNA, 244 bp, Unknown
  Bacterial polypeptide expressing nucleotide sequence isolated from the Sargasso Sea
gatgtctaatatgcaggaagtaattgcaagaggggcaaaggttttactaataacaaataaaaataaagatgaagttgtttctgaaaacatttgggagcaaatagaagttgataaattacatgatgaattaattccttttctagtaacaatacctctacagaaactcgctttttactcggcacttgaaaaaggatatgatatagataaaccaagaaatttagcaaaatctgttactgttgaataa

SEQ ID NO: 246394 - DNA, 806 bp, Unknown
  Bacterial polypeptide expressing nucleotide sequence isolated from the Sargasso Sea
aacattaaaaaatggaattaatgaatatgtagatacattaaataatgatattaatatttataattttccttggaaaatgaatgaaatttcttcagtaactttaattggttgtggaacagcctatcattcttgtctacttgcaaaatactggttcgaagaattaacttcattagatgttaatgtagatattgcttcagagtttagatatagaaaaaatagatttaagaaagagactttatatatatttgtatctcaatctggtgaaacagcagatacttatgcagcattagatttgtgtaatcaaaatgatatgaaaacatgtgctgttgtaaatgtcattgagagttctattgctagagactcagaatttgttttaccaatacattgtgggaccgagataggggttgcctctacaaaagcctttttgggtcaaatccttatattatacattttagctttaaaactaggattattaagaaaagatttaaaaaaagagttattcaatgaaaaacttaaagatcttaaatctcttcctaaattagcagaaaagactttattgaccgataataagatacagacaatatctaatacctttaacgaggccaaaggttcaatgtttttaggaaggggtttttcttttccaatagcattagaaggtgcattaaagttaaaagaactgtcctatatccatgctgaaggctatccagctggtgaaatgaaacatggaccgcttgctctaatcgaagagggaatgccagttgttgtattagcaccgagagacaattattataaaaaaactatttcta

SEQ ID NO: 246395 - DNA, 325 bp, Unknown
  Bacterial polypeptide expressing nucleotide sequence isolated from the Sargasso Sea
aaacatggacctttggccttaatagaagagggcatgccagtagttgttttggctcctagagataattattacaaaaaaacaatttcgaatatgcaggaagttattgctagaggagcaaaagtattattgataacaaataaaagcaaagatgaagttgtgtcagaaaatatttgggaaactattgaggttgagaatacaaatgatgatttgcttccattccttttgacaataccgcttcaaaaacttgcttattactctgctcttaaaaaaggttatgacattgataagccaagaaatttggctaaatctgtcactgttgaataaa

SEQ ID NO: 246396 - DNA, 1025 bp, Unknown
  Bacterial polypeptide expressing nucleotide sequence isolated from the Sargasso Sea
atcgatgcctgtggccttgccgtttgacgaagccttctacgccggtattgaacggatcgagatcctggcttgcggcaccagtcgccatgcggctctggtgggtgcccatctgctggagcaattcgcaggattgcccacggccgttcactacgccagtgaattccgatacgcgccgccgccgctggcccccaacaccctcaccattggtgtcacccaatccggggaaacggccgacaccctggcggctttggcgatggaggcccagcgccgttgcgcccactccgacccggcctatgcctcgcgccagctgggggtgaccaaccgtccggagagttcactctcccgtcaagttcctcacatcctggacatcggtgccggagttgaagtgggcgtggcggccactaaaactttcatgggacagctgttggctttctatggtctggcgatggccttcgcgacgcgcagtggcagtcgttcagccgctgaaatccagacgctggcggatgaattgcggacgcttcctcagcagctgcaggagctggtgtcacttcatgaccagcgctcggaagccctggcccatcgctttgccgaaacccaggacgtgatcttcctcggtcggggcatcaactaccccatcgcgctggagggagccctcaagctgaaagaaatcagctacatccatgccgagggctatccggccggtgaaatgaagcatggtccgattgctctcttggatgcccacgtgccggtcgtgtcgatcgcggtgccgggaacggtgttcgagaaagtgctcagcaacgcccaggaggccaaggcccgcgatgcacgcttgatcggtgtggcgcctgagggacctgacacggcgctgtttgatgacctcttgcctgtgcccgaggtgagcgagtgtctgagcccgttgctgacggtggtgcccatgcagctgttgagctatcacatcgcagcccatcggggcctggatgtggaccaaccccgcaatctggctaagagtgtgaccgtggagtgat

SEQ ID NO: 246397 - DNA, 854 bp, Unknown
  Bacterial polypeptide expressing nucleotide sequence isolated from the Sargasso Sea
attaaaaaaacaattaacacttaaaggtcataattttaaatctcaaacagatacagaggtaattgttcatttaattacagagaatttaaaaactgctgagttagaagaagctataacaaaaactttaaaacaacttcatgggagctttgctattggtattgtttttaaagattttccagatttgatagttggagcaagaagaggctctccattggctgtaggttatggtccaaatgaaaattatttaggctcagactcttatgctttaaaatcaatgacaaataaaattacttatttggatgatggtgaattttgtatagttaagaaagattatgttaatttttttaatgaggaaggaaaaaaaataaacaaaaaaattttagaactttcttcaaatgaagcaaattacgaaaaaggtgattttaaacactttatggccaaagaaattgaagaacaaccaataactttaaagacaggaataaaagaatatatagataacgttaataaagatgtaaatattttgaattttccttggaaaattgatgagattagttcgatagaattaattgggtgtggaactgcttaccattcttgtatgatggcaaaatattggtttgaagaattaacatctttagatgtgaatgtagatatagcatcagaatttagatatcgaaaaaatagatttaaaaatgattgtttatatatatttgtttcacaatcaggagaaacagctgacacttatgctgcattagatatatgtaaaaaaaataaaatgaaaacttgtgctatagtgaatgttattgaaagctctatagctagagattctaattatgttttacccattcattgtggtc

SEQ ID NO: 246398 - DNA, 865 bp, Unknown
  Bacterial polypeptide expressing nucleotide sequence isolated from the Sargasso Sea
gatgtgttcaattataggctattctggaagtgaaattgcagctccaattattgtaaaaggattgaaaagaatggagtatagaggatatgacagtgtaggagttgcaacagaatcagaaaatcaaattgagttaaaaaaaggaactggtaaagtaactgaagtaaattcaaaatttcaactagacacactaccaggcagaataggcataggccatactagatgggcaactcatggaaaagtaacagatcttaatgcacacccacatccaagtaattcaggaaaaatcgcaatagtgcataatggaataattgaaaattttgaagaactcaaaaagcaactagaggacgagggatatagtttcaaaagtgagacagatagtgagataattgcaaacttgcttcaaaaaaattatgagtctacaaaaaatgttaaagatacaatcatgaaaacagtttctgccataaaaggccattacgcatttgtagcaatgtttgaaaatggtcaacttgcagcagccagatttcatgaaccgttaataatgggagttggacaagaaaatattttcttatcaagtgatgtattaggattcattgaatatactgataatgcgatatatatgaaaagtggaaattttgtaattttagagaacagagaatttgaaatattagattttaatggagaaaagattaaacacgaaataacaaaagtttcaaaagaatttggagatgcatacaaaggggattatgcacatttcacattaaaagaaatttatgaacaaccagatttgatcttaaaagcaggagaaagaacaatagaaggtttagaagaagccagtagattacataagaaatgcaaagaatatcta

SEQ ID NO: 246399 - DNA, 799 bp, Unknown
  Bacterial polypeptide expressing nucleotide sequence isolated from the Sargasso Sea
atgtgtggtattattggtatcgcaagtaacaaatcagtatcgacaaatattattagcgcattaaaaaaattagaatatcgtggatatgactcagctggtttagcaactattgcaaatggacaaatcaatgaaaaaaaatgtcaaggtagagtagaaaagctagaaaatattttatttcaaaacccaagcaaaggtaaccttggaatcggtcacgtcagatgggccactcatggtatacccaacacagtaaatgcccatccacactctagtgaaattgtctcagttgtgcacaatggaataatagaaaactcagaagaattaaaaaaaaatttagaaaaatctggtaaaaaatttaaatctcaaactgatacggaggtaattacagttttattaactgaaaagttagaaaaatacgatccactaaatgccgtattcgaaacccttgaaatgctgaaaggaagctttgctttaggaattatttttaaaaattataaaaattatgtcattggtgctagaagaggaagcccacttgcagtcggttactctaacaacgaaaactatcttggttcggactcttatgcattaaaaacaatgacaaataaaatttcttaccttgatgacggggatgtatgcgtattaaccaaagatgatattaaattttataattcaaaaaaaaatataattaataaagaaatctttactctttcagaggataaatcagcaattagcaaaggaaattataaaaatttcatgataaaagaaattttcgagcaacctgtcactaccaaaacatgttgaa

SEQ ID NO: 246400 - DNA, 460 bp, Unknown
  Bacterial polypeptide expressing nucleotide sequence isolated from the Sargasso Sea
atgtgtggaattgtcggtattgctagcaaaaatgattgtattgataatataatatctggattatactctcttgagtatcgaggatatgattcttcaggattagcaacaataaaaaataatcattttgaatataataaaaatattggtaaaatttctaatttagaaaaatctgttaaaaataataaattaagtggagacgttgtaattgctcacactagatgggcaactcatggtaagccttctataaaaaattgtcatccatttataaaggataactgtgttttagttcataatggtatcatagaaaattatacagatttaataaattattattctataaaacaaaaaaatattaagtcagaaacagactctgaaattattgctgaaatatataacaaattattaaatgaatttaataatccaatggaagctatcaaaaatctaaataaaaaaataatag

SEQ ID NO: 246401 - DNA, 905 bp, Unknown
  Bacterial polypeptide expressing nucleotide sequence isolated from the Sargasso Sea
cttttgctggaggctctgcagcgggtgctgcccaagttgcaaggggcctatgccctggcggtgatctggaatcaggcgccgggtgcacttgtggtggctcgcaaggcggcacccctcttgatcgggttgggtgaaggggaattcctctgtgccagcgacacaccggccttagcaggtttcacacgcacgatcttgccgatggaagacggcgaggtggccttgctctcaccccttggcgttgagctttacgacgccgcaggggtgcgccagcaacgcatgcccacccagctcagcggcgtggatcatgtggcggacaaacgcgagttccgccacttcatgctcaaggaaatccatgagcaaccggaaaccgcggagctgtgggtggcccgccatctgccccaggggctggcgactgagcagccggtggctctgccgatggacgatgccttctacgcagggatcgagcggattcagatcctggcctgcggcaccagccgccacgccgcgatggtgggggcctacctgctggagcagttcgcaggaatacccacatcggtgcattacgccagtgaattccgttacgccccgccgccgctggctccccacaccctcaccattggcgtcacccagtccggtgaaacggcagacaccttggccgccctggccatggaggcggagcggcgtctggcccatggggatccggcctttgccccccgccaactgggggtgaccaaccgtccggaaagctccctgtcgcgtcaggtgccgcacattctcgatatcggggccggtatcgaggtcggtgtggccgccaccaagaccttcctcggccagctcttggctttctatggcttggccatggcgtttgctgcccgtcgtggcgcacgctccgcggctgagatcaa

SEQ ID NO: 246402 - DNA, 1024 bp, Unknown
  Bacterial polypeptide expressing nucleotide sequence isolated from the Sargasso Sea
acaagataatcaaaattatgacaaaggtgattataaacattatatggctaaagaaatagatgaacaaccaattacgataaaaaattgtgtgaacgaatatatcgataaaataaatagacaaataaatatttacaattttccttggaaaattaatcaactttcatcagttattttaatcggttgtggaacagcgtaccactcgtgtttagtagcaaaatactggtttgaagagcatacaacattggatgttagcatagatattgcttcagaatttagatacagaaaacttaaatttaaaactgactgcttatatgtttttgtatcacaatctggcgaaacagcggatacatatgcggctctagatttatgtaaaaaaaacaaaatgaaaacttgctcaattataaatgttgttgaaagttcaatagccagagaaacagatcttgtattacctattcattgtggtcctgaaattggagttgcatctactaaggcttttttaggacaaatgttggttttgtatatgttgtgcttaaaaatatcatttgatcaaaaagtaattactaaaaaaaattaccaagaaaaaataaaaaatttactttccttatctaatttatgtaaaaaaactttattaacagatagtaaaatccaaaaaactagtagaacatttattgaagctaaaggatctatgtttttaggtagaggttattcatatcctatagcattggaaggagcattaaaattaaaagaacttgcctatgttcatgcagaaggatatccggcaggtgaaatgaaacatggtccgctggcattgattgaagaaggcatgcccgtagtcgttcttgctcctagagataatcattataaaaaaacaatttcaaatatgcaggaagtaattgctagaggagccaaagttttgctaataacaaataaaagtaaagacgaaatccaatctgaaaatatttgggaaactatagaagttgaatatttgtctgaagatctttttccttttttaacaacaatacct

SEQ ID NO: 246403 - DNA, 421 bp, Unknown
  Bacterial polypeptide expressing nucleotide sequence isolated from the Sargasso Sea
atgtgtggaataattggtatagcaagtaataaatctgtttcgatgaatattataaattctttgaaaaaactagagtatagaggctacgactcagcgggtttagccactcttaatattgataggatagatgaaaaaaaatgttctggcagggtagaggagttggaaaaaattttatttaaaactccctcaaatggtaatgttggtattgggcatgttagatgggcaactcatggtataccaagtatagttaacgcgcatcctcattcatcagaaatagtctctgttgttcataacggaattatagaaaactctgatgagataaaaaaaagtttagaaaacaaagggttaagatttaaatctcaaacagatacggaggttataacactattaattacagaagcattaaaagataacgaacctc

SEQ ID NO: 246404 - DNA, 451 bp, Unknown
  Bacterial polypeptide expressing nucleotide sequence isolated from the Sargasso Sea
atgtgcggtattgttggtggtgtttcagatagaaatgttttaccaattttaattgaaggactaaaaagactggaatatcgagggtatgattctgctggagttgcttttagagaaaacagcaaaatttcacttataaaagcaaagggcagagttctagatctcgagaataaacttcctgaaatgaaagttaaaagcaatcaaggaattgcacatactagatgggcaacacatggcgtgccgtcagaaaaaaatgcgcacccacaaatttctgaaaataagatttttgttgttcataacggaattattgaaaatcacttaaaccttaaagaaaaactgcaaagtgaaggagtaaaatttagatccgatactgatactgaagttgtagctcatctcattaacctgcatatgcaaaggggtatggatttcgattcggcaacacttaaaagctatt

SEQ ID NO: 246405 - DNA, 640 bp, Unknown
  Bacterial polypeptide expressing nucleotide sequence isolated from the Sargasso Sea
aattggcgtagcatctaccaaagctttcactactcagctcacagcgttcttaatgcttaccctagcactgggcaaagaaaacggcatgacagacgctgacagcaaagctattgtctctgcgcttcatagtctacctgcaaagcttgaagagaccttagcgataactggtggtattgaagatttagctgaagaatttgcagataagaaccacagcttgttcctaggtcgtggcgaccaataccctattgccatggaaggggcgctaaagcttaaagagatttcttatattcatgcggaagcgtatgcgtctggtgaattgaaacacggcccacttgcgcttattgatgacgaaatgcccgttattgtggttgcaccgaacaacgaactcctcgagaagctaaagtcgaacgttgaagaagtacgtgcccgtggcggcatcatgtacgtatttgcggataaggatgcggcgtttgaaggtgatgaaaccatgcgcgttatcaacgtaccgcactgcgacgaaccaatcgcacctatcatttataccttgccactacagctattgagctactacgttgcattaatcaaaggtacagacgttgaccagccgcgtaacttggcgaagtcagttacggtggaataa

SEQ ID NO: 246406 - DNA, 940 bp, Unknown
  Bacterial polypeptide expressing nucleotide sequence isolated from the Sargasso Sea
gatgtttttggaagaaaattttgatttaaaaaatttaaaaggtaatattggaattggtcatgttagatgggccactcatggagcaccaaacagtattaatgctcacccacattcttctgataatgtttctgttgtgcacaatggaattattgaaaattcaacaatattaaaaaaatatctgacaagcaaaggtcatatatttaaatctcaaactgacacagaagttatagtccatttaattacagaaaatttaaaaacagatgaattagatttagctattacaaaaacattaaaacagcttcatggaagttttgccttaggaatcatttttaaagatagtccaaacttaattgttggggccagaagaggttcacccttagctgttggttatggaccaaatgaaaattatttaggatcagattcatatgcattaaaggcgatgacaaataaaattacatatcttgatgatggcgaattttgtatcattagaaatgatcaagtccttttttttaatgaagatggaaaaaagataaataaaaaaattatggaactatcctcagatgaatctagctatgaaaaaggtgaatttaaacattttatggctaaggaaatcgaagagcaaccaacaacaattaaaactggaattaaagaatatatagataaaacaaatttagagataaatatttataattttccgtggaaagtagatgaaattaattcaattaccttaataggttgtggtactgcttaccactcatgtctgatggcaaaatattggtttgaaaatttaactcaactcgacgtaaatattgatattgcttcagaatttagataccgaaaaaatagatttaaaaaagattctttatatatatttgtatcacaatctggagaaacagcagatacttatgcagcactagaccttttaacaaaaataaaatga

SEQ ID NO: 246407 - DNA, 718 bp, Unknown
  Bacterial polypeptide expressing nucleotide sequence isolated from the Sargasso Sea
tatgtgtggaatagtaagttactacggaaagaaaaactcagtaccttttttattaaatggactcagaagattggaatatcgcggttacgattcggctgggatagctataatgaaagatggctctataaaaactgtcaaaaaagcaggaaaagttgataggcttcataaaaaaataaaagaatctcctatcaatggttcaattggtattggacatacacgatgggctacgcatggagagcctaatgacacaaatgctcatccacaccaagataaaacagggaagatttttattattcacaatggaataattgaaaatttttcaacattaaaagaagtattaattcgaaaaggtttcatttttaaaagtgaaaccgatactgaagttttggtaaatctaatttctgacatatattatgctgatggtctaaattttgaacaagctgttgaagcagccctaaatcaagttatcggaacttatggtatagttactttttgcagtgatgagccaaataaaattgtggcagctcgccatggaagcccccttgtcttaggtgtgggaaacgatgaatattttattgcgagtgacgcatctccaatcgtagagcatacaaggaacgtaatatatctagatgaaggcgaaatcgttactatcgatgataatggttactctattagatcaatgcatgatgatactattgtaaatagagaaactacagaa

SEQ ID NO: 246408 - DNA, 886 bp, Unknown
  Bacterial polypeptide expressing nucleotide sequence isolated from the Sargasso Sea
gtacagaggatacgattctgctggacttgcaatttttgacgaatcagaagaaataaaagtttataaaagcacggggaaggtctcagagcttcaaaactcaattgaccagaaccctgttaatggaaatactggtatagcacataccagatgggccacacacggtcttccaaccagagaaaatgctcaccctcaccactctaataaggaaatttacgttatccataacggaatcattgaaaaccaccaagaaataagaaccacgctaaaggcgttgggttatgttttcgaatcagagacggatacagaggtcatagcacacttgatacatgccaagatgtcagaaaacaatactcccttggttgagtcattgagggctgcggttaaagatttaaggggagcgtatgccataggagctgtgtcatctaaagagcctggtcttttagcggcagcaagaaaaggcagcccattagttattggccaaggtcaaggagagaattttattgcttcagatcagctagctcttgctgactttgctgagaactttgttttcctagaagagggcgacttagcagagataactccaactgatacaaaattttggaacattgatgatgaacaagtagacagaccagtcgtagtggcaaaatctctcggtgaaacgatagacaaaggtgagtatagacactttatgttaaaagagatcaaggagcagcccgagaagataaaaggacttttagaaggtcagttaaccgaatccggagtgcaggaagaaatattcggtccagaagctccagaaatttttaaaaaagtagagtccgtgcaaattgttgcttgcggaactagttaccatgctggcaccgttgctaagtactggctggaaggatta

SEQ ID NO: 246409 - DNA, 517 bp, Unknown
  Bacterial polypeptide expressing nucleotide sequence isolated from the Sargasso Sea
tatgtgtggaattgtaggaataacaagtacaaaatctgttaccaattcaatactaaactctctaagaaaacttgagtataggggatacgactcatctggtatagcaactttgtatgaaggaaatatcaacgaagttaaatgcgaaggtagagtagactctcttgaagaaaatttaaataaattaaaactattaggaaatgtcggaataggacatgtaagatgggctacccatggagtgccgagcgctatcaatgctcatccacattcatctgaaaacgtttctgttgttcataatggaattattgaaaattcgacgttacttaaaaaacttttaattaaaaaaggccatttatttaaatcacaaaccgacacagaggtaattactcatttaattacagagtatttaaaaaaaaatgatttaaaaacatcaattataaaaatgcttaaaagattgcacggtagttttgcattaggaatcatatttaagaatcaaccagatgtaattgttggagcaaga

SEQ ID NO: 246410 - DNA, 982 bp, Unknown
  Bacterial polypeptide expressing nucleotide sequence isolated from the Sargasso Sea
tatgcaatatttgatgaaaacaaaaaagcagtgaaagagaaaattactgagatagacatttcaagccaagctacctctaagggtgacttcaagcacttcatggaaaaagaaatttacgaacaaccccaagctattttgaatactattgatggaagagttggaggtgatgacgttttagataatatctttggattaggctcttcggatatttttgaaaaagttaaaagaattcaagttgtagcatgcgggacgagtctccatgctggcagagtagcagctaattggttttcagcgatttcagagctgccaacgcaaatagattatgcgtctgaatatagatacagaaaccctcatgttgatgaagactctttactagttacaatttcacagtcaggcgagacggcagatacacttgctgcattaaggtacgcaaaagaaaaagactatttatcaacactaacaatttgtaatgttccaactagctcccttgcaagagagtccgactattctatttttacaaatgcaggccctgaaataggtgtggcatcgaccaaagcattcacgacccagctcgccgctttaatgttattagctttgtctttagctaaaagcagaggtaaaaatccaaaattaagaaccagagtaattacagccatgcgctcattagcggacacagttgaagaaactttaaaacttaaagatgccattcttgagattgctccagaaatagcaaacaaagataatgcattatttttaggtagaggcattttttacccaattgctaaagagggtgcattgaagctaaaagaaatttcatatattcatgccgaggcttatccagccggcgagttaaaacacggcccactggctctaatagatgaagatatgccagtaatcgcgttggctccagaaagcgagattgctgagaaacttgtttcaaaccttgaagaagttaaagctagaggcggaaccctttatgtat

SEQ ID NO: 246411 - DNA, 978 bp, Unknown
  Bacterial polypeptide expressing nucleotide sequence isolated from the Sargasso Sea
gatgctcactcaatagaccatttaacccaaagaataatttatttagaggatggtgatcatgcgttaattaaatttgatgatgtcgaaatttttaatgaaaacgaagaaaaagttaatagaaaagttattaatataaaagctgaaattggtttaataacaaaaggtggttacaaacattttatggaaaaggaaatatttgaacaaccctcagttattcctcaaacaatttcgacatttattaataataactctgatatcaaattagatctaaataaatttggatttaaaaataaaaatactttgctaattgctgctgctggaactagttactatgctgcgatggtaggtaaatattggatagaacatattgctgatttacctgtcataattgatttagcatctgaatatagatatcgaaagccctctgtttttggtcaaagtgctatgttggtcatttcacaatcaggtgaaagtttggatacacttatggcattgaggcatggtaaagagcttggtctaaatactaatgcaattgtaaacgttgaaggtagtacaatagacagagaagccgattatagtttatatacaagagtcggagcagaaataggtgtagcaagtacgaaatcttttacttctcagttagttattttatttataatagctatcgccctaggaaaaaaatttaataatttcaaattaagccaaatacaaaaaatttgtaactatatgcatgctttacctagtgcaattgctcaaatgttaaatatggaaaatgaaattaaatccgtagcacagaatataaaaaatgtaaaaagcataatttttcttgggagaggactattgtatcctcttgcattagagggtgcattgaaattaaaagaaattagttatattcacgcagaaagttttgcagctggagaaatgaaacatggtccaattgctttaatagaagaccaagtgccagtaattatgttttta

SEQ ID NO: 246412 - DNA, 640 bp, Unknown
  Bacterial polypeptide expressing nucleotide sequence isolated from the Sargasso Sea
atgtgtggaattgttggcgctgttgccgaacgtaatgtcgttgagatccttcttgaaggactaaaaaggctggagtatcgcggctacgattcagccggtgtagctttacttaaaaacgacggcacgctcacccgtattcgccgcacgggcaaagtgcaagagttagccgatgccgttgcagaaggcgaagccttgggaactacaggtattgcacatacccgttgggcaactcacggcggtgtgacagaagcgaacgctcaccctcatttctcaaccgagcgcgtagccgtggttcacaacggtattattgaaaactacgtgaacttaaaagggcagcttaaagagcaaggctacacctttaccagcgacaccgataccgagaccattgcgcacaccgtgcatgaagagcttaagtcgggcaaagccctgcttgatgcagtacaaagcgcggtaaaaacttttcacggtgcttatggcacagtgattatggataaagaagatccaagtcgcgtggtggtagcgcgttcaggcagcccgctcgttattggtttagggcttggcgaaaactttattgcgtcagaccaaatggcgctattgccggttacccgccgctttatctttttagaagagggtgaatagc

SEQ ID NO: 246413 - DNA, 370 bp, Unknown
  Bacterial polypeptide expressing nucleotide sequence isolated from the Sargasso Sea
aatgtgtggaatagttggaattacaagctctaaagaggtcattcccagaattataagttcattaaaaaaacttgagtatagaggctacgactctgcaggtttagcaacactttcaaatggaaatataaatgaggtcaaatgtgagggtagagtagacgctttagagaaaaacattatacaaactaaaatatctggctctattggtatcggacacgttagatgggccacacatggaaaacctagttcaattaatgcacatcctcattcatcagaagatgtatctgtagttcacaatggtataattgagaattcaactattctaaaaaaggtattagaaaataaaggctataagtttaaatctcaaacagat

SEQ ID NO: 246414 - DNA, 826 bp, Unknown
  Bacterial polypeptide expressing nucleotide sequence isolated from the Sargasso Sea
gagcttccaactcaaatcgattatgcttcggaatacagatatagaaatcctcatgttgatgaagactcacttttagtaacaatttcacaatctggtgaaactgcagacacattggctgccctcagatacgcagaagaaaaagattacttatctactctttgtatatgcaatgttccaacaagctcgctagctagggagtcagaatattcaatatttacaaacgctggaccagaaattggagttgcttctactaaagcttttactactcagcttgcggcattaatgttattagctctatctttggcaaaaagcagaaatagaaatcctaaattaagaaaaagaataattactgcgttaagatcattgccagatacagttcaggaaacattaaaacttaaagatgcaatattagaaatagcacctgaaattgcatcgaaagataatgctttgttccttggaagaggtattttttatccaattgcaaaagaaggagccttaaaattaaaagaaatttcttacattcatgctgaggcttatccagcaggcgaacttaaacacggtccacttgcactaattgatgaggagattcctgttattgcactagcaccagagagtgagattgcagaaaaattagtctctaatcttgaagaagtaaaagctagaggcgggactctatatgtgttttctgatccctcaatctcaatggatttaaaatctggcagattaataaatatgcctaaatgtgattttctcttaactcctattatttacacaattcctcttcaaatactttcttatgaagttgcattacttagaggaactgata

SEQ ID NO: 246415 - DNA, 832 bp, Unknown
  Bacterial polypeptide expressing nucleotide sequence isolated from the Sargasso Sea
tcatcagtggttttaattggatgcggaacagcatatcattcatgccttgttgctaagtattggtttgagcaaaatacaagtttagatgtaagtgttgatatagcttctgagtttagataccgaaaaattaaatttaaaaaagattgcctttacgtttttgtttcgcaatcaggtgaaaccgcggatacttttgctgcattagatttatgcaaaaagaattatgttagaacttgtgctgtcgtaaatgttgttgaaagttcaatcgcaagagattctgatctagttttacctatacattgtggacctgaagttggtgttgcatctacaaaggctttcttgggacaaatgttagtcctttatttattatgtacaaaaatttcttatgaacaaaaatcaattaataaaaaggattatcaaaagaaaataaaagatttactgtctttatctaaatctgcaaaaaatactttaaatattgaagataaaattcaaactcttggaaaagactttgctaattctaaaggatcaatgtttcttggcagaggatattcatatccaattgcacttgaaggagctttaaaacttaaagaacttgcttatgttcacgctgaaggttatccagcgggtgaaatgaaacacggacctcttgcacttatagaggaaggtatgccagtcgtggtaattgctccaagagacgagcattacaaaaaaactatttcaaacatgcaagaagttatatctagaggagcaaaagttttactaataacaaataaaagtactgatgaaatttattcagaaaatatatgggaacaaattgaagtagatactatatcta

SEQ ID NO: 246416 - DNA, 637 bp, Unknown
  Bacterial polypeptide expressing nucleotide sequence isolated from the Sargasso Sea
tgcttctacaaaagcttttttggggcaaatgcttgttctttatttgttgtgtacaaaaatttcttacgagcaaagatcaattttgaaaaaagtttataaaaagaaaattaaagatttactgtcattatctaaatctacaaaagaaactttaaatgtagataacaaaatttataatttaggaaaagattttgctaattccaaaggatctatgtttttaggaagaggctactcttatccaattgctcttgagggtgctttaaaacttaaggaacttgcttatgtacatgctgagggatatccagctggtgaaatgaaacatggtcctcttgccttaatagaagatggtatgccagtagttgtaattgcaccaagagatgaatattacaaaaaaacaatttctaatatgcaagaagtaatatcgagaggcgcaaaagtattacttattacaaataagagcacagatgaaattttttctgaaaatatttgggagaaaattgaagttgaaaatatatctgacgagttactaccttttttaactacaatccctttacaaaaattggcatattactctgctttggatagaggctttgatattgataaacctagaaatcttgctaaatcggttactgttgaataa

SEQ ID NO: 246417 - DNA, 814 bp, Unknown
  Bacterial polypeptide expressing nucleotide sequence isolated from the Sargasso Sea
gatgtgtggtataataggtataaacagtaataagccagtttcaggaacaattataaattctcttaaaaaattagaatatagaggttatgactctgcaggtattgcgactctttcaaatggtcaaataaatgaagttaagtctgaaggtagggtagataaccttgaaaaaaactctctagttaaaaatatggatggaacaattggtattggtcatgtgagatgggcaacacatgggttaccgaacagtattaacgctcaccctcactcttctcaaaatgtatctgttgttcataatggaattatagaaaattcaacattattaaaaaaatttttagttggtcatggtcacaaatttaaatcacaaacagatactgaagtgattgttcacttaattacagagaatcttaaaacagaaaatattgttaactcaataaaaaaaactttaaaagctttgcatggaagttttgctttaggaatcatatttaaagatcaaccagatttaataattggcgctagaagaggttctcctttagcagttggatatggtccaaatgaaaactatttaggttctgactcttatgcacttaaatcaatgactaataagattacttatttaaacgatggtgagttttgtgtaattaaaaaagatcatgttgaattttttgatgaagaaggagttaaagtaaataaaaaagttttagaattatcttccgaagaaaaaaaatacgataaaggcgattacaaacatttcatggcaaaagagatagaagaacaaccaactactcttaaaaatggaataaaagaatatctagat

SEQ ID NO: 246418 - DNA, 838 bp, Unknown
  Bacterial polypeptide expressing nucleotide sequence isolated from the Sargasso Sea
gtggagctctacgacggcgacggcgtccgtcagcagcggatgccgaccctgctgacaggaatgaaccatgtggtggacaagcgggagttccgccatttcatgctcaaggagatccatgagcagccagagacggcggcactgtgggtgtctcgccatctgcctgcggggctgccggcatcgatgcccgtggccttgccgtttgacgaggccttctacgccggcatcgaacgaatcgagatcctggcctgcggcaccagtcgccatgcggctctggtgggtgcccatctgctggagcaattcgcaggattgcccacgtctgttcactacgccagtgaattccgatacgcgccgccgccgctggcccccaacaccctcaccatcggtgtcacacaatccggcgaaacggccgacaccctggcggccctggcgatggaggcccagcgccgcagcgcccaccctgacccggcctatgccccgcgccagctgggggtgaccaaccgtccggagagttcgctctcccgccaggtcccccacatcctggacatcggtgccggcattgaagtgggcgtggcggccaccaaaaccttcatggggcagttgctcgccttctacggcctggccatttccttcgccgcgcgccgtggcagccgctcagaagcagagattcaggctctggtggatgaactgcgcaggcttcctcagcagctgcagaagctcgtgtccctccatgatcagcgctcggaagaactggcccatcgcttcgccgaaacccaggacgtgatttttctgggtcgcggcatcaataaccccatcgcccttgaaggagccctcaagctca

SEQ ID NO: 246419 - DNA, 679 bp, Unknown
  Bacterial polypeptide expressing nucleotide sequence isolated from the Sargasso Sea
cgattttgttttcctattcatgctggtccagagattggagtagcttctaccaaagcattcactgggcaaatgttagtactctatattttagctattaaaatctcagaaattaggaaagaaataacagaaaaagattataacaaaaaaattaatgatttaaaaaaacttccagatttaattaaaaaaacaataaattattgtcaggataatactccaattattgctaaggattttttaaaagcaaaaggagcgatgtttttgggcagaggtttatcttttcctatggccttggaaggtgctttaaaacttaaagaactgtcttatttacatgcggaaggatacccagctggtgagatgaaacatggaccacttgctttaatcgaagaaggtttaccagttgtaattttggctcccaaagacaggttttttgaaaaaacaatttcaaatatgcaggaggttattgcaagagggggtaaagtaattttaataacaaatgaaaacaaaaatattataagtgaaaatataagatttacattacagattccaaaaacgaatgatcatttaactccttttcttatgactgtaccattgcaattattagcatatcatgtggcttctctaaaaaattgtgacatcgataaacctagaaatttagcaaagtcagtaactgttgaataaa

SEQ ID NO: 246420 - DNA, 976 bp, Unknown
  Bacterial polypeptide expressing nucleotide sequence isolated from the Sargasso Sea
gatggtgaattctgtattattaaaaaagatcatgtggaattttttagtgatgaaggaactaaaataaataaaaaagttttagagttgtcctctactgaagaaaaatatgacaaaggtgattacaaacattttatggctaaagaaattgaagaacaaccaaacacaattagaaatggaattaatgagtatttagatatgtcaaataaagatattaatatttataactttccttggaaaagtagtgagattacatcaataaccttaattgggtgtggaacagcatatcattcatgtttaatggcaaaatattggtttgaggaaataacatctttagatgtaaatatagatatagcatcagaatttagatacagaaaaaatagatttaaaaaagacacactttatgtattcgtctcacaatctggagaaacagcggatacttatgctgctttagatctttgtaaacaaaacagtgttaaaacgtgtgcagttgtaaatgtagtggaaagctcgattgccagagactctgaatttgtactaccaatacattgtggaactgaaataggtgttgcttcaactaaagcttttcttggacaaatgctaattttatatcttctagctctgaaacttgctttattgagaaaagatattggaaaggctcattttgataaaaaaattgatgatcttaaaaatttaccgaaacttattgagcacacgttattgattgataacaaaatacaaacaatttcaaatacttttaatgaggcaaagggctctatgtttttgggacgtggtttttcttatccaattgctcttgaaggtgcattaaaactaaaagagttatcatatattcatgccgaaggttatccagcaggagaaatgaaacacggacctcttgctttgatagaggaaggtatgccagttgtggttttggctccaagagattatttatataaaaaaacgattttctatatgcagg

SEQ ID NO: 246421 - DNA, 866 bp, Unknown
  Bacterial polypeptide expressing nucleotide sequence isolated from the Sargasso Sea
caaggacttcataaaatggagtatcgaggatattactcagcaggcattgcattacatcaaaaagatcaggttgttcatttaagaaccttgggcaaagttaaattacttgaagaaaagatgattcaagagaaaccaaagagtaaacttggtattgcacacacaagatgggcaactcatggtgagccctctgaagaaaatgcacatcctcacaaatcgaacgaaagggtatatattgttcataacggaataattgaaaactacttagatttaaaagattttcttaaaaaagagggctattcgtttgcatctcaaactgattcagagctcattgctcacatgcttgattactttttaaatcaagggaactccatgttagattccatgtacttaacaaaagataggcttgatggtgcatatgctatcgcagccatagatttagaagatgatcaaaatattataattgctagaagtaaatcaccacttttaattggaataggtatagatgagcttttagcagcttcagacccgctagctttgggacaattaaccaatgaatttatttttttggaagacggtgatgtcgcagaactatcctcagacagctatttgatttatgacatcaataaacaaaaagttgaaagagaaatttctaaaatagatatttctagccaagcgacttcaaagggtgaatacaagcattttatggagaaagaaatttatgaacagcctgaagctatattaaatactattgatggaagggttggaggtgatgatattttagagaacatttttggacttggatcatcagaaatgtttgaaagagtaaaaaggattcaaaatgtagcttgtgggacaagcctccacgc

SEQ ID NO: 246422 - DNA, 88 bp, Unknown
  Bacterial polypeptide expressing nucleotide sequence isolated from the Sargasso Sea
cagcttttagcatatcacttggcagtgttaagggaatgtgatatagatcagccaaggaatctagcaaaaagtgttacggttgagtgag

SEQ ID NO: 246423 - DNA, 901 bp, Unknown
  Bacterial polypeptide expressing nucleotide sequence isolated from the Sargasso Sea
aatgctaaaacaacttcatggtagttttgctttaggtataatatttaaagatgaaccagatttgataattggagcaagaagaggatctcctttagcagtaggatacggaccatcagaaaattatcttggatcagattcttatgctttaaaatcaatgacaaataaaatttcttatttaaatgatggtgagttttgcatgattaaaaaagaaaatgtcgaattttttgataaaaaaggaaacaaaattaataaaaaagttttaacactttcctctaatgaacagaattatgacaaaggtgattataaacattttatggctaaagaaatagaagaacaaccaaccacaataaaaaattgtattaatgagtatatcgacaagataaatagctctatcaatatttttaattttccatggaaatcaaatcaaatttcatcaatagttttaataggttgtggaactgcgtatcattcttgtttaatggcaaaatattggtttgagcagttaactacattaaatgtatcagttgatattgcctctgaatttcgatatcgaaaaaatagatttagcaaagatactctatatgtatttgtatcacaatcaggcgaaacagcagatacttttgctgcattagatttgtgtaataaaaataaaatgaaaacttgtagtgttgttaatgttgtagaaagctcaattgccagagaatctaaatttgttttgcctatacattgtggccctgaagttggtgttgcttctactaaagcttttttaggacaaatgctggttctgtacattttgtgtttaaaacttggaaatataagaggcgatatagttaaaaatgtatatcttaaaaaaataaaatctctattttctttatctaaattagctagtcaaactttagaa

SEQ ID NO: 246424 - DNA, 954 bp, Unknown
  Bacterial polypeptide expressing nucleotide sequence isolated from the Sargasso Sea
catgttgactaaagatgaagttagtttctacgatgcaaaccttaagaaagtaaataaaaaaattctcacaatgtcagaaaatgaggcttcagctgataaaggcgaatacaaacattttatgtacaaagaaattattgaacaacctgatactgtaaaaaattgtataaatgaatatgttgatagtatgaaaaaaaatattaatattgtaaattttccaatagaaccaaaaaatataaaaaagattattttgataggctgtggtacagcttataattcatgtttaacagctaaatactggttagaggaattaacttcaattgatattgaaatagatattgcttccgaatttagatatagaaaattaaagtttaattcaaataatctttatatttttgtttctcaatcaggagaaacagccgatactgcagctgcattggatttatgtaaaaaaaataatgtaaaaacatgttcaatagtaaacgtaatcgagagctcaatagccagaaactctgactgggttttacctatatatgctggcgtagaaattggagtagcatcaaccaaagcatttttagggcagttaactgttctttatattttgtgtttaaaattagcttttgtaagaaaagatattgataataataaatacattaaaaatataaataatttgaaaaaacttccagaagcaatagtgaaatgtataaaaaaagaaaatgaagtacaactaatggcgaaagaatttattccagcaaaaggatcaatgtttttaggaagaggatcctcatatccagttgctttagagggtgcattaaaattaaaagaactgtcttacttacatgcagagggttacccggctggagaaatgaagcatggacctttggctttgattgaagaaggtctgccagtaatagttattgccccaaaggacaaatactttgaaaagactatttctac

SEQ ID NO: 246425 - DNA, 903 bp, Unknown
  Bacterial polypeptide expressing nucleotide sequence isolated from the Sargasso Sea
ttcccgtgggaaatcagctccattaaatctgtaatgttaataggttgtggcacggcttatcattcttgtttgatatcaaaatattggatagagcaaaatacaaatttagatgtaaatgttgatatagcttctgaatttagatatcgaaaagttagatttaaaaaggactgtctatatatttttgtttctcaatcaggtgagacagctgatacacatgcagctttaaatttgtgtaaacaaaataaagtgaaaacctgtgctgtagtaaatgttatagaaagctcaattgcaagagatgccgaattagtattaccaatttattgtggtcaagaaattggagtagcatctactaaagcattcattggtcaaatgttagtattgtacattttaataactaaaatatcatttgatcaaaaatgtattaatagaaaaatatatcaatctaaaataaaaaacttatttaacttatcaaactctattaaaaaaacccttaaagttgatcaaaaaatttttaatattggtaaaatttttgcccaggcaaaaggatcgatgtttttaggtagaggtttttcgtttcccattgcattagagggcgcattaaagcttaaagaattagcttatgtccatgcagaaggatatccagctggtgaaatgaaacatggcccattagctttaatagaagaaggtatgcctgttgttgttttagcacctagagatgagcattataaaaaaacgatttcaaatatgcaggaggttatagctagaggtgctaaggttttgttgataacgaataaaaataaggatgaggtaatttcagaaaatatttgggaaataatagaagttgatcaattaagcgatgaattgatcccttttttaaatgacataccattgcaaaaacttgca

SEQ ID NO: 246426 - DNA, 388 bp, Unknown
  Bacterial polypeptide expressing nucleotide sequence isolated from the Sargasso Sea
aatgtgtggaataattggaataaatagtaataaagcagtttcatcaacaataattagctctttgaaaaaattagaatatagaggctatgactccgcagggattgcaacactttcaaacaataaaattaatgaaattaaatccgaaggaagagtggataaactagaaagcaattcattgatcaaaaatatggaaggaactatcggaataggtcatgttcgatgggcaacacatggattaccaaacagtataaacgcccaccctcattcatcacaaaatgtctctgtagtccacaatggaataattgaaaattcaactcagttgaaaaaatttttagttggcaaaggccataaatttaaatcacaaactgatactgaggtaattgttcat

SEQ ID NO: 246427 - DNA, 628 bp, Unknown
  Bacterial polypeptide expressing nucleotide sequence isolated from the Sargasso Sea
aaagctttccttggtcaaatgctagttttatatttattttcaattaaaatagcttttgtaagacggaatattgataaaaataaataccaaactaaaattaaatctcttttaggtcttgcggatcaagtaaaaaatacactagacacagataatcaaattcaattagcatgtagttcatttgctgatgcaaaaggatcaatgtttttaggaagaggaagttcatttccaatagctttggaaggtgctcttaagttaaaagaattggcttatatacatgctgaaggatatccagcaggtgaaatgaaacatggacctcttgctttaatagaggatggaatgcctgtagttgtgattgcaccaagagattattattataataaaacaatttcaaatatgcaggaagtgatcgcaagaggtgcgaaggtattattaataactaataaaagcactgatgaaatattttctgaaaatatttggcaaaagatagaagtagaaaatatagatgacgatcttttacctttcttaataacaattccattacaaaaacttgcttatcattctgcattaaaaaagggttatgatattgataaacctcgaaatttagcaaaatctgtaacagttgaataat

SEQ ID NO: 246428 - DNA, 871 bp, Unknown
  Bacterial polypeptide expressing nucleotide sequence isolated from the Sargasso Sea
ggatgtgagtatagatatagcatcggaatttagatatcgaaaagttaagtttaaaaaggactgtttatatgtctttgtttcacaatctggtgaaactgctgatacttatgcagctttagaattatgtaaaaaaaataagatgaaaacttgtgcagttgtaaatgttgttgaaagttcaatagccagagatgctgatttagttttacctatttattgtggtcaagaaattggtgttgcatctacgaaagcttttcttggacaaatgttagtgctatatattctgtctataaaaatttcctttgatcaaaaatttattactaataaagaatatcgatctaaaattaaaaatttactattactgtctaattcagcaaaaaaaacgcttaaattagaccataaacttttaaatattggaaaagtttttgcacatgctaaaggatgtatgtttttaggtagaggttattcatttcccattgctttagagggcgcgttgaagttaaaagaattagcttatgttcatgctgagggttacccagcgggtgaaatgaagcatggaccattagctttgatagaagaaggtatgccagtagttgttatagctcctagggatgatcattataaaaaaacgatgtcaaatatgcaggaagttattgcaagaggggcaaaggttttgctaataacaaataaaaataaagatgaagttgcttctgaaaatatttgggaacaaatagaagtagataaattagatgatgaattaattccgtttctagtaactatacctcttcaaaaacttgctttttattcggcacttgaaaaaggttatgatattgataagccaagaaatttagctaagtcagtaaccgttgaataa

SEQ ID NO: 246429 - DNA, 526 bp, Unknown
  Bacterial polypeptide expressing nucleotide sequence isolated from the Sargasso Sea
atgtgtgggatcgtaggaattactagtaccaaaaacgtttcagcatcaatagtgaattcattaagaaagttagaatatagaggttatgattcagcaggtatcgctactttagaaaatggcgttataagagaagttaaatgtgaaggtagagtaaatgcattagaaaataatctttctaaacaaaaaattgacggtaatgttggaataggacatgttagatgggccactcatggagtgccaagtacagtcaacgctcatccacattcatcggataaagtttcagtagtacataatggtataattgaaaattctactattctaaaaaaattgctaatcaaaaaaggatatgtctttaaatctcaaacagatacagaagtcatagtacatttaattacagattatttaaaaaaaaataatctcaaaaactcaataattaaaatgcttaaaaaagttcatggaagttttgcattgggaataatttttcaagatcaaccggatataattgtggagcaagacgaggctcacc

SEQ ID NO: 246430 - DNA, 903 bp, Unknown
  Bacterial polypeptide expressing nucleotide sequence isolated from the Sargasso Sea
aatgcttgaaaaagttaagagagttcaaatagtggcctgtggaacaagcttgcacgctgggagagtcgcagctaattggttttcagcaatttcagaacttccaactcaaacagactatgcttctgaatatagatatagaaatccccacgtggacgatgattctcttctggtcacaatttctcaatctggagaaacagctgacactcttgcagcattaagattcgcaaaagaaaaagattatttatccactttatgtatatgcaatgttcctacaagctctcttgcaagagaatcagagcattcaatatttactaatgctggtcctgaaattggagttgcttccacaaaggcctttactactcaacttgcagctttaatgttgttagcattgtctcttgcaaaaagcagaggaaaaaatccaaagctaagaacaagagtaataacagcgctaagatcattgtcagaaacggtagaagaaactttaaaactcaaagacacaattttagaaatagcacctgaaatagcaaataaaaataatgctttgtttttaggcagaggtattttttatccaattgccaaagagggagcgctaaagcttaaagaaatttcttatattcatgctgaagcgtatcccgctggtgagttaaaacatggacctctggctttaattgatgaagaaataccagttattgctttagcaccagaaagcgagatagctcaaaaattagtttctaatctggaagaagttaaagctagaggcggaacgctttatgtattttctgacccatcgatttcaatggatttaaagtctggaagacttatcaatatgccgaaatgcgattttctattaacacctattatatatacgatacctcttcaaattctttcttacgaagtcgcttt

SEQ ID NO: 246431 - DNA, 349 bp, Unknown
  Bacterial polypeptide expressing nucleotide sequence isolated from the Sargasso Sea
atgtgtggaattattggaatatcaagtaacaaatctgtttctgcgaatataataaactctttaaaaaaattagaatacagaggatatgactcagcaggtatagcaacactttcagatggtaaaataaacgagctaaaaactgagggtagagtagacaacctggaaaataattttgatttaaaaagcttaaaaggaaatattgggattggacatgttagatgggcaacccatggtattcctaacagtataaatgctcatccgcattcatcacacaacgtttctgtagttcataatggaataattgaaaattctacaatattaaaaaaacatttaacaaacaaaggtcata

SEQ ID NO: 246432 - DNA, 859 bp, Unknown
  Bacterial polypeptide expressing nucleotide sequence isolated from the Sargasso Sea
tatgactaataaagtttcttatcttaatgatggagagttttgtataattaaagaaaatcaggttgagttttttgataccacgggaaataaagtaaataaaaaaatattaaacttatcccgagataatcaagattatgacaaaggtgattacaaacattttatgttaaaagaaatagatgaacagccaattataataaagaattgtataaatgaatatattgataaaataagtaagcaaataaatatttataattttccatggaaaattaatcaaataaactctgttgttttaattggatgtggaacagcttatcattcttgtttagtagcaaaatactggtttgaagaatatacatcgcttgatgtatcagtagatatagcttcagaatttagatatcgaaaacttaaatttaaaactgactgcctgtatgttttcgtatcacaatctggagaaactgctgatacttatgcagctttagatatatgtaaaaaaaatagaatgaagacttgctcaatagttaatgttgttgaaagttcaatagctagagattctaatttagttttaccaatacattgtggtcctgaaattggtgtagcatcaacaaaagcttttttgggtcaaatgttggtattgtatatgttgtgtttaaaattgtcttatgatcaaaaaataactagtaaaaaaaaataccaagaaaaaattaaaaatttactttctttatcaaatttatgtaaaaaaactttattaactgatgttaaaattcaaaaaacaagcaaggcatttattgaatctaaaggttcaatgtttttaggtagaggctattcctttcctatcgcgttagaaggagctttaaattaa

SEQ ID NO: 246433 - DNA, 880 bp, Unknown
  Bacterial polypeptide expressing nucleotide sequence isolated from the Sargasso Sea
gatgtgtggaataataggaattaatagcaacaaacctgtttcggtatcaataattaattcattaaaaaaattagaatacagaggatatgattcagcaggtatagccactctctcaaatggtttgattaacgagataaaatctgaaggtagagttgataaattagagaaaaatactttattacaaaacatggagggaacaatagggataggtcatgttagatgggctacacacggattaccaaatagtataaatgcccatccacattcatctcaaaatgtatctgtggttcacaatggaataattgaaaattcgacaatattaaaaaagtttttagttggaaaaggacataaatttaaatctcaaacggatacagaagtaattgttcatttaattacagaaaatttaaaaacagatgatattgtaaattcaataaaaaaaactttaaagtctctccatgggagttttgcactcgggattatttttaaagatcagccagatttaattgtaggggctagaagaggttctcctttggctgttggttatggtccaaatgaaaattatttaggttcagattcttatgctttaaaagcaatgacaaataaaattacttatttagatgatggtgagttttgtgtaattaaaagagatcatgttgagttttttaatgaagaaggaattaaaattaataaaaaagttttagaattatcatctgatgaagaaaaatatgaaaaaggtgattataaacattttatggcgaaagaaattgaagaacagcccagtactttaaaaaatggaataaatgaatatttagataattctaataataatataaatattattaattttccttggaaaataaatgaaataaattcaattact

SEQ ID NO: 246434 - DNA, 654 bp, Unknown
  Bacterial polypeptide expressing nucleotide sequence isolated from the Sargasso Sea
ggcctgaaatatccgtcgcttcgactaaggcttttacaacacagctggtaacattattgactatggcggtgcattggggcgagctgcgtggtgttctgtctgatagcgaggtcaaaaaaataactgataaccttgcgaatttgccaagcttgctggcaagaatgttatctgacgaactagattggataggtgccagtagcgagctagccttatcgcaagatgtcatctatttgggaagaggggtaaatttccctatcgctctcgaaggcgctttgaagctgaaggaaatcagttacattcatgctgaaggatatgcggcgggcgaaatgaaacacggtccaatagcactgctagagaggggtgttcctgttgttatggttgccccgcatgatgaatggtttgaaaagacgtcatctaatcttaaggaagctcttgctagaggagcccgagtggttttgctttctgatgataaaggcattgaaaagttacacgaagctgcgacatggatttttaggatgccaagagttcatccaatgttaactcccatcctttattccctgccagttcaactattggcttaccacacggcaaaggaaaagggtactgagattgaccagccacgtaatttagcaaaaagtgtgacggtagagtagt

SEQ ID NO: 246435 - DNA, 169 bp, Unknown
  Bacterial polypeptide expressing nucleotide sequence isolated from the Sargasso Sea
agataccacaaaaaaaataaaatcatttattgttgatgaagctaatattattactgcaccatttatttatactattccttaccaactttttgcatatcatacagctcttcttaaaggaactgatgttgatcaaccaaggaatttagctaaatcagtgactgtggagtag

SEQ ID NO: 246436 - DNA, 873 bp, Unknown
  Bacterial polypeptide expressing nucleotide sequence isolated from the Sargasso Sea
aataaattcaattaccttaataggttgtggtactgcttaccattcttgcttgatggccaagtattggtttgacgaattaactcaacttgatgttaatattgatattgcatcagagtttagatatcgaaaaaatagatttaaagaaaattctttatatatatttgtttctcaatcaggagaaactgcagatacttatgcagctctagacctttgtaataaaaataaaatgaaaacttgtgcagtggttaatgtaattgaaagttctattgcaagagattcaaaatttgtattaccaatccattgtggcccagaaattggagttgcatctaccaaagcctttttaggtcaaatactaattttatacattcttgccctaaaattaagttctttacgaaaagaaattactaaagaaaactatcaagaaaaaattaaagatctacaagatcttccaaaattaatagaaaagtctctgttaattgataatgatattcaagccatatcctctacttttaatgaagcaaaagggtcaatgtttttaggaagaggtttttcatatccaattgcacttgaaggtgccttaaaattaaaagaattatcatatgttcatgcagagggatatcctgctggagagatgaagcatggacctttggccttgatagaagatggaatgcccgttgtagttttagctccaagggatagttattatttaaaaactatctcaaatatgcaggaagttatagcaagaggtgcaaaggttttattgattactaataaaagtaaagatgaagttgtttcggagaatatctgggaaacaattgaagttgaaaatacaaataatgatttgttaccttttcttttgactataccacttca

SEQ ID NO: 246437 - DNA, 396 bp, Unknown
  Bacterial polypeptide expressing nucleotide sequence isolated from the Sargasso Sea
tatgtgtggaattatagctgctgcctcaaaccgcaacgttggaaagttgcttgttcaagggcttcataaaatggaataccgtggttacgattctgctggaattgctcttcatcaaacagaccaaattgctcatcttagaaccctaggaaaagtaaagctacttgaagaaaaaatgattgctgaaaagccaaaaagtaagcttggcattgctcacacaagatgggccactcatggagaaccatcagaagaaaatgcacatccacatatgtcaaatgaaagagtttatatcgttcacaatggaataattgagaattatctagatcttaaagatttttttaaaaaggaagggtatttcttttcatctcaaacagactctgaattaatagctcaccttct

SEQ ID NO: 246438 - DNA, 889 bp, Unknown
  Bacterial polypeptide expressing nucleotide sequence isolated from the Sargasso Sea
caacacgcttgagtccagacttggcagcaatgatgtcttagataatatctttggattgggttcgtcagaaatttttgctaaaactaaacgtattcaatttgttgcatgcggcaccagtttgcatgcgggaaaggttggtagattttggtttgaagaaattgctggcattccatgctacgttgattttgcgagtgaatatcgctatcggaatccactggtggaagatgggacattatttgtaactatttcccaatcgggtgagactgcagatactttagctgccttacgttatgctagagataaagattatctaagtacactttcaatatgtaatgtacctaccagctctttagctagagaatcagaccatgttctatttacaaacgcagggcctgagattggcgttgcatccaccaaagcatttactacccaattggtgtctttgttgttgttagcaatgtcaattgcaaaaagtcaagacaagaatccaatcatgcgagaggcgattaccaaagagcttaaagatttaccagcagcgattgacgaatcactagacacaaaaactgccattcaaaaaatcacgcctgctatagcggaaaaaaataatgctctatttcttggccgtggaatatttttcccaatcgttcaagagggcgctcttaaattgaaggaaatatcttatatccatgcagaggcctacccagccggtgaactaaaacatggacctctggctttggttgatgacagtattccaattgtagccttgtcacctgagaacgacttaactgagaaattgatttctaatcttgaagaggtaaaagcaagaggcggaaccctatacgtgtttggtgaaggccaagatcagtttacgatagatagtgggagctat

SEQ ID NO: 246439 - DNA, 651 bp, Unknown
  Bacterial polypeptide expressing nucleotide sequence isolated from the Sargasso Sea
tttgtgtggaataattggtatagttggaaaatcatcggttcaaccttctattattgaagcattagagaaattagagtaccgaggatatgacagttcgggaattgctactgtttcagataattcaattattcggagaagggcagttggcaagctgtcttctttaaaagagctgataaataaaaaacctgtcaagggagaaattgggataggccatacacgctgggctactcatggtgtgccatcattggagaatgctcacccccataaggttggcaaagttgctttagttcataatggcataatagaaaattttcatgaattgaggtcccaacttatcagtgaaggacagacgttcgtaagtgatacagatacagaagtaattgctgctttttgttcaaaattattggaaagcggaatgtctccagatgaggctgttgtgagcacgttaaataacttggaaggggcatttgcattatgttttatttttgaagaatacgataatatcttgattgctgcaagaaagggaagccctttggtagtaggatggggttccggagaaatgtttgttggctcagatgcaatagctttagcttcgttaacaaatcagctaacctatgttgaagaggcaaattatgtaatttttgtcaaaaa

SEQ ID NO: 246440 - DNA, 826 bp, Unknown
  Bacterial polypeptide expressing nucleotide sequence isolated from the Sargasso Sea
gtgcacaatgggatcatcacgaatcatcaggcgttgagagagacgttgacgaggaagggatacgtgttcgagagcgacacggataccgaagtcattccaaagttgacaaagtatttgtacgataagtttcacgaaaagtgcacgttcaggcagctcgtgatggaggtgtgcagacagttgcagggagcgtacgcgctggcgttcaagtcgaagcactacccgggtgaattggtggcggcgaagcggggctctccgttgattttgggcatcgccgagggtccgcatccgggcgaacagcacgcgttggtgacgagcgaaggtttcgtgccgccgtccaaacgcgcgaaacgaacctccattgaattctatttcgcttcggacgcctcagccatggttgaacacaccaagcgcgtgttacacctcgaagacgacgacgtcgcgcacattcgcaacggcgcgtatggcatctatcgcatggagaagattcactctgaaggggacgattcgccgagcttggcgtacgcgccgacggtgaagtcggcggaagtcgagcgcacgatcgagacgctgacgatggaggttgaacaaatcatgaaggggaactacgatcactttatgaagaaggagattcacgagcaaccggacgccattaaacagacgatgcgcggtcgcgtcgtcttcgacccggacggaacgacggtgcagcgcgttttcttggggggtatggtagattatttgggcacgattcgacgttcgagacgcatcattttgtgcgggtgcggaacgagttaccacagcgccatcgccgtgcgtcaactcatggagg

SEQ ID NO: 246441 - DNA, 726 bp, Unknown
  Bacterial polypeptide expressing nucleotide sequence isolated from the Sargasso Sea
gttactctggttgcgtgcggaacaagttattatgcggctctggttgcttcttattggctagaagagttagcgaagattccgtgtcaagtcgagatagcaagtgaatttcgttatagaacggtggtttgtaggccaaatagccttttcgtgactatttctcaatcaggagaaactgcagataccttggccgctttgcggttagctaaggaattgggatttgcgtcaactcttactatttgcaacgtggccactagctctctggttcgagaaagtaatttggctttgatgatcaatgctggggttgagataggggtagcttcgaccaaagcgtatacagccatgcttgttgatcttcttttacttactctagcgcttgctaaatgtaacggactaagtggcggaaaggaatcagagattgtttctaagctacatgagttgccaaaattaatagaagactgtcttggccttgatgaagaagtaaaagatttatctaataactttatagatagggatcatgcactgtttttgggccgcggaagcatgtatccggttgctttggaaggtgctcttaaattaaaggaaatatcttacattcatgcagaaggttacgctgcaggagagcttaaacacgggcccttggctttggtcgatgaagaaatgcctgtagtagcggtggctccaaacgacgaattattggaaaaactgcaatcaaacttgcatgaggtg

SEQ ID NO: 246442 - DNA, 771 bp, Unknown
  Bacterial polypeptide expressing nucleotide sequence isolated from the Sargasso Sea
aactgcagatactctagcagctctcagatatgcaaaagaaaaagattatttatcctcactatgtatttgtaatgttccgactagttctcttgcaagagaatctgattattcaatatttactaatgcaggtcctgaaataggagttgcatcaaccaaggcttttaccacacaacttgcagcattaatgttattagctctgtctttggcaaaaagtagaaaaaagaatccaaaactcagaacaagagttgttacggcattaagatctttgccagatactgttgaagaaacattaaaacttaaagaatcaattacagatctagctccagaagttgccagcaaagacaatgccttgtttcttggaagaggaattttttatccaattgcaaaagaaggagctctgaagctcaaagaaatttcatatatacatgccgaagcatacccggctggagagttaaagcatggtcctctcgctttgattgatgaaaatatgcctgtcattgcattggcacccgaaagtgaaatcgcagaaaaacttatatcaaatcttgaagaagtaaaggcaagaggagggacgctttatgtattttcagatccttctatttctatggatttaaagtcaggcaaacttataaatatgccaaaatgtgacttcttgttgactccaattatctacactataccgttacaaatattatcttacgaagtagccctcttgagaggtactgatatcgatcagcctagaaatctagcaaagtcagtcactgttgaata

SEQ ID NO: 246443 - DNA, 421 bp, Unknown
  Bacterial polypeptide expressing nucleotide sequence isolated from the Sargasso Sea
aatgtgtggaatagttggaataacaagcactaaatcagtaacttcaatgattgtaaattctttaaaaaaacttgaatatagaggttatgactcatctggcattgcgacactacataacggaaatatcaatgaagttaaatgtgaagggagagttgatactttagaaaaaaatttaaacaaatctaatttatcaggaaatgttggcattggacatgttagatgggccactcatggaatacccagcacaataaatgcgcatccacattcatcagaaaatgtttctgtagtacataatggaattattgaaaattctactatattaaaaaaatatttagttaaaaaaggtcatatttttaaatctcaaacagatacagaggtaataactcatttaattacagagtacttaaaaaaaaatgatctt

SEQ ID NO: 246444 - DNA, 943 bp, Unknown
  Bacterial polypeptide expressing nucleotide sequence isolated from the Sargasso Sea
ggcgatgtagccaaagttgcacctgacttagtagaagtttttgatgcaaaaaatcaattagtcaatagagaacaattgacaattgatatcaaagcagaagctgcctcaaagggtgattttaaacaccacatggaaaaagaaatttttgagcaaccacaagcagtactaaatactttggatggaagaataggcggagaggatgttttagagaatattttcggagagggctcttcggaattattagccaaggttaaaagagtccaagttgtagcttgcggcacaagtttgcatgcgggcagagtcgcggcaaattggttttcggcaattgcagggctgccaacgcaaatggattacgccagcgagtaccgatataaaaatccttacatcgatgaagatactttgttggtgacaatctcacaatcgggcgagaccgctgatactcttgctgccttgagatatgcaaacgacaaaggctatcttggatctttagcaatctgtaacgtgccaaccagttcacttgctagagaatctgattttcttttgttaacaaacgctggtccggaaataggggtggcttcaaccaaagctttcaccactcagctaacggctctaatgcttttgactttgtctctagcaaaagctaccggaaaaaatcctcgcttgcgaggtcgaattattaaagcgctgagatttctgccagaaaaaatttctgaagctcttgcattaaaaccagaaattttagaaattgccccagaaatcgcgaataagaacaatgccttatttttaggcagaggaatcttttaccctatcgccaaagagggtgcgttaaagcttaaagaaatttcatacattcacgcagaggcttatcctgctggagaattgaaacatggccctttggcgttaatagatggagagatgccagtaatagctattgctccagaac

SEQ ID NO: 246445 - DNA, 789 bp, Unknown
  Bacterial polypeptide expressing nucleotide sequence isolated from the Sargasso Sea
aggttatggtccaaatgaaaattatctaggctcagactcatatgctttgaaatcaatgacaaataaaattacgtatttaaatgacggtgaattttgtgtaattaaaaaagatcaagtagaattttttaatgaggaaggaataaaaataaataaaaaagttttagaagtatcctctgaggatgaaaagtatgaaaagggtgattataaacattttatggcaaaagaaattgaggagcaaccaaccacattaatgaatgggattaatgagtatttggataattttaataatgacattaatatttataactttccttggaaaatcaaagacatttcatcaataactttaattggctgtggtacagcttatcatagttgtttaatggcaaagtattggtttgaagagttaactacaatggatgtaaatgtagatatcgcttctgaatttagatacagaaaaaatagatttaaaaaagaaactttatatatctttgtttctcaatctggcgaaacagcagatacctacgcagctttagatttatgtaaaaagaatggaatgaaaacttgtgcagtagttaatgtagttgagagttctattgctagagactccgaatttgttttgccaattcattgtggaacagagattggtgtagcgtccactaaagcttttttaggtcaaatattaatactttatatattctctttgaaactaggtttattaagaaatgacttaaaaaaagacgtatttattcagaagataaaggatttaaaggaacttcctaagttagtgaa

SEQ ID NO: 246446 - DNA, 868 bp, Unknown
  Bacterial polypeptide expressing nucleotide sequence isolated from the Sargasso Sea
cccgatatcctgatcgtggcgcgcaatgcctcgccattagcattggggattggagatgatgcctgttatatcggatccgatgcgattgcgctgtcacatttgacgcgaaaggtcatctatctaaaagatcatgattttgcgctggtgcgtgctgatggtgtggcggtctatcaggatggtggagtgccggttaaccgggagcctgtgtttgttgctgccagcccaggcctaattgataagggcggatatcgccatttcatggaaaaagaaattcacgaacagcctgatgcgattgcgcattcgttagcggcaatgaccgatgaacatggccagttaactgcacatatgagcgacagtgctttgcgcgctatcaatggaattgttatgttggcagcaggcaccagccattacgccacgcaaatcgcgcgatattggatagaatccctcgctgccgtacctgtggcttgcgaagtcgcatcggaatatcattacagacaaccggcaacctcaccttataataccgccattgccgtttcgcaatcaggggaaagtcttgataccttgatggcgatgcggcatgctgcaaattgcaacttgtcgacaattggccttgttaacgtgccgagcagcacgatcgcccgtgaggcgagcgccgtactacccacaagagccgggccagaaattggtgttgcaagcacaaaatccttcacagcacaattaactgtgctgttgtgttttgcagtcgaaattgcgcgagccaagcgccagatagatgatgcacgggccgcggcgattcatatggaaattcaagcgctgcctgggcttgtcggaaagacgcttgccctatttgataaaatccggccaatag

SEQ ID NO: 246447 - DNA, 571 bp, Unknown
  Bacterial polypeptide expressing nucleotide sequence isolated from the Sargasso Sea
aatgtgtggaattgttggtatagctagcaagaaatctgtatcaaatagcataattcaagctttaaaaaaattagaatacagaggttatgattctgcgggattatcaacaattgataatggagaaattaatgaaaaaaaatgttcaggccgagttgacaatttagaaaaaatactttttttaaatccttcaatcggaactttgggggtaggacatgtccgctgggcaactcatggagttccaaataaaattaacgctcatccccattcttccgacttagtttccgttgttcataatggaattattgaaaactctaatgttttaaaaaatgaacttattaaaaaaaaatatttttttaaatctcaaactgatactgaggttatcacaattcttttaacagattttttaaaaaataataatctaattgatgcaattcaaaaaactctagaacgtttagaaggaagttttgcgttaggaattatttttaaaaaatacaataatttaatagttggagctagaagagggagtcctctcgcggttggttatggtcatcaagaaaactatataggctca

SEQ ID NO: 246448 - DNA, 739 bp, Unknown
  Bacterial polypeptide expressing nucleotide sequence isolated from the Sargasso Sea
ttgtgcggtattattggcatagtttcaaaaaacgaggttgttgaccggttattagatggcttagaacgcctcgaatataggggatatgacagtgcaggtatagctactatcaatagttcggagattgtttacagtaagagtacgggtaaacttaagtctctaaggaacaaaataaaggagaaccctttagatggtcatgttggaattggtcacacgagatgggcgactcatggcgaaccaatagaaattaatgcgcacccacatgtaacaaaaaatgtggcagtggtgcataatggcattatcgaaaattttgcagagtttaaagatgaattacttgagaaagggataatatttaactcacagacagacacagaagttattgccaggcttattgaagaaaaaatttctaaggaaaaatgcggaccattagaagcagtaagacttactattgaaaaattacgaggatctttcgccttatgcttcattttccagggacttgacgatctcattatagtaaccagaagaggatctccactagcactaggctttggcgatggagagaattttgttagttcagatgcattatctttatcaatcttttcgaaaaaagtatgttatctagaagagggtgatcttgctacactaacttcggacgaggtgaaaatatatgatagttttggcaacagtgtttttagagatattcaaatattatatactgaccccaataaatctcagtaaa

SEQ ID NO: 246449 - DNA, 162 bp, Unknown
  Bacterial polypeptide expressing nucleotide sequence isolated from the Sargasso Sea
aaaacttaagatttaaattagaaataccatttattaattatcttttaacaccttttataattactgtgccattgcaacttttggcatatcatgtcgctagcttaaaaaaatgtgatatagataaaccaagaaatttagccaaatcggttactgttgaataga

SEQ ID NO: 246450 - DNA, 520 bp, Unknown
  Bacterial polypeptide expressing nucleotide sequence isolated from the Sargasso Sea
aatgtgtggaatagttggaataacaagctcaaaacctgtaacttcaatgatcttaaattcattgaggaaacttgaatacagaggatatgattcatcaggaatagcaactttacatgatggcaatattcatgaagttaaatcagaaggcagagtagatgctttagaaaaaaatttaaatagatcaacccttcagggtaatattggtattggacatgtaagatgggctacgcatggagttccaagcactataaatgctcacccacattcatcagataatgtatcagttgttcataatggtataatcgaaaattcaacattgttaaaaaaaatgctcttaaaaaagggacatgtgtttaaatcccaaacagatactgaggttatcactcatctaattacagaatatttaaaaaaaaatgatttaaaaacgtctattattaaaatgttaaaaagactacatggaagttttgctttaggaattatatttaaagatcaaccagaatataattgttggtgcaagaag

SEQ ID NO: 246451 - DNA, 758 bp, Unknown
  Bacterial polypeptide expressing nucleotide sequence isolated from the Sargasso Sea
ccctaatgagaattatttaggctcagattcttattccttaaaatcaatgacaaataaaattacttacctggatgatagtgagttttgtatagtcaaaaaagatgaagttaatttttttaatgaagagggtaaaaaaataaataaaaaaatcttagagctttcatcagatgaagcaagttatgaaaaaggtgactttaaacattttatggctaaagaaattgaagaacagccaacaactgtaaagactggaataaaagaatatttagataatgtaaataatgatgtaaatttatttaattttccctggaaaattgatgaaattaaatcaatcaaattaattggatgtggaactgcatatcactcttgtttaatagctaaatattggtttgaagaattgacgtctttagatgtaaatatagatatagcttcagaatttagataccgaaataatagatttaaaaatgattcattatatatatttgtttcacagtcaggagaaacagctgacacttatgctgcactagatttatgcaataaaaataaaatgaaaacttgttcaatagtaaatgtgattgaaagctcaattgcaagaaattcaaattatgttttaccaattcattgtggtccagaaattggagttgcctctactaaagcttttttaggtcaaatacttgttttatacattttagctctaaaatttggatttttaaaaaacgagcttgaaaaaattaagtatcaagaaaagataaaagatttaa

SEQ ID NO: 246452 - DNA, 882 bp, Unknown
  Bacterial polypeptide expressing nucleotide sequence isolated from the Sargasso Sea
gccgttaaaaaaactttagccggccgattaggaaaaaacaaagtgttagttgattgttttggcgtcggtgccgaatcaatttttcaaaaagtgaaatcaattcaaattataggatgtggtagcagttactactctggactggtagcaaaatattggttcgaacaattagttggtgtctcgtgtcaggtagatattgcaagtgaatttcgctatcgaaaaaatgttgtgcacgagaacacaatactcgtagctatttcccagtcgggtgaaactgctgatacccttgccgcggtaagaaatattgaagatgaagattatcttgcaacgttgagtttgtgcaatacaccgaatagttcccttgttagggaaacagatttcacgttaatgatggaggcgggtgtggagatatgcgtcgcctcgactaaggcatttacaaatcagcttgtaaatcttttgatgcttgcgagcgcgattggccagtctagggggtgttcttcaggagtcgtccaagaaatttttgacgcactgaattcgttgccatctcaaatagaggagattttaaacctagatattgatattgaacggatttctgaacgatttgtcgaaaaaaacaacgccctctttcttggaaggggtagtcattatccgattgctcttgagggagccttaaagttaaaagagatttcgtatattcatgccgaagcatatccggcgggagagctaaagcatgggccccttgcgctggtggatgattcgatgccagtagttgcagtagcaccaagtaacgagttgataggaaaattaaaatctaatttagaggaagtcagagctcgcggcgcgcagttattgatatttgcggacgagagtatttctctaaacgaa

SEQ ID NO: 246453 - DNA, 727 bp, Unknown
  Bacterial polypeptide expressing nucleotide sequence isolated from the Sargasso Sea
tatgtgtggaatagttggatatatagggaataaaaaagctaaagaaattattgttaaaggcctaaagaggttagagtacaggggatatgactctgcaggtatagctacaatggaaaaaaataaattattgattactaaagaagttggaaaagttaaagatttagttaaatcaatatctgaaaaagaccataatggaaagattggtataggtcatactagatgggctacacatggagaaccaaataaattaaatgcacacccacattcagattatagaaaaaaatttacactagtacataatggtattattgaaaactataatagtttaaaacagttattaaaagataataatataaattgtgaaacggatactgatactgaggttcttgttcagttcatttcctttatttatcatgaaaagaagttatcgttttctgagtctgtaagagttgctctaaatgaagttataggtgcttatggaattgtagtaatgtgtgaagatgagcctgacacaattatttcagcacgtttaggtagtcctttattattaggaattggagattctgaagtttttattgcttcagactcttctcctataattgaatatacacgaaatattatctttttagatgaaggtgaattagcaaaaattacaccagcaggatatgaagtaagaaatattaaggaaaatgaaataatttcaaaagatatagaacaaattcaatat

SEQ ID NO: 246454 - DNA, 771 bp, Unknown
  Bacterial polypeptide expressing nucleotide sequence isolated from the Sargasso Sea
tctcttcaaatataattaattctttaaaaaaattagagtacagaggatatgactcagcaggtatagctacactttcagatggtgaaattaatgaagtaaaatcagaaggtagagtagataatttagaaaataattttgatttaaaaaacttaagaggaaatattggtatagggcatgtaagatgggcaacgcacggaattccaaatagtttaaatgctcatcctcattcttctcataacgtttcagtagttcataatggaattattgaaaactcaacaattttgaaaaaacatttaattaacaaaggttacaagtttaaatcacagacagatacagaagtaatcgttcatttaataacggaacatttaaagacttcagaattagaagcagctattacaaaaactttaaaacaacttcatggtagctttgctcttggaattgtttttaaagatatgccagacttaatagttggtgccagaagaggatcaccactagctgttggctatggtccaaatgaaaattatctaggatcagactcttatgctttaaaatctatgacgaataagattacttatcttgatgatggtgaattttgtgttgtaaaaaaggatcaagttcttttttttaatgaagaaggaaaaaaagttaataaaaaaatattagaattatcatctgatgaggcaaattatgataaaggtgatttcaaacattttatggcaaaagaaattgaagaacaaccaacaacaattaaaactggaataaaagaatagt

SEQ ID NO: 246455 - DNA, 517 bp, Unknown
  Bacterial polypeptide expressing nucleotide sequence isolated from the Sargasso Sea
actgagggatttgcctaaattaattaataagactttaaaaatgacaggcgaatacaagaaagtggcaaggctgctttttaaaagaaacagtgcattatttttaggtcgtggtttgtattttcctattgctagagaaggagcacttaagctcaaagaaatatcttatatacatgctgaagcttatccaggcggagagttaaagcatggaccattggcactgatagacaaaaatatgccagtaatagctttagctccagacaatgaacacttagataaaattacatcaaacattgaggaagtggcagcccgaaaaggtaaggttattaccataggaccactaggcagaacaaaaatagataaaaatggtgggcatattaagattcctaagacattggatctgcttaatccgattgtctcagtagtgccaatgcagttgattgcatactacaccgcagtctttaaaggcaccgatgtagataagcctcgcaaccttgcgaaaagtgttactgtggagtag

SEQ ID NO: 246456 - DNA, 523 bp, Unknown
  Bacterial polypeptide expressing nucleotide sequence isolated from the Sargasso Sea
tatgtgcggaatagttgctgtaactggatataaaaaagctttaccattattaattaatggtttagaaaaacttgaatacagaggttatgattctgcgggagttgcaataatcaattccgaaaataattctattttttgtaataaagcagagggaaaactagagaatttaataagcaatctgaatgatcataatattcctggaactgtgggtataggacatactagatgggcaacgcatggaaaacctgaggttaaaaatgcacatcctcatactgatagttcaggaaatatagcagttgttcaaaatggcattattgaaaatttccaaggtttaaaaaaaaaattagaggaagagggcattatttttaattctgatacagataccgaggtaattccccatctaattcaaagagagttaaatacattaagtaaacttaatcttgagaataatgggtcaacattattagtagctgtgagaaatgtattgtcggatttagagggatcttatgctttagccagttat

SEQ ID NO: 246457 - DNA, 787 bp, Unknown
  Bacterial polypeptide expressing nucleotide sequence isolated from the Sargasso Sea
atgtgtggaattatagctgctgcctcaaatcgtaacgttggaaagttgcttgttcaaggacttcataaaatggaataccgtggatatgattctgctggaattgctcttcatcaaacagaccaaattgctcatcttagaaccttaggaaaagtaaagctacttgaagaaaaaatgattgctgaaaagccaaaaagtaagcttggcattgctcacacaagatgggctactcacggagaaccatcagaagaaaatgcacatccacatatgtcaaacgaaagggtttatattgttcacaacggaataattgagaattatctagaccttaaagattttttaaaaaaggaaggttattctttttcatctcaaacagactctgaattaatagctcaccttcttgaatattttcttaataaaggaaacaacatgttggattcgatgtatttaaccaaagaaaagcttgatggtgcatatgcaatagcagccatagacaaagaagatgatcaaaatattattattgctagaagtaaatctccacttttaatagggattggaatggatgaatttttggctgcttcagatcctctagcaattggccagctgacaaacgagtttatttttttagaagacggagacgttgcagaattatcatctgagagttataccatttttgatgagtcaaagaagaaagttgaaagagagatttctcaaatagatatttcaagtcaagctacatctaaaggtgaatatcggcacttcatggaaaaagaaatttatgaacagccagaag

SEQ ID NO: 246458 - DNA, 331 bp, Unknown
  Bacterial polypeptide expressing nucleotide sequence isolated from the Sargasso Sea
ccggccggggagatgaagcatggtccgatcgccctgctggatgcccatgtccccgtggtctccatcgccgttccgggtgccgtcttcgagaaggtgctcagcaacgctcaggaggccaaggcccgcgacgcgcagctgatcggcgtggctccgcagggtccggacacggacctcttcgatgagctgcttccggtcccggaggtgagcgagtggatcagccccctgctcacggtggttccgatgcagctgctgagctatcacatcgccgcccatcgcggactggatgtggatcaaccccgcaatctggctaagagtgtgacggtggagtgat

SEQ ID NO: 246459 - DNA, 311 bp, Unknown
  Bacterial polypeptide expressing nucleotide sequence isolated from the Sargasso Sea
aatgtgcggtatcattggtatagcttctaaagaaaatgtgtcttcgaacattataaatgcattaaggaaattagaatatcgtggttacgactctgctggtattgcaataaacactgccaagaagatcaatcaaagaaaagtaaaaggcaagcttgataatttgatttacgctcttcagaaagatcaatttgatggcaatacgggaataggtcatactcgttgggctactcatgggggaacttctgataaaaatgctcacccccatttctcaaccttggtatcgcttgtacataatggaataattgaaaatg

SEQ ID NO: 246460 - DNA, 838 bp, Unknown
  Bacterial polypeptide expressing nucleotide sequence isolated from the Sargasso Sea
aattttattgcctcagatattatggctttagcacctgtgacaaataaatttacatatttagacgatgggcaagttgctctacttaccaatgataaagcagtggtaaaaaatacttcccataaaattgtgagaaccaaaacccatgaggtagactcaaatgcgtacactaacgacatggcgggttacaaccacttcatggaaaaagagatcttcgaacaacctgaagcagttaaaaaatcaattgagggtcgattatctaaacatgatacacaagaaggaatttttggtgctgggtttgagaaagctgtaaatgatattactaatatacaaattgttgcgtgcggcaccagctaccactcagcacgtatttttgaattttggtcccataagttcttaggcataaactgtcgggtagattacggcagcgaataccagtaccaaaaacctgttaattcagacaaaactttacttgtaactatttctcaatcaggcgaaacagcagatacattatcatctttaaaatttgcaaagaaaactggcaaaccactctctttaactatttgtaatgtagcgaacagttcaatttgccgtgagtctgattttacgctcttaactaatgctggtcctgaaataggtgttgcttcaaccaaagcctttgttacacaattgtctgctttaaatttacttctgttgacacttatgaaagtgcacaatcgtttacctgggtctagaaaaaaaattactaaagccttattagaattgcctgggcatttggaaaaaacccttaaacaagccgacgtatataaaaaagtagcaaaacaactttcaaaaagaacag

SEQ ID NO: 246461 - DNA, 789 bp, Unknown
  Bacterial polypeptide expressing nucleotide sequence isolated from the Sargasso Sea
atttcgttatagaaaaaatagatttaaaagtgataatttatatgtttttgtttctcaatctggggaaactgctgacacttatgctgctttagatctatgcaataaaaataatatgaaaacttgttcagtggttaatgttgttgaaagttcaatagctagagactcaaaatttgtattaccaatacattgtggaccagaaataggtgttgcatcaactaaagcttttctaggacaaatgctagtactttatttgttatgccttaagatgggtaaacttaatgatgatattaagaaaaaaaattatatttccaaaatcaaaagcttattaaatttatcgaaaaatatagaactttctctaaaatctgaaaatgatattcaaactatatctaatagttttacagatataaaaggctctatgtttttaggaagaggttactcatatccaattgctcttgaaggagcgcttaaattaaaagaactttcttatatacatgcagaaggttatccagcaggtgaaatgaaacatggtcctttagcattaatagaggatggtatgccagttgtagtaattgctccaagagatgagtactacaaaaaaacaatgtctaatatgcaagaagttatagcaagaggcgctaaagttttattgataacaaataaaagtaaagatgaaatattttctgaaaatatttggcaaaaaattgaggtagaaaatacagacgatgatttgttaccttttttaataacaattccacttcaaaaattagcttactttactgctttaaaaaa

SEQ ID NO: 246462 - DNA, 235 bp, Unknown
  Bacterial polypeptide expressing nucleotide sequence isolated from the Sargasso Sea
atgcaggagggtatcgcccgcggtggccgtgtgatcttcctgtcggacgctgccggcatcgaaaaactgggagatatggcggcggcgactatcgaactgccggcggtcgatgcgttcgttgcgccgatcctctacaccatcccgatccagttgctggcctatcacgtcgcggtactgaaatgcacggacgtcgatcagccgcgcaatctggcgaagtccgtcactgtggagtagt

SEQ ID NO: 246463 - DNA, 868 bp, Unknown
  Bacterial polypeptide expressing nucleotide sequence isolated from the Sargasso Sea
agataccgaagtgatagttcatttaattactgaattattaaaagaaaataatttaaaaaattctatattaagaatgttaaaacaattacaaggaagttttgctatagctataatttttaaggatcaaccagatttaattgtaggagctagaagaggatcaccattagctgtaggatatggaccaaatgaaaactatttagggtcagactcttatgctttaaaatctatgactaataaaatatcatatttaaatgatggcgaattttgtattgttaaaagaaatcaagtggaattttttgacgaagatggagttaaattaaataaaaaagttttaaagttatcttctaatgaagaaaattacgaaaaaggcgattataaacacttcatggctaaagaaattgatgaacaaccaataacaattaaaaattgtataaaagagtatattgatagcatcaataacgatattaatatttataattttccatggaatattaatgagatttcttccataaatctaataggatgtggaactgcttatcattcttgtttaatggcaaagtattggatcgaagaatttagttctctagatgttaacatagatatagcttctgaatttagatatcgaaaaaacaggtttaaaaaagacagtttatatattttcgtctcacaatcgggtgaaaccgctgacacttatgcagctctagatttatgtaataaaaataacatgaagactgcaagtattgttaatgttattgaaagttcaatagctaggaattctaaatttgttttaccaattcattgtggtccagaaataggtgtcgcttctacaaaagcatttttaggccaaaatgttagttttatacctaaa

SEQ ID NO: 246464 - DNA, 880 bp, Unknown
  Bacterial polypeptide expressing nucleotide sequence isolated from the Sargasso Sea
aaagactgcaagaaagtggtttgaggacatatgtgagattccttgctatatagattttgcaagtgagtacagatacaggaatccaatcgttgaagacaacaccctctttgtaacaatatctcagtctggcgagacagctgacacactggctgctttagaatacgcgcgagctgaaaagtatgttggtatcgtgacaatatgtaatgttccaacaagcaccatgtcgagagaagctgattggaagatgttcactaatgcagggcccgaaataggagttgcatcaactaaagcttttaccactcaattagctgctttgctgatgctcgctctgtcaatttcgaaaagccaagacaaaaatgctgataaaagaaaacaagcaacacaggagctaagagaaaccccagcattagttgatcaatcttttaatttgaaggaaaacatttcacaaataacacaaaatatctctactaagcacaacgcattatttttaggaagaggaatgtatttctccattgcacaagagggagcacttaaattaaaagaaatatcatatatacatgctgaagcatatccagcaggagagctaaagcatggacccttagccttggttgatgagcaaattccagttattgctcttgctcccgaggatagcctggtcgagaaacttttatcaaacctcgaggaggtaaaagctagagggggcaccttatatgttttcggaaatgcaaactcaactattgagataatcaaaggaagatttataaatatgcctaattgcggagattataacgcaccaattatttacaccataccacttcaaatactagcctatgaggtagcttgtctaagaggcacagacgtagaccagccaagaaattag

SEQ ID NO: 246465 - DNA, 692 bp, Unknown
  Bacterial polypeptide expressing nucleotide sequence isolated from the Sargasso Sea
aatgtgtggaatagttggaattacaagtaataaggaagtaacaactagaataataaattctctaaaaaaattagagtatagagggtatgattcagcgggtatagcaactcttaaagacggattcataaatgaagtaaagagcgaaggtagagttgaagtacttgaaaaaaatatttcaaatacaaatatacaaggagaaatcggtataggccatgtaagatgggctacacatggtaaacccagcactataaatgcacatccacattcatctgagtctgtttcagtagttcacaatggtattatagaaaattcaacaattttaaaaaaaattttagaaaaaaaaggttatagttttaagtcccaaacagatacagaggtaattgttcacttagtaaccgactatttaaaaaaaaataatttaaaaaatgcaattgttaaagttttaaaaaaattacatggaagctttgctcttggaattatatttaaggattatccagatctaattgtaggtgcaagaagaggttcgccattagctgtaggatatggtcctaatgaaaattatcttggatcagattcttatgcattgaaatctatgacaaataaaatttcctatcttaatgatggtgaattttgtttaattaaagaaaaccatgtagaattttttgatacaaagggcaataaagttaataaaa

SEQ ID NO: 246466 - DNA, 730 bp, Unknown
  Bacterial polypeptide expressing nucleotide sequence isolated from the Sargasso Sea
aggtgagccagttactttaaccatttgtaatgttgctaatagctttttgtgcagagaatcagactatactttgttaactaaagccggaccggaaattggtgtagcttcaaccaaaacttttgttacccaattagcttgtttaaatctgttgcttttaactttgatgagagtgcacaacaaattaccaacagcaagaaagaaaattaccgcagcactgagggatttgcctaaattaattaataagactttaaaaatgacaggcgaatacaagaaagtggcaaagctactttttaaaagaaacagtgcattatttttaggtcgtggtttgtattttcctattgctagagaaggagcacttaagctcaaagaaatatcttatatacatgctgaagcttatccaggcggagagttaaagcatgggccactggcactgatagacaaaaatatgccagtaatagctttagctccagacaatgaacatttagacaaaattatgtcgaacattgaagaggttgctgctcgaaaaggcaaggttattactataggaccactaggtagaacaaagatagataaaaatggcggccacattaagattcctaagacattggatctgcttaatccgattgtctccgtggtgccaatgcagttgattgcgtactacaccgcagtctttaaaggcactgatgtagataagcctcgcaaccttgcgaaaagtgttaccgtcgaatga

SEQ ID NO: 246467 - DNA, 856 bp, Unknown
  Bacterial polypeptide expressing nucleotide sequence isolated from the Sargasso Sea
aacggaagtccacttgttgcaggtacaaatggagttggcaattcaataggatctgactcaattgcattaagttcagttgccaataaagtgtgttacttggaagacggggatataacagtattaaccaaagaaagtatagaaatttataacctggagggtgaaagagcgaatagagaatttgttgaaataggaataaacgagtcagaagtttcaaaaggtccttataaacattttatggagaaagaaatacatgagcaccctcatgcagtaggtgaaacatttcgacaatttgtagattacgataagggtacaatcgcaatttcaaatattaatttaaattttgataaaatttcaaagatttgtctgattgcttgcggaacggcctattactcgtgtttagttggaaaatattattttgaacaatatgcaaggacaccggttgaatgcgatatggcatcagagtttcgttatcgtgatccagtaattgatcccaatgcattatgtatatttgtttcacaatccggtgagacagccgatactaaagctgcattagattattgtagaaagcaaaaaattcagacgttgagtattgtaaacgttaaaaatagctcaatagcaagagatagtgatcattgtatctataccaaggcaggtgcagaaataggggtagcttcaacgaaggcatttactgctcaattatcagcacttttatctctatcaattcatttagcatcagaaaaaaaattcatgtctattgaggaaaatacaaaattatgtaaggagattatgcaagcacctctattgcttgaacaagcaattgagagatcttattcactaaaagacacggcaaaagcaa

SEQ ID NO: 246468 - DNA, 866 bp, Unknown
  Bacterial polypeptide expressing nucleotide sequence isolated from the Sargasso Sea
ttaaaaaaacatttaattaacaaaggtcacaaatttaaatctcagacagatacagaggtaatcgttcatttaataacagaacatttaaagacttcagaattagaaaaagctatcacaaaaacattaaaacaacttcatggtagctttgctcttggaattgtttttaaagatatgccagacttaatagttggtgctagaagaggatcaccactagccgttggctatggtccaaatgaaaactatctaggatcagactcatatgctttgaaatcaatgacaaataaaatcacataccttgatgatggtgaattttgtattgttaaaaaagatcaggttcttttttttaatgaagaaggaaaaaaagttaataaaaaaatattagagttatcatctaatgaagcaaattatgataaaggtgattttaaacattttatggcaaaagaaattgaagagcagccaacaacaattaaaactggaataaaagaatacgtagataacgtaaataaagagataaatatttttaattttccatggaaaatagaagagattaattcaataattttaattggatgtggaactgcataccattcctgtttaatggctaaatattggtttgaggaacttacaaacttagatgttaacatagatatagcgtcagaatttagatacagaaaaaataggttcaaaaaaaatactttatatgtctttgtttcacaatcaggtgaaacagcagatacttatgcagctttagatctttgtaataaaaatcacatgaagacatgcgcggtagtcaatgtaattgaaagctcaattgcaagagattctaattttgttttaccaattcattgtggtcctgaaataggagt

SEQ ID NO: 246469 - DNA, 742 bp, Unknown
  Bacterial polypeptide expressing nucleotide sequence isolated from the Sargasso Sea
cttgtgcggtattattggtatagtgtcaaaaaatcaggtcgttgaccggttaatagaaggcttagaatgtctcgaataccgggggtatgatagtgcggggatagccactattaataattcggagattatttgcagtaaaagcacaggtaaacttgtttctcttaagaacaaattaaaaaaaaagccaatagacggttttattggaattggtcacacgagatgggctactcacggcgaaccaactgaaattaacgcacacccgcatgctacaataaatgtggcagtcgtgcataatgggattattgaaaattttgcagagttaaaagatggattgcttgagaaaggaataaactttgaatcgcagacagatactgaggttatagctaagcttgttgaggaaaaaatttctaaggaaaagcgtggacctttagaagcagtaagacttactgtggaaaaattacgtggatcttttgctttgtgctttattttcaaaggacatgagaatttcatggtagcaaccagaatgggatctccattagctcttggctttggcaatggagagaattttgttagttcagacgcgttatctttatcaatattttccaagaaagtatgttatttagaagaaggtgactttgctaaacttacctctgatgaagtgagaatgtatgatagctatggcaacagcatatctagggaccttaatatcttatatactgacccggtcaatctcagtaaaggt

SEQ ID NO: 246470 - DNA, 541 bp, Unknown
  Bacterial polypeptide expressing nucleotide sequence isolated from the Sargasso Sea
atgtgtggcataatcggagttacatcgttaagtgatattcaagatcacatattaagtagtttaaaaagactagaatacagaggttatgacagctcaggcatagccactatctcaaacaataaactttatttttgtaagtcagaaggtaaaatccaaaacttatcaaaaaaattaattaatcaccctgttgggggaaaaataggtataggtcatacaaggtgggctactcatggaattgtttctgaagttaacgcacatccacatgtttctggtaatgtagcaattgtacataatggaattattgagaattttcaagaaatcagaaatagacttgaagctaaaggcagaaagtttctatcacagacagatagtgaagttattgctcatttatttgatcaatacttaagtgatggtaaaatttcgctagaacagataactatgaatgttttacaacaactagagggtgcttatgcatttgtagttttgttattaaaccatccagatacattaattgctgcaagaaatgcgtcacctttagcta

SEQ ID NO: 246471 - DNA, 813 bp, Unknown
  Bacterial polypeptide expressing nucleotide sequence isolated from the Sargasso Sea
aagacggaacattgtttgtaaccatctcacaatcccgagaaacagcagatacattggctgccctcaaatatgcaaaagaaaaagattatttaagcacattatcaatttgcaacgttccaaccagttcgttggctagagaatcagagcatgttctttttaccaatgctggcccagaaattggcgttgcatcaacaaaggcatttactacccagctggcaggtttaatgctgttagccatgtctattgcaaaaagcttaaataaagacaaaaaattaagaaaaaaccttgtaaaagaattaagaaatttgccagaggtaatcgataagacattgaaattatcaaatgagatcatgaggatcgttcctaatatagctgataaacacaatgctttattcttaggaaggggaatgttttttccaattgttcaagaaggcgcactcaaactgaaagaaatttcatatattcatgcagaggcttacccggcaggagagttaaaacatgggccattggcattggtcgacgatcaaattccagtagtggcattatctcctgaaaatactttaactgaaaaattagtttcaaatcttgaagaggtgaaagcaagaggcggaacgctttatgtttttggtggagagaattcaaaaattaaaatcgaaagaggagaatatattcaaatgccagaatgcagcgaattgttagctccaatcatttataccattccacttcaaattcttgcatatcaagttgcatgtcaaagaggcactgatttagatcaaccaaggaacttagccaagtcggtcactgtagagtaga

SEQ ID NO: 246472 - DNA, 878 bp, Unknown
  Bacterial polypeptide expressing nucleotide sequence isolated from the Sargasso Sea
tatgcataaagaaattcatgaacaacctaccgctataggggaaactttaaaaagttttatagatttggacacaaagtcattaaagattaatagtgacctttttagtaaaaaaatttctagaataacaatgattgcttgtggtacatcgtcttatgcatgtaaggtagcaagattttggtttgaaaaattagcagcagtgcctgtacatattgatatagcctctgaatatagatatagaaggattatttattctgagaatgaattagttatatttatttctcaatcaggagaaactagagatacaattgcttgtctagaagaagctaaaaaattaggagtgaatacatttgctatagttaatgtatcagagagcagtattgctaggttagctgatgaaactattttaacattagctggacctgaaattggagtggcttctacaaaagcatttactactcaactttttacattactgattttagctataaagcttggtattgaaaaaaataaaatttcttctgaactcgaattttctttagtggatgaattaatggagataccttcgcttatgaaaaaaactttagataatgaagataaaattaggagtatagcatcagaagtttatactgcacaagatgtattatatttaggtagaggagaatgtcatgcaatagccctagaaggagcattaaaattgaaagaaattagttatattcatgcagaaggttatgctgctggagaattaaagcatggaccaattgccttagttgatgagaatgttcctataattggaattttaccaacaaatacattatttaataaaactgcttctaatttagctgaagtttatgctagaggaggaaaaatcatttctatta

SEQ ID NO: 246473 - DNA, 556 bp, Unknown
  Bacterial polypeptide expressing nucleotide sequence isolated from the Sargasso Sea
gtatcaagtcctgatgaaataggtaaattaataagcgaacttataaaacttccgccattacttgaagatctcttagagaaacataataaatcttcagaaaagttggcgcatgacttttttaatattaaagatgttattttcttaggaagaggaataaattatcctattgcccttgaaggggcgttaaaacttaaagaaataagttatatacatgcagctggatatcctgctggtgagatgaaacatggtccaatagctttattagataaaaaagtacctgtaatttcgattgcctcccctggtgaggtttttgataaagttatcagtaatgctcaagaagcaaaagctagagattcatatttaattggaattgctcctgaatgtaatggaactgaaatctttgattatttaatgaaagttccttcctctaatgaatggatctcacctctacttaatatactgcctttacaattattgagttaccatattgcagctcataggggacttgacgtggatcaaccaagaaatttagctaaaagtgtaaccgttgaataat

SEQ ID NO: 246474 - DNA, 277 bp, Unknown
  Bacterial polypeptide expressing nucleotide sequence isolated from the Sargasso Sea
ttagctcctagagacaattattacaaaaaaaccatttctaatatgcaagaagttatcgccagaggagctaaagttttattaattacaaataaaagaaaagatgaaattgtttcagaaaatatttgggagaaaatagaagttgaaaatactattgatgatttaattccatttttattaactgttccattacagaaattagcttactattcagccttgaaaaaaagctatgatatagataaaccaagaaacttagccaaatcagtcactgttgaataat

SEQ ID NO: 246475 - DNA, 780 bp, Unknown
  Bacterial polypeptide expressing nucleotide sequence isolated from the Sargasso Sea
ggtgaaactgctgatacttatgcagcactagaaaaatgcaaaagcaataaagttaaaacatgtggaatagtaaatgttgtagaaagctcaatagctagaagtgcagattttgttttaccaatacatgctggtcctgaaataggtgtagcttctacaaaggcatttattggccaaatgattgttctttatttgctaacgttaaaaatagctaaagagagaagtgacatcaagcaggatgaatattcaaaattaattttggatttaataaaattacctgaatttattgaacaaacattaaacaaacaaaaagatatacaaattatagcaagagactttataaatgctaaaggtacaatgtatttaggcagaggatactcttatccaattgcaatggaaggtgccctcaaattaaaagaactttcttacattcacgccgaaggttatgcggccggagaaatgaaacacgggccacttgctcttatcgaaaatggaatgccagtagtagttttagctcctaaagatagatattttgaaaaaacagtttctaatatgcaagaggttattgctagaggtggaaaagttttaatgattactgatgatacttcagaaacaatgaatgaaaatattaggtttaaattccaaattccaaaaaccaattcaacagttaattcttttcttttaacaataccaatacagtttttggcatatcatgtagctttattgaagaattgtgacatagataaaccacgaaatcttgctaaatcagttactgttgaataa

SEQ ID NO: 246476 - DNA, 417 bp, Unknown
  Bacterial polypeptide expressing nucleotide sequence isolated from the Sargasso Sea
taggcagaggagtatatttttcaattgcacaagaaggcgcattgaaattcaaagagattacatacattcatgcagaggcatacccagcgggagagctaaagcacggaccgcttgcgcttgttgatgaaatgacacctgttgtggcgctggccccagaggatgagctggtagaaaagcttctgtcaaatcttgaagaagttaagtctagaggaggcacactttacgtctttggaaatgcgacctcgaagatcaaaattgaaaaaggcaagttcatgaatatgcctgagtgtggttactacaatgcaccaattgtttatacgatccccttgcaaattttggcatatgaagttgcatgctcaataggaacagacctagaccaacctagaaatttagcaaaatcagtgaccgtggagtaat

SEQ ID NO: 246477 - DNA, 835 bp, Unknown
  Bacterial polypeptide expressing nucleotide sequence isolated from the Sargasso Sea
cgatatagaaatccccatgttgatgagaattcaattcttattacaatttctcaatcaggcgaaaccgctgatacgcttgccgcgttaaattatgcaaaagaaaaaaactaccttgcaactgttggaatttgcaatgtgccaaccagcactttagcaagagaatctgattttgttttatttaccaatgcaggtccggaaataggagttgcctcaaccaaggcatttacaacacagcttgctgctttaatgttgttaaccctttcgctcgcaaaagcgagaaacttgaatccaaaattaagacagagggtggtcactgccctaagagctttgccagaaataatcacgcaaactctagaattaaaagattctattattgagatggccccagcaattgccaacaaggataacgcactgtttttagggcgcggtattttttatccggttgctaaagagggcgcactaaaactcaaagagatttcatacattcatgctgaggcttatccagcaggcgagcttaaacacggacccttggcacttattgatgaaaacatgccggttatagcgttagcacctgaaagcgagattgcagaaaagctcgtttctaacttagaagaagttaaagcgcgcggtggaactctatatgttttttcggatccgagtgtctccatcgatgtaaaatctggaagtcttgtgccaatgccaaagtgcgattttttattaacaccaatcatctacaccatcccgctacagattctttcatatgaagtcgcgctgctaaggggcactgatattgatcagccaagaaacttagcgaagtcagttactgtagaataag

SEQ ID NO: 246478 - DNA, 878 bp, Unknown
  Bacterial polypeptide expressing nucleotide sequence isolated from the Sargasso Sea
gacctcaattgatgttgaaatagatatagcgtctgaatttagatatagaaaattaaagtttaattcaaataacctttatatttttgtttcacaatcgggagaaactgctgacactgcagcagcattagatatttgtaaaaaaaataatgttaaaacatgttcgattgtaaacgttatcgaaagtacaatagctagaaattctgactggattttaccaattcatgctggaatagaaattggtgtagcatcaacgaaagcatttttaggtcagctaactgtgctttatattttatgtttaaaaatagctattattagaaaagatattgatgaaaatatatacaaaaaaaatgtaagtaatttaaacaaacttcctgaagctattaaaaaatgtataaaaagtgagagtgatgttcagctaatggcaaaagaatttaattcagcaaaaggatcaatgtttttaggaagaggctcttcttttccaattgctttagaaggtgcactgaaattgaaagaattatcttacttacatgcagaaggttatcctgctggtgaaatgaaacatggacctctagctttaattgaagaaggcctaccagtgataataattgcaccaaaaaatagatattttgaaaaaacaatttcaaatatgcaggaagttattgcaaggggtggaaagatactttttattacagataacaaaaaagagtctcttaatgaaaatataaggtttggttttagagttccatatcttgacaatttcttatctccgatattgctcactttgcctttacaaatgcttgcttatcatgttgcgctattaaaaaattgtgatgttgataaacctagaaatttggctaagtcagtcacagttgagtaat

SEQ ID NO: 246479 - DNA, 433 bp, Unknown
  Bacterial polypeptide expressing nucleotide sequence isolated from the Sargasso Sea
taactggctattcttaggcagggggctcaattatcctgtcgcactccaaggcgcattaaaactcaaagaaatcagttacattcatgcagaaggcatgcctgcagcggaaatgaaacacggtccaattgcactcatcgatgaaggcatgccagttgtgtttatcgcaactcgggggagccaatacgaaaaagtcatcggcaacattgaagaagtaaaatctcgcggagggcatgtcattgctgttgcaaccgaaggcgacacaaacatcgcatcgcattgtgacgatgttttttacgttccagatgtccctgaagccttgcaaccactcattactgtcattccactgcaattgcttgcgtaccatgcagctgtcctgcgagggaaagatgttgataagccgagaaaccttgcaaaatctgttacagtcgaatag

SEQ ID NO: 246480 - DNA, 760 bp, Unknown
  Bacterial polypeptide expressing nucleotide sequence isolated from the Sargasso Sea
ctgataaaaactttattagtaacaatatctcagtcaggcgaaacggcagatacactttcatctttaaagtttgcaaaaaaatcgggcgatccagttactttaaccatttgtaatgttgctaatagctctttatgcagagaatcagactatgctttattaactaaagccggtccggaaattggtgtagcctcaaccaaagcttttgttacccaattagcctgtttaaatctgttgcttttaactttgatgagagtgcacaacaaactaccaacagcaagaaagaaaattaccgcagcactgagggatttgcctaaattaattaataagactttaaaaatgacaggcgaatacaagaaagtggcaaagctactttttaaaagaaacagcgcattatttttgggtcgtggtttatattttcctattgccagagaaggggctcttaagctcaaagaaatatcttacatacatgccgaagcctatccgggcggagaattaaagcatggaccactggcactgatagacaaaaatatgccagtaatagctttagctccagataatgaacacttagataaaattacatcaaacattgaggaagtggcagcccgaaaaggcaaggttattactatagggccactaggcagaacaaaaatagataaaaatggcggccacattaagattcctaagacattggatctgcttaatccgattgtctcagtggtgccaatgcaaataattgcttattacaccgccagtctttaaa

SEQ ID NO: 246481 - DNA, 518 bp, Unknown
  Bacterial polypeptide expressing nucleotide sequence isolated from the Sargasso Sea
aactaccttccccgatgcaatcaagaaaagcttgaaagtagaaaacagcattcaggttatggctaaagaatttctagatgcaaaaggatccatgtttttaggaaggggattatcttttccaatagcattagagggagccttaaagcttaaagaactatcttatttacacgcagaaggctatccagctggtgaaatgaagcacggacctctagctttaatcgaagaaggtttaccagtgattgttattgctcctaaagatagatattttgaaaaaactctttcaaatatgcaagaggttattgcaagaggaggcaagattttatttataactgacaataaaaaggaattaatgaatgaaaatattagatttggaatcagggtcccttcattagatagcttactttctcctatattgttaactattccaattcaattgttagcttatcatgttgctttactaaagggttgtgatattgacaaaccaagaaacttagctaagtcagtgacggtagaataaa

SEQ ID NO: 246482 - DNA, 682 bp, Unknown
  Bacterial polypeptide expressing nucleotide sequence isolated from the Sargasso Sea
atgtgtggaattataggcgtagcctcaactaaaccttcagtagataagctgcttataggtctcttacgtcaggagtataggggctatgattcggcaggattggctatatttgatgaagcagacgagatacagatttttaaaagaactggaaaagttgctgaacttcaaagctcaattgatcaaaatccagtcaatggaaatgtgggcatagctcacacaaggtgggccactcacggtcttcccacagaaaataatgctcacccgcatcactcaaataacaatgtttttgtaatccacaacggcattatcgaaaatcatcaagaaataaggacaacactaaaggctttgggttatgtgtttgagtctgaaactgacactgaagttatagcgcatttaatccatgcaaaaatggttcaagaagaggcatctctgattgaagcccttcagcttgctgtgaaagatttgaggggtgcatatgccataggtgctgtttgtgaaactgagcctggcatcattgcagcagctcgcaagggaagtcctctagttgtgggaatgggccacggagaaaactttattgcttctgaccaattggcactagcagattttgctgagaactttgttttcttggaagagggtgatttggctgaaataacttcgtcaggcacaaaatttggaacttaaa

SEQ ID NO: 246483 - DNA, 451 bp, Unknown
  Bacterial polypeptide expressing nucleotide sequence isolated from the Sargasso Sea
agaatttttagatgccaaaggatcgatgttcttaggtagaggcaattcttttccaatagctcttgaaggtgcattaaaattaaaagaactttcctatttgcatgccgaaggatatccagcaggggaaatgaagcatggaccacttgccttgattgaggaaggtttaccagtaatagtaattgcaccaaaagataaatattacgagaaaactttatcaaatacacaagaggtcatatcaagaggaggaaaaatattttttatcactgataataataaaagactattaagcacgaacataagatttagattgagagtaccacatgtagataatttattatctcctttattgttaaccattcctttgcagcttttagcttatcacgtagcactattgaaaaattgtgatatagacaaaccaaggaatctagcaaaatcagttactgtagaataa

SEQ ID NO: 246484 - DNA, 556 bp, Unknown
  Bacterial polypeptide expressing nucleotide sequence isolated from the Sargasso Sea
atgtgtggaataataggaatatctagcaataaacctgtctcagcaaatataattaactctttaaaaaaactagaatacagaggttatgactcagcaggtatcgccactctttcaaatggagaaattaacgaggtaaaatctgaaggcagagttgataatttagaaagcaactttgatttaaaaaatttaaaaggaaatattggaattggacacgttagatgggcaactcatggtattcccaatagtttaaatgcgcatccgcattcatctgataatgtatcagttgttcataatggaattattgaaaattcaacaatattaaaaaaacatttaattaacaaaggtcacaacttcaaatctcagacagatactgaagtaattgttcatttgataactgagcatttgaaaacttcagaattagaagaagctattacaaaaacacttaaacaacttcatggcagttttgctcttggaattgtatttaaagatatgcctgacttaattgttggtgctagaagaggatcacctcttgcagtaggttatggtccagaatgag

SEQ ID NO: 246485 - DNA, 409 bp, Unknown
  Bacterial polypeptide expressing nucleotide sequence isolated from the Sargasso Sea
ttcatatccaattgcacttgagggtgctttaaaactaaaagaactcgcatacgttcatgcggaaggttatccagcaggagagatgaaacatgggcctcttgcactaatagaagaaggtatgcctgtggtagtaattgctccaagagatgaacattacaaaaaaacaatttcaaacatgcaagaagttatatctagaggcgcaaaagttttactaataacaaataaaagtactgatgaaatttattcagaaaatatttgggagcaaatagaagttgatgcaatatctgatgaactcattccttttttgaccactatacctttgcaaaagttagcttattactctgcattagataaaggatacgatatagataaacctagaaacttagctaaatctgtcactgttgaataa

SEQ ID NO: 246486 - DNA, 636 bp, Unknown
  Bacterial polypeptide expressing nucleotide sequence isolated from the Sargasso Sea
tttgatcaaaaatccctcaaatggcaacataggtataggccatgtaagatgggccactcatggaatacctaatattattaatgcacatcctcattcgtctgaaaaagtttcagtggttcataatggtataatagaaaactcagatgaattaaaaaaggatcttgaagaaaaaggttttaagtttaaatcacaaactgacactgaagttattactgtcttagttacccagtttttagaaaattcaaaacctttagagtcagtattcaaaaccttaaaaaaattaaaaggtagttttgctttaggaataatatttaaaaattttccagacattataattggtgcgaggagaggtagcccacttgctgttggttattcaaatgatgaaaattacttaggttcagattcttacgctctgaaatctatgacaaataaaatttcttatttagatgatggtgaattatgtatgttatctaaaaataaagtcgatttttacgatttaaatcaaaaaaaaataaataaaaaaatttatactgtttcagacgatgaaaatactacagacaaaggtgactataaaaactttatgtctaaagaaatttttgagcaatctaacactatcaagaaatgcttgagcgagta

SEQ ID NO: 246487 - DNA, 805 bp, Unknown
  Bacterial polypeptide expressing nucleotide sequence isolated from the Sargasso Sea
caagaaggaatttttggtgcaggttttgaggcagctgtaaacaacatcaccaatatacagattgttgcatgcggcaccagctaccactcagcacgtatttttgaattttggtcccataagtttctgggcataaattgtcgagtagattacggcagcgaataccagtatcaagaacctgttaaatcagacaaaaccttacttgtaaccatttctcaatcaggtgaaacagcagacacactgtcatctttaaaatttgcaaagaaaactggtaatccgctttctctagcgatatgtaatgtagctaatagttctatttgtcgtgaatccgactttacacttttaactaacgctggtcctgaaataggtgttgcttcaactaaagcctttgttacacaattgtctgctttaaatttactcctgttgacacttatgaaagcgcacaatcgtttgcctgggtctagaaaaataattactaaagctttactagagctgcctgggcatttggaaaaaacacttaaacaagcagacgtatataaaaaagtagcaaaacaacttttcaagaaaaatagtactctttttcttggcagggggctttattttccaatagcgagagaaggtgctttaaaactgaaagagatctcttatattcatgctgaagcctatcctggtggtgagctaaaacacggccctctagctttaatagataaagatatgcctgtcattgccttggtgcctgacaacgagcacttagataaaattacttctaatattgccgaagttgcagcaagaaaaggcaaggttttta

SEQ ID NO: 246488 - DNA, 685 bp, Unknown
  Bacterial polypeptide expressing nucleotide sequence isolated from the Sargasso Sea
ttgataaacgcgatagaagaaagtaagttcagtaaattagagtcatcaaaagttgctattggtcatacaagatgggctacgcatggaaaggtaaatataaaaaacgctcatccaataatttatgacaaaaaagttgcagtggttcacaacggaataatagaaaactatgaaaaaataaaagaaaaatcatttctcaaatcatatgactttgaaactacaactgatacagaagtgataccagttttaattgataattttgttaaaaaagggaaatcttttttcgagtcagcaaaatcaacattaaaaataattgatggggcttatgcatttgctgcaattcatcaggattttccaaatgaaatatttgtatcaagaaacacctcaccacttgtcataggtataggatcagattttaaagtagttgggtctgactctcactcaataactcaattagtaaatcaagttatttatcttgaggatggtgattacgctataattcgaaataaagagattgaaatttttgacaaaaaagatgaaaaaactcatagaaaaatagtaaatgttaatactgatattggctttgttagtaaagatgggttcagacattttatggagaaagaaatttttgagcaacctaatgtactaataaatacaataagctctttgctgcaagaaaacgataaaa

SEQ ID NO: 246489 - DNA, 802 bp, Unknown
  Bacterial polypeptide expressing nucleotide sequence isolated from the Sargasso Sea
aatgtgtgggatagtaggaattacaagctcaaaaaaggtttcaagttctattttaaattcacttagaaaattagaatacaggggctatgattcagcaggtatagcaactttggaaagtggtgtaattaaagaagtgaaatgtgagggtagagtagatgcgctagaaaaaaatttgtcaaaacaaaaaattgatggcagtattggaatagggcacgtaagatgggcaacccatggagttccaagtacaattaatgcacatccacattcatctgataaagtgtcagttgttcataatggtataattgaaaattctactattcttaaaaaattattgattaaaaaaggttatgtatttaaatctcaaacagatacagaggtaattgtacatttaattactgattatttaaaaaaaaataatcttaaaaactcaataattaaaatgctgaaaaaagttcatggcagctttgcattaggtataatatttcaagatcagccagatttaatagttggagctagaaggggttcgccacttgctgttggttatgggccaaatgaaaattatcttggttcagattcttatgcattaaaatcaatgactaataaagttacttacttagatgatagtgaattttgtattattaaaaaagatggagtagaattttttgatgaaatcggaaataaagtaaataaaaaagtattagaactttcaaaagatgaacaggaatatgaaaaaggcgattataaacattttatggctaaggaaattgatgaacagccaaacaacattaaaaaattggtgtaa

SEQ ID NO: 246490 - DNA, 430 bp, Unknown
  Bacterial polypeptide expressing nucleotide sequence isolated from the Sargasso Sea
atgtatcttggccgcggtactgcgtttccattagcactggaaggagcattaaagtttaaagaaatatcatatattcacgcagagggatatcctgcaggtgaaatgaaacatggtccacttgctttaattgaaaaagatttgccagttgtgtgcattgttccaccgggtccgctattccataaaacaatttcaaacatacaagaagttattgctcgtggaggtaaaatattaatgataacagacgatgaaacattagaatcaaattctgaaaatatttgggaagtttttcgcttaccaaaatgccccaaatcaattgaggcaatcgtttattctgttccaattcatatgcttgcctattatacggcggttgagcttggtaatgatgtcgatcagccaagaaatcttgctaagtctgttactgtagaataat

SEQ ID NO: 246491 - DNA, 866 bp, Unknown
  Bacterial polypeptide expressing nucleotide sequence isolated from the Sargasso Sea
gctagaagtagacgtcgatatagcttcagaatttagatatagaaaattaagatttcatccagataacttatatatatttgtttcacaatctggagaaactgctgacactgctgcagcgctggatatatgtaaaaaaaataaagttaaaacttgttctatcgtaaatgttgtcgaaagcacgattgcaagaaactctgattgggtcttgccaatacatgcaggtcctgaaattggtgtagcttcaactaaagcttttgtaggtcaaatgatagttttatttatattaagcttaaaactagctaaagctagaaatgatatagatgataaagaatactataataatattaaaaatttatctggtcttcctaaagcaatagaaaaaagtttaaaagttgaaaataatattcaagcgatggctaaggaatttctggatgcaaaagggacaatgtttttaggaagaggattgtcttttccgattgctctagaaggagccttaaaactgaaagaattatcttatttacacgctgaaggttatcccgctggtgagatgaaacacggaccattagctttaattgaagagggattacctgtaatcgttatagcccctaaagataaatattatgaaaaaactctttctaatatgcaggaagttatggctagaggtggaaaaattctttttattacagatcataaaaaagaattaatgaatgaaaacataagattaggtattagagttccttcaattgataatttgctttcgcctatacttcttacaataccaatacaattattagcttatcacgtagcgttgttaaaaggctgcgatatagataaacctagaaatttagctaaatctgtaactgttg

SEQ ID NO: 246492 - DNA, 694 bp, Unknown
  Bacterial polypeptide expressing nucleotide sequence isolated from the Sargasso Sea
tcagaatatagatacagaaatccgcatgtagacgaggattcccttttggttacaatctcacaatctggagagacagccgacactattgcagctttgagatatgcaaaagagaaagattacctatccacaatcaccatctgcaatgtcccaactagctctcttgctagagagtccgatttttttctctacacaaatgctggtcctgaagttggagtcgcgtctacaaaagctttttcaacacagttaacaggtttaatgttactagttttgtctcttgcaaaaagcagaaaaatgaatcctaagctgaggcaaagagtaattacagcgctgagaaggctccctgaaaaaatcgaggaagctctcgaattaaaagaagagatcattaagatagctcctgaaattgcaagtaaagaaaatgcacttttccttggtcgaggaattttttatccaatatctaaagagggcgcactaaaacttaaagaaatatcatatattcacgcagaagcatatccagcaggcgaacttaaacatggccctttggctcttattgacgaaaatatgccagttattgcccttgcgcctgaaagtgaaatagttgaaaaactggtatctaatctcgaagaagtaaaagcaagaggtggaatgctctatgttttttcagattcttctgtaacgatggatacaagctccgggg

SEQ ID NO: 246493 - DNA, 642 bp, Unknown
  Bacterial polypeptide expressing nucleotide sequence isolated from the Sargasso Sea
aatgtgtggaataattggaattactagtacaaaacaagtttcttcagcaataattaattcgttaaaaaaattagaatatcgtgggtatgactcagcaggcatagcaacattaaacgatggatttattaatgagattaaatgtgaaggaagagtagatggtttagaaaaaaatgtaactaaaattaatttacttggcaatgttggaataggacatgttagatgggcaactcatggcattccaagtattataaatgcacatccacattcatccgaaactgtttcagttgttcataatggaataattgaaaattcaacaattctcaaaaaatttttagttgataaaggacataaatttaaatctcaaactgataccgaagtgattgttcatttagtaacagaatacttaaaaaaaaatagtttaaaagaatcgattctcaaaatgctaaaaaagctcgaaggtagttttgcattaggaataatctttaaagatcaaccagatttgatcgttggtgcaagaagaggttcgccattagcagttggttacggtcctaatgaaaattatttgggatcagattcatatgcattaaaatcgatgacaaataaaatttcatatcttaatgatggtgaattttgcattttaaa

SEQ ID NO: 246494 - DNA, 651 bp, Unknown
  Bacterial polypeptide expressing nucleotide sequence isolated from the Sargasso Sea
aatgaaaacttgtgcagttgtaaatgttattgaaagttcaatagcgagagatgctgatttagttttacctatttattgtggtcaagaagttggtgttgcttccactaaagcgtttcttggacaaatgctagtgctatatattttatctataaaaatttcctttgatcaaaaatttattacaaaaagagaatatcaagcaaaaattaaaagtttactatcactgtcaaattcagcaaaaaaaacgcttaaattagaccataaacttttaaatattggtaaagtttttgcgcatgctaaaggatgtatgtttttaggaagaggttattcttttccaattgccttagaaggcgccttaaagctaaaagaattagcttatgttcatgctgaaggttatcctgctggtgaaatgaagcatggaccactagctttgatagaagaaggtatgccagtagttgttatagctcctagagatgatcattataaaaaaacaatgtctaatatgcaggaggttattgcaagaggagcaaaggttttactaataactagtaaaagtaaagatgaagttatttctgaaaacgtttgggaacaaatagaagttgataaattaaatgatgaattaattccatttctagtaactatacctttacaaaa

SEQ ID NO: 246495 - DNA, 605 bp, Unknown
  Bacterial polypeptide expressing nucleotide sequence isolated from the Sargasso Sea
catgtgtggaatagtagggtattcaggacctaaagagcctcttccaattctaattgcaggtttatcgagattagaatatcgaggctatgactctgcaggtatagcgatttctgatggttcagagataacaatagaaaaaaaagaagggaagctagaggctcttaagaaacacttagctgacaaaaaaataaagggcaatataggtatagggcatacaagatgggcaactcatggtgtgccaaatgatgttaatgctcatccacattcagataatgatcaagattttgcaattattcataatgggataattgaaaattatgctgagatcaaagaagagttactaaacgatagttataagtttgaatcagatacggacacagaagttgttgcagtcgaactaagtaaacaatggaacggaaatttactagaaacggtagtaaatgtttcaaaaaatctagaaggaacctatgcattggttgtaacaacaacgaagcaagaaaatactattgttgcaggtaggatgatgagtcctcttgtactaggagtgggagagggagaggtgtttctcgcctcagactcagctgcaattttagaacatacagata

SEQ ID NO: 246496 - DNA, 851 bp, Unknown
  Bacterial polypeptide expressing nucleotide sequence isolated from the Sargasso Sea
aatgtgtggtatcattggtatagcctctaaagagaatgtgtcttcgaatattataaatgcattaaagaaattagaatatcgtggttacgattctgctggtattgcaattaatgctaataacaagattaatcaaagaaaggtaaaaggtaagcttgataatttgatctatgctcttcagaaagatcaatttgatggtaatacgggaattggccatacgcgttgggctacccatggagaaccttccgataaaaatgctcatccccattcatcaacctcagtatcgcttgtacataatggaataattgaaaatgctgcagaattgaaaaaattaaaggaattaaaagaataccattttgagtctgacactgactctgaagtaattactgcgttattgacgttttatctaaaggagggcctgagtcatcttgagagtgttcaaaagacaatttcttctctagagggatcatatgcactagcaattatttttagtgatagtgaagatactatttatggcgctaagaatggaagtccgcttgttgcaggtacaaatggagttggcaattcaataggatctgactcaattgcattaagttcagttgccaataaagtatgttacttggaagatggggatataacagtattaaataaagaaagcatagaaatttataacctagagggtgagagagctaatagagaatttgttgaaataggaataaatgagtcagaagtttcaaaaggtgcttacaaacactttatggaaaaagaaatacatgaacaccctcatgcagtaggtgaaacatttcgacaatttatagattacgataagggcacaatcgcaatttcagatatta

SEQ ID NO: 246497 - DNA, 922 bp, Unknown
  Bacterial polypeptide expressing nucleotide sequence isolated from the Sargasso Sea
tacgatcaaagatactatgcgaggtagaatagatccaattgatggtacggctcacttgggcggtattgaggattatatgaatagaatacaggatgcacatagaatatatattaccgcttgcgggacatcttggcatgctggcttaataggaaaatatcttattgaggagtatgctggaattcctgtgcatgtagaatacgcttccgaatttcgctatagaaaaccaataattgactcaaatactgtcgttataggtatttcccaatcaggagaaacagcagatacgttagctgcaattagaaaagctaaagatttaggagctttgactgttggaatttgcaatgtggtaggctcttctgttgccagggaaactgattgcggaatttatacccatgcaggtccagagatcggcgttgcatcaaccaaagcctttacatcacaagtatcagtactatttcttttatctttatgctttggaaagaataggaacctttcatcccaaacaggtaagaaatacgcaaatgcattaacgaatattggtgaacaggtaaaaataattttagatggatctagctcaattttagaagttgcgaaatcaactgtacatgcagataattttctatatttaggaagaggtttaaattttccagtggcgcttgaaggagctttaaaattaaaggaaatatcttacattcatgcggaaggctatcctgcagctgaaatgaaacatggccccatcgctctaattgatgagaaaatgcctgtcgtgtgcttagctcctgacgacagaacctatgataaggtgttatccaatattcaggaggtaaaagctagaaaaggtgtaatcattacagtgacaaataatagaactcctgagcttgagaaagtatcagactatataatagagttccttcaacgcacc

SEQ ID NO: 246498 - DNA, 868 bp, Unknown
  Bacterial polypeptide expressing nucleotide sequence isolated from the Sargasso Sea
ttagccgtatcacaaaaattacaaggtacttatgctttagctgtattagacaagaataaccctaaagaaattgtgtttgcaaaaaaaggaagtccattaattattggtattggtgaaaatgaaaactttttagcatctgatactcatgcattaatagaacatacaaaagattttatttatttagaggatggggaccacggaaaaatttttgagtcagggtatttcatttgcgatccttcaggtaaggaattatctcgtgaggttatgcagtcaaaattaagccttcaatcaactgaaataggtgaatatagccacttcatgcaaaaagaaatatatgagcagccagatgctattttagaggcttttcaaggaagaatagttgaaggaaaagtaccaattgaaatgctaggcccaaatgccttagcaatcttaaaaagtgttaagtttgttcaaattgtggcatgtggtacaagttatcatgctgcacttataatgaaacactggttagacaagcttgcaggcataccttctcatgcagaagttgccagtgaattcagataccgtcaacatgccgttcaagatgacacattgtttattacaatttcacaatccggcgagactgccgacactttagcggcattaaaagaaattaaaaaagacccacgatacatcagtactttatctgtatgcaatgttcctgagagctctttatctagagagtcggatgtaacagtatttacaaatgcgggtgctgaaattggggttgcctcaactaaagcatttacttcccaactcaccactttaatgctcattgtgattacacttggtaaaaattttctcattgacgaaaaactcgaaaaagaacttt

SEQ ID NO: 246499 - DNA, 303 bp, Unknown
  Bacterial polypeptide expressing nucleotide sequence isolated from the Sargasso Sea
ttgtggatgaggatatgccggttgtcgctgttgcacccaacaataatttattagagaaacttaaatcgaatttagaagaggtcaaagcacgcggtggaaagctctacatatttgctgatgagataagtgaggtggagtcaaccaatggcatgtttgtgcttaatattaacaatgtttatgactatatgagcccaattattcatacaattcctctacaactcttagcttactatgtggcggtgattaaaggtgctgatatcgatcaaccacgaaatttggcaaagtcagtgacagtggaataag

SEQ ID NO: 246500 - DNA, 740 bp, Unknown
  Bacterial polypeptide expressing nucleotide sequence isolated from the Sargasso Sea
tatgtgtggaattattggaatatctagcaacaaacctgtttctggaaatataattaattcattaaaaaaattagaatacagaggatatgattcagcaggtatagctacactttcaggtggtgaaatcaatgaaataaaatctgagggaagagtagataacttagaaaataattttgatttaaaaaacttaagaggaaatattggtataggacatgtaagatgggccacacacggtataccaaatagtttaaatgcacatcctcattcctctgataatgtatcagtagttcataatggaattattgaaaattcaacaatattaaaaaaatacttaattaacaaaggtcataattttaaatctcaaacagatacagaagtaattgttcatttaattactgagcatttaaaaactttagaactagaagaagctataacaaaaacattaaaacaacttcatggtagttttgcacttggaattgtatttaaagagatgccagatttacttgttggtgctagaagaggctcgcctttagcagttggatatggtcctaatgaaaattatctaggctcagactcatatgccttgaaatcaatgactaataaaatcacgtaccttgatgacggcgaattttgtattgttaaaaaggatcaagttcttttttttaatgaagatggaaagaaggttaataaaaaaatattagaattatcatctaatggagcaaattatgacaaaggtgatt

SEQ ID NO: 246501 - DNA, 823 bp, Unknown
  Bacterial polypeptide expressing nucleotide sequence isolated from the Sargasso Sea
atttataattttccatggaacacaaattcttttaaatccgtgttacttattggttgtgggacagcatttcactcttgccttgtagctaaatattggttggaacaaaatacaaatttagatgttagtgttgatattgcctctgaatttagatatcgaaaagttagatttaaaactgattgcctttatatatttgtttcacaatcaggggaaactgcagatacatatgctgccttagatttatgcaaaaaaaataaaatgaaaacttgtgcagtggtaaatgtagttgaaagttcaattgcaagagatgctgatttagttttgccaatccactgtggacaagaagttggtgtagcatcaactaaagcatttattggacaaatgttagttttatacattttatgtactaagatttcttttgatcaaaaatgtataacaaaaaaagagtatcaaactaaaattaaaaatttacttactttatcaagctccacaaaaaaaactctaaaaatagatcaaaaaattttaaatattggaaaagtatttgcgaatgcaaaaggctctatgttcctaggaagaggatattcatttcctatagcattagagggagcattaaaacttaaagagttagcatatgttcatgccgaagggtatcctgctggcgaaatgaaacatggaccattagcactaatagaggagggaatgcctgtggttatattagccccaagagatgatcattataaaaaaactatttcaaatatgcaggaagtcattgctagaggagcaaaagttttattgataacaaataaaagtaaagatgagattattt

SEQ ID NO: 246502 - DNA, 463 bp, Unknown
  Bacterial polypeptide expressing nucleotide sequence isolated from the Sargasso Sea
acttggaaaagattttgctaattctaaaggatcaatgtttttgggaataggttattcatatccaattgcgcttgaaggtgctttaaaactaaaagagcttgcttatgttcatgccgaaggttatccagcaggtgaaatgaaacatggacctcttgcactaatagaagaaggtatgcctgtagtggtaattgctccaagagatgagcattacaaaaaaactatttcaaatatgcaagaagttatatctagaggtgcaaaagttttactaataacaaataaaagtactgatgaaatttattcagaaaatatatgggagcaaatagaagttgagcatatatcagatgaactcattccttttttgaccactatacctttacaaaagttggcttattactctgcactagataaaggatacgatatcgataaaccaagaaacttagctaaatctgtcactgttgaataa

SEQ ID NO: 246503 - DNA, 715 bp, Unknown
  Bacterial polypeptide expressing nucleotide sequence isolated from the Sargasso Sea
aaatattggtttgaacaacttacttcttttgatgttcatatagatattgcatcagaatttcgttacagaaaaaatagatttaagaatgagactttgtacgtttttgtttctcaatctggagaaacagctgatacttatgcggctttagatttatgcaataaaaacaatatgaaaacatgttctgttgtaaatgtagtagaaagttcaattgcaagagactcaaaatttgttttaccgatacattgtggtccagaaattggtgttgcatctacgaaagcctttttaggacaaatgttagtactttatttgttatgtcttaaaatgggtaaacttaatgatgatatcaagaaaaaagaatatatttccaaaatcaaaagcttattaaatttatcgaaaaatatagaactttctctaaaatctgaaaacgatattcaaaccatatcaaatagttttacaaatataaaaggttctatgtttttaggtagaggttattcgtatccaattgcacttgaaggtgcacttaaattaaaggaattgtcttatattcatgcagaaggttatccagctggtgaaatgaaacatggtcctttagctttaatagaagatggtatgccagttgtagttattgctccaagggacgagtactacaaaaaaacaatgtccaatatgcaagaggttatagcaagaggtgctaaagttttattaataacaaaca

SEQ ID NO: 246504 - DNA, 746 bp, Unknown
  Bacterial polypeptide expressing nucleotide sequence isolated from the Sargasso Sea
taacaaaaataagctaaaaacttgttctataataaatgttgttgagagctctattgcaagagactcgcagtttgttttaccaattcatgtgggtcctgaaataggtgtagcttctacaaaagcttttttaggtcagatgctagttctctatattttatgcttaaaattatcttatgaaaggaaagaaatagataaaaaaacttttagctataaagttaaatctttattggaattatctaaaaatgttaaaaaaactctttcaactgagaatcaaattcaaacagtgtgtaaaagttttgttgatgcaaaaggctctatgtttttgggtaggggtttttcatatccaattgctttggaaggcgctcttaaattgaaggaattagcttatgtacatgcagaaggatatccggctggtgaaatgaaacatgggccacttgctttaatagaagatggaatgcctgtagttgttttagctcctagagatgagtacttcaaaaaaacaatttcaaatatgcaggaagtaattgcaagaggagctaaagtactattaattacaaataaaagcaaagatgaagttcttcatgaaaatatttggcaatcaataaaagtagaaaatacaaatgacgatttgttgccttttttaataactattcctttgcaaaaacttgcatatcattcagcattaaataaaggttatgatatagataaaccaagaaatttagcaaaatctgtcactgttgaataat

SEQ ID NO: 246505 - DNA, 360 bp, Unknown
  Bacterial polypeptide expressing nucleotide sequence isolated from the Sargasso Sea
tatgtgtggaatagttggaatagtaagtaataaatcagtatcagcaagcataattggtgcattaaaaaaactagaatatcgtggctatgactcagctggaatttcaacactaagtaataatgaaataaacgaacaaaaatgttctggaagagtagataacttggaaaaaatactttttcaaaatccttctgatggtgatcttggtattggacatgtaagatgggcaacacacggaatcccaaatcaaattaacgctcacccacattcctctgaagtagtatcagttgtacacaatggtataattgaaaattccgataaattaagagacgaatatattaaaaaaggttactcttttaaatc

SEQ ID NO: 246506 - DNA, 463 bp, Unknown
  Bacterial polypeptide expressing nucleotide sequence isolated from the Sargasso Sea
atgtgtgggataattggtattgcgagcaataagtctgttacctcaaatattattaattctttaaaaagattggaatatagaggatatgactccgctggtattgcgacaatctttaaaaaaaatcttaatgaaaaaaaatgctctggaagagttgaagagcttgaaaagatattatttaattctccagctcatggcaatatagggattggccacgtaagatgggctactcacggcataccaaacgaagttaatgctcacccacattcttccgaaatagtttcggtggttcataatggaataattgaaaattctaattctcttaaaaagaaactggagaaagagggatacaaatttaaatctcaaactgacactgaagttatcacattattgataacgaaatatttaaaagactcaaacccggttgatgcggtattaaagtctttaaaatatcttgaaggaagtt

SEQ ID NO: 246507 - DNA, 640 bp, Unknown
  Bacterial polypeptide expressing nucleotide sequence isolated from the Sargasso Sea
gcaagaagaggctctcctcttgcagttggttatggtccaaatgaacactatcttggttcagactcttatgcgttaaagtcaatgactaataaaatttcatatttaaatgatggagaattttgcatattaaaaaaagatcaagtcgaattttttgattctggtggaaccaaagtaaacaaaaaaattttaaatctttctaaagatgatcaaaattatgaaaaaggagattacaaatattatatggctaaagaaatagatgagcagccaaccacgttaaaaaattgtgtaaatgagtacatcgacaaacataataaagagataaatatttataattttccttggaaaatcaataaaatctcatcagttattttaattggatgtggaacagcatatcactcatgccttgtggcgaaatattggtttgagcaaaatacaagcttagatgtgagtgttgatatagcttctgaatttagatatcgaaaaattaaatttaaaaaagattgtctttatgtttttgtttctcaatctggagagactgcggatacatttgctgcattagatttgtgtaaaaagaataatgttaaaacttgtgcagtagtaaatgttgttgaaagttcaattgcaagagatgcagatctag

SEQ ID NO: 246508 - DNA, 888 bp, Unknown
  Bacterial polypeptide expressing nucleotide sequence isolated from the Sargasso Sea
attattaggaattgcaagcaataaacctgtttcaattaatataattaattctctaaaaaaattagagtacagaggttatgactctgctggaatagcaactttagataataatttaattgaagaaaaaaaatgttctggaagagtagaggagttagaaaaaatattatttaaaaatccttcaaccggtaatatcggaataggacatgttagatgggctacacacgggattcctaatattataaatgcgcatccacattcttcagatgaagtatccgttgttcataacggaataattgaaaattctgatgaactaaaaaaaaatcttgaagataaaggatttaaatttaaatcacagacagatactgaagtaataactattttaatcacacaatatttgaatgattcaaaaccgttagactcagtatttaaaactttaaaaaaattaaaaggtagttttgcacttggtatcatatttagaaatcattcagatattattataggagcaagaaaagggagccctttagcagtgggttattctaatgaagaaaattacttaggttcagactcttatgctttaaaatctatgacaaataaaatttcttacctagatgatggagaagtatgcatgctaactaaaagtgatgtgactttttacgattcaaaaaaaactaaaataaataaaaaagtttataccctatctgatgatgaaaatacttcagataaaggtgattataaaaactttatgtctaaagagatttttgaacaatcaagcacaataaaaaagtgcattagtgagtatactgatagtatcaaaaaagatataaatatttataactttccaataaacccaaaaaaaattaataagataatattaatttggatgtggta

SEQ ID NO: 246509 - DNA, 691 bp, Unknown
  Bacterial polypeptide expressing nucleotide sequence isolated from the Sargasso Sea
atgtgtggtattataggaattaatagtaataaagaggtttcatcaacaattttaaattcacttagaaaattagagtatagaggatatgactcagctggcattgccacattaaatagtggatatattcaagaggtaaagtgtgagggtagagtagaaaatctcgaaaaaaatataatcaaaaataaattgcttggaaatgtaggcataggtcatgttaggtgggctactcatggtattcctagtgctttaaatgctcacccccattcctctgataatgtttcagtggttcacaacggtattatagaaaactcaactttattaaaaaaatttttagttaaaaagggtcacagatttaaatctcagacagatacagaggttattgtacatttaattacagaatatttgaaaaaaaataatttaatagacacattaacaaaagtattaaaaaaacttcatggtagttttgcattaggaataatttttaaagatgaaccggacttaatagttggtgcaagaagaggctcacccttagcagttggttatggtccaggtgaaaattacctaggttcagattcttatgcattaaaatctatgactaataaaataacttacttagatgatggtgaattttgtattttaaaaaaaacagaagtaagtttttttaatgaacaaggaaaaaaaataaataaaa

SEQ ID NO: 246510 - DNA, 97 bp, Unknown
  Bacterial polypeptide expressing nucleotide sequence isolated from the Sargasso Sea
cgtcgcggttcaactgattgcctactatacagctgttgcaaaaggcacagacgtagatcaacctagaaatttagccaagtctgtgacggttgaatga

SEQ ID NO: 246511 - DNA, 922 bp, Unknown
  Bacterial polypeptide expressing nucleotide sequence isolated from the Sargasso Sea
agtaagtgaactagaatcagctttatccaaaacagatatttataattctggaatagctcatacaaggtgggctactcatggtaaaccaaatcaattaaatgctcatccccatttagatcaatcaaagaaaattgctttagtgcataatggaataattgaaaattatgatccgattaaaaaatttcttttatcaaaaaaaataagttttaaatcggagacagatacagaagtattagtacagctaattggatatttttacaataatggaaaaatgagctttgaaaaatctgtgcgcgcagctttgcaaagagtcgatggcgcttatggaattgtaattcttaatactgattatccagatatgatgattgctgctagaaaaggaagtccattagtactaggaattaaagaaaaggaattttttattgctagcgatatatcacctattgtaaaacacacacaagatataatctacttgaaagattcagaaatggccgttataaataataaaagttttgaggtaaaatccgtagataaagacatttctttgcctaaaaatattgaaaaaattgattttaaaatcgatgattttgataaaggcaattttgattattttatgcataaagaaattcatgaacaaatatcaacaatacctaacacaatcaaaggaagagttaaagatggatcagttttattgcagggtatatctgattattgggataaaatagaatcagctgaaaagatttatattaccgcttgtggaacatcttggcatgcagggttaataggtaaaaattttattgaaagatttgcaaatgttccagttcatgttgaatacgcttcagagtttagatataatcatactgtgatagatagcaaaactgttgtaattgctatctctcaatctggagagaccgctgatact

SEQ ID NO: 246512 - DNA, 735 bp, Unknown
  Bacterial polypeptide expressing nucleotide sequence isolated from the Sargasso Sea
tttaaacttaacaaaagatgatcaaaattacgacaaaggcgattataaatacttcatggcaaaagaaattgatgaacagccaactactattaaaaactgtgtaaatgaatatatagataaatttaacaagcaaataaatatttataattttccttggaaattaaaagatatttcatcgatatcattaattggttgtggaaccgcatatcattcatgtttgttagcaaaatattggtttgaggaaaatacaaacttagatgtatcaattgatatcgcttctgagtttagatatcgaaggataaagtttaaaaaagattgtttatatgtgtttgtttctcaatcaggagaaacagctgacacatatgcagcattaaacatgtgtaaaaccaataaaatgaaaacatgttcaatagtaaatgttgttgaaagctcaatagctagagattcagattttgttttaccgatacattgcggcccagaagttggtgttgcttcaactaaagcttttttaggtcagatgctagttttatatattttttgtttaaaaatatcatttgatcaaaaaagaattagtaaaaaggattttcagaaaaaaataaaaaatttactatctttatcaagtttagcaaaaaaaactttattgatagataataaaattcaaaaaaccagtaaagcatttattgaagcaaaaggatcaatgtttttgggaagaggctattcatttcctatagcatt

SEQ ID NO: 246513 - DNA, 718 bp, Unknown
  Bacterial polypeptide expressing nucleotide sequence isolated from the Sargasso Sea
agattatttaaaaacagaaaatttaattgatagtatttataaaacattaaacaaattaattggaagttttgcattaggagtaatttttaaagattttgaagatgtagtggttggagcaagacgtggaagtcctttagctgtaggctatgggcataatgaaaattttttaggatctgattcttatgccctaaaaactatgacaaataaaatttcttatctagacgatggagatttttgtttattatacaaagaaaaaatagaattttataattctgataagaaaaaaataaataaaaaaatttttgaattatccaatgaagaaaatatagccgagaaaggtgattataaagattttatgtcaaaagagattgatgaacagagttatacaacaaataaatgtattcatgaatatttggatcaatcaagaaatgaaataaacatttataacatccctataaatccattaaaaataaataaaataaggttagttgcttgtggaactgcttaccattcttgcttgatggcaaaatactggattgaagaattcacctcaattgatgtagaggccgatatcgcatctgaattcaggtatagaaacgtcaaattaaataaagatgatttatatatatttgtatcacaatccggtgaaactgctgacacatatgcagctcttgaaaaatgtaaaaataatggattaaaaacttgcggaatagtaaat

SEQ ID NO: 246514 - DNA, 889 bp, Unknown
  Bacterial polypeptide expressing nucleotide sequence isolated from the Sargasso Sea
gtaagacaacaaagcccgctcgttatcggcgaaggctttgaagaacaatttattgcctctgacattatggccttgtctaacattactaataaattcaaatttatggatgatggacaaatagctattcttaataaagaccatataactgtgacctcttcttctggagtggcagcaaaattaaaaacccaagaggtagactcaaatgcctataccaacgatctaaaaggctatagccattttatggagaaagagatatttgagcagtcagatgtcactaaagacgctcttgaaggcagacttacaaaaaatgaaagccaagaggggatttttggggttggctttgaaaaagaaatgaaaaacattacaaacatacagattattgcttgtggcacaagctttcatgcaggcagaatatttgaattttggtcgcataagttcttaggaataaattgtcgagttgattatggcagtgaataccaatatcaaaaaccaattaaaacagacaaaacactattaataacgatatctcagtcaggcgaaacggcggacacgctttcatctttaaagttcgctaaaaaatcaggcgatccagttaccttaactatttgtaatgttgccaatagttctttgtgtagagaatcagactacaccttattaactaaagctgggccggaaattggtgtagcttcaaccaaagcgtttgttacccaattggcttgtttaaatttgttgctattaactttaatgagagtgcacaacaaactgccaacagcaagaaagaaaattacagcagcacttagagatttacctaaattgatcaataggactttaaaaatgacaggcgaatacaggaaagtggcaaagctacttttaaaagaaacagcgcatt

SEQ ID NO: 246515 - DNA, 436 bp, Unknown
  Bacterial polypeptide expressing nucleotide sequence isolated from the Sargasso Sea
atgtgtggaatagttggaataacaagtaataaaccagtttcatcagcaatcataaattccctaaggaaacttgagtacagaggatatgattctgccggtttagcaacattatcagatggttttattaatgaagttaaaactgaaggaagagtagacaaattagaaaaaaacaatgatataaaaaaaatgttaggtcatgttggtattggtcatgttagatgggcaacccacggaattccaaacacaataaatgcgcatcctcattcctcagagacggtttcaatcgttcataatggtataatagaaaattcaacaactctcaaaaaaagtttagttgttaagggacacaaatttaaatcacaaactgatactgaagtgatagttcatttaattactgagctacaaaaagaaaatgatttaaaaaattcaatttaaa

SEQ ID NO: 246516 - DNA, 157 bp, Unknown
  Bacterial polypeptide expressing nucleotide sequence isolated from the Sargasso Sea
tttgattatttgatgaaagttccttcctctaatgaatggatttcacctctaattaatattttgcctctacagttattgagttatcatattgctgctcataggggacttgacgtggatcaaccaagaaatttagctaaaagtgtaactgttgagtaat

SEQ ID NO: 246517 - DNA, 335 bp, Unknown
  Bacterial polypeptide expressing nucleotide sequence isolated from the Sargasso Sea
tgctggagaattaaaacatggacctttagctttagttgacaaaaatatgccagttgttggtttaatgcctgataacaatcttgtgaatcaagtcctatctaacttagcagaagttaaggcacgacaaggattagtttatatatttactaacaagaaaatgaaacttaaaagaaatgacaagactaatattatcccaatgccagcatgtggccactatattgcccctttggtatatgtcattcctatgcaacttttgtcttatcatgttgctcttaataagaaaacaaatattgatcaaccaagaaatcttgcaaaatcagtcactgtggagtaat

SEQ ID NO: 246518 - DNA, 690 bp, Unknown
  Bacterial polypeptide expressing nucleotide sequence isolated from the Sargasso Sea
aatgtgcggaattattggtatagcaagcaacaaaccagtctcaataaatataattaattctttaaaaaaattggaatataggggttatgactcagcaggtctagcaacattgacgaataattttattaacgagaaaaaatgttctggtagagtagaggagttagaaaaaattttattcaaaaccccttcaaatggcaatataggcattggtcatgtcagatgggccactcatggtgttgcaaatgttatcaatgcgcatcctcattcttctgagcaagtttcagttgttcataacggtataattgaaaattcagatgagataaaaaaagagttagaagcaaaaggactaaaatttaagtctcaaactgatacagaggttataactcttcttattaccgaggcattaaaaaatagcaacccattagattcagttttcaaaacattaaataagcttcatggtagttttgctcttggtattctgtttaaaaatttttcagacattattataggtgcgcgaagaggaagccctttagcagtagggtactctaatggcgaaaactatttaggttccgactcttatgctttaaaatcaatgactaataaaatctcctatttagatgatggtgaagtatgcgtattaagcaaagataacgtaaatttttacgacgcaaatcagaaaaagataaataa

SEQ ID NO: 246519 - DNA, 832 bp, Unknown
  Bacterial polypeptide expressing nucleotide sequence isolated from the Sargasso Sea
attggagcgagaagaggttctccattggcagttggttatggtccaaatgaaaattatcttggatctgattcatatgcgttaaaatctatgactaataaagtctcttatcttaatgatggagagttttgcttaataaaagaaaatatcgttgagttttttgacacaaaaggacacaaggtaaataaaaaaattttaaatttatcaaaagatagtcaaaattacgacaagggtgattataaacattttatggcaaaagaaattgatgagcaaccaattacaataaaaaattgtgtaaacgagtatatagacaagattaacagacaaattaatatttacaatttcccatggaaaaaaaacgacatatcttcaatagttttagttggatgtggaaccgcctatcattcctgtctagtagcaaaatattggtttgaacaacatacatcattagaagtttctgtagatattgcctcagagtttagataccgaaaattaaattttaagaaaaattgtttgtatgtttttgtatcacaatctggggagaccgctgatacttatgcagctttagatatttgtaaaaaaaataaaatgaaaacttgttcaattgtaaatgtcgtagaaagctcgatagcacgagactcagatttagtattgccaatacattgcggtcctgaaattggagtagcatctactaaagcttttcttggacagatgttggtactttatttgttatgtttaaaaatttctcatgatcagaaaatgataaataataaaaattacaaggaaaaaataaaaaatttacttttattatcaaatgcttgtaaaaaaactttat

SEQ ID NO: 246520 - DNA, 871 bp, Unknown
  Bacterial polypeptide expressing nucleotide sequence isolated from the Sargasso Sea
ccgcttggaattgaaatatatgactcaagcaacgaaagacaatatagaaatccagtttctttaaaagtctcagaacaaataatggataagagtaatttcaaacactacatgtggaaagaaatatatgatcagccacagactgcaaaaaactggttggaaaattatttaattaagaactcagataacggtcaatatcaaatcaactatccatttgatacagatttttttgaatcaatagaaagaattgaaattattgcttgtggtacgagtaaacatgctgcaatggtgggcagctttttactagaacaattttcaggtatccctacaaatgttttttatgcaagcgaatttcgatattcaccacctccactattgccaaatacattaactattggagtcactcaatcaggagaaactgctgatacaattgctgctatcgatatggaaattaaaagacgttcttcaattgaaaatgaaaaatttaaacccaatcttattgcaataacaaataggaaagagagttccataggtaggcaggtctcaaatataattgatatctgtgcaggaatagaagttggagttgcagcaacaaaaactttttttgctcaattactttctttttatggattagctattaaatttgctcaaattaaaagtaatcaaagtcctgatgaaataaataaattaataaatgaacttataaaacttccgccattgttggaagatcttttagagaaacataataaatcttcagaaaagctggcacatgacttttttaatattaaagatgttatttttttaggaagaggaataaattatcctattgcccttgaaggcgctttaaaactcaaagaaattagttacattcatg

SEQ ID NO: 246521 - DNA, 637 bp, Unknown
  Bacterial polypeptide expressing nucleotide sequence isolated from the Sargasso Sea
tgcttcaaccaaagcatttctcggacaaatactaattttatatattttagccttaaaacttgctttattgagaaaagatattgaaaagactcattttgaaaaaaaaattgatgatcttaaaaatttaccaaaacttattgagcaaacattgttgattgataataaaatacagacaatttcaaatacttttaatgaggcaaagggttctatgtttttgggacgtggtttttcttatccaattgctcttgagggtgccttaaaactaaaagaattatcatacattcatgctgaaggttatccagcaggagaaatgaaacatggacctcttgcattaatagaggagggtatgccagttgttgttttggctccaagagacaattactataaaaaaacgatttcaaatatgcaggaggtaattgcaaggggggctaaagttttattaatcacaaataaaagcaaagatgaagtaatttcagaaaatatttgggagaaaatcgaagttgaaagtactaatgaggatctactaccttttcttttgaccattcctttgcaaaaattagcttattattcagctctaaaaaaaggttatgatattgataaacctagaaatttagcaaagtcagtaaccgttgaataa

SEQ ID NO: 246522 - DNA, 719 bp, Unknown
  Bacterial polypeptide expressing nucleotide sequence isolated from the Sargasso Sea
tgaggatggaacaaaaataaataaaaaaatattagaactttcttcagatgacgctagttatgaaaaaggtgattttaaacattttatggccaaggaaattgaagaacaaccaattacagtcaaaactggaattaaagaatatgtagacaaatcaaattcagaaataaatatatacaatttcccgtggaaaattgatgaaattaattcaattactttaataggctgtggcaccgcttaccattcctgtttaatggccaaatattggtttgaagaattaactcaacttgatgtttctatagatattgcatcagagtttagatatcgaaaaaatagatttaaaaaagacaatttatatatatttgtctcacaatctggagaaacagcagatacttacgcagcactagatctatgtaaaaaaaataatatgaaaacttgtgctgtagtaaatgtaattgaaagttcaattgcaagggatgcaaattttgtattaccaattcattgtggcccagaaattggtgttgcatctacaaaagcttttttaggccaaatattaattttatatattttatctttaaaactaggatctttgagaaatgaaattaataaagaaatttgcaaagaaaagattaaagatcttcagaatttaccaggtctaattgaaaaatctttattaatagataatgatatccaagctatatcttctacttttaatgatgcaa

SEQ ID NO: 246523 - DNA, 814 bp, Unknown
  Bacterial polypeptide expressing nucleotide sequence isolated from the Sargasso Sea
ttttgtagaaattaaaaatggtaaatataagttgtttgactcagacttaaatgaaattgaaagagagatccaagaaatagactgggaggtctctgaagcagagaaatcaggatatgaccattttatgtataaagagatacttgaacagtttgaagtaattgaaagaactatttctggaagactagacacaaattctgatgatattccgattaagtcagatcatgcatctaaatttgaaaaaatttggatagttgcatgtggaactgcttatcatgcaggtttatttggcaaagatctgtttgagaaagttcttggtgtaccagtaagtgttgagttagcttcagagtttagatacagggagccgattgttgggaaaaatgatttaggtattgtaatttcacagtctggagaaacaatggatacaattgctgcaacagaacttcttaaagaaaatggctcacacgtactcgccctagttaatgttgtgggaagttcattggcaagaatggcagatagtgtattttacttacatgttggtccagagatcggtgtagcttctactaaagcttatttagggatgcttgtatctcaacttgtacttgctaaacattgggactctaaaaatagattggacgtatcttttgatgagattgcagaacttccaaatctaatagaaaaaacaatggcttgtgaagatcaaataaaagagatatctgaaaaaatttacaaaaagaatgacatttattttattggaagaggtttggattatgctttagcagctgaaggcgcctttaaattaaaagagatttcatat

SEQ ID NO: 246524 - DNA, 775 bp, Unknown
  Bacterial polypeptide expressing nucleotide sequence isolated from the Sargasso Sea
ataaataaaaaagttttagaattatcttctgaagaagagaaatatgataaaggtgattataaacatttcatggcaaaggaaatagaagaacagccaactacactcaaaaatggaattaaagaatatatcgacacctcaaacaatgatattaatattttcaacttcccgtggaagattgatgaaatttcttcaatcactctaatcggttgtggtacagcttatcattcttgcctgatggcaaaatattggtttgaggaattaactaccctagatgtaaatgtagatatagcctcagaatttagatatagaaaaaataggtttaagaaagatactttgtatgtctttgtttctcagtcaggggagacagcagatacttatgctgctttagatttatgtaagtcaaataatatgaagacttgctcagtagtgaatgttattgaaagttcaatcgcaagagattctgaatttgtattaccaatacattgtggaatagaaataggtgttgcttctacaaaagcctttttaggacaaattttgatactgtatatattcgctttaaaacttggacttttaagaaatgatttaaaaaaggaattatttaatgaaaaacttaaagatttaaaagatttgccaaaattagttcaacaaactttacagattgacaataagatacaaactatatccaaaacttttaatgaagcgaaaggatctatgtttttaggtagaggtttctcatttccgatagctttagagggtgctttaaaattaaaagagc

SEQ ID NO: 246525 - DNA, 547 bp, Unknown
  Bacterial polypeptide expressing nucleotide sequence isolated from the Sargasso Sea
aatgtataatgaaaaaattaaagatttactttctttatcgaacttgagtaaaaaaactttattaactgatagcaaaatacaaaaagccagcaaagaatttgttaaagcaaaaggttctatgttcttaggtagaggatattcttttcctatagcattagagggtgctttaaaattaaaagaactagcttatgttcatgcagaaggttatccagcaggagaaatgaaacatggtccattggcattgattgaagaaggaatgccagttgttgttcttgctccaagagatatgcattataaaaaaactgtttctaatatgcaggaagtaattgcaaggggagcaaaagttttgttaataacaaataaaagcaaagatgagattcaatcagaaaatatttgggaaacgataaaagttgaaaatttaactgaggatcttcttcctatattgacaacaattcctcttcaaaaacttgcttattattccgctttactaaaaggatatgatatagataaaccaagaaatctagcaaagtctgttacagttgaataa

SEQ ID NO: 246526 - DNA, 343 bp, Unknown
  Bacterial polypeptide expressing nucleotide sequence isolated from the Sargasso Sea
aatgtgtggaataattggcattgcaagtaataaatctgtaacatcgaatattattcaatctctaaaaaaattagaatatagaggttatgattcagctggtattgcgaccatagtaaatggatatattgatgagaaaaaatgcaccggtagagttgataatctagaaaaaatcttatttaaaaatccatcaaatggaattttaggtattggacatgtaaggtgggctacacatggtgttccgagtcagatcaatgcacacccacattcgtccgacgaggtatcagtggtgcataatggaattattgaaaattccacagaattaaaattagctttagaaaaaaaa

SEQ ID NO: 246527 - DNA, 688 bp, Unknown
  Bacterial polypeptide expressing nucleotide sequence isolated from the Sargasso Sea
aatgtgtggaatagtaggaatagttagtaacaaatctgtatcttcgagcatcattggagcattaaagaaattggagtatcgaggttatgattcagctggtatttcaactattagcagaggcgaaattaatgaaaaaaaatgttctgggagagttgataaattagaaaaaattctttttcaaaacccttcagacggagatcttggaataggccatgttagatgggcgacacatggaattccaaacaaaattaatgcacatccacattcttcagaagttgtatcagttgtacataatggcataattgaaaattcagataagctaaggcaagaatatattaataaagggtataaatttaaatcacaaacagatactgaagttataaccgtaattttaagtgattttttaaaatcagatgatttgataaattgtattcataaaactttagaaaaacttgaaggaagttttgctttaggagttatatttaaagattttaaaaatgttgttgttggagcaagaagaggaagtccattagcagtaggctatggacataatgaaaattttattggttctgattcctacgcacttaaaacaatgactaataaaatttcttatttagacgatggtgatttctgtttgctttataaagaaaaagtagaattttacaattctgaaaaaaaaaaaaattaa

SEQ ID NO: 246528 - DNA, 796 bp, Unknown
  Bacterial polypeptide expressing nucleotide sequence isolated from the Sargasso Sea
aaatttctaattaataaaggtcataaatttaaatcacaaacagacacagaggtaattgtgcatttgattactgagaatttaaaaactcatgatctagaagaagcaattacaaataccttgaagcagctacacggcagttttgctcttggaattatatttaaagatattcccgatttaatagttggtgctagaagaggatcacctttagctgtaggttatggaccgaacgaaaattatctcgggtcagactcatacgcattaaaatcaatgacaaataaaattacttatcttgatgatggtgaattttgcatcatcaaaaaggatcatgttaatttttttaacgtagaaggaaaaaagataaacaaaaaaatcttagaattatcatctggtgaggctagttatgataaaggtgattttaaacattttatggcaaaggaaatagaagaacaaccaactacaataaagatgggaattaaagaatatatagataaaacaaattcggaaattaatatcatgaatttcccttggaaaattaaagaaattaataaaataacactaataggttgtggtaccgcgtatcactcttgtcttatggctaaatattggtttgaagaattaacaatgcttgatgttaatattgatatagcgtctgagtttagatatcgaaaaaatagatttaaacaagataccttatatgtgtttgtctcacaatctggagaaactgctgatacttatgcggcactagatttgtgtaacaaaaataaaatgaaaacatgttctgtagtaaatgttatga

SEQ ID NO: 246529 - DNA, 788 bp, Unknown
  Bacterial polypeptide expressing nucleotide sequence isolated from the Sargasso Sea
tttccctggaaaataacttcaattaagtctgtaatgttaataggttgtggaacagcttttcactcatgtctgatagcaaaatattggatagagcaaaatacacaattagatgtaaatatagatatagcttcagaatttagatatcgaaaagtaagatttaaagaagattgtctttatatctttgtctctcaatcaggtgaaaccgcggatacgtttgcagctttagatttgtgtaaaaaaaacaaagtgaaaacttgcgctgtagttaatgttatagaaagctcaatagcaagggatgcagatttagtattaccaatatattgtggtcaagaaattggtgtagcttcaacaaaagcatttattggtcaaatgttagttttatacattttatcaacaaaaattgcatttgatcaaaaatgtataacgcgagaagagtatcagtcaaagattaaaaacttgttaaaattgtcagattcagcaaaaaaaactttaaaacttgatcaaaaaatctttaaaattggaaaagtttttgctaatgcaaaaggatcaatgttcttaggaagaggctattcatatccaatagcattagagggagctttaaaactcaaggagctagcatatgtacatgcagaaggatatcctgctggtgaaatgaagcacggacctcttgctttaatagaagagggtatgcctgttgtagttttggcaccaagagatgagcattacaaaaaaacaatctcgaatatgcaagaagttattgctagaggggcaaaagttttattgattac

SEQ ID NO: 246530 - DNA, 904 bp, Unknown
  Bacterial polypeptide expressing nucleotide sequence isolated from the Sargasso Sea
agggaaacttaaaaatttaataaaaagtgtagcaaattctcagattccagggactgtaggaataggtcatacacgttgggcaactcatgggaaaccccaagtaaaaaatgcacatcctcatattgatagctcgggtaaagtagcagttgttcaaaatgggattatagaaaattaccaggaattaaaaactaagttagaaaacgaaggtatagtttttaattctgatactgataccgaggtaattccgcatttgatccaaaaagaattaaatacattaaatcaactaaaacttgagaataatggttcaactttattggtggcagtaagaaatgtgatatctgatttagaaggatcctatgctctcgctgtcttatgggctggtgctcctgattcattggtggttgctagaaagcaggcacctttaattatcggtttaggcgaaggagaatttatatgtgctagtgatacgccagcaattgcaaatttcacaaagataatattacctatggaggatgaagaaatagctcttttaactcctttagggattgaaatttatgattcaaataatgaaagacaatatcgtaatccaatttcattacagatatcagaacaagtgacggataaaatgaattttaaacattatatgttgaaggaaatttatgatcagccagaaacagctaaacattggctagataaatatttaattaaaaatgataagactggacaattacagattaatttttcatttgataccaccttttttgaatcaatcgaaaggattgaaattattgcttgtggcacaagcaaacatgctgcaatggttggtagttttttgttagaacaattctcaggtattcctacaaatgttttttatgcaagtgaatttagatactctccaccacct

SEQ ID NO: 246531 - DNA, 380 bp, Unknown
  Bacterial polypeptide expressing nucleotide sequence isolated from the Sargasso Sea
attaaaattaaaagaattatcatatttgcatgccgagggatatccagctggcgagatgaagcatggacctttagctcttatagaagacggacttcctgtaattgttatagcacctaaagataaatattttgagaagacaatttctaatatgcaagaggtaattgcaagaggggggaaagttttacttataacagataaaaaaaatgaagttattaatgaaaacatcagatttaagttagagatgccgtacgttgaaagtttattaaatccatttttaactacgatcccactccagttattagcttatcatgtagcattattgaaaaaatgtgatattgataaacctagaaacttagcaaagtcagtaacagtagaataat

SEQ ID NO: 246532 - DNA, 847 bp, Unknown
  Bacterial polypeptide expressing nucleotide sequence isolated from the Sargasso Sea
aatttccaggaaatcaaagactttctagcaaatgaaggttatgaatttcaatctgaaactgactcggaagtgataccgcatctaatccactatcatttcgaggctgtaaaggatcttttagaagcggttaggcagagcgtaaagcaattgagaggggcttacgcagtcggtgttatacacaaagatcatcatgacaagctgattgctgctaggtctggcagtccattggtagttggtaaaggaataggcgagaactttattgcgtctgatatcctggccttgaaaccagttactgataagtttatttatttggaagaaggggacctgattgaattaagttcagaagatatctcgatttggaatatagacgatgaatctgttgtccgaagcagtgtacaagtgttacttggtccagattcgacggataagggtaattacagacactacatgcaaaaagagatatttgagcaaccaaagtcaattacggataccttagaaggcagaatcggtttgaatggtctgttgatcgagtcttttggggtgggcgctgcatctatatttgagacgatagagaacgttactctggttgcgtgcggaacaagttattatgcggctctggttgcttcttattggttagaagaattagcgaagattccgtgccaagtcgaaatagcaagtgaatttcgttatagaacagtggtttgtaggccaaatagccttttcgtaactatttctcaatccggagaaactgctgacaccttggctgctttgcggttggctaaggaattgggatttgcgtcaactcttaccatttgcaacgtggccactagctctctggttcgagaaa

SEQ ID NO: 246533 - DNA, 819 bp, Unknown
  Bacterial polypeptide expressing nucleotide sequence isolated from the Sargasso Sea
aaaaagatgcgctttatgtattcgtatctcagtcgggcgaaacagcagatacatatggagctttagatttatgcaataaaaacaatatgaaaacttgttctgtagtaaatgtagttgaaagttctatagcgagagactcaaaatttgttttacctattcattgtggtccagaaattggtgtagcatcaacaaaggcttttataggtcaaatgctagtattgtatttattatgcattaaaattgcaaaaagtaggaaggatatatcaaaagatattttttctgaaaaaataaaatctcttaaatcattatctggattaattaaggaaagtttaaaaactgagaatgaaattcaatcaatttgcaattcatttattgaagcaaaaggctctatgtttttgggaagaggatattcttttcctatagcgctagaaggagcattaaaattaaaagaactggcttatgttcatgcagaaggatatccagcaggtgaaatgaaacatggaccactcgcattaatagaagatggaatgccagtagtagttttagctcctagagataaatattataaaaaaacaatttctaatatgcaggaagtgattgcaagaggtgcaaaagttcttctaattacgaacaaaagtaaagatgaagtatattcagaaaatatttggcaaacaattgaagtagaaaatacttcagaagatttatttccttttcttgttacagttccattacaaaaacttgcatattattctgcattaaaaaaaggatatgacatagataagcctagaaaccttgcaaaatctgtcactgttgaataat

SEQ ID NO: 246534 - DNA, 674 bp, Unknown
  Bacterial polypeptide expressing nucleotide sequence isolated from the Sargasso Sea
tgttttgccaattcattgtggaaccgagataggtgttgcatctaccaaggcttttttaggtcaaattcttatattatatattttagcttggaaactgggattatcgagaaaagatttaaaaagagagctatttaatgaaaaacttaaggaccttaaatctcttccaaaattagtagaaaaaactttattgaccgataataaaatccagacaatatctaatacctttaatgtggctaaaggttctatgtttctaggtagaggtttttcttttccaatagcattagagggtgctttgaaattaaaagagctatcttatattcatgccgaaggttatccagccggcgaaatgaaacatggacctcttgcacttattgaagaaggaatgcccgttgttgtgttggcacctagggacaattattataaaaaaactatttctaacatgcaggaggttattgcaagaggcgcaaaagttttattagtaacgaataaaagtagtgatgaagtggtttcagaaaatatttgggaaaaaatagaagttgaaagtgctaatgaggaccttttgccctttcttttaacaatacctttacaaaaattagcttattattcagctctcaaaaaaggatttgatatagataagcctagaaatttagctaaatcagtaaccgttgaataat

SEQ ID NO: 246535 - DNA, 625 bp, Unknown
  Bacterial polypeptide expressing nucleotide sequence isolated from the Sargasso Sea
atgtgtggaatcattggaattgcaagcaataaacctgtttcaataaatattttaaattctttaaaaaaattagaatataggggttatgactctgcagggttagcaactttaagcaataatttgattgatgaaaaaaaatgttctggaagagtagaagaactcgaaaaaatattatttaaaaatccatctaaaggtaacataggcataggtcatgtaagatgggccactcacggcgtacccaacattactaatgcacatcctcactcctcagaggaagtttcaatagtacataatggtattattgaaaattcagatgaactaaaaaaagatctagaagcacaaggttttaagtttaaatcacaaactgatacagaagtaattactttattagtaactcagttattagaaaaattagaacctttagaggcagtatttcaaactcttaaaaaattaaaaggaagttttgctttaggaattatgttcaaaaatttttcagatattattatcggcgctagaagaggaagcccattagctgtaggttactccaatgaagaaaactatttagggtccgactcttacgctttgaaatccatgacaaataaaatctcttatttggatgatgggg

SEQ ID NO: 246536 - DNA, 781 bp, Unknown
  Bacterial polypeptide expressing nucleotide sequence isolated from the Sargasso Sea
tctgggagaaacagccgacacccttgctgcattgagatatgcacaagaaaaggattatctatcgaccctttgtatttgtaatgttcctacaagttctcttgcaagagaatcagagtattcaatatttactaatgctggtcctgaaattggagttgcttctacaaaagcctttaccactcaactcgcagccttaatgctgctggctttgtctcttgccaaaagcagagaaaaaaatccaaggttgagaacaagggtaataacagcattaagatcattaccggaaacggtcgaagaaaccttaaaacttaaagaaataattctagaaatcgcacctgaaatagctaataaagataatgctttgtttttaggcagaggtattttttatccaatcgctaaagagggagcactcaagcttaaagaaatttcttatattcatgctgaagcctacccagctggcgagttaaaacatggccctcttgctttaattgatgaagaaatgccagttattgctttagccccagaaagcgagatagctgaaaaactagtttctaacttagaagaagttaaagctaggggcggaactctttatgtattttctgatccatcaatttctatggatttaaagtctggaagactcattaatatgccaaagtgtgactttctcttaacaccaatcatatatacgatacctcttcaaatcctttcttatgaagtagctttgttaagaggaacagatattgatcaaccaagaaacctagcaaagtccgttacggttgaatag

SEQ ID NO: 246537 - DNA, 998 bp, Unknown
  Bacterial polypeptide expressing nucleotide sequence isolated from the Sargasso Sea
ggctttatcgcaacttactagtgagtttgtttttctagaggatggcgacattgcagttattaccaaggagagctatcaagtatttgataaaaaaaattctcctgtcacaagagatgtaaccgagatagacatagcggtaaatgcagttactaagggcgagtactcacactttatggagaaagagatatatgaacaaccaactgcattagcaaacactatcgacgggaagctcggaaatgatgacgtattagataacatctttggtttaggttcatcagaagtctttagcaaaattaaaaggattcaatttgttgcatgtggtacaagtcttcatgcaggcaaggtaggaaggttttggtttgaaaaaatagctcaaatcccatgctatgtagactttgctagtgagtatagatatagagacccacttgtagaagaaggcaccttgtttgttactatctcacaatcaggtgaaaccgcagacactcttgctgccctaaggtatgcacaagaaaaagactatttaagcactttatcaatttgcaacgtgccaactagctctctggctagagaatcagagcacgttctttttactaatgctggccctgaaataggtgttgcatcaacgaaagcttttacaactcagcttgcaggtttaatgcttctggccatgtctattgcaaaaagcttaaataaagataaagagcaaagaaaaaaccttgcacatgagttaagaaatctgccgaaggtgattcaggagacattaaaactttctaatgagatcctgaacattgttcccaatatagctgataaacataatgctttatttctgggcagaggaatgttttttcctattgttcaagaaggcgcattaaaacttaaagaaatttcatatattcatgctgaagcttatccagcaggagagcttaaacacggcccgttggcattagttgatgatcaaatacctgttgttgcactatcacctgaaaatactctaactg

SEQ ID NO: 246538 - DNA, 821 bp, Unknown
  Bacterial polypeptide expressing nucleotide sequence isolated from the Sargasso Sea
tgttttagaaaaagatatatctaaatttaatcttttaggagatatcggtatcggccatgttagatgggcaactcacggtaaacccagtaaaattaatgctcatccacattcatctgaacaggtttcagttgtacataatggcattattgaaaattcaacaatattaaaaaaagttttagagaaaaaaggatatatattcaaatcacaaacagataccgaggtaattgctcatcttgttacagattatttaaaaaaaaattctttgaaagatactattattaaagtattgaaaaaacttcatggtagttatgctttaggtataatttttaaagatagtaatgatttaatgattggcgccagaagagggtcacctttggctgttggatatggaccaaatgaaaactatctagggtccgattcatatgcactcaaatctatgacgaataaaatctcttatttagatgatgaagaattttgtatcattaaaaaagatcaagtagagttttttgaaagtaacggaaaaaaaataaacaaaaaagtaatgaatttatctaaagaagatattcaatatgataaaggtgactataaatatttcatggaaaaagaaatagatgaacagccgtctactattagtgattgcataaatgagtatgttgataaatataataaacagatcaatatttataattttccttggaatataaattcttttcaatcagttgtgcttattggctgcggtacagcctatcactcttgtttagttgcaaagtattggctggaacaaaatacaaatttggatgtgagtatagatatagcttcag

SEQ ID NO: 246539 - DNA, 814 bp, Unknown
  Bacterial polypeptide expressing nucleotide sequence isolated from the Sargasso Sea
tatggaaaaagagatccatgagcatccacaagctgtaggtgagacattccgattatttattgatcatgataaaagaattatctcaatagatagtattgatttagatttttctaatatttcgaagatacatttaattgcatgtggtactgcgtactactcatgtctagtagcgaaatactatttcgaacaatatgcaaggatccctgttgagagtgatatggcgtcagaatttagatatcgagacccagtactcgatcctaaagcattatgtatttttgtttcacaatctggagaaacagctgataccaaggcggcattagattattgtaagagtgcaaagatcagaacacttagtattgtaaatgttacaaatagttcaattgcaagagaaagtgattattgtttgtacaccaaagctggggttgaaataggggtagcttctacaaaggcatttactgcacaattatcggtacttttatcaatggcaatccattgtgcaacaattaataagaagatttcattagatgaaaataaaaacatttgccaagagattatgcaagctccgcagttaattgaaaacgcaataaaaagatcatatgggttaaaagaaacagcaaaatctataattggcgctaaaggcgttatgtatctaggcagaggaactgcctttccattagctttagagggagctcttaaatttaaagaaatatcctatattcatgctgaaggatatccagcaggcgaaatgaaacatgggccacttgctttaatagaaaaagatctaccggtagtttgtattgtgcctccaggtcca

SEQ ID NO: 246540 - DNA, 779 bp, Unknown
  Bacterial polypeptide expressing nucleotide sequence isolated from the Sargasso Sea
tatggctaaagaaatagaggagcagcctgtaacaataaaaactggaattaaagaatatttagatagtgtaaataatgagataaatattttcaattttccatggaaaattaacgagattaaatcagttactttaattggctgtggtactgcttatcattcttgcttaatggcaaaatattggtttgaagaattaacttctttagatgttaatatcgatatagcttctgagtttagatatagaaaaaatagatttaaaaaggatagtttatatatttttgtatctcagtctggtgagactgcagatacttatgctgccttggatctttgtaacaaaaataatatgaaaacatgtgctgtagttaatgtaattgaaagctccatagcaagaggctcaaattttgttttaccaattcactgtggaccagaaattggagttgcatctacaaaagcctttttaggtcaaatacttgttttatatattttagctttaaaaataggatctttatctggtctaatagaaaaaaaaaattataaagaaaaaattaaagatcttaaaaacttaccaaacctgatagaaaaaactctattggtagataatgacattcaagcaatatcctcaacatttaatgaagctaaaggatctatgtttcttggcagaggttattctttccctatagctttggaaggagcattaaaactaaaagaattatcttacgttcacgcagagggttatcctgcaggtgaaatgaaacatggaccacttgcattaatagaagaag

SEQ ID NO: 246541 - DNA, 724 bp, Unknown
  Bacterial polypeptide expressing nucleotide sequence isolated from the Sargasso Sea
tgtgctgtagtaaatgtaattgaaagttcgattgcaagagatgcaaatttcgtattaccaattcattgtggtccggaaattggtgttgcatctactaaagcttttttaggccaaatattaattttatatattttagctttgaaacttggatctttaaggaatgaaattaataaagaaaattacaaagataagattaaagacttacaaaagttaccaagtttaattgaaaaatctttattggtagataatgatattcaggctatatcctctacctttaacgaagcaaaaggctcaatgtttttaggaagaggtttttcctaccctatcgcacttgaaggtgctttgaaactaaaagaattatcttatattcatgcagagggttatccagcaggagagatgaaacatggtccattggctttaatagaggatggaatgccagtggtagttttagctccaagagacagctattacaaaaaaactatttcaaatatgcaggaagtcatagcaagaggagcaaaagttttattaataaccaataagagtaaagatgagattgcatcagaaaatatttgggaaactattgaagttgaaaatactaatgatgacttgttgccttttcttttaactataccacttcaaaaattggcttattactcagctctaaaaaaaggatatgacatcgataagccaagaaatttggctaaatctgtcactgttgaataaa

SEQ ID NO: 246542 - DNA, 708 bp, Unknown
  Bacterial polypeptide expressing nucleotide sequence isolated from the Sargasso Sea
tgcatgtggcacaagccttcatgcaggaaaagttggaaggttttggtttgaacacatagctcaaattccatgctatgtagactttgctagcgagtatagatacagagatccgcttgttgagaaaggcaccttgtttgttactatctcacaatcaggtgaaaccgctgacactcttgctgccctaaggtatgcacaagaaaaagactatttaagcactctgtcaatttgcaatgtaccaactagttctcttgctagagaatcggagcacgttctttttactaatgctggccctgaaataggtgttgcatcaacgaaagcttttacaactcagcttgcaggtttaatgcttctggccatgtctattgcaaaaagcttaaataaagataaagaacaaagaaaaaatcttgcatatgagttaagaaatctgccgaaggtgattgaagagacattgaaactttctaatgagatcctgaacattgttcccaatatagctgataaacataatgctttatttctaggcagaggaatgttttttcctattgttcaagaaggcgcattaaaacttaaagaaatttcatatattcatgctgaagcttatcctgcaggagagcttaaacacggcccgttggcattggttgatgatcaaatacctgttgttgcactatcacctgaaaatactctaactgaaaaattagtttcaaatcttga

SEQ ID NO: 246543 - DNA, 469 bp, Unknown
  Bacterial polypeptide expressing nucleotide sequence isolated from the Sargasso Sea
gagataattaagatggccgaagattttgatgacaaagaacatgcattatttttgggcagagggatccactatccaatagctatggaaggagcgctaaaattaaaagaaatttcttacattcatgccgaggcgtatccggcaggcgaattaaagcacggacctttagcactagtggatgatagtatgccggtagtagcagtagcaccaaatgacgacttactggaaaagcttcattcaaacctagaggaagtaaaggctagagggggaaagctctatgtatttgggcatactgatgcctatcatcaaggctttgcagaaaagtttattgagcttccagaaattccagaattaatagcacctttaatttataccattcctcttcagatgctttcttatcatgtcgcaatccttaagggtaccgatattgatcagccaagaaatctagctaagtctgtcacagtggagtagc

SEQ ID NO: 246544 - DNA, 392 bp, Unknown
  Bacterial polypeptide expressing nucleotide sequence isolated from the Sargasso Sea
tatgtgtggaattattggtattaatagcaacagaccagtatctgtctcaattataaactctttaaagaaattagaatatagaggctatgactccgcgggtattgcgactttatctgatggattaattaatgaagttaaatcagaaggaagggtagataatttagaaaaaaattcattaattcaaaatatgaatggcacaattggtatagggcatgttagatgggcaactcacggagcaccaaacagtattaatgctcatcctcattcttctcaaaatgtatcagttgttcataatggtataattgaaaattctacattactcaaaaaatatttgataggaaaaggacacaaatttaaatctcaaactgatactgaagtaattgttcatttga

SEQ ID NO: 246545 - DNA, 508 bp, Unknown
  Bacterial polypeptide expressing nucleotide sequence isolated from the Sargasso Sea
accaaaatcattagatgccgtcatggagcttgaagaccaaattatagaaatggcaaaagattttgatcaaaaagaacatgcacttttcttaggcagaggtatacattatccggtcgccatggaaggggcattgaaactaaaagaaatatcttacatccatgctgaagcctatcctgctggcgaattaaagcacggccctcttgcattggttgattcagaaatgcctgtagtggccgtagctccgaatgatgatttattagaaaaacttcaatccaacttagaagaagtacgcgccagaggagggaaactttatgtctttggtcattccgatgcccatcacgatgatgaatctatcactcgcttcatagaacttcctgaagtacccgagctaattgcaccccttatttactcgataccgttacagcttctggcctatcacgtcgccattcttaaaggcactgatatagatcagccaagaaatttggctaaatcagttactgtagagtaa

SEQ ID NO: 246546 - DNA, 489 bp, Unknown
  Bacterial polypeptide expressing nucleotide sequence isolated from the Sargasso Sea
aatgtgtggaattattggaattgcaagcaataaacctgtttcgattaatataattaattcactaaaaaaattagagtatagaggctatgattctgctggattagcaactctagataataatttaattgatgaaaaaaaatgttcaggaagagtagatgagttagaaaaaatattatttaaaaatccttcaaatggaaatattggaattggacatgttagatgggccacacacggaattcctaatattattaatgcacatccacactcgtcagaagaagtttctgttgtccataatggaataattgagaactcagatgaattaaaaaaagatcttgaagaaaaaggatttaaatttaaatcacagacagatacagaagtgatcactattttaattacacaatatttaaaaaatttagagcctctggaatcagtattcaaaactttaaaaaaattaaagggaagctttgctcttggtattatatttagaaa

SEQ ID NO: 246547 - DNA, 928 bp, Unknown
  Bacterial polypeptide expressing nucleotide sequence isolated from the Sargasso Sea
tattcaagaagtaaagtgtgagggcagagtagacaatctcgaaaaaagtattattaaaaataaattgctaggaaatgtaggcattggtcatgttagatgggctacccatggtattcctagcactttaaatgctcaccctcactcatctgataatgtttcagtggttcataacggcattatagaaaactcgactttattaaaaaaatttttagttaaaaagggacatagatttaaatctcaaacagatacagaggtgattgtacatttaattacagaatatttaaaaaaaaataatttaatagacacattaacaaaagttttaaaaaaacttcatggtagttttgcattaggaataatttttaaagatgaaccagacttaattgttggtgcaagaagaggctcaccgttagcagttggttatggtccaggtgaaaattacctaggctcagattcttatgcattaaaatctatgactaataaaataacttacttagatgatggtgaattttgtattatcaaaaaaacagaagtaagcttctttaatgaacaaggaaaaaaaataaataaaaagatactttcgttaacaactgatgaacaaaattatgataaaggtgattacaaacactttatggctaaagaaattgacgaacagccactaacaataaaaaattgtataaatgaatatattgataaaaaaaataatgaaataagtatttttaattttccatggaaaatagaagacatatcatcaattacattagtaggttgtgggactgcatatcattcttgtttaattgcaaaatattggtttgaacaacttacttcttttgatgttcacatagatatagcatcagaatttcgttacagaaaaaatggatttaaaaaggatactctctatatctttgtttctcaatctgagaaacagctg

SEQ ID NO: 246548 - DNA, 751 bp, Unknown
  Bacterial polypeptide expressing nucleotide sequence isolated from the Sargasso Sea
aatgtgtggaataattggcatagcaagcaataaatctgttacttctaatattattaattctttgaagagacttgaatacagagggtatgattcagccggtatagcaacaatatctgatgaaagtcttaatgaaaaaaaatgttcagggagagtagaagagcttgaaaaaatattatttaattcaccagctcaaggaaatattggaataggacatgtaaggtgggcaactcatggtattccaaatcaaattaatgctcatccgcactcatctgaaattgtatcagttgtgcataatggtataatagaaaattctaattcattaaaaaaaaatttggaaaaggagggttttaaatttaaatcgcagactgatacagaggtgatcacacttttaataactaaatatttgaaaaactcaaatcctacggatgctgttttaaaatcactagaacatctcgaaggtagttttgcacttggaatattatttaaagatcaatcgaatataattataggggctagaagaggaagccctcttgctgttggttattcaaataatgaaaactatttgggatctgattcttatgcacttaaagcgatgactaataaaatttcttatttagatgatggagaaatatgtattttaacaaaaaatagtgtcgaattctttgattctttaaaaaataaaataaataaaaaaattctagttttatctgaagataaaaatgaagcaaagttaggcgattataaaaatttt

SEQ ID NO: 246549 - DNA, 840 bp, Unknown
  Bacterial polypeptide expressing nucleotide sequence isolated from the Sargasso Sea
catcggccaagaccctctcccgcagtccaccacgggtatcgggcacacccggtgggccacccacggaggaccaaccgaccacaacgcacatcctcatgtcagtgacgacggaaggatcgccgttatccacaacggcatcatcgaaaacttcgcaccgttgagagacgagctcatcgcggctggtgtgatgctgtcgtcggagacggacagcgagatcgttgctcacctgctcgcacgagctcttcccgaagttgatcaggacctagcggcggcgatgcagtcagtctgtgcgcgcttggaaggtgccttcacactcgtggcgatggatccgaatgacccgtcgttggtcgtgggggcgcgacgtaattcgccgcttgttgtcggtttgggcgaaggtgaaaattttctcgcaagcgacgttgcggcgtttgttgatcacacacgtaacgcactcgagctcggtcaagaccagatcgttgtcgtgcgggccgatggagtcgaggtgcgcgatttcgccggcacccaggtcgaggccaagccctacgttgtggactgggacgcctcagcggcggaaaagggtgggtacgacctgttcatgctgaaggaaatcgcagaacagcccaaagccgtcgccgacgcgcttcgtggacgcatcgatgcggagcaacgcattcaattggatgagacagcgctcgatgacgcggtgctgcgcgacatcaccaaggtcgtcgtggttgcctgcgggactgcggctcatgccggcatggtggcgaagtacgccattgagcattggacacgactgcccgtcgatgtcgaattggcgagcgagtttcggtaccg

SEQ ID NO: 246550 - DNA, 741 bp, Unknown
  Bacterial polypeptide expressing nucleotide sequence isolated from the Sargasso Sea
gcagtcattgacatagatcaaaaaggaaaaatatttgcagccaaacaaaaaagccctcttttagtaggaaaaggcatagaagaaaattttgtagcttcagatccactagcaattgccgggcttgccgaatcattctacctgctcgaagacggcgattttgcagagatcacacaagatgaaatcaaaattgttggcattgataatgagcctgtagtaagagaggagaccttaattgacacaacagttaaagaggcatccaaagagggctataaacacttcatggaaaaagagatctatgagcaaccaaaggccatagcaaatgccattgagggaagaacaacagatggcgatgttctagacaatatatttggcctgggttcatctgagtcattcaaaggggtaaaacgaatacagtttgtggcatgcggtaccagcctccatgcagcgaagactgcaagaaagtggtttgaagagctctctgaaacgccatgctacatagattttgcgagcgaatacagataccgaaaccctttggttgaggacgatactttattcgtctgcatttcgcagtcgggagaaacagcggacaccatggcggcattgaattatgcgaaagaagaaaaatatttaggcattgtaacgatttgcaatgttcccacaagcaccatggcaagagagtccgattggaaaatatttacaaacgcaggccctgaaatcggcgttgcctcaaccaaagcattt

SEQ ID NO: 246551 - DNA, 816 bp, Unknown
  Bacterial polypeptide expressing nucleotide sequence isolated from the Sargasso Sea
ccaaatagtgttaatgctcacccacactcatctcacaatgtttctgttgttcataacggtatcattgaaaattcaacaatattaaaaaaatatttaacaaccaaaggtcatgtatttaaatctcaaactgacactgaagtaatagtccatctaattacagataacttaaaaaccaacgaattagaagaggctatgaccaaaacattaaaacaacttcatgggagctttgctttaggaatcgttttcaaagatattcctgatttaataattggagctagaaggggctcacctttagcagttggttatggacccaacgaaaattatctaggttcagattcttatgcattaaagtcaatgacaaataaaatcacatatcttgacgatggtgaattttgtataattaaaaaggaccatgttcttttttttaatgagcagggaaaaaagataaataaaaaaattttagaactttcatcaaatcaggctagttacgaaaaaggtgattttaagcattttatggcaaaagaaattgaggatcaaccaacaacagttaaaactggaataaaagaatatgtagataaaacgaattcagaaattaatatctataatttcccatggaaaattagtgaaataaattcaattacattaataggttgtggcaccgcttatcattcctgtatgatggctaaatattggtttgaagagttaactcaacttgatgtctctatagatattgcatcagagtttaggtatagaaaaaatagatttaaaaaagatactttatatatatttgtctcacaatctggagaaacagcagat

SEQ ID NO: 246552 - DNA, 562 bp, Unknown
  Bacterial polypeptide expressing nucleotide sequence isolated from the Sargasso Sea
atcagatgatgatgaaaataattatgtaaaatcattacttgatgttccaagattaatttctaatgttttggatcaggaagaagaccttattaaaattgtaaaagaattaaatccaattaagaatgctttatatcttggaagagggcagatgtatcctgttgctcttgagggagcattaaaactaaaggaaatttcttatattcatgcggagggttatcctgctggtgaaatgaagcatggtccaatagctcttttggaaaagggtcttcctgtaataattggtgcaccatcatttaacttatttgataaaacagcatctaatctttatgaagttatcgcaagagatggaaatgttttacttatcactgatcaagaaggtttgaatcatcttggagataccacaaaaaaaataaaatcatttattgttgatgaggctaatattattactgcaccatttatttatactattccttaccaactttttgcatatcatacagctcttcttaaaggaactgatgttgatcaaccaaggaatttagctaaatcagtaactgtggagtag

SEQ ID NO: 246553 - DNA, 361 bp, Unknown
  Bacterial polypeptide expressing nucleotide sequence isolated from the Sargasso Sea
ttatattcatgcagaaggctatgctgcaggtgaattaaaacatggtcctatagcgttaatagatgaaaaggttccagtaataggaattatacctactaataatttatttgataaaacctattctaatctagctgaagtaaaagcaagaggtggaaagataatttgtatcactgatgaagcaggcaaaaataatctagaagatttatctgatcttatttttagtataaaaaattgtagtgattatttacaaaccatagttagcgctttaccagcacaattattagcttatcacgttgcctgttttaagggtactgatgttgatcagcctagaaatctagcaaaatctgttactgttgaataa

SEQ ID NO: 246554 - DNA, 833 bp, Unknown
  Bacterial polypeptide expressing nucleotide sequence isolated from the Sargasso Sea
aacgtcattagatgtatcgatagatatcgcctctgagtttaggtatagaaaaaatagatttaaaaaagatgcactttacatatttgtatctcagtcgggtgaaacagcagacacatatggagctttagatttatgtaataaaaacaatatgaaaacctgttctgtagtaaatgtagtagaaagttctatagcgagagactcaaaatttgttttacctattcattgtggtccagaaattggcgtagcatcaacaaaagcatttataggtcaaatgttagtattatatttattatgtatcaaaattgcaaaaagtagaaaagatatatcaaaagatattttttttgaaaaaataaaatctcttaaatcattatctggattaattaaggaaagtttaaaaactgaaaatgaaattcaatcaatttgtagttcatttattgaagcaaaaggctctatgtttttaggaagaggttattcttttcctatagcgttagaaggagcattaaaattaaaagaattagcttatgttcatgcggaaggttatcctgcaggtgaaatgaaacacgggccgcttgctttaatagaggatggaatgccagttgtagttttagctcccagagatcaatattataaaaaaacaatttctaatatgcaggaggtgattgcaagaggtgcaaaagttcttttaattacaaataaaagtaaagacgaagtttattcagaaaatatttggcaaacaattgaagtggaaaatacttcagaagatttatttccttttcttgttacaattccattacaaaaacttgcttattattctgcattaaaaaaaggatatg

SEQ ID NO: 246555 - DNA, 704 bp, Unknown
  Bacterial polypeptide expressing nucleotide sequence isolated from the Sargasso Sea
aatgtgcggtgttgttgcaatagtaggaaaacaaaacgcaagtcaactcgttttagaaggcttaaaaaaacttgaatatagagggtatgactcagcaggtattgctttagtatctggtggaaaactccaaacttttaagtcagaaggtaaattaatcaatttaattgataatttaaatcaactatccaatacaaatttatattctgatcattccatagctattggtcatacaaggtgggctacacatggtaatattagcgttgaaaatgctcatccattgactagtaaaaataaagtagcagttgttcataatggaatcattgaaaattatgattctataaaaaacaaactcatttcagagggatatgtttttaaaagtgaaactgacactgaggtactaccacatctgtttatgaaatatataaatttaggaaataactttttggaagcaggtagacttgtcttaaaagatattaaaggtgcatttgcttttgttgcaatgagtttggattttccaaatcaattatttgcatcaagaaattcgtcacctttagctattggtttaggtaataaatcaaactttgttggttcagacgctcactcaatagatcatttaactcaaagaataatttatttagaggacggtgatcatgctttaattaaattagacaatgttgagatttataataacaaagaagcaaaaa

SEQ ID NO: 246556 - DNA, 880 bp, Unknown
  Bacterial polypeptide expressing nucleotide sequence isolated from the Sargasso Sea
attaaatgcgcacccacattcttcagaagaagtttctgtggtccataatggtattatagaaaattcaaatcagttaaaacaagatttagaaaaaaaaggttataaatttaaatcgcaaactgatacagaagttataacatttcttttaacagattttttgaaaaatttagatttggtagatgctataaataaaactcttgataaacttcatggaagctttgcattaggcattctttttaagaagcacaaggacatagttgcaggagcaaggagaggaagcccacttgctgtcgggtatggtcctaaagaaaactatcttggctcagactcttacgcattaaaatcaatgactaataagatcacttatttagatgatggtgacatatgcttacttacaaacaatagaatagaattttacaattcgaaaaataaaaaaataaataaagaaattttaactttatcaaatgacaaacatactgctgaaaaaggcgattataaggattttatgtctaaggaaattaatgaacaaaatattacggttaagacttgtattaaagaatacattgatcagatacgaaagggtataaatatatataattttccaataaatcccaaagaaatacaaaagataattttaattggatgtggaacagcgttccattcttgtctaacagcaaagtattggttagaagaacttacaagcatatcaaccgaaattgacatagcatcagagtttagatacagaaaaattaaatttaataaaaaatatttgtatatttttgtttcacaatcaggagaaacggcagacacttttgctgcccttgatttatgtaaaaaaaataatgtaaaaacatgttctattgtaaatgttgtagaaagt

SEQ ID NO: 246557 - DNA, 330 bp, Unknown
  Bacterial polypeptide expressing nucleotide sequence isolated from the Sargasso Sea
aaatgaaacatggacctctagctttaattgaagaaggtatgccagttgtagtattggccccgagagacgactattacaaaaaaactatttcaaacatgcaggaagtaattgctaggggagcaaaagttcttttgattacaaataaaagcaaagatgaagtttattcagaaaatatttggcaaacaatcgaggtagaaaatacatcagaagatttattaccttttttaataacagttcctttacaaaaacttgcgtattattctgctttaaaaaaaggatatgatatagataagcctagaaatcttgcaaaatctgtcactgttgaataat

SEQ ID NO: 246558 - DNA, 553 bp, Unknown
  Bacterial polypeptide expressing nucleotide sequence isolated from the Sargasso Sea
aatgtgtggaatagttggttatattggaaaaaatgatgcgcttataaatttgaaatctaaaattaaactacttgaatacagagggtatgatagctctggattatgcgtaatagattcaaaaacaaataatttttacattaaaaaaactgtaggcacaattgataaaataaaaggttttaaaaaaattaattcttctgttggcatttcacatacaagatgggctacacatggaaaaataaatgagaaaaatgctcatcctcagttaagtcaaaatagtatgatctcgatagtacataacggaattgttgagaattaccaagacatcaaaattctattaattgaaaatggctacaaattcaaatcagaaactgatacagaagttatatctaatttaattgaattttttcttaaaaaatatgacatcgaagaatctttaaaaaagactctaaataaaattgaaggatcgtcatcaatagtcggaattaatattaaacagcctgaaaaaatatttattatgaaaaaaggaaattccggaggtttggtaatttctgaa

SEQ ID NO: 246559 - DNA, 969 bp, Unknown
  Bacterial polypeptide expressing nucleotide sequence isolated from the Sargasso Sea
gaagggagagttgataatctcgaaaaaaattctttagtgcaaagtatggaaggaactattggtataggacatgtgagatgggcaacacacggatctcccaacagtataaatgctcatccacactcatcgcaaaatgtatcagttgtccacaatggtataattgaaaattcgacattactcaaaaaatttttagttagcaaagggcatgtttttaaatctcaaacagatacagaagttattgttcatttgattacagaaaatttaaaaactgaaaatataattaattcaattaaaaaaactttaaaagctcttcacggaagttttgctttaggcattatatttaaagatgagccaaatttaattgttggtgcgagaagaggttcacctttagcagtaggttatggtcctaatgaaaactatttaggatcagattcatatgctcttaaatcaatgacaaataaaataacttatctaaatgatggggaattttgtgtcattaaaaaagatcatgttgaattttttagtgaagatggaactaagataaataaaaaagttttggaattatcaagtgaagaagaaaaatatgacaagggtgattataaacattttatggcaaaagaaattgaagaacaaccgatcactctgaaaaatggaattaaagaatatgtagacaacgcaaataataatattaatatttataatattccttggaaaaaagatgagatttcttctattaccttaattggttgtggcacagcttatcattcttgtttaatggctaaatattggtttgaagagttaacatctttagatgtaagtgtagatattgcatctgaatttagatatagaaaaaatagatttaaaaaagacaacctatatgtttttgtatcacaatctggtgaaactgctgatacttatgctgcattagatttatgtaaaaaaaataacatgaaaacttgtgctgttgtg

SEQ ID NO: 246560 - DNA, 685 bp, Unknown
  Bacterial polypeptide expressing nucleotide sequence isolated from the Sargasso Sea
atgtgtggaattgttggcgcagtcgccgaacgtaacgttactgccatcctgatcgaaggcctcaagcgcctcgaataccgcggctacgatagcgccggtgtggccgtcttcaccaacgccggcaagctggagcgcatgcgccgcccgggtaaggtcagcgaactggaccaagccctggccggtgagccgctggcaggccgcctgggcattgcccacacccgttgggccacccacggtgcaccgtgcgagcgtaacgctcacccgcacttctccggcgacctggccgtggtgcacaacggcattatcgaaaaccatgaagtgctgcgtgaacaactcaagggcctgggctacgtcttcacctcggacaccgacaccgaagtgatcgcccacctgctcaaccacaagctcaaggatcacagcgacctgaccaccgccctcaaggccacggtcaaggaactgcatggcgcctacggcctggccgtgatcagcgccagccagcctgaccgcctggttgccgcacgcagtggcagcccattggtgatcggcctgggcctgggcgagaacttccttgcctctgaccaactggccctgcgccaagtgaccgaccgcttcatgtatctggaagaaggcgacattgccgacatccgccgtgaaagcgtgcagatctgggatgtgaatggtcagt

SEQ ID NO: 246561 - DNA, 592 bp, Unknown
  Bacterial polypeptide expressing nucleotide sequence isolated from the Sargasso Sea
gatgtgtggaattattggcgtagcctcaactaaaccttcagtagataagctgctcataggtctcttgcgtcaggagtataggggctatgattcagcaggattggctatatttgatgaagcagaccaaatacagatttttaagagcactggaaaagttgctgaacttcaaaactcaattgatcaaaatccagtcaatggaaatgtgggcatagctcacacaaggtgggctactcacggtcttccaacagaaaataatgctcacccacatcactcaaataacaatgtttatgtaatccacaatggcattatcgaaaatcatcaagaaatccggacaacattaaaggctttgggttatgtgtttgagtctgaaactgacactgaagttatagcgcatttaatccatgcaaaaatgtctcaagaagaggcccctttgattgaggctcttcagcttgctgtgaaagatttaaggggtgcatatgcaataggcgctgtttgtgaaactgaacctggaatcatagcggcagctcgcaaaggaagtcctttagtagtgggaataggtcatggagaaaactttattgcttcagacaattag

SEQ ID NO: 246562 - DNA, 760 bp, Unknown
  Bacterial polypeptide expressing nucleotide sequence isolated from the Sargasso Sea
ttggctgcccttcgttatgccaaagaccaaaactatcttgcttctcttgcaatctgtaatgtccctacgagttcattggccagagaatcagatttcttactactaaccaatgctgggcccgagataggcgtagcctctacaaaagcattcaccacgcagctcatagccttgatgttattgactttatctcttgcgaaagcctcaggaatgaaccctaagctcagagctagagtaattcaagctttgcgacagatgcctgatattgttgaaaagtgtcttgaacttaaagactatatcgttgatatagcttctgagatagctcaacaagataatgcactatttttaggtcgagggatgttttatcccatagcaaaggagggtgctcttaaattaaaagaaatttcttatattcatgcagaagcttaccctgctggagaattaaagcacggaccgcttgcattaattgacgagcgcatgccagtcgttgcaattgctccagaacacgaattagcagagaaattagtatccaaccttgaagaggtcaaagcaagaggcggcgcgttgtacgttttcggtaatgcgaaagaaaagctatctcttgaaaggggtaaatatatcagcatgccggagtgcgatttcttgcttactcctattttgtacactatcccgctgcaaattttatcttacgaggttgccttgatcagaggtacggatattgatcaaccaaggaatctggctaagtccgtaactgttgaataag

SEQ ID NO: 246563 - DNA, 328 bp, Unknown
  Bacterial polypeptide expressing nucleotide sequence isolated from the Sargasso Sea
aatgaaacatggaccattagccttaattgaagaggggatgcctgtagtagttttagctccaagagacgattattataaaaaaactatttctaatatgcaggaagttatagcaagaggagcaaaagttttattaataacaaataaaagtactgatgatgttgtatctgaaaatatttgggaaactattgaggttgaaactaccaatcaagatcttttaccatttcttttaactatacctttgcaaaaacttgcctattattcggctcttaaaaaaggttatgatatagataagcctcgtaatttagctaaatcagtaaccgttgaataa

SEQ ID NO: 246564 - DNA, 271 bp, Unknown
  Bacterial polypeptide expressing nucleotide sequence isolated from the Sargasso Sea
ttagctccagacaatgaacacttagataaaattacatcaaacattgaggaagtggcagcccgaaaaggtaaggttattaccataggaccactaggcagaacaaaaatagataaaaatggtgggcatattaagattcctaagacattggatctgcttaatccgattgtctcagtagtgccaatgcagctgattgcgtactacaccgcagtctttaaaggcaccgatgtagataagcctcgtaaccttgcgaaaagtgtaactgtagaatgaa

SEQ ID NO: 246565 - DNA, 724 bp, Unknown
  Bacterial polypeptide expressing nucleotide sequence isolated from the Sargasso Sea
tatgtgtggaattataggaatttcaagcaataagtcagtatcagcgaatataattaattctttaaaaaaattagaatatagaggttatgactcagcaggtatagccacactttcagacggtgaaattaatgaattaaaatctgagggaagagtagatagtttagaacaaaattttgatttaaaaaatttaaaaggaaatattggaataggccatgttaggtgggcaactcatggtattcctaatagtgtgaatgctcatccacattcatctcataatgtttcggttgttcataatggaataatagaaaattcgacaatattaaaaaaacatttaactagtaaaggccacaattttaagtctcaaacagatactgaggtaattgttcatttaattacagagaatttaaaaacagctgagctggaagaagccataacaaaaactctaaaacaacttcatggtagttttgctattggtatagtttttaaagattttccagacttaatagttggagcaagaagaggctctccattagctgtaggctatggtccaaatgaaaattatttaggttcagactcttacgctttaaaatcaatgacaaataaaattacttatttgaatgatggtgaattttgtatcgttaagaaagatcatgttaatttttttaacgaagaaggtaaaaaaataaatgaaaaaattttagaactttcttcaaacgaagcgaat

SEQ ID NO: 246566 - DNA, 937 bp, Unknown
  Bacterial polypeptide expressing nucleotide sequence isolated from the Sargasso Sea
aaaggaataggcgagaactttattgcctctgatgtgatggccttgaaaccagttactgataagtttatttatttggaagagggagatctgattgaattaagtccagaagatatctcaatatggaatatagacgatgaatcagttgtccgaagcagtgtgcaagtgttactcggtccagattcgatggataagggtaattacagacactacatgcaaaaagagatatttgagcaaccaaagtcaattacggatacattagaaggcagaatcggtttgaatggtctcttgatcgagtcttttggggtcggttctgcatctatatttgagacgatagagaacgttactctggttgcgtgcggaaccagttattatgcggctctggttgcttcttattggctagaagaattggcgaagattccgtgtcaagtcgagatagcaagtgaatttcgttatagaacagtagtttgtagaccaaatagcctttttgtaactatttctcagtcgggagaaactgctgataccttggccgctttgcggttggctaaggaattgggatttgcgtcaactcttaccatttgcaacgtggctactagctctctggttcgagaaagtgatttggctttaatgatcaatgctggggtcgagataggggtagcctcgaccaaagcgtatacagcccagcttgttgatcttcttttacttactatagccctagctcaatataacggattaagtggcgcaaaagaattagagattgtttcggagttgcataagttgccaaatttgatagaagactgtcttggccttgatgaagaagtaaaagatttatctaatgactttatagacagagatcatgcattgtttttggggcgaggaagcatgtatccggttgctttggaaggagctcttaaattaaaggaaatatcttacattcatg

SEQ ID NO: 246567 - DNA, 637 bp, Unknown
  Bacterial polypeptide expressing nucleotide sequence isolated from the Sargasso Sea
tcatacgcgatgggctactcatggagcccctaacgagcccaatgcgcacctgcatacgtcgatggatggggatatcgcaattgttcataatgggattattgaaaacgccggtatcattaggcagcaactcgtatctgaggggtacacctttcggtctgagacggatacggaggtcgtggttcatctcatcgattacctatgggaagatggagccccgcttgaaaaagcggttcaggccgccttgcgtaatgttgatggagcgtacgggattgcggctgtatcgtcgcgcgatcccgagaagattgtggtcgcacgacacggtagccccattcttatcggagttggtaagaatggagagattttggccggttcagatgctgccgcagtcattgaggtaacgagagatgtagtttatctggatgatggagactgcgcggttctaactgcggagggatatcgcacatatcaaatcgaaggtcacgaggtgcagcggggagtccatgaagttacgtgggctctcgactctattgagaagagtggatacccgcatttcatgctcaaggagatttatgagcagccatcaagcgtcgctgatgttatgcgaggtcgtatactgcgaggttctagcgatgcgcgt

SEQ ID NO: 246568 - DNA, 334 bp, Unknown
  Bacterial polypeptide expressing nucleotide sequence isolated from the Sargasso Sea
aatgtgtgggattattggtgcagcctcctctagaaacgttggaacaatcttagtcaatgcgctgaagaaaatggaatatcgaggctatgactcggccggactcgttttaaaccaagatgaggtcgcatttcaactaaggacacttggcaaggtttcaaaccttgaggaattaatgataaaacaaaggccaaaagctgattcagggattgcgcatacaagatgggcaacgcatggaattccatcagagaccaatgcacatcctcatgggtccaatggaaacatctatattgttcacaatggaatcattgaaaaccacgatgacctgagagaaaga

SEQ ID NO: 246569 - DNA, 426 bp, Unknown
  Bacterial polypeptide expressing nucleotide sequence isolated from the Sargasso Sea
tatgtgtggaattattggtattaatagtcataaacctgtatcagcatcaataatcaattccttaaaaaaattagagtatagaggttatgactcagctggaatagctactctatcaagtggtttaataaatgaagtaaaatctgagggacgggtagataagcttgaaaaaaattctttagtacaaaatatggagggcactataggaattggccatgtaaggtgggcaactcatggtctgcctaatagtataaacgcacaccctcactcatcacaaaatgtttctgtagtacacaatggtataattgaaaattcaactttattgaaaaagtttttagtaggtaaaggacataaatttaaatctcaaactgatacagaagtaattgttcatttgattacagaaaacttaaaaacagatgatattgtaaa

SEQ ID NO: 246570 - DNA, 748 bp, Unknown
  Bacterial polypeptide expressing nucleotide sequence isolated from the Sargasso Sea
tatgtgtggaataattggtataaatagcaataaacctgtatcagtaacaattattaattctttaaagaagttggaatatcgaggatatgactcggcaggtatagcaactctttcgagaggatcaattaatgagataaaatctgagggtagagtggataatcttgaaaaaaattctttgatccaaaatatggaaggcacgattggtattggccatgttagatgggcaactcatggattacccaatagtatcaatgcacatcctcattcatctcaaaatgtttcagttgttcataatggaataattgaaaattctactttactaaagaaatatttagttggtaaaggtcataaatttaagtcacaaacagataccgaagtaatagttcatttaattacagaaaatttaaaaactgaaaatattgtgaattctattcaaaaaactttaaaatctttacatggaagttttgctcttggtattatatttaaagatcaaccagacttaattgttggtgcaagaagaggatctcctttagccgttggatatggtccaaatgaaaattatttaggctctgattcttatgcccttaaatcaatgacgaacaagataacttatttaaatgatggtgagttttgtgtaattaaaaaagatcatgtagagttttttaatgaagaaggagcaaagattaataaaaaagttttagaactatcctcatctgaagaaaaatatgaaaaaggtgattataaacat

SEQ ID NO: 246571 - DNA, 402 bp, Unknown
  Bacterial polypeptide expressing nucleotide sequence isolated from the Sargasso Sea
caatagcattagaaggtgcactaaaactaaaggaacttgcatatatgcatgccgaaggttatcccgcaggcgaaatgaaacatggaccattggctttaattgaagaaggcatgcctgtagtggtaattgcgcctagagatgaattatataaaaaaactgtttccaatatgcaagaagttatatcaagaggtgcaaaagttttattagtaacaaataaaagtaaagatgaaatatattcagaaaatatttgggaaacaattacagttgaaaatgtatccacagatcttttgccatttttaacagcagttccattacaaaaattagcttattattctgctcttgaaaaaggttatgatatagataaacctagaaatttagctaagtcggttacagttgagtaat

SEQ ID NO: 246572 - DNA, 730 bp, Unknown
  Bacterial polypeptide expressing nucleotide sequence isolated from the Sargasso Sea
atagctaaaatcccatgctatgtagactttgctagtgagtatagatatagagacccgcttgttgaggaaggcaccttgtttgttactatctcacaatcaggtgaaaccgcagacactcttgctgccctaaggtatgcacaagaaaaagactatttaagcactttgtcaatttgcaatgtaccaaccagttctctggctagagaatcagagcacgttctttttactaacgctggccctgaaataggtgttgcatcaacaaaagcttttacaactcagcttgcaggtttaatgcttctggctatgtctattgcaaaaagcttaaatatagataaagaacaaagaaaaaaccttgtacatgagttaagaaatctaccaaaggtgatcgaggagacattaaatctttctgatgagattttgagcatagttccaaatatagctgataaacataatgctttatttctgggtagaggaatgttttttcctattgttcaagaaggcgcattaaaacttaaagaaatttcatatattcatgctgaggcttatcctgcaggagagcttaaacacggcccgttggcattagttgatgatcaaatacctgttgttgcactatcacctgaaaatactctaactgaaaaattagtttcaaatcttgaggaggtgaaagcaaggggcggaacactttatgtttttggcggagagaatgcaaaaatcaaaattgaaagaggtgaat

SEQ ID NO: 246573 - DNA, 811 bp, Unknown
  Bacterial polypeptide expressing nucleotide sequence isolated from the Sargasso Sea
gatttgcttgtttttgtaagccagtctggtgaaacagctgacacgattggagctttaagatttgccaaagaatattcaaaaaatattcttgctatcgtcaacgttgaacaaagctcaattgcacgtgaagcaaattgggtgtttccaaccaaagcagggcctgagatcggagttgcatccacaaaagcgttcgtgtctcaactcataattttaaaaatcttaaatatcaagtttgcaagcgatttatctaagatcagtatagagcaaagatcaaaatttttgagtggtttattagaattacctaggctatattcggaaattttatctaaaaatgagagtataaaaaaattgtgtaaaaacatcattaggtccaatagtgttctgtatttaggaagagatatcttatacccaatagcccttgagggtgcattgaagttaaaggagataagctatttacatgcagagggttatgcttctggggagttgaagcatggaccaatagcgttgattgatgagagtatgccgattgttgcgttaaacccttcgactaaagtatttcagaaaacgttgtctaatttagaagaagtaaaggctaggaggggtaaaatgatattatttaccgatgaaaaaggtaaagagttatctaaagatttaaccaaatcaatttttcagttgcccagctgctccgattttttggtgccaattttatattctttaccactccagttaatagcctattacacagctttagaaaaaggaacggatgttgatcaaccaagaaatttagcaaagtccgttacagtagagtagt

SEQ ID NO: 246574 - DNA, 991 bp, Unknown
  Bacterial polypeptide expressing nucleotide sequence isolated from the Sargasso Sea
tatgattcttgctggaattgcaacactcacaaacaatgaaattaatgaagttaaatctgagggcagagtaaataaacttgagagtaatccattgatcaaaaacatggaaggaactattggaataggtcatgttcgatgggcaacacatgggttaccgaatagtgtaaacgctcatccacactcatcacaaaatgtctctgttgtccacaatggaataattgaaaattcaactcagttaaaaaaatttttagttagcatagggcataaatttaaatcacaaactgatacagaggtaattgttcatttaatcacagaaaatctaaagtcagataatattgtgaaatcaattcaaaaaactttaaaatctcttcatggcagttttgcacttggaataatatttagagaccagcccgatataattgttggtgcgagaagagggtcacctttagctgtagggtatggaccaaatgagaattatctaggctctgactcgtatgctttaaaagctatgactaacaaaattacttatttaaatgacggtgaattttgtattgttaaaaaagaccatgttgaattttttagtgagaatggaaataagataaataaaaaagttttagaattatcctctgaagataataaatacgaaaagggtgattataaatattttatggctaaagaaatagaagaacagccatcaacattaaaaaatggtattaatgaatacatagatactttgaataatgatataaatatttataattttccatggaaatctaatgagatttcctctgttactctaattggttgtggcaccgcatatcactcgtgtttattggcaaaatactggtttgaagagcttaccacattagatgtaaacgtggatatagcatcagaatttagatatagaaacaatagatttaaaaaaagacatttatatgtatttgtctcacagtctggtgaaactgcagatacttacgcagctttagatcta

SEQ ID NO: 246575 - DNA, 419 bp, Unknown
  Bacterial polypeptide expressing nucleotide sequence isolated from the Sargasso Sea
ttttttaggaagaggaataaattatcctatagccctcgaaggcgcgttaaaacttaaagaaattagttacatacatgcagctggatatcctgctggtgaaatgaaacatggtccaatagctttgttagataaaaaagtacctgtaatttctattgcctcccctggtgaggtttttgataaagttatcagtaatgcacaagaagcaaaagctagagattcatatttgattgggattgctcctgaatgtaatggaactgaaatctttgattatttaatgacagtcccttcttctaatgagtggatttcacctctacttaatatattgcctttacaattattgagttatcatattgcagctcataggggacttgatgtggatcaaccaagaaatttagctaaaagtgtaactgttgaataat

SEQ ID NO: 246576 - DNA, 802 bp, Unknown
  Bacterial polypeptide expressing nucleotide sequence isolated from the Sargasso Sea
atattttttgtatctcaatcaggagaaaccgcagatacttatgcagctctagaaaaatgtaagaaaaacaatataaaaacttgtggaatagtaaatgttgttgaaagctcaatagctagatcagcagattttgttttacctatttatgcaggacctgaaattggtgttgcttcaactaaagcctttataggtcaaatgttagttttatatttgcttacaataaaaatttctaaggaaagagaagacatagataatgagacttataaaaaattagttgttgagataaaaaaaattccagaattaattaaaaaaaccttatctaaacagaatgatatccaagttattgctagagattttattgatgctaaaggcataatgtatctaggaagaggatattcatatccaatagcgatggaaggagctttaaaactcaaagaattatcttatattcatgctgaaggatatgcagcgggagaaatgaaacatggaccattagctttaatagaggatggtatgcctgtaatagttctggcgccaaaagatagatattttgataaaactatatctaacatgcaagaagtaatagcaaggggtggcaaagtgttaatgataactgacgacacatcagaaacaatgaatgaaaacataagatttaaatttcaactaccaaaaactagtgagagtgctaatccttttttacttagtattcctattcaatttttagcttatcatgtggcattgttaaagaattgtgacatagataaaccaagaaatttggcaaaatctgttactgttgaataat

SEQ ID NO: 246577 - DNA, 499 bp, Unknown
  Bacterial polypeptide expressing nucleotide sequence isolated from the Sargasso Sea
ttttcaaaatcaatttcagaaattctagaaaatccagttaaaattcaagaaattgcaaaagagttgaaagatgtatcagacatttacattttgggcagaggaataaactatccaatcgcaatagaatcagcattaaaattaaaagaattgacatacattcatgcagaaggaataccaggtggagaattaaaacacgggcctcttgcgttaatggatacagacgtttttgttattgtcattaatccaaatgattcaacatatactgacacattaacaagtgcacgagaaattaaagctcgtggagcaaagattattggagtttcagatattgaaagtgacgtttatgattattggataaaaattccaaaaattaatgaaattctatatccaatttcagagatcattccaatacaattactaacatactactcatctttggaaaaagatgcagatccggactatcctagaaatttagcaaaatcagtaactgtcaagtaga

SEQ ID NO: 246578 - DNA, 496 bp, Unknown
  Bacterial polypeptide expressing nucleotide sequence isolated from the Sargasso Sea
aatgtgtggaattattggaatagctagtaacaaaccagtttcaatgaatattgtaaattcattaaaaaaactagaatatagagggtatgactctgctggactagcaacaatagataaggatgaaataagtgaaaaaaaatgctcaggcagagtagaggaattagaaaaaattttatttaaaactccatctcaaggacatcttggtataggacatgttagatgggcaacacatggtataccaaatatcgtaaacgctcacccacattcatcagaaattgtatcagtagttcataatggaattattgaaaactcagatgaattaaaaaaaaatttagagtcaaaaggcctaaagtttaaatcgcagactgatacggaagttattacattattaattactgaatttttaaaagataacaaacctttagaatcagtttctaatacattaaaaaaattaaaaggaagttttgcgttaggtattatttttaaaaattataaa

SEQ ID NO: 246579 - DNA, 571 bp, Unknown
  Bacterial polypeptide expressing nucleotide sequence isolated from the Sargasso Sea
gcaggtccagagataggagtagcttctacaaaggcatttacggctcagttaactgtccttataatgctcgcactaaaaattggtagaaaaaaaggcgtttccaaaaatagaggaaaagaattaattagagcacttagaaatattgataaagatgtaaacataatacttcaaaatattgaagaaataaaaaaggttgcgaatgctacatcatcagttaataattatttgtatctgggtagaggagtcaattttcccgtagcgcttgagggagcattaaaactcaaagagatatcttacattcacgctgaaggatatccagctgcggaaatgaagcacggtccgatagctctcattgataaagatatgcccgttgtattcatcgcacctcaagatgatactttcttaaaaattttagcaaatatagaagaagtgaaggcgcgaggtggggtaataattacaatcacagataaggtgaatagttctcttgaaaaattatcagatttcattttaataacaccaaaaactcataaatacatttttcctataagctgttctgttatattacaaattc

SEQ ID NO: 246580 - DNA, 616 bp, Unknown
  Bacterial polypeptide expressing nucleotide sequence isolated from the Sargasso Sea
gcttttgttacccaattagcctgtttaaatctgttgcttttaactttgatgagagtgcacaacaaactaccaacagcaagaaagaaaattaccgcagcactgagggatttgcctaaattaattaataagactttaaaaatgacaggcgaatacaagaaagtggcaaagctactttttaaaagaaacagcgcattatttttgggtcgtggtttatattttcctattgccagagaaggggctcttaagctcaaagaaatatcttacatacatgccgaagcctatccgggcggagaattaaagcatggaccactggcactgatagacaaaaatatgccagtaatagctttagctccagataatgaacacttagataaaattacatcaaacattgaggaagtggcagcccgaaaaggcaaggttattactatagggccactaggcagaacaaaaatagataaaaatggcggccacattaagattcctaagacattggatctgcttaatccgattgtctcagtggtgccaatgcaattaattgcttattacaccgcagtctttaaaggcaccgatgtagataaacctcgtaaccttgcgaaaagtgttacggtggagtaag

SEQ ID NO: 246581 - DNA, 805 bp, Unknown
  Bacterial polypeptide expressing nucleotide sequence isolated from the Sargasso Sea
ctctttactagttacaatttcacagtcaggcgagacggcagacacacttgctgcattaaggtacgcaaaagaaaaagactatttatcaacactaacaatttgtaatgttccaactagctcccttgcaagagagtccgactattctatttttacaaatgcaggccctgaaataggtgtggcatcgaccaaagcattcacgacccagctcgccgctttaatgttattagcattgtctttagctaaaagcagaggtaaaaatccaaaattaagaaccagagtaattacagccatgcgctcattagcggacacagttgaagaaactttaaaacttaaagatgccattcttgagattgctccagaaatagcaaacaaagataatgcattatttttaggtagaggcattttttacccaattgctaaggagggggcattgaagctaaaagaaatttcatacattcatgccgaagcctatccagctggcgagttaaaacacggcccgctagctctaatagatgaagacatgcccgttatagctctggctccagaaagtgagattgctgagaaacttgtttcaaaccttgaagaagttaaggcaagaggaggcacgctttatgtattttcagatccttccatttctatggacttaacctcaggaagattagtaaatatgcctaagtgcgattttttattaacaccaattatttatacaatccctcttcaaattctttcctatgaagttgccttattaagaggtactgatattgatcaaccaagaaatttagctaagtcggttacggtggagtag

SEQ ID NO: 246582 - DNA, 919 bp, Unknown
  Bacterial polypeptide expressing nucleotide sequence isolated from the Sargasso Sea
agattcagaattaatagcgcatttgattcaccatcattacaaaaataatgatcttttgtgtgcgatgcagtcggccataaaagaattagagggcgcatatgcaatcgcggcagttgatctaaatcacaaagatcaattggtaatagcaaggtataagagtccgctactaattggtgtgggaatagaggaaaattttgcagcctctgaccctctcgcattagcacaattgacctcaaattttgtctttctagaggatggcgataccgctgttgtaaaaaaagatagctatgagatatttgatgcgaagagcaaatcagttaacagagacgtaactcatctagatattgaaactagttctgttactaagggtgaattctcacatttcatggaaaaggaaatttttgagcaacctcaatctgcaagcaacacgcttgagtccagacttggcagcaatgatgtcttagataatatctttggattgggttcgtcagaaatttttgctaaaactaaacgtattcaatttgttgcatgtggtaccagtttacatgcaggaaaggttggcagattttggtttgaagaaatcgctggcattccatgctatgtcgattttgcgagcgaatatcgctatcgaaatccacttgtggaaaatgggacattatttgtaactatttcccaatcgggtgagactgcagatactttagctgccttacgttatgctagagataaagattatctaagtacactttcaatatgtaatgtacctaccagctctttagctagagaatcagaccatgttctatttacaaatgcagggcctgagattggcgttgcatccaccaaagcatttactacccaattggtgtctttgttgttgttagcaatgtcaattgcaaaaagtcaagataagaatccaatcatg

SEQ ID NO: 246583 - DNA, 873 bp, Unknown
  Bacterial polypeptide expressing nucleotide sequence isolated from the Sargasso Sea
catgggtgttcccaacgaggttaatgcacatcctcattcatcagaaatagtttctgtagttcataacggaataattgaaaattctcttgaattaaaaaaaaatttagaaaaatcaggaaaggttttcaagtcacaaacagatacagaagtaataacagttttattgacagaaaaattaaaaaaacttgaacctttaaaagctgtttttgagactttagatttgcttaaaggaagctttgctttaggtattatatttaaaaattttaaagacattgttattggagctagaagagggagtccacttgcagttggttactcaaataatgaaaattatctgggttcagattcttacgcacttaaatcaatgactaacaaaatatcttatttagatgatggagatgtatgtgttttatctaaagatcaagttaaattttataattataaaaaagacaaaattaataaagaagtttttacattatctgatgacaaaaattctgcgagcaagggaaattataaaaattttatgattaaagaaatatttgaacaaccgttaacaactaagacctgtttaaaagagtacattgacaaaataagagaagaaattaatttttataacctgccaattgatcctaaaaaaatcaataaaatagttttgattggatgtggaacggcttatcattcatgtttagttgcaaaatattggttagaagatttaacatccttaaatgttgaaaccgatatagcttcagaatttagatatcgaagaattaaatttgaacaaaacaacctctatatatttgtatcacaatcaggagaaacggcagatacttacgctgctttagatacttgtaagaaagaaaatgtaaaaacatg

SEQ ID NO: 246584 - DNA, 871 bp, Unknown
  Bacterial polypeptide expressing nucleotide sequence isolated from the Sargasso Sea
gcccgtgtacccgctcttgctcatgtcagtagcgaatttcggcacaacaatcctgtgattgaatccgatgcgattcattttgcagtcagtcaatcgggagaaacggcagacactctagccgcagtcaaagaaatccaactcaagggtggtgaagtccgtggtgtcatcaatgtcgtaggttctaccattgcccggcaatgcggtcgtggatgttacatccactcaggtcctgagcagtctgttgcctcaaccaaagcattctcgaacatggtggcggcactgtcactatttggaatccaaattggtcgtgcccgctcaatttctcgagaaaaaggtaaacaattggttaaatcactgcagggtatcccaaaattagtcgacaaatacttgcaaaatcaggggcctattgacgaggttgtcgaagttgtcaagcatgcaaagagcgtcctatttcttgggcgaggaatttccgccccagtggctcgagaaggtgcactaaagttgatggaaattgcctacatcccttgcttggcttatcctgcgggtgagatgaaacatggtccgattgcattgctagaggaggggagccctgtggttgtgattgcgcccaatgattctttgaaagacaaaacggtttctagcattcaagaatgtcgtgcacgtggtgccaaaatcattctcattcatgaagagggggatgcgattgctgaagaagccgacatttcaattccaattcccgcaaccgatccgatgtttacgcccatgctgacggtgctaccgttgcaattgattgcatacaagaccgcactggaactcggttgtgatgttgatcgcccgcgaaatctcgcgaaatctgtgactgtggaataat

SEQ ID NO: 246585 - DNA, 922 bp, Unknown
  Bacterial polypeptide expressing nucleotide sequence isolated from the Sargasso Sea
tgtaagatggcaaactcatggaaaacctagttcaataaatgcacatcctcattcatcagaagaagtatctgtcgttcataatggtataattgaaaattcaactattctaaaaaagttattagaaaataaaggttataagtttaaatctcaaacagacacagaagtaatagttcatttggtaactgattatttaaaaaaaaataaccttaaaaatacaattataaaagttttaaaaaaattacatggtagttttgcactaggaataatattcaaagaccaaccagacttaatagttggggcaagaagaggctctcctcttgcagttggttatggtccaaatgaacactatcttggttcagactcttatgcattaaagtcaatgactaataaaatttcatatttaaatgatggagaattttgcatattaaaaaaagatcaagtcgaattttttgatgctgatggaaccaaagtaaacaaaaatattttaaatctttctaaagatgatcaaaactatgaaaaaggagattacaaatattatatggctaaagaaatagatgagcagccaataactttaaaaaattgtgtcaatgaatacatcgacaaacataacaaagaaataaatatttataattttccttggaaaatcaatgaaatctcatcagtagttttaattggatgtggaaccgcatatcattcatgccttgttgcaaaatattggtttgagcaaaatacaagtttagatgtgagtgttgatatagcttctgagtttagatatcggaaaattaaatttaaaaaagattgtctatatgtttttgtttctcaatcaggagaaactgctgatacatttgctgcattagatttgtgcaaaaagaataaagctaaaacttgcgcagtagtaaatgtggtgaaagtcaatgcaaga

SEQ ID NO: 246586 - DNA, 915 bp, Unknown
  Bacterial polypeptide expressing nucleotide sequence isolated from the Sargasso Sea
ttctttttttcacgaagaaggaaaaaaagttaataaaaaaatattagaactatcatcagataaagcaaattacgataaaggtgactttaaacatttcatggcaaaagaaattgaagagcaaccactaacaattaaaactggaattaaagaatatgtagataatgtaaataaagacataaatatttttaattttccttggaagatagaagagattaattcaatcacgttaataggatgtggaacagcataccattcttgtttgatggctaaatattggtttgaggaacttacaaacctggatgttagcatagatatagcttccgaatttagatacagaaaaaataggtttaaaaaagacactttatatgtctttgtttcacaatctggagaaacagcagatacctatgctgcattagatctttgtaataaaaataatatgaaaacatgtgctgtggtaaacgtaattgaaagctcaattgcaagagattctaattttgttttacctattcattgtggtcctgaaattggagttgcatcaacaaaagcatttttaggtcaaatacttgttttgtatattttagctttaaaacttggatcaatgagaaatgaaattaaaaaaaaagaatatcaagaaaagattaaagctttaaaagctttaccaggattaatagaaaaaactttattgtatgataatgatattcaagcaatatcttcaacatttaatgaagcaaagggctcaatgtttttaggaagaggctattcttatccgatagctttagaaggtgcattaaaacttaaagaactttcttatgttcatgctgaaggatatcctgcaggtgaaatgaagcatggacctttggctttaattgaagaaggtatgccagtagtcgtcttagctcccagagataattatta

SEQ ID NO: 246587 - DNA, 940 bp, Unknown
  Bacterial polypeptide expressing nucleotide sequence isolated from the Sargasso Sea
aaacgatcgatggctggaagagaccaaccaaaaaggaagacaagtaatgtgtggaattatggggcagcctcctctagaagcgttggaaaaatcttggtcaggggactgaagaaaatggaatatcgcggctatgactctgccgggctcgttttaaaccaagacgaggccgcatttcaattaaggacgctaggcaaagtttcaaaccttgaagatgcaatgattgaacaaaggcccaaagcccattctggcattgcgcacacaagatgggcaacacatggaattccatcagagacaaatgcacacccacacgggtcaaatggaaatatatacattgttcacaatggaatcattgaaaaccatgatgagctgagagaaaggctatcaaatgaaggctatgagattcagtcagaaaccgattcagaattgattgctcacctgatccatttcaataaagaaaaaggcaaaaccacattgggcgcactaattgagacaataaaagagcttgatggcgcatactcagttgctgtaatcgacacagaggaaaaaggaaaaatatttgcagccaaacaaaaaagtcctcttttggttggaaaagggatagaggaaaattttatcgcctcagatccgctcgcaatagccggtcttgcagaatctttctatctacttgaagatggcgactttgcagaaatcaccaaagatgaaattaaaatttttggcagcaatggtgaggcgctctcaagagaagagaccataatagacacaagcgtgaaggaggcatcaaaagatggttacaaacacttcatggaaaaagaaatatatgagcaacctcaagcaataacaaatgctattgagggaaggacttcagatggagaggttttagataatatatttgggctgggttcatcagaggcgtttaagggcgtcaaaagaattcagttgt

SEQ ID NO: 246588 - DNA, 757 bp, Unknown
  Bacterial polypeptide expressing nucleotide sequence isolated from the Sargasso Sea
tatgactcagccggtctcgttttaaatcaagatgaggtcgtatttcaactaaggactcttggcaaggtttcaaaccttgaagacgcaatgattgagcaaagacctaaagctgattctggtattgcacatactagatgggcaacacatggaattccatcggagaaaaatgcacacccccatgggtccaatggaaacatctatattgttcacaatggaatcattgaaaaccacgatgagctgagagaaaggttagcaaacgaaggttatgagattcagtcagaaaccgattcagaattgattgctcatttgatccattcgaataaaggaaaagacaaaaccacattggcagcactaattgagacaacaaaagagcttgatggtgcatactcaatcgctgtcattgacagagaggaaaaagggaaaatatttgcagccaaacaaaaaagcccgcttttggttggaaaagggatagaagaaaattttattgcctccgatccgctagcaatagccggccttgctgaatctttttatctgcttgaagacggtgactttgcggaaatcaccaaagatgaaattaaaattgttggaacaaatggtgagccggtctcaagagaagagaccataatagacacaagcgtgaaagaagcctcgaaagacggctataagcatttcatggaaaaagaaatatacgaacaacctcaagcaataacaaatgctattgaaggaaggactgcagatggagaagttttagataata

SEQ ID NO: 246589 - DNA, 799 bp, Unknown
  Bacterial polypeptide expressing nucleotide sequence isolated from the Sargasso Sea
atgtgtggtatcagcggcatagtgcattcagaaaattttggcaggaatttacttaattccataagaaatcttgaatatcgaggatatgattcttgtggggttgctgtgatccagaatggcaagatcgatttaagaaaaaatataggcggaattgatgatgtcaatctgaaagaacgtttggatcagatgcagggaaaaattggtattgctcacacgcgttgggcaacccatggaggtgtcactcaggaaaatgctcatcctcatctttctgcaaaccgaaaatttgccgttgtccataacggtataatatcaaattatcagcaacttagggatgtaatgcttagcgaaggtgtttgttttgagtcattgacggatactgaggtttttgtgaaccttttggaaaaatcctatactgaaagaaatgatttggaacaggctttcctagcagcacttcagcagatagaaggttcattttcaattgttatgctttcttcacatgacccagagcatttgtattgcgtaaaaaacgagtcacccttattgttgggtctgggcgaagaatgtaattatgttgggtctgatataaatgcctttctagaatataccaggaaggcaattgttttagatgaaggcgaatatgtaattttaggtcctaatgactaccaagtccgcagtttaaaaactggtaaaaaacttaagaaaaatgttctgcatattgactgggacttagagaccagtaaaaaaggtggattttctcattatatgctcaaagaaatatttgatgagccaagaaactgtc

SEQ ID NO: 246590 - DNA, 931 bp, Unknown
  Bacterial polypeptide expressing nucleotide sequence isolated from the Sargasso Sea
accaattattataaaaaattgtgtaaacgagtatgttgataaaataaataaacaaataaatatctataattttccttggaaaactaaacaaatatcctcgattgttttgataggatgcggaacagcatatcattcatgtttagtagcaaaatactggtttgaagaatatacttcgcttgatgtttctatagatatagcttcagaatttagatatcgaaagcttaaatttaaaactgactgcctatatgtttttgtatctcaatctggagaaactgctgatacttatgcggcattagatatttgcaaaaaaaataaaatgaagacctgctcaatagttaatgttattgaaagttcaattgcgagagattctgatctggttttaccaattcattgtggtcctgaaattggtgtggcatcaacaaaagcctttttgggtcaaatgttagtattgtacatgctatgtataaaattatcttatgatcaaaaaatagtaagtaaaaaaaactatcaagaaaaaattaaaaatttattatctttatcgaatttatgtaaaaaaactttattaacagatggcaaaattcaaaaatcaagcaaagcatttattgaagcaaaaggttcaatgtttttaggtagaggttattcatttcctatagcgttagaaggtgctttaaaattaaaggaacttgcttatgttcacgcagaaggttatccagctggtgaaatgaaacatgggccacttgcattaattgaagaaggtatgccagtcgttgttcttgctcctagagacgattattataaaaaaacaatttctaatatgcaggaagtaatagcaagaggcgcaaaagtattattaataacaaataaaagtaaagacgaaatccaatcagaaaatatttgggaaactatagaagtagaaaatttatccgatgat

SEQ ID NO: 246591 - DNA, 893 bp, Unknown
  Bacterial polypeptide expressing nucleotide sequence isolated from the Sargasso Sea
tatgtgtggcattgtcggggcagtcagaacttctgaagcgagcggctttttgctcgagggtctgcgcaggcttgaatatcgtggctacgactccgccggggtagtggtgatcaaccccgaaggaaaactcgagcgggcgagagtcgtcggcaaagtcggagaactggaacaggcgctgcgtcagacaccgctggcaggcgcaaccggaatcgcccatacccgctgggcgacgcatggcggcgtcacagagcccaatgcccatccgcatatctgcaatggcactttggcgctcgtgtgcaacggcatcgttgaaaatcacgaaactcttcgcgatgcacagcgtgcggcgggtctcagttttacttctgaaaccgatacggaagtcgtggtgcatcaggtctatcttcaccttcagcaggggttagatctggtggatgcagtgcgtgccacgatggcggagctgcacggcagttttgcactggctgtggtgcatgccggcgagccggaccggctcgttgcggcccgccagggtccgcctcttctgctcgggcggtcgggcgaagagacctttgtggcgtccgatatcaacgccctgctgccggtaacccgcaactaccaggtgcttgaaaacggcgatgtggtggatattcgcgggagcgattgcctgattcgtgatcaagctggcgaaatagttgagcggaccgtgcacagcagcacgcagtcgggcgagagtgcagagctgggtgaataccgccatttcatgcaaaaagaaatccaggaacagccccgggcggttgctgataccctcaaagggcgcctgctgggtgatcatgttcttgaggaatcttttggcagccgcgctcaggagatctttgatgcgacccggcaggttc

SEQ ID NO: 246592 - DNA, 631 bp, Unknown
  Bacterial polypeptide expressing nucleotide sequence isolated from the Sargasso Sea
agttgcttctacaaaagcctttactactcaacttgtagccttaatgctgctggctttgtctcttgcaaaaagtagaggaagaaatccaaagttaagaacaagagtaataacagcattaagatcattgtcagaaactgttgaagaaactttaaaacttaaagacacaattttagaaatagctcctgaaatagccaataaagataatgctttgtttttaggcagaggtattttttacccaattgcaaaagagggagcactaaagcttaaagaaatttcttacattcacgctgaagcttatcctgctggtgagttaaaacatggacctcttgctttaatagatgaagaaattccagttattgctttagcgccagagagtgagatagctgagaagttagtttctaatctcgaagaagttaaagctaggggcggaactctatatgtattttctgatccttcaatttcaatggatttaaagtctggaagactcatcaatatgccaaagtgcgactttcttttgacgccgatcatttatacgatacctctacaaatactttcttacgaagtagctttgttaagaggaaccgatatagatcaaccaagaaatttagcaaagtcagtcaccgttgagtag

SEQ ID NO: 246593 - DNA, 868 bp, Unknown
  Bacterial polypeptide expressing nucleotide sequence isolated from the Sargasso Sea
atctcaaacagatacagaagttataacagtaatgttaactgattttttaaaatcagaagatttaataaactgcattcataaaactttagaaaaattagaaggaagttttgctctcggagtaatttttaaagatttcaaaaatttagtagttggagcgagaagaggaagcccgctagcagttggatatggacataatgaaaattttataggttcagactcttacgctcttaaatcaatgacaaataagatctcttatcttgatgatggagatttttgcttgctttatagagaaaaagttgaattttataattcagaaaaaaaaaaaattaataaagaaattttagaattatctaatgaggacaatatcgccgaaaaaggagattataaagactttatgtctaaggaaattgatgagcagtcatttactacaaaaaaatgcatcaatgaatatctagataaatctcgtaatgaaattaatatttataatctaccaattgaccccaaaaagattaataaaataagattaatagcttgtggaacagcatatcattcatgtttaatggcaaaatattggattgaagaaaacacttctattgatgttgaagcagacatagcatcagaatttagatatagaaatgttaaacttaataaagatgacctttatatctttgtttcgcagtcaggagaaacagctgatacatatgctgcacttgaaaaatgtaaaaaaaataatgttaagacttgtgggatagttaatgttgtagaaagctcaatagcaagacttgctgattttgttttaccaattcatgctgggcatgaaattggcgttgcatctactaaagcttttttaggtcaaagtgcttgtgct

SEQ ID NO: 246594 - DNA, 214 bp, Unknown
  Bacterial polypeptide expressing nucleotide sequence isolated from the Sargasso Sea
cgtggcgggcagctgtttgtttttgccagtgagaatgcgggctatgaatcgggtcccggctgtgaggtcttggccttgccggcctgcagcgcgttagcagggcctgtcatgtttacgatcgccctccagctcctcgcctatcatgtcgcggttgcaagaggtaccgatgtcgataagccgcggaatctcgctaaaagcgtgacagtagagtaac

SEQ ID NO: 246595 - DNA, 874 bp, Unknown
  Bacterial polypeptide expressing nucleotide sequence isolated from the Sargasso Sea
cattggtatagcttctaaagagaatgtgtcttcgaacattataaatgcattaagaaaattagaatatcgtggttacgactctgctggtattgcaataaacactgctaataagatcaatcaaagaaaagtaaaaggcaagcttgataatttgatttacgctcttcagaaagatcaatttgatggcaatacgggaataggtcatactcgttgggctactcatggggaaccttctgataaaaatgctcacccccattcatcaacctcagtatcgcttgtacataatggaataattgaaaatgccgcagaattgaaaaaatcagaggaggttaaagattaccattttgagtctgacactgattctgaagtaattactgcattattaacgttttatctaaaggaaggtctgagccatcttgagagtgttcaaaagacaatttcttctctagagggatcatacgcactagcaattatttttaatgatagtgaagacactatttatggcgctaagaatggaagcccacttgttgcaggtacaaatggagttggcaattcaataggatctgactcgattgcactaagctcagttgccaataaagtgtgttacttggaagacggggatataacagtattaaacaaagaaagtatagaaatttataacctagagggcgaaagagcgaatagagaatttgttgaaataggaataaacgagtcagaagtttcaaaaggtccctataaacattttatggagaaagaaatacatgagcaccctcatgcagtaggtgaaacatttcgacaatttgtagattacgataagggtacaatcgcaatttcaaatattaatttaattttgataaaatttcaaagatttatctga

SEQ ID NO: 246596 - DNA, 733 bp, Unknown
  Bacterial polypeptide expressing nucleotide sequence isolated from the Sargasso Sea
catgaaaacatgtgctgttgttaatgtaatcgaaagctcaatagcaagagattctaattttattttaccaattcattgtggtcctgaaattggagttgcatcaacaaaagcatttctaggccaaatacttgttttatatattttagctttaaaacttggatccatgagaaatgaaattgaaaaaaaagaatatcaagaaaagattaaagacctaaaagctttgcctagcttaatagagaaaacattgcttcatgataatgatatccaagctatatcttcaacatttaacgaagcaaagggttcaatgtttttaggaagagggtattcgtatccaatagctttagaaggtgcattaaaacttaaagaactttcatatgttcatgctgaaggatatccagctggtgaaatgaaacacgggccattagctttaattgaagaaggtatgcctgtagtagttttggctcctagagataattattacaaaaaaacaatttctaacatgcaggaagttattgctagaggagcgaaggtattattgataactaacaaaagtaaagatgaagttgtgtccgaaaatatttgggaaactattgaagttgagaatacaaacgatgacttgcttccatttcttttgactattccacttcaaaaacttgcatattactctgctcttaaaaaaggttatgacattgataagcctagaaatttggctaaatctgtcactgttgaataa

SEQ ID NO: 246597 - DNA, 649 bp, Unknown
  Bacterial polypeptide expressing nucleotide sequence isolated from the Sargasso Sea
ccagaaattgggagttgcatcaacaaaagcttttttgggtcaattgatagttttatatattttaatcttaaaactttcctcaattagaaatgaaattaatcaaactaattacaatcaaaaaattgaaaatttaaaaaaaatacctaaatttttaaaaaaaacattagatttagaaacgaatattcaaattttagctaaagaatttctagatgcgaagggctcaatgtttttagggagaggtagctctttccctatagctttagaaggcgcccttaaattaaaagagctatcctatttacacgcagaaggctatcctgcaggagagatgaaacatggtccgttagctctaattgaagagggattacctgtaattgtgattgctcctaaagataaatactttgaaaaaactttatcaaatatgcaagaagttatcgcaaggggaggaaaaatagtttttattactgataataaaaaaaagtctattagtgaaaatataagattcggattaagagttcctcacatcgataatttattgtctccaatattgttaacaattccattacaattattagcttatcacgtagctttacttaaaaattgtgatattgataaacccagaaatttagctaaatctgttactgtagaataa

SEQ ID NO: 246598 - DNA, 820 bp, Unknown
  Bacterial polypeptide expressing nucleotide sequence isolated from the Sargasso Sea
gggtatgactcagcaggtatagctacactttcagatggtatgattaatgaagttaaatctgaaggaagagttgatagacttgaaaaaaattctttaattcagaatatgaatggcacaataggcattggtcatgttagatgggcaacacatggattgccaaatagtatcaatgcacatcctcattcatctcaaaatgtatctgtagtacataacggtataattgaaaattcaactttgttgaaaaaatatttagtaggaaaaggtcataaatttaaatctcaaactgatactgaagtcattgttcatttaataactgaaaatttaaaaactgataatattgttaattcaataaagaaaactttgaattctcttcatggaagttttgctttaggtataatatttaaagatcaaccagatttaattgtaggagcacgaagaggatcacctttagcagttggttatggtccaaatgaaaattacctaggttcagactcttatgcattaaaatcaatgactaataaaatcacttatcttaatgatggtgaattttgtatcataaaaaaagatcatgtagagttttttaataatgaaggaataaagattaataagaaagttttagaattatcatctgatgaagaaaaatatgacaaaggtgattacaaacatttcatggctaaagaaattgaagaacaacctaatactttaaaaaatggtatcaatgaatatatagataatcttaataatgatataaatatctataattttccttggaaaataaatgaaatttcttcaatcactttaataggttgtggtacagctt

SEQ ID NO: 246599 - DNA, 703 bp, Unknown
  Bacterial polypeptide expressing nucleotide sequence isolated from the Sargasso Sea
ttgggtgaaggggagtttctctgtgccagcgacacgccggcgcttgccgggttcaccaaaacgatcctgtcgatggaggacggagaggtggcgctgctctccccactgggggtggagttgtacgacgcggatggacgtcgtcagcaacgcatgccttcggtcttgtccggtgccgatcacgtggcggacaagcgtcatttccgccatttcatgctcaaggaaattcatgagcagccggaaaccgctgcgctctgggcagcgaggcatctgcccgcgggcctgagtgcggagatgcccgtggctctccccatggatgaggccttctatgcgggactggaacggatcgagattctggcctgtggcaccagccgccatgccgccctggtgggaggtcatctgctggaacagttcgctggtgtgcccacagcggtgcactacgccagtgaattccggtatgcaccaccaccgctggcgccgcacaccctcaccattggtgtcacccagtccggtgaaacggctgacaccctcgctgccttggcaatggaagcggagcgccgccggttgcatgccgacccggcctacgcctcccgccagcttggggtgaccaatcggccggagagctctttgtcccgacaggtgctggacatcctggacatcggagccggcatagaggtgggcgtggctgccaccaaaaccttcatgg

SEQ ID NO: 246600 - DNA, 631 bp, Unknown
  Bacterial polypeptide expressing nucleotide sequence isolated from the Sargasso Sea
gaacagtcaattacaacaaaaaaatgtattaatgaatatattgataaatctagaaatgaaataaatatatataatctacctattgatcctaaaaaaataaataaaattagattaattgcttgtggaactgcttaccattcttgtcttatgtctaaatattggtttgaagagtttacttctattgatgttgaggcagatatagcttcagaatttagatatagaaatgtaaaattaaattcaaatgacctttatgtttttgtatcccaatcaggagaaacagcagacacatatgctgcgcttgaaaaatgcaagaaaagtaaagttaaaacttgtggaatagtaaacgttgtagagagctcaattgctcgaacagctgactttgttctacctattcatgcaggtccagagattggtgtagcttcgactaaagcattcatggggcaaatgcttgtattgtatttattatccttaaaaatagcgaaagaaagaaaagatattaatgaagaagtttacaaaagattagttttagatttaaaaaaaataccagatttaattaaagaaacattaactaagcaaaaggatattcaggtaattgcaagagattttataaacgctaagggaactatgtatc

SEQ ID NO: 246601 - DNA, 654 bp, Unknown
  Bacterial polypeptide expressing nucleotide sequence isolated from the Sargasso Sea
catgatcagcactatactgccaacatatgcgcgagcagatttagaatttgtgaaaggccaaggcgcttggttaacagaagcagatggaagtcactttttagacttagcttctgggattgcagtaaattctttaggccatgctcatcctgatcttgtgaagattataaaatctcaggctgaaacgctttggcacgtatcaaacctttatgaaatacctcagcagcgtgccctagcagatatattagttgcaagttcgtttgccgacactgttttttttacaaactcaggaactgagtcttgcgaattagccgttaaaatggctcgaaaatattggtttgaaaaaggctaccccaataagtttgaaataattacatttgagggttcatttcatggtcgctcttctgcaggcatagcagcaaccgcctctgaaaaaatgacaaaaggctttgggcctttattgcctggcttcataaacataaatttgaatgatcatgaggcaatcaaaaccacagtttcagaaaagactgccgcaatcttaatcgaacctattcagggagaaggaggtattagggtattacccgaaccatttttgaaagaaattcgcgcaatttgtgatgaaaaaaacattttgttgatacttgacgaagttcaatg

SEQ ID NO: 246602 - DNA, 142 bp, Unknown
  Bacterial polypeptide expressing nucleotide sequence isolated from the Sargasso Sea
agagtacctcgtgttgataacttcctatcaccattattacttacaattcctttgcagcttttagcataccatgtagcttcattaaaaaattgtgatattgataaaccaagaaatttagctaagtcagttacagttgaataaa

SEQ ID NO: 246603 - DNA, 844 bp, Unknown
  Bacterial polypeptide expressing nucleotide sequence isolated from the Sargasso Sea
atgtgtggaatagttgctgttactggttataagaaagccttaccagtattacttgatggtttaaaaaaactcgaatatagagggtatgattctgcaggaattgcgataatcaattctgaaacaaaagatatttcttgtaacaaagcaaaaggaaaacttaaaaatctaataaatgaactcaaagataaaaatatttccggaactgtaggtattggtcatactcgttgggcaactcatggaaaaccagaagtcaaaaatgctcatcctcatatcgatagtacaggaacaatagcagttgttcaaaatggcattattgaaaattttcaagatttaaaaaataaattagagcaagagggaattattttcaattctgatacagatactgaggtaattccgcatttaattaaaagagaattaaatacattaagtcaacttaatcttgagagtaatggttcaactttattagtagcagttagaaatgtaatatctgatttagaaggatcttatgctttggcagttttatggtcaggggcaccaacttctttggtggttgcaagaaaacaggcccctctgattattggtttaggtgaaggagaatttatatgtgcaagtgatactccagctattgcaaattttacaaatattattttgcctatggaagatgaggaaatagcattattaacccctcttggaatagaaatatatgactcaaacaacgagaggcaatatcgaaatcccatttctttaaaagtttcagagcaaataatagataagatgaatttcaaacactacatgttaaaggagatatatgatcaacctggaactgcaaaaaattggttagaaa

SEQ ID NO: 246604 - DNA, 139 bp, Unknown
  Bacterial polypeptide expressing nucleotide sequence isolated from the Sargasso Sea
agttccttcctctaatgaatggatttcaccattacttaacatagtacccttacaattgttgagttatcatattgcagctcatagaggacttgacgtagatcaaccaagaaatttagctaaaagtgtaactgtggaataa

SEQ ID NO: 246605 - DNA, 636 bp, Unknown
  Bacterial polypeptide expressing nucleotide sequence isolated from the Sargasso Sea
atgggcaacacatggaatacctaatactttaaatgctcacccacattcatcagagaaagtttccgttgtacataatgggattattgaaaattcagatgaattaaaaaaaactctagaagaaaaaggttttaagtttaaatcagaaactgatactgaggttataacattgttagttacagagtcgttaaaaaaatcagatcctctagagtcagtatttaaaacacttaaaaaactaaaaggaagttttgctttaggtattatttttaaaaaccatactgatattattattggcgcaagaagaggaagcccacttgcagtaggttattctaaagaggaaaactatcttggttcagactcttatgctctaaaatcaatgacaaataagatttcctatttagatgacggtgaaatttgtgttttatccaaaagtgaaatttcttttttcgatgccaatcaaaacaaaattaataaaaagatacatattgtatctgacgatgaaaatactgctgataaaggagattataaaaattttatgtccaaagaaatctttgaacaaccaaacactgcaaaaaaatgtgtcagtgagtacattgatagtctcaaaaaggatataaatatttataattttgccaatac

SEQ ID NO: 246606 - DNA, 308 bp, Unknown
  Bacterial polypeptide expressing nucleotide sequence isolated from the Sargasso Sea
aatgtgcggaatagttggaattacaagctctaaagaggttactcctagaattataagttcattaaaaaaacttgagtatagaggctacgactctgcaggtatagcaactctttcagaaggaaatataaatgaagtaaagtgtgagggtagagtagacgctttagagaaaaacattatacaaactaaaatatctggctctatcggtattgggcacgtaagatgggcaacgcatggaaaacctagctcaattaatgcacatcctcattcatcagaagatgtatctgtcgttcacaatggtataattgaaa

SEQ ID NO: 246607 - DNA, 565 bp, Unknown
  Bacterial polypeptide expressing nucleotide sequence isolated from the Sargasso Sea
atgtgtggaattgtcggtgctgttggcgagcgtaatgttgttgaaattctattagaaggcttaaagcgacttgaatatcgtggttacgactcttcaggcgtggccttgttgcaacaagatggcacactaaatcgcataagaagtaccggtaaggtgcaagagctcgtcgatattattgctaacgatgaagcgctagggactactggtattgctcacacacgctgggctacccatggcggtgttactgtagccaatgcccacccacatttctctagcgaccgcgttgcggtagtgcacaacggtattattgaaaactaccaaaccctacgcgaacagctttcagcaaaaggctatgtatttagcagcgacaccgacaccgaaaccatcgcccacacggttcatgaagcattggatgcgggtaaagatttattagaagcggttcaaacctccgttaaaacattccacggcgcttacggtaccgtagttatcgacaaagaagatgtggggcgtatggttgtagcgcgctctggtagcccgttagtgattggtttagggcttggcgaaa

SEQ ID NO: 246608 - DNA, 718 bp, Unknown
  Bacterial polypeptide expressing nucleotide sequence isolated from the Sargasso Sea
tattgtcaccatttgcaatgttcccacaagcacgatggcaagagaatctgattggaagatatttacaaatgctggcccagaaattggggttgcctcaactaaagcattcacaacacaacttgcaacactattactcttagcttgttcaatatcaaaaagcaaaaacataaataaggacaagagggccgaagctattaaagaccttgttaatacaccaacactcgtgaaagaagcgtttgggctaaaaaaacacatagacgatattgttgagaaaatcgcagataaaaaaaatgcattgtacctgggtagagggatgtatttctcagtagcacaagagggcgccttaaagcttaaggagattacttatatccatgcagaggcgtatccagcaggagagctaaaacacggaccacttgcactggttgatgaaatgacgcctgttatagcactagctccagaagatgaactggcagaaaagctcatctcaaatctcgaagaggtcaaatcaagagggggcacgttgtatgtctttggaaatgcaaactcaaagataaaaattgaaaaggggaaacttatgaacatgccagattgtggctactataatgcacctattgtttacacaatacctttgcaaatactggcctatgaggttgcatgctcaataggaacagacctagatcaaccaaggaaccttgcaaaatcagtcactgtggagtag

SEQ ID NO: 246609 - DNA, 643 bp, Unknown
  Bacterial polypeptide expressing nucleotide sequence isolated from the Sargasso Sea
tggtgttgcctcaactaaagcctttttaggacaaatgttagtactttatttattatgtcttaaaatgggtaaccttaatgatgatatcaagaaaaaagattatatttccaaaattaaaagcttattaaatttatcaaaaaatatagaactttctttaaaatctcaaaacgatattcaaattatatcaaatagttttacaaatataaaaggttctatgtttttaggtagaggttattcatatccaattgcgctcgaaggtgcacttaaattgaaagaattatcttatattcatgcagaaggttatccagctggtgaaatgaaacatggtcctttggcattaattgaagatggtatgccagtcgtagttattgctccaagagatgaatactacaaaaaaacaatgtccaatatgcaagaggttatagcaagaggtgctaaagttttattaataacaaacaaaagcactgatgagatattctcagaaaatatttggcaaaaaattgaagttgagaatacagatgatgatttgttaccttttttaataacaattccacttcaaaaattagcttactatactgctctaaaaaaaggttatgatattgataaaccaagaaatctagcaaaatcagtaactgtagagtaa

SEQ ID NO: 246610 - DNA, 397 bp, Unknown
  Bacterial polypeptide expressing nucleotide sequence isolated from the Sargasso Sea
gtagctctggaaggagctttaaaactcaaagagatatcttatatccacgccgaaggatatccagctgcagaaatgaagcacggtcctatagctcttattgataaagatatgccagttgtatttattgcaccgcaagatgatacattctctaaaattatggcaaatatagaagaagttaaggcacgtggtggtataataatcactataacagataaagtaaatagtggcattgaaaaattgtcagattttgttttaataacaccacaaacacataaatacgtttttcctataacttgctctgttatattacaaattctagcatatgaattagctgtgaaaagaggttgcgaaatagatcaaccaagaaatcttgcaaaatcagtaaccgtagagtaat

SEQ ID NO: 246611 - DNA, 452 bp, Unknown
  Bacterial polypeptide expressing nucleotide sequence isolated from the Sargasso Sea
aatgtgtggaattgtaggaattgtcagtaataagtcagtatcagcgagtattataagtgcattaaagaaattagaatatcgtggctatgactcagctgggatttcaactttaatcaatggtcaaattaaagaacaaaaatgctcgggtagggtagataatcttgaaaagattctttttcaaaatccatcctcaggagatcttgggattggtcatgttaggtgggcaactcatggggttccaaatcaagtcaatgctcatccacattcatcagaagctgtttcagtagtgcataatggaataattgaaaattcagacactttgaggaatgaatataaagataaaggatattcatttaaatcacaaacagacactgaagtaataacaattatgctaacagattttttaaaacaaaatgacttaatcaactgtattcataaaactttaaaaaaaa

SEQ ID NO: 246612 - DNA, 550 bp, Unknown
  Bacterial polypeptide expressing nucleotide sequence isolated from the Sargasso Sea
aatgtgcggaataattggtattgcaagtaataagtctgttacttcaaatattataaattcattaaaaagacttgaatatagaggatatgactctgctggtattgctacaatttcaaaagaaaatctcaatgaaaaaaaatgctcaggaagagtagaggaacttgaaaaaatattatttaattcaccagcacaaggtaatataggaattggtcatgtgagatgggccactcacggcataccaaacgaagtcaatgctcatccacactcatcagaaattgtttctgttgttcataatggaattattgaaaattctaattatttaaaaaagaaactggaaaaagaagggtacaaatttaaatctcaaactgacactgaagtgatcacattattgataacaaaatatttaaaagactcaaatccaattgatgcagtattaaagtctttagaacatcttgagggaagttttgctttagggatattatttaaagataaatcagatatcattattggagccagaagaggaagccctcttgccgtgggatattcaaat

SEQ ID NO: 246613 - DNA, 961 bp, Unknown
  Bacterial polypeptide expressing nucleotide sequence isolated from the Sargasso Sea
ggaaggagaattatttgtgcaagtgatacgccagcaatcgcgaattttacaaaaattattttacctttggaggatgaggaaatagctcttttaactcctttaggaatagaaatctatgattctaataacgagagacaatatcgaaatccaatttctctacaaactgcagaccaagtaagtgataaaaaaaattttaaacactatatgttaaaggaaatctatgatcagcctgatatagctaaatattggctagaaaaatatttaattaaagatttaaagactgatcaatttcaaattaattactcttttgatactgattttttaaactctgttgaaagaatagatattgttgcttgtggtacgagtaagcattctgcaatggtgggtaaatttttattagaacaattctcaggcataccaacaaatgttttttttgcgagtgagtttagatactccccaccaccattacttcctaataccttaacaattggagtgactcagtcaggagaaactgccgatactattgcggctataagcatggaaattaagaggagatcttcaatagaagatagaaactttaaaccaaatttaattgctattacgaacagagtggaaagctcaataggtagacaaattccaaatgttattgatattagtgctggaattgaaattggtgttgctgctacaaaaactttctttgcgcaacttctttctttttatggattagctataaaatttgctcaaattaaaggaagtcaaagtaatgaaaatattaatcaattagtttcagaattaactaaattacctgtattagttgaagaacttttagaaaaacataaagaatcttctgaaaaacttgcacatgatttttttaatattaaagatgttatttttttaggaagaggaataaattatcccattgctctcgagggagctctgaagttgaaggaaattagttata

SEQ ID NO: 246614 - DNA, 790 bp, Unknown
  Bacterial polypeptide expressing nucleotide sequence isolated from the Sargasso Sea
tctattagtgacactctaagaggcaggttgaaccttgatgatggaacatctatgctagggggtataaatgatcatattccaagcatattatcagcttcaaggatatatattactgcctgcggtacttcatggcatgcagggcttataggaaaacatttaattgaggaatatgctagagtaccggtccatgtagaatatgcttctgaatttcgatatcgaaatgctataattgatgcaaatacaatactaattgctattagtcaatcaggagaaactgcagatacactagcagcgataaagaaatcaaaagaagcaggtgcacttactttgggtatatgcaatgtagttgggagtacaatatctcgagaaacagatgcaggaatatttactcatgctggaccagaaataggagtagcatcaacaaaagcatttacagcgcaggtaactgtcttgattatgctagcattaaaaatagggaggaaaaaaggtgtatctctatatcgtggaaaagatttgattaaatctcttaaaaatattgatttaaatgtttctgatatacttaaaggtataaataaaattaaagaagtagctaaatcaacctttaaagccgacaattatctttaccttggcagaggtgtcaatttccctgtagctcttgaaggagcccttaaattaaaggaaatatcatacattcatgcagagggctatccagctgcagaaatgaaacatggtccaattgcattaatagataaagatatgcctgtggtttttatcgcgccccgaggatgat

SEQ ID NO: 246615 - DNA, 868 bp, Unknown
  Bacterial polypeptide expressing nucleotide sequence isolated from the Sargasso Sea
tcatctggtatctcagttctggataatagtaactcgatcataactataagggctaaagggaagttagagaatctaaataaaaaaataaaaactaatgagctctttggaaatattggaattggtcatacaagatgggcaacccatggtgtgccatctacagataatgctcatccccatgtttctgaaaatgtttctattgttcataatggaataattgagaattactcgcaacttaagaaaatgttgaaaaataaaggatttatttttaaatcgcaaactgatagtgaagttatagctcatttactaagttatgagttgagagtaaacactccaaggaatgcaataaaaaacactttaaaatacttagagggtgcatttgctatagcaatactttttaaaaattttaatatattagcaggtgcgaggagaggaagtccattagcacttggtttatccaataaaactacttatttaggttctgattcgttagctctagcgccttttactcaaaagattatatttatggatgaaggagatagcgttgtaattgagcaagacaaatttgaaatttacaataaagattttaaaaaagttaagagaaatataacattatcttcttttactggatcaaatcttgataaagggaattttgatcattacatgcaaaaagaaatttttgaacaaccacctattattggagactctttatcaagattccttgatcctattaaaaaaaagataaatattcttgatttaaagattaattggaaaaaaatttcaaaaatagattttattgcatgtggaacatcttactttgcatgcctaactgcaacttactggtttgaaaaatatttaaatttgaatgcaa

SEQ ID NO: 246616 - DNA, 895 bp, Unknown
  Bacterial polypeptide expressing nucleotide sequence isolated from the Sargasso Sea
tggtttgaggacatatgtgagattccttgttatatagactttgcaagtgaatacagatacaggaatccaattgttgaagacaacactctctttgtaacaatatctcaatctggcgagacagctgacacactggccgctttagaatatgctagaggcgaaaagtatgttggtattgtgacaatatgtaatgttccaacaagcaccatggcgcgagaagctgattggaagatattcacaaatgcagggcccgaaataggagttgcatcaactaaagcttttaccactcaattagctgctttgctgatgctcgctctgtcaatttcgaaaagccaagataaaaatgctgataaaagaaaacaagcaacacaggagctaagagaaaccccagcattagttgatcaatcttttaatttgaaggaaaacatttcacaaataacacaaaatatttctactaagcacaacgcattatttttaggaagaggaatgtatttctccattgcacaagagggagcacttaaattaaaagaaatatcatatatacatgctgaagcatatccagcaggagagctaaagcatggacccttagccttggttgatgagcaaattccagttattgctcttgctcccgaggatagcctagttgagaaacttttatcaaacctcgaggaggtaaaagctagaggggggaccctatatgtttttgggaatgcaaactcaactattgagataagtaagggaaaatttataaatatgcctgattgcggagattacaatgcaccaattatttacaccataccgctccaaatactggcctatgaggtagcctgcctaaggggcacagatgtagaccaaccaaggaatttagctaagtccgttacggttgaaatatcttgag

SEQ ID NO: 246617 - DNA, 772 bp, Unknown
  Bacterial polypeptide expressing nucleotide sequence isolated from the Sargasso Sea
atgtgtggaatcattggaattagtagcaacaaagctgtctcttcatcgatattaaactctttaaaaaaacttgaatataggggatatgactcagcaggtatagcaacaataaatgaaggtttaataaatgaagtaaaatgccaggggagagttgatgttttggagaaaaatatttcacaaattaatcttctagggaatgttggaattggccatgtaagatgggctacccacggtataccaagcacgataaatgctcatccacattcaaacgaaagtatctcagttgttcataacggaataattgaaaactcagctgttttaaaaaaacaattaattaacaaaggtcataaatttaaatcacaaacagatacggaagttatcgttcatcttcttaccgaatatttaaaaacagatcagttaaacgaggcaattataaaaacattaaatgatttagatggtagtttcgctttaggcatgatttttaaagatatgcctgatctgattattggtgcaagaagaggatccccattagctgtaggatacggtccaaatgaaaactatctaggttctgactcatatgcattaaaatctatgacaaataaaattacctatttgaatgatggtgaattctgtataattaaaaagaaacaagttgacttctttgactctcaaggaaaaaaagtaaataaaaaaatattacagttatcatcgagtgatcaaaattatgaaaaaggtgaatacaagcattttatggctaaagagatagatgaac

SEQ ID NO: 246618 - DNA, 350 bp, Unknown
  Bacterial polypeptide expressing nucleotide sequence isolated from the Sargasso Sea
ttatcctgctggtgaaatgaagcatggtccaatagctcttttggaaaagggtcttcctgtaataattggtgcgccatcatttaacttatttgataaaacatcatctaatctttatgaggttatcgcaagagatggaaatgttttacttatcaccgatcaaaaaggtttaaatcatcttggagataccgcaaaaaaaataaaagcatttattgttgatgaagccaatattattactgcaccatttatttatactattccttatcaactttttgcgtatcatacagctctgcttaaagggactgatgttgatcaaccaagaaatttagctaaatcagtaacggtagagtaat

SEQ ID NO: 246619 - DNA, 190 bp, Unknown
  Bacterial polypeptide expressing nucleotide sequence isolated from the Sargasso Sea
tggtgttgcccctaactgtaatggcactgagatctttgattttttaatgactataccttcaacaaatgagtggatttcacctttattttctattatacctcttcaattattgagttatcatattgctgcccatagaggacttgatgttgatcagccaagaaatctagctaaaagtgttactgtagaatga

SEQ ID NO: 246620 - DNA, 754 bp, Unknown
  Bacterial polypeptide expressing nucleotide sequence isolated from the Sargasso Sea
ctgctttaaaaaagcaaaggagcttggtgcaattactcttggtatttgtaatgtggttggaagttcaatttctcgagaaacggatggtgggatttttactcatgcaggtccagaaataggtgttgcctctacaaaagcatttacatcacaagtaacagttctcataatgtttgctctaaatattggtaggaaaaaaggagtatcaaaacatcgtggaaaagaattaattagtgcgctaaaaacaattgatcaagatgtagcatcagtgcttagacaaataagaaatataaaggaggttgctaaacatacagcggcagctgataattatttatatttaggtagaggaattaattttcctgtagctttagaaggagccctgaaattaaaggaaatatcatacattcatgcggaagggtatcctgccgcagaaatgaagcatggtccaattgctctaattgatgaaaatatgccagtagtatttattgctcctcatgatgatacatttactaaggtcctgtcaaatatagaagaagtcaagtcccgtggaggaatagttatttcaatcactgataaaattaataattcactaaaaaaaatatcagattttgtattaatagcacctcagacacataaatatgtattcccaataacgtgttctataattttacaaatgttagcatatgaacttgcagtttgtagaaaatgtgaaattgatcaaccaagaaacttggcaaagtcagttacagtagaataa

SEQ ID NO: 246621 - DNA, 602 bp, Unknown
  Bacterial polypeptide expressing nucleotide sequence isolated from the Sargasso Sea
tttatatattttggctttaaaacttggatcattaagaaaagaaattgaaaaaaaagaatataaagaaaaaattacagaactaaaagatttaccaggattaatagaaaaaactttactacatgataatgatattcaagcaatatcctcaacatttaacgatgcaaagggctcaatgtttttaggtagaggttattcatatccaatagctttagaaggagcattaaaactcaaagaactttcttacgttcatgctgaaggatatccagcaggtgaaatgaaacatggtccattagctttaatagaagaaggtatgcctgtagtagttttggcacctagagatagttattacaaaaaaacaatttcaaatatgcaggaagttatagcaagaggtgcaaaggttctattgataacaaataaaagtaaagatgaggtagtttcagaaaatatttgggaaactatcgaagtcgagaatacaaacgatgacttacttccattcctactgactattccccttcaaaaactcgcgtactattcagctcttaaaaaaggttatgatatagataaaccaagaaatttagcaaaatcagttacagtcgaataaa

SEQ ID NO: 246622 - DNA, 965 bp, Unknown
  Bacterial polypeptide expressing nucleotide sequence isolated from the Sargasso Sea
agaggagtatcattcacaagctcaacggattctgaagttcttgttcaattaatttctgaattgtattacaataatagtgaaaagttaagttttgaagatgctgtaagagcagcattgcaggaagttgtaggtgcatatggaattgttgttatatgtgaggatgaacctggcaaaattattgctgctagaatgggcagccctttagttttgggcgttggcgagggtgagtttttgattgctagcgacgcctctccaatagtggagtatactcgaaatgtaatttatttagatgataacgaattagttttaattgaagatgaaaaattttcaatatctaaaattgattcaaaaaaaatcatcaataaaacacttttaaaaattgatttaacaattgaagagatagaaaaaggtgagttccctcatttcatgctcaaagaaatttatgaccaacggcattcaatttctgatacaatgcgtggtagatttaatttaaacgatggcacaactcaattaggtggcatcattgattacttaccaaacatattatcagcatcaagaatttacataactgcctgtggcacttcttggcatgccggtctaattgggaagcatcttatcgaggaatattcaagaatacctgtgcatgtggaatatgcctcggagtttcgttatcggaatgtaattattgacagcagcacgattattattgctataagtcaatctggagaaacagcagatacattagctgcaattaggaaagctaaagagttaggtgcaattacccttggtatatgtaatgtagttggaagtacaatttctagagaaacagatgcaggtatttttactcacacgggtcctgagataggtgttgcttctacaaaagcatttactgctcaattaacaattttaattatgttagcaataaagctaggtaggaagaaaggtatttcaaaagaaagaggtaa

SEQ ID NO: 246623 - DNA, 347 bp, Unknown
  Bacterial polypeptide expressing nucleotide sequence isolated from the Sargasso Sea
aatgtgtggaataatcggtatagctagcaataaagctgtttctattaatatcatcaattctctgaaaaaattggaatacagaggatatgactcggcaggcttagcaacactaactgataatattatcaatgaaaaaaaatgcataggtagagtagaggagctagaaaaaatattatttaaaacaccatcaaatggaaatattggtattggacatgttaggtgggccactcatggagttcccaatattgtaaatgctcatccacactccacagatcaagtttctgtggttcataacggtataattgaaaattctgatgaaattaaaaaagaacttgaaaataaaggtt

SEQ ID NO: 246624 - DNA, 553 bp, Unknown
  Bacterial polypeptide expressing nucleotide sequence isolated from the Sargasso Sea
atgtgtggaattataggtataaatagtaataaaccagtttcaggaacaatcataaattcgttaaaaaaattagaatatagaggttatgattcagcaggaatagcaactctttctagtggtttaattaatgagattaaatcagaaggcagggtggataatcttgaaaaaaattctttagttaaaaatatggagggcactataggtataggacatgttaggtgggcaacacatggtttaccaaacagtgttaatgcacatccacattcatcgcaaaatgtatctgttgttcataatggaattattgaaaattcaacattattaaaaaaatttttagtaagcaaaggtcataaatttaaatctcaaactgatacagaagttattgttcatttgattactgaaaatttgaaaactgaaaatatagttaactcaattaaaaaaagtcttaaagctcttcatggaagttttgctttaggaattatatttaaagatgaacccgatttaatagttggagctagaagaggctcaccgctagcagttggatatggacctaacg

SEQ ID NO: 246625 - DNA, 451 bp, Unknown
  Bacterial polypeptide expressing nucleotide sequence isolated from the Sargasso Sea
agcgcatgatttttttaatattaaagatgttattttcttaggaagaggaataaattttcctattgctcttgaaggagcgttaaaactcaaagaaattagttacattcatgcggctggatatccagctggagagatgaaacatggtccaatagctttgttagataaaaaagtacctgtaatatctattgcttctcctggtgaagttttcgataaagttattagtaatgctcaagaagcaaaagctagagatgcatatttgattgggattgctcctgaatgcaatggaactgaaatttttgattatttaatgaaagttccttcctctaatgaatggatttcacctttaattaacattgtgcctttacaattattgagttaccatattgcagctcatagaggacttgatgtggatcaaccaagaaatttagctaaaagtgtaactgtggaataa

SEQ ID NO: 246626 - DNA, 343 bp, Unknown
  Bacterial polypeptide expressing nucleotide sequence isolated from the Sargasso Sea
atatccagcaggtgagatgaaacatggtcctttagcattaatagaggagggtatgccagttgttgttttagcaccaagggataattattataaaaaaacaatttctaatatgcaggaagttatagcaagaggtgcaaaagttttattgataacaaataagagcaaagatgaagttgtttcagaaaatatttgggaaactatagaagttgaagatacaaataatgatttgtttccttttcttttaactattccacttcaaaaacttgcttactattcagctcttaaaaaaggttacgatatagataagccgaggaatcttgctaaatcagttacagtcgagtag

SEQ ID NO: 246627 - DNA, 879 bp, Unknown
  Bacterial polypeptide expressing nucleotide sequence isolated from the Sargasso Sea
aatgtgtggaattataggtattgctagtaataaatctgtttcagtaaatattatacatgctcttaagaaactagagtacagaggatatgattctgccggattggcaacaattaacaagggaagaatagatgaaaaaaaatgtccaggaagagttgaaaagttagaaaaaattttatttcaaaaccctagtgagggaaatctgggcataggccatgttagatgggctacacacggtgtaccaaacgaagcaaatgctcatcctcactcaactgaaatagtttcggtagtacacaatggtattattgaaaactcaagtgaattaaaaaaggttttggaaaatgagggaaaaactttcaaatcgcagacagatactgaggtaataacagtattgctgacagaaaaattaaaaaacacagaacctttggatgcagtttttaaaacattaagccttttaaaaggaagttttgctttaggaataatatttaaaaattataaagattttgttattggcgcaagaagaggtagtcctttagcagttggatactcaaatgaagaaaattatctaggatccgactcttatgctttaaaatctatgacaaataaaatttcatatctagatgatggggatgtttgtattttatctaaagatgaagtgaaattttataattcaaataaagaaaaaataaataaagaaatatttactctttctgaaaacaagtctgaagtaagcaagggaaattataaaaatttcatgatcaaagagatttttgaacaaccaataacattaaaaacttgtttaaaagaatatattgataaaattagagaggaaataaatttctatagtctcccaattgaaccaaaaaaaataaaaaaattgtt

SEQ ID NO: 246628 - DNA, 735 bp, Unknown
  Bacterial polypeptide expressing nucleotide sequence isolated from the Sargasso Sea
attttttaatgaagatggaactaaaataaataaaatagttttagaactatcaagtgaggaagaaaaatatgacaaaggtgattataaacattttatggcaaaagaaattgaagaacaaccaactactcttaaaaatggtatcaaagaatatatagatacagcaaataatgatattaatatttataatattccttggaagaacaatgaaatttcctctattactcttattggttgtggcacagcttatcattcctgtttaatggctaaatattggtttgaagaattaacttcactagacgtagtaatagatatagcgtctgaatttagatataggaaaaatagatttaagaaagatagtttatatgtgtttgtttctcaatcaggagaaacagctgatacttacgccgccttagatttatgtaaaaaaaacggtatgaaaacttgtgcagttgttaatgtaattgaaagttcaatagcaagagactctgaatttgttctacctattcattgtgggacagagattggagttgcttcaacaaaagcttttttgggtcaaattcttatattatacattctggctttaaaattaggactattaagaggtgatttagaaaaaaaagaattatctgaaaaattaaaagatttaaaagagttaccaaaattagtcgaacaaactttaatgacagataataaaatacaaaatgtctcaaatacattcaatgaggcaaagggctc

SEQ ID NO: 246629 - DNA, 836 bp, Unknown
  Bacterial polypeptide expressing nucleotide sequence isolated from the Sargasso Sea
ctttgtgaaacgccatgctacatagattttgcaagcgagtacagatatcgaaacccacttgttgaagatgatactttattcgtctgcatttcacagtcaggagagaccgcagacaccatggcagcattgaattatgcgaaagaagaaaggtatttaggcattgtgaccatttgcaatgttccgacaagcacaatggcaagagagtccgattggaaaatatttacaaacgcaggccctgaaatcggagtcgcctcaaccaaagcatttacaacacaacttgcagcactaatgctcttggcttgttcaatatcaaaaagcaaagacataaatcgagataagaggaccgaagctattaatgaccttattaatacaccggcccttgtgaaagaagcgtttggattaaaaaaatatatagaggaaattgttgagagaattgcagacaaaaagaatgcattgtatttaggcaggggtgtttacttctcaatcgcacaagagggagcgctaaaatttaaagagatcacatacattcatgcagaggcatacccagcaggcgagctaaaacatgggccgcttgcacttgttgacgaaaggacaccggttgtagctctcgcaccagaagatgagcttgtagaaaagctagtctcaaatcttgaagaggtcaaatcaagaggaggcactctttatgtctttggaaatgcaaactcaaagataaaaattgaaaagggaaagtttatgaacatgccagaatgcggttactacaatgcaccaattgtttacacgatacctttgcaaatattagcctatgagggtgcatgctcaataggaacagacctaga

SEQ ID NO: 246630 - DNA, 559 bp, Unknown
  Bacterial polypeptide expressing nucleotide sequence isolated from the Sargasso Sea
atgccaaaagaatctattattaagttggtagaagacttagtagagttaccagcattaactgctgaagttttagctatagacaaatctttaaataaaattgctcaacaattaaaaaatgtaaaagatgttctatacgttggaagaggtatttcatttccaattgctttggagggagctttaaaactaaaagaaattagttatattcatgctgaagcttatgcagctggagaattaaaacacggtcctattgctcttgtggatgaaggtgttccagtagtggccttagcaccttcagatgatttattttctaaaacagcttctaatatagaagaagtgtcagcaagaggagcaaatataatattaatttcagacaaagaaggtattaataaactctctaaaacggcgcatataactttagaagtaccacatagtaacacatttattttgccaattttatattctatacctgtacaaatgttagcatatcatactgcagttgctaaaggtactgatgtagaccaacctcgaaatctagctaaaagtgtaactgtcgagtagt

SEQ ID NO: 246631 - DNA, 789 bp, Unknown
  Bacterial polypeptide expressing nucleotide sequence isolated from the Sargasso Sea
ccaaaaaaaattaataaaatagttttgatcggatgtggtacagcttatcattcatgtttagtagcaagatattggcttgaagagttaacaacaattgatgcagaagtagatatagcttcagaatttagatatagaaaattaaagtttaaccctaataatttgtatatatttgtttcacaatcaggtgaaactgccgacactgctgctgctttagacatatgtaaaaaaaataaagtaaaaacttgctcaattgtaaatgttgtggaaagtaccatcgcaagaaattctgactgggttttacctattcacgccggtccagaaattggcgttgcttcaaccaaagcttttttaggacaattaatcgttttatatataatgactttaaaactttctaaggctagagatgacatcgataaagataagtacgatgaaaatttgagaaatttactaaaactttctgattcgattaaaaatactttaaaattggaaaatgaaattcagctaatggctaaagaatttttaaatgcaaaaggttcaatgtttttaggaagaggaaattcatttccaattgctcttgaaggggcgttaaaattaaaagagctctcttatcttcatgccgagggatatccagctggagagatgaagcatggacctctagctttgattgaagagggtttgcctgtaatagtgattgccccaaaagataaatattatgaaaaaactttatccaatacacaagaagttatagcaagaggaggaaaaattttttttattacagataacaataaa

SEQ ID NO: 246632 - DNA, 820 bp, Unknown
  Bacterial polypeptide expressing nucleotide sequence isolated from the Sargasso Sea
catcttttagattattttttaaaccaaggaaacaatatacttgactcaatatatttgacaaaagaaaagctagaaggagcatatgcaatagctattttagatatagaagatgaaaataatatttatgtagcaaggtgcaaatctccgctacttgttggccaaggtgaaaatgagaattttgccgcatcagaccccttagcgattggaaaactggcaaatgaatttatttttctagaagatgaggatgttgcagttatttcaaaaaatagaattcaaatatacgatgaacaaaaacaacctatacacagagaagtaacggaaatagactctgaatatcaaaccatttcaaagggtgaatacactcactttatggaaaaagaaatatatgaacaacctcaagcaattctaaatacccttgatggcagagtggggggtgacgatgttagagatgatatattcggcattggatcttcaaaactattcgaaaaggtaaaacgcatacaaattgttgcctgcggaacaagtttacatgcaggaagagtagctgctaactggttatcagcaattgcaggcatcccaactcaggtagattatgcatcagagtatagatatagaaatccacatgtagacgaggactcccttttggttacaatctcacaatctggagagacagctgatactattgcagctttgagatacgcaaaagagaaagattacctatccaatatcaccatatgcaatgtcccaaccagttctcttgcaagaaaatgggatttttttctatacacaaatgctggtcccgaagtggagtgctccacaa

SEQ ID NO: 246633 - DNA, 593 bp, Unknown
  Bacterial polypeptide expressing nucleotide sequence isolated from the Sargasso Sea
ctttgtaatgctagctctatcaattgccaaaagccatgataaaaatgccgataaaagaaaacaagcaacccaagagttaagagaaaccccagcacttgttgatcaggcctttaacctgaaagaaaacatcactcaaataacacaaaacatctctaccaaacacaacgcattatttttaggcaggggaatgtatttttctatcgcacaagagggagcattaaaattaaaagaaatatcatatatacatgctgaagcatatccagcaggggagttaaagcatggccctttagccttagttgatgagcaaataccagttattgctcttgcacccgaggatagtctagttgaaaaacttttatcaaacctcgaggaagtaaaagcaaggggcgggactctgtatgtttttggaaacgcaaactcaactattgaagtaaagaaggggaaatttatcaatatgcctgactgcggagactataatgctccaattatttacaccataccacttcaaattcttgcttatgaagtagcatgcttgaggggaacagatctagatcagccacgaaatttagctaagtcagtcacggtggagtaga

SEQ ID NO: 246634 - DNA, 772 bp, Unknown
  Bacterial polypeptide expressing nucleotide sequence isolated from the Sargasso Sea
ggtagttttgcattaggaataatttttaaagatgaaccagacttaattgttggtgcaagaagaggctcacccttagcagttggttatggtccaggagaaaattatctaggttcagattcttatgcattaaaatctatgactaataaaataacttacttagatgatggtgaattttgtattatcaaaaaaacagaagtaagcttctataatgaacaaggaaaaaaaataaataaaaaaatactttcattaacaaccgatgaacaaaattacgataaaggtgattacaaacactttatggctaaagagattgacgaacagccactaacagtaaaaaattgcataaatgaatatgttgataaaaaaaataacgaaataagtatttttaattttccgtggaaaataaaagatatatcatcaattacattagtaggttgtgggactgcttatcattcttgtttaattgcaaaatattggtttgaacaacttacttcttttgatgttcatatagatattgcatcagaatttcgttacagaaaaaatagatttaaaaaagagactttgtacgtttttgtctctcaatctggagaaacagctgatacttatgcggctttagatttatgtaataaaaacaatatgaaaacatgttctgttgtaaatgtagtagaaagctcaattgcaagagactcaaaatttgttttaccgatacattgtggtccagaaattggtgttgcctcaacaaaagcttttttaggacaaatgttagtgctttatt

SEQ ID NO: 246635 - DNA, 433 bp, Unknown
  Bacterial polypeptide expressing nucleotide sequence isolated from the Sargasso Sea
gcagaccttgatcgatcggctcgacttgcgctgcgccgagctggcccatgcctttgccgacacgcgcaccgtgatttacctaggccgcggcatcaactaccccattgccttggagggcgccctcaagctcaaggagatcagctacatccatgccgagggctatcccgcaggggagatgaagcatggcccgatcgctttgctcgacgctgatgttcctgtggtgagtgttgccatgcctgggccggtgttcgacaaggtgctcagcaatgcccaagaagccaaggccagagatgcgcgcctgattggggtggccccggaatgccccgatactgagattttcgacgagttgctgcctgtgccagcagtcgatgagttgctctcgccgctgctcaccctgattccgatgcaactgctcagctatcacatcgctgcc

SEQ ID NO: 246636 - DNA, 930 bp, Unknown
  Bacterial polypeptide expressing nucleotide sequence isolated from the Sargasso Sea
gctattgcctgtgacccggtctttcgcgttttagaagaaggtgatgtggctgaagtgactcgtcgtactgtgagcattttcgatgtgaatggcaataaagttgagcgcgaagttaaagaatcagaaatcacccacgatgccggtgacaaaggtgaatatcgccactatatgctcaaagaaatttatgagcagccattggcgctgacacgcaccatcgaaggtcgtatcgctaacaagcaagtgctcgacacggcttttggtgataatgcagctgagtttttaaaagatatcaaacacgtgcaaatcattgcctgtggtactagttaccatgcaggtatggcggcgcgttattggttagaggattgggccggcgtttcttgtaatgtcgaaatcgcctccgaattccgctaccgtaagtcgcatttattccctaacagcctgttggtgacaatttctcaatcgggcgagactgccgatacgctggcggcgatgcgcctagctaaagaaatgggttataaggcgacgctgactatctgtaacgctccaggctcttccttggttcgtgagtctgacatggcgtacatgatgaaagcgggcgctgagattggcgttgcttcaactaaagcctttaccgtgcaattagcgggtttattaatgctgacggcggtgatcggccgccataatggtatgtctgagcaaatgcaggcggagatcactcaaagcctacaatctatgcccgctaaagtggaacaagccctaggtttagatgatgcgattgctgaattggcggaagactttgccgacaaacaccatgccttattccttggccgtggcgatcagtacccgattgcgatggaaggtgcgctcaaactaaaagagatctcctacatccatgctgaggcatatgcctctggcgagctgaaacatggc

SEQ ID NO: 246637 - DNA, 799 bp, Unknown
  Bacterial polypeptide expressing nucleotide sequence isolated from the Sargasso Sea
gtcatctcacaatccggggagaccatagacaccttagcagcgctgcgctacgcgcggtcgcaagatcagaagatcctctcaatcgtgaacgttccggaaagcgccatcgcccgagaatcagatgccgtcttacaaacttacgccgggcccgaaatcggcgtggcctctacaaaggcgttcaccacgcaattgaccgttctggcctgtttggccatcgccatggcacacgctcagggagccatagatgatcccgagcgcggtcgccttgttggcgcgcttaccgaagtacccgctcgggcggcggaaatcctgaatcacgacgagcaaatcaacgagatcgcccatgacatggcagaggcccgcgacatcctgtatctgggccgtgggaccagctatccgctagcactggaaggagcactcaaactcaaagagatttcctacatgcacgccgaaggctacgcggcaggcgagatgaagcatggccccatcgcccttattgacgaggcggttccggtagtcgtggtggcaccaacagacaacctcatcgataagaccgtgtccaacgttcaagaggtaatggcgcgcggcggtagggtgatcttcctgtctgatatggccggcgtatcccggttgggcggcgcagcggacgcgacggtgaccttgccatcggtggatccctttgtaaccccacttctttacgcaattccggtgcagttgttagcctaccatatcgcggtgataaaaggcaccgacgtggatcaaccccgtaacttggcaaaaagcgtcacggtggaatagg

SEQ ID NO: 246638 - DNA, 690 bp, Unknown
  Bacterial polypeptide expressing nucleotide sequence isolated from the Sargasso Sea
agcgagagatgctgattagtttttacctatttattgtgtcaagaaattggtgtgcctccacaaaagcgtttcttggacaaatgttagtgctatatattttgtctataaaaatttcattcgatcaaaaatttattacaaaaaaagaatatcaatctaaaattaagaatttactatcactgtctaattcagcaaaaaaaacactcaaattagatgataaacttttaaatattggtaaagtttttgcacatgctaaaggatgtatgtttttaggaagaggctattcttttcctattgccttagagggtgctttaaagttaaaagaattagcctatgttcatgctgagggttatcctgctggtgaaatgaagcatggacctttagctttaatagaagaaggtatgccagtagtcgttatagcccctagggatgattattataaaaaaacgatgtctaatatgcaggaagttattgcaagaggggctaaggttttactaataacaaataaaaataaagatgaagttgtttctgaaaacatttgggagcaaatagaagttgataaattacatgatgaattaattccgtttctagtaactatacccctacaaaaactcgctttttactcagcacttgaaaaaggttatgatatagataaacctagaaatttagcaaaatctgttactgttgaataat

SEQ ID NO: 246639 - DNA, 467 bp, Unknown
  Bacterial polypeptide expressing nucleotide sequence isolated from the Sargasso Sea
aatgtgtggaataattggaataataagctctaaagaagtttcaaatagaatagttaattcacttaaaaagcttgaatatagaggatatgactctgctggcatagccaccctagttgacggaaatataaacgaagtaaagtgtgagggtagggttgatgctttagaaaaagatatatcaaaattaaatcttaaaggagagattggtataggtcatgttagatgggcaacacacggtaagcctagcaaagttaatgctcatcctcactcatcagaacaggtttcagttgttcataatggaattattgaaaattcaacaattttaaaaaaacttttagaaaaaaaaggttatatatttaaatcacaaactgatactgaggtaatagctcatctagtaactgattacttaaaaaaaaattcactgaaagatactattatcaaagttttgaaaaaacttcatgggagttttg

SEQ ID NO: 246640 - DNA, 408 bp, Unknown
  Bacterial polypeptide expressing nucleotide sequence isolated from the Sargasso Sea
tatgtgtggaattgttggtgcaataagcaatagaaatgtagacggaatcctcatggaaggtctaagaaggcttgaatacagaggatatgactcagcgggactcgccgttattacaaagaataatattgaaagattgcgccgagctggaaaagtagtgaagctgcaggaagctctcgatagcagcaaacttgagggacaagtaggaatttctcatactcgatgggcaacacacggtgttccatcagaaaaaaatgctcaccctcacatctcggatcctgattttgcaattgtgcataatggaattatcgaaaattatctccaaattaaagacaagcttcttgtccaaggttacacattttcatcagatacagataccgaagtggtcattcataggattcacagtcatta

SEQ ID NO: 246641 - DNA, 816 bp, Unknown
  Bacterial polypeptide expressing nucleotide sequence isolated from the Sargasso Sea
agatgaattttttatagcctcagatgcaacacctattattgagtatactaaaaatgtagtttatttagatgatgaagagattgctacaattgagttaggagaagatgtaaagataaataccattaaaaatcaaagcattactccttacatccaagaattagagatgaatcttgaagcgattgaaaaaggaggatacgatcatttcatgctcaaggagatctatgagcaaccacaatcgattaagaacagtatgctgggtcgattgaaaatgaagtcagggaaaataacactgagtggaattgaagagtttgaatctaaatttttaaatgctaaacgtatagtatttgttgcctgcggcacctcatggcattccgctttggttggagagtatatgattgaagaggtagctagaattccagtagaggtggaatacgcttcagaatttaggtatagaaatccaatcatcaacgaggatgacattgtcattgcgatcagtcaatcaggggaaactgcagatacactcgcagctcttgaaatcgctaaaaagaaaggtgcaacgatttatggaatttgcaatgtagtgggttcttccattgctagagctactgacgcaggatcatacacccatgctggtcctgaaatcggagtagcatcaacaaaagctttcactgcgcaaatcactattttggcgcttatggccttgactttggctaagaaaaagggtacggttaataaaacctattatcaaagtttaattaaccaattgatagagatacctaaattggttgaaaaagcattgaaaacagatgatcaaat

SEQ ID NO: 246642 - DNA, 469 bp, Unknown
  Bacterial polypeptide expressing nucleotide sequence isolated from the Sargasso Sea
tcaatcatcagaaaagctagcacatgatttttttaatattaaagatgttatttttttgggacgaggtataaattatcctatagctcttgaaggagcattaaaactcaaagaaattagttatattcatgcagctggatatccagctggtgagatgaaacatggaccaattgctttgttagataaaaaagttccagtaatttccatcgcctctcctggtcaagtttttgataaagttattagtaatgctcaagaagcaaaagcaagagattcatatttgattggaattgctcctgaatgtaaagggactgaaatctttgattatttaatgcaaatcccctcctctaatgaatgggttacacccttacttaacatagtccctttacaattattgagttatcatatagcagcccatagaggactagacgttgatcaaccaagaaatttagcgaaaagtgtaactgtggaatga

SEQ ID NO: 246643 - DNA, 877 bp, Unknown
  Bacterial polypeptide expressing nucleotide sequence isolated from the Sargasso Sea
tagagttgataatcttgaaaaaaattctttagttcaaaatatggaaggtacaataggtattggtcatgtaagatgggctactcatggtttacctaatagtataaatgcacatccacattcatctcaaaatgtatcagttgtacataatggaataattgaaaattcaacattattaaaaaaatttttaattagtaaaggacataaatttaaatctcaaacagatactgaagtaattgttcatttaattacagaaaatttgaaaacagaaaatattgtaaattcaataaagaaaactttaaaatctcttcatggaagttttgctctcggaattatatttaaagatgaaccagatttaattgttggagctagaagaggatcaccattagcagtaggatatggacctaatgaaaattatttaggctcagattcttatgcattaaaatcaatgactaataaaataacttatttaaatgatggtgagttttgtattcttaaaaaagatcatgtagaattttttaatgaagatggaacaaagattaataaaaaagttttagaattatcaactgatgaagaacagtatgataaaggtgattacaaacactttatggcaaaagaaattgaagaacagcctataaccttaaaaaatggaattaatgaatatatagataatgcaaacaatgatattaatatttataattttccttggaaaacaaatgaaatttcctcaataactttaattggttgtggaactgcatatcattcatgtttaatggcaaagtattggtttgaagaattaacctctttagatgtaaatgtagatatagcatcagaatttagatacagaaaaaataggtttaaaaaagagactttatatatt

SEQ ID NO: 246644 - DNA, 827 bp, Unknown
  Bacterial polypeptide expressing nucleotide sequence isolated from the Sargasso Sea
aagtacaaaaaatgtttcagcaacgatacttaattctctaagaaagttggaatatagaggatatgactctgcaggtattgcaactttagaaactggcattattaaagaagtgaaatgtgagggcagagtagatgtattagaacaaaatctttctaaacaaaagttagaaggaaatattggaattggccacgtaagatgggctactcatggtgtacccagcactgttaatgctcatcctcactcttcagataaagtctcagtagtacataatggtataattgaaaattcaacaattttaaaaaaacttttaattaaaaaaggatatgtttttaaatcccaaactgacacagaagtgattgtatatttaattacagaatatttaaaaaaaaatgatttaaaaaattcaatgattaaaatgctaaagcgtgttcacggaagttttgctttaggaataatctttcaagatcagcccgatttaattgttggagcaagaagaggttctccgcttgctgttggatatggaccaaatgaaaattatttaggttcggactcatatgccctaaaatcaatgactaataaagttacttatttggatgatagtgaattttgtattataaaaaaggataacgttgaattttttgatgagaaaggaaataaagtaaataaaaaagttttagaactttcaaaaaatgaagaagattatgcaaagggtgattataagcattttatggcaaaagaaatagatgaacaaccatcaaccataaaaaattgtgttaacgaatatataaataaaattagcaattctataaatatttataattttccat

SEQ ID NO: 246645 - DNA, 805 bp, Unknown
  Bacterial polypeptide expressing nucleotide sequence isolated from the Sargasso Sea
tatgtctttgtttctcaatcttggagaaacagctgatacttatgcagccttagatttatgcaataaaaacaatatgaaaacatgctctattgtaaatgtagtagaaagttcaattgcaagagactcaaaatttgttttaccgatacattgtggtccagaaattggtgttgcctcaactaaagcttttttaggacaaatgttagtactttatttattatgtcttaaaatgggcaaacttaatgatgacattaagaaaaaagattatatttccaaaatcaaaagcttattaaatttatcaaaaaatatagaactttctttaaaatctgaaaacgatattcaaaccatatcaaatagttttacagatattaaaggttctatgtttttaggcagaggttactcatatccaattgcacttgaaggtgcacttaaattgaaagaattatcctatattcatgcagagggttatccagctggtgaaatgaaacatggtcctttggcattaattgaggatggtatgccagttgtagtaattgctccaagagatgaatactacaaaaaaacaatgtccaatatgcaagaggttatagcaagaggcgctaaagttttattaataacaaacaaaagcactgacgagatattctcagaaaatatttggcaaaaaattgaggttgagaatacagatgatgatctgttgccttttttaataacaattccacttcaaaaattagcttactatactgctttaaaaaaaggttatgatattgataaacctagaaacctagcaaaatcagtaaccgtagagtaa

SEQ ID NO: 246646 - DNA, 925 bp, Unknown
  Bacterial polypeptide expressing nucleotide sequence isolated from the Sargasso Sea
tctgtcactaagaatctcggcagagtaaacgaactaacaaaaaagctcaacttaaaaaccaaccaaagcaatttagggatagctcatacaagatgggcaacacatggcatcccatctgaaaaaaacgctcaccctcatcacagtaaaaatatttttgttgttcataatggcattatagaaaatcataatgatttaagggcctatcttaaggcagagggcataagattttctacccaaactgatactgaagtcattggacacctcataagaacttttacagaaaaaggccaaagctttgagaaagcggtattcaatactataaaaaaactcaaaggcgcgtatgcccttggcatcattgacaagaataatcctgagcaaataattggggtcagaaaccaaagcccacttgtgcttggaaagggatttgaagaaaactttattgcctcagatataatggctctagcacctgtgaccaataaatttacatatttagacgatggccaggttgctctgcttagcagccacaaaacagtggtaaaaaacatatctactaaaatcataagaaccaaaacccacgaggtagactcaaatgcatacaccaatgatatggccggcttcagtcacttcatggaaaaagagatctttgaacaacctgaagcagttaaaaattctattgagggccgattatcaaaaaacgaaacacaagaaggaatttttggtgctggatttgaggaggctgtaaacaatattaccaatatacaaattgttgcatgtgggaccagctaccactcagcacgtattttcgaattttggtcgcacaagtttctgggcataaactgtcgggtagattacggcagtgaataccagtatcaagaacctgttaaaacagacaaaaccttgcttattactatttctcaatcgggtg

SEQ ID NO: 246647 - DNA, 852 bp, Unknown
  Bacterial polypeptide expressing nucleotide sequence isolated from the Sargasso Sea
gccatggccgggcccgacggcaagctctccacgccgctttcgcgcgaggaccttgccgccatcgacggcattgtcatgctggccgcaggcacgagccactacgcggcgatggtggcgcgttactggatcgaatcgcttgcccgggtgccggtgagctgcgagatcgcctcggaataccgctatcgcaagcctgtgaccggcgccttcagctgcgctgtcgccatttctcagtcaggcgagagcctggatacgctgatggccatgcgccacgccggcgaggctggcttgcggaccattggccttgtcaatgtgtcgggcagcaccatcgcgcgcgaggccgacatggtgatgccgacacgcgccggcccggaaatcggtgtggccagcaccaaggcgttcacggcccagctgacggcgctggtcagttttgccgtggcccttgccgaggcaaaggggcagatcagcgttgagcgccgtgatgaaatccatgctgccattcaggggctgccgtcgatggtgggccgcacactcggcctgttcgacgatatcaggccgctggcgcattcactgactgcggcacgttcggcgctctatctggggcgtgacgtgctgttcccggtggcgctcgaaggcgcgctgaagctgaaggagctaagctatatccatgccgaggggtttgcctcgggggagatgaagcacggccccatcgcgctgatcgaggaaggacttccggtggtggccctgctggctgccgacgaggtaatgggcaaggcggcaagcaatcttcaggaagcggctgcccgtggcggccggattatcctgatcaccgaggagcgcgccgctagcaccgtc

SEQ ID NO: 246648 - DNA, 88 bp, Unknown
  Bacterial polypeptide expressing nucleotide sequence isolated from the Sargasso Sea
caacttttagcgtatcatgtagcgctattaaaaaattgtgatattgataaacctcgaaacttagctaagtcagtcacagtcgaatgaa

SEQ ID NO: 246649 - DNA, 337 bp, Unknown
  Bacterial polypeptide expressing nucleotide sequence isolated from the Sargasso Sea
ctgctggtgattaaacatggcccccttgctttaattgaaaaagatttgcctgttattgctttagctccttttgataaaaatttttccaaattattatcgaatattcaagaaataaaggctagagatggtaaaataataatgattacagataaactagggtctagaaaagctaagaagttttgtgatgaattaataattttaccagaaacaaatattataactgcagctattatttattcattgcctatacaaatgattgcatatgaattaggagttttacttaaaaaaaatattgatcaacctcgcaatcttgcgaaatctgttacagttgagtaaa

SEQ ID NO: 246650 - DNA, 217 bp, Unknown
  Bacterial polypeptide expressing nucleotide sequence isolated from the Sargasso Sea
gctgcaagaaaaggcaaagttgtgactataggcccactgggaaaaactaaaattactaaagatggtggacatattaagattccaaagactttagaccttcttaatccaataatctcagttgtaccgatgcaacttatttcatattacactgcacttcttaagggaactgatgtagataagcctcgtaaccttgcaaagagtgttactgttgaataaa

SEQ ID NO: 246651 - DNA, 805 bp, Unknown
  Bacterial polypeptide expressing nucleotide sequence isolated from the Sargasso Sea
gccgctatagcaatatcccagtccggagaaagccttgatacgttaaaagctatgaggtacgccgctacggagaaactatcaactatcgcgcttgtcaatgttctgaccagctctcttggtagagaggctgatttcgttcttcccacaatggcaggtccggaaataggtgttgcatcaactaaagcttttacagcacaactgacagtattaattacttttgctgttttgttagcaaaggcgaggggcaagttgtcagaaaaagatgctgacaacttgcagtatcaaattcagttgctgcctgggttaattggaaaagcgcttcaaagttttgatataattagacccattgcaaaaaaattaagttctcgaaggtctgctttgtttttaggtcgaggtgtattattcccaatagcgttagaaggtgctttaaagctcaaagagcttagctacatccatgcagaaggatttgcttcaggggaaatgaagcatggacctatagcgttgatcgaggagggtctaccagttatctcgttactggcggcagacaatttgatggaaaagagtatcaataacttaaaagaggcaagtgctcgcggtggaagaataattttagtggcggaagaaaaagttgccagactagttgattttgcggatgaagtaatacccgtacctgatgtgaattccctcttgtcccctatcctttttactattccagttcagctcttggcctatttaactgcgttagaaaagggcactgacattgatcagcctaggaacctagcgaaatcggtgactgtggagtagg

SEQ ID NO: 246652 - DNA, 460 bp, Unknown
  Bacterial polypeptide expressing nucleotide sequence isolated from the Sargasso Sea
atattttgttgagaaaattgcagacaaaaagaatgcattgtatttaggcaggggcgtttacttctcaattgcacaagagggagcattgaaattcaaggagattacatatattcatgctgaggcatatccagcaggcgagttaaaacatgggccacttgcacttgttgatgagatgacacccgttgtagcccttgcaccagaagatgagctcgtagaaaagctcgtctcaaatctcgaagaggtcaaatcaagaggaggcacgctttacgtctttggaaacgcaacatcaaagataaaaattgaaaaaggaaaatttatgaacatgccagattgcggttactacaatgcaccaattgtttacacaataccattacaaatattagcctatgaggttgcatgctcaataggaacggacctagatcaaccaaggaacctagcaaaatcagtcaccgtggagtaa

SEQ ID NO: 246653 - DNA, 697 bp, Unknown
  Bacterial polypeptide expressing nucleotide sequence isolated from the Sargasso Sea
ctcaatagctagagactcaagctttgtattgccaatccattgtggtccagaagtaggtgtggcttcaacaaaagctttcttaggtcaaatgttggttctttatattctttgtcttaaattagccaacgagagaaaagaaatagataaaaaaaattttacttcaaaggttaaatctttattagatttatcaaaagatgttaaaaaaacccttttaactgaggatcaaattcaattaatttgtaaaagctttgtagacgcaaaaggttcaatgtttttaggaagaggttattcttaccctatagctttggaaggtgcacttaaattaaaagaattagcatatgttcatgctgaaggatatcctgcaggcgaaatgaagcatggacccttagcattaattgaagatggaatgccggttgttgttcttgctcctagagatgaatatttcaaaaaaactatttctaatatgcaagaagtaattgctagaggtgcaaaggtacttctaattacaaataaaagtaaagatgaagttgttcatgaaaatatctggcaatcaatagaagtagagaatactaatgatgatttattaccttttctaattactatacctttgcagaaacttgcctaccattctgcactaaataaaggctatgacatagataaaccaagaaatttggcaaaatctgtcactgttgaataa

SEQ ID NO: 246654 - DNA, 527 bp, Unknown
  Bacterial polypeptide expressing nucleotide sequence isolated from the Sargasso Sea
aatgtgtggaatctttggtattttctctaataatccagttattaatccaattttaacgggactctcgaagcttgaatatcgggggtatgattcatctggtatctcagttctggataatagcaactctatcataactgtaagagctaaaggtaaattagagaatctaaataaaaaaataaaaacaaatgagctatttggaaatattggaattggtcatactagatgggctacccatggtataccatctacaattaacgctcatccgcatgtttctgaaaatgtttcgattgttcataatggaataatagaaaattactcacaactcaagaaaatgttgaaaaataaaggatttatttttaaatctcaaactgatagtgaagttatagctcatttactaagttatgaattaagagtaaatactccaagaaatgcaataaaaaatactttacaatatctagagggtgcatttgctatagcaatactttttaaaaactttaatttacttgcaggaggcaggcgaggaaagt

SEQ ID NO: 246655 - DNA, 773 bp, Unknown
  Bacterial polypeptide expressing nucleotide sequence isolated from the Sargasso Sea
aaacaaagtaaataaaaaaattttaaagctttcatctaatgaaactagctatgataaaggtgattttaaacattttatggccaaagaaattgaagaacagccaaataccattaagactggaataaaggaatatgttgataaaacaaattcagagataaatatttacaatttcccatggaaaataagtgaaataaattcaattaaattaataggttgtggtactgcttatcattcttgtttaatggctaaatactggtttgaagaattaactaaacttgatgtcacgatagacattgcatcagagtttaggtaccgaaaaaatatatttaaaaaagatactctatatgtatttgtctcacaatctggtgaaacagcagatacttacgcagcactagatctatgtataaaaaataatatgaaaacttgtgctgtagtaaatgtaattgaaagttcaattgcaagagatgcaaattttgtattacccattcattgtggtccagaaattggtgttgcatctacaaaagcttttttaggccaaatactaattttatacattttagctttaaaactaggatccttgagaaatgaaataaatccaaaaatgtacaaaaaaaaaattaaagaccttcagaatttaccaagtctaattgaaaaatctttattaatagacaatgatatacaagctatatcttccacttttaatgaagcaaaaggttcaatgtttttgggaagaaggtttttcgtacccgattggcacttgaaggagctttaaa

SEQ ID NO: 246656 - DNA, 892 bp, Unknown
  Bacterial polypeptide expressing nucleotide sequence isolated from the Sargasso Sea
tttgaagagcatacagatctagatgtcacaatagatatagcatctgaatttagatacagaaaacttaaatttaaaaatgattgcttatatgtgtttgtatcacaatcaggtgaaactgcagatacttatgcagctttagacctgtgtaaaaaaaataaaatgaaaacctgttcaattattaatgttgttgaaagttcaattgctagagattctgacttggttttaccaattcattgcggtcctgaaattggtgttgcttcaactaaagcttttataggtcaaatgttagttttatacatgttatgcataaagatatcttttgatcagaaaaaaattaataaaaaaaaatatcaggaaaaaattaaaaatttactttctctatcaaatttatgtaaaaaaactttattaattgatagtaaaattcaaaaaactagcaaagcttttattgaagccaaaggttcaatgtttttaggaagaggatattcatttcctatagctttggagggcgctttgaaattaaaagaactcgcatatgttcacgccgaaggatatcctgctggagaaatgaaacatggtcctttagcattaatagaagaaggtatgccagtagttgttcttgctccaagagatgaatattataaaaaaactgtttcaaatatgcaggaagtaatatcaagaggtgctaaagtgttgctaattacaaataaaagtaaaaatgaagttcaatcagaaaatatttgggaaacaatagaagttgaaaatttgtctgaagatcttcttccttttttaacaactattcctttacaaaaattagcatattattctgctttacaaaaaggttatgatatagataaaccaagaaatttggccaaatctgtcactgttgaataaa

SEQ ID NO: 246657 - DNA, 931 bp, Unknown
  Bacterial polypeptide expressing nucleotide sequence isolated from the Sargasso Sea
tatgtgcggtgttgttgcagtaattggtaaacgaaatgcaaatcaactcgtgattgaaggtttaaaaaaacttgaatatagaggatatgattctgcaggcattgtatcagaggttaatgggacttttgaaactgttaagtcagaaggcaagctcattagattaattgaaaagataaatcaaaaatcaagtagtaaattatattcagaaaactccgttgctttaggtcatacaaggtgggcaacacatggtaatataagtgtagaaaatgctcatccattgacaagtgaagacaaagtagctgttgttcacaatggaattatagaaaattatgaaaaattaaaaaaaaaccttatttcagaaggatatgtttttaaaagtcaaactgataccgaggttttgcctcacttgttcatgaaatatatcaagttaggaaatgattttctgcaagctggaagatttgttttacaagatattaagggtgcatttgcatttgtggctataagtctagattttccaaaccaattatttgtatcaaggaattcatcgcctttagcaattggtttgggagaaaaatcaaattttgttggatcagatgctcattcaattgatcatttaacccaaaaaattatttatttagaagacggtgatcatgcattaattaaattagatgagttagaaatctataataaaaatgaaaaaaaagtaaatagaaaagttattaatattaaagcagaaattgggcttgtaacaaagggtggttataaacattttatggaaaaggagatatttgaacagccttcagtaattccacaagcaagttcatctttaataaaaagtaattctgaaataaacatagatttaaataaattaggctttaaagacaaaaatactttgcttattgctgcagctggtacaagttactatgctgct

SEQ ID NO: 246658 - DNA, 934 bp, Unknown
  Bacterial polypeptide expressing nucleotide sequence isolated from the Sargasso Sea
gacaaaccgacaactattaaaaattgtataaatgaatatattgatagtgtaaaaaaaaatatcaatattataaactttccaattactcctaaaaatataaataaaataattttaattggatgtggtacagcctacaattcttgcttaaccgcaaaatattggtttgaagaattgacaacaattgatgttgaaatagatatcgcttctgaatttagatacagaaaattaaaatttaattctaataatctttatatttttgtctctcaatcaggtgaaacagctgatactgctgctgctttagatatatgtaaaaaaaatgatgttaaaacatgttcgatagtaaatgtaattgaaagcacgattgcaagaaattctgattgggttttgccaattcatgcaggtactgaaattggagtagcttcaactaaagcatttttaggtcaattaacagtcctttatattttatgtttaaaattggctattttaagaaaagatattggccaaaaaatatatgaaagacacataaataatttaaaaaaattaccagaggcgataaaagactctcttgatgctgaaaataatttacaattaatggcaaaagaatttctatcagcaaaaggatcaatgtttttaggaagaggatcctctttcccaatagctttggaaggtgcattaaaactgaaggaattgtcttacttacatgctgagggatatccagcaggtgaaatgaaacatggacctctagccctgatagaagagggtcttcccgtaatagtaattgctccaaaggataaatactttgaaaaaacaatctctaatatgcaagaagttatagcaagaggagggaaaatactttttattacagataacaaaaaagagtcattaaatgaaaatattagatttggtttaagagttccatacattgataatttat

SEQ ID NO: 246659 - DNA, 838 bp, Unknown
  Bacterial polypeptide expressing nucleotide sequence isolated from the Sargasso Sea
tacagaaaaaacagattcaaaaaagatactttatatgtatttgtatcccaatccggtgaaacagcagatacttatgcagcactagatatatgtattaaaaatagaatgaagacttgtgcagtagtaaatgttattgaaagttcaatagctagagatagtgaatttgttctcccaatacattgtggaactgaaatcggagtcgcatcaacaaaagcttttttaggtcaaattttaattctttatattttagccttaaaactagggctgttaaaacaagatatagaaaaaaaagtatttacaaaaaaaattaaagatcttcaaaatttaccaaaattagttgagaagacattatctattgataataaaatacaatcaatatgtggtacatttaatgaagcaaaaggatcaatgtttttaggaaggggtttttcttttccaattgcacttgaaggagcgctcaaattaaaagaattatcttatgtacatgctgagggctatccagctggagaaatgaaacatggtccgttagctctaattgaagagggaatgccagttgtagttttggctccaagagacaactattacaaaaaaacaatctcaaatatgcaggaggttattgcaagaggagccaaagttttgttggtaacgaataaaagtagtgatgaggtggtttcagaaaatatttgggaaaaaattgaagttgaaagtgctaatgaggatcttttgccatttcttttaacaatacctttacaaaaattagcttattattcagctctaaaaaaaggatttgatatagataagcctagaaatttagctaaatcagtaaccgttgaataat

SEQ ID NO: 246660 - DNA, 479 bp, Unknown
  Bacterial polypeptide expressing nucleotide sequence isolated from the Sargasso Sea
tatgtgtggaatcgttggggctgttgcagaacgtccagtaaataaaatcttagttgaaggccttaagcgtcttgagtaccgtggttatgactcagcaggtgtagctttacttgaaggtaatactcttaatacagttaaagcagttggtaaggttgtaaacttagaatcagcacttgaacaagctggtgttagcggtcacacaggtattgcacacactcgttgggcaactcatggcggtgtaactgaagccaatgctcacccacatgtttcaagcaatcaattagcgcttgtacataacggtatcattgaaaaccacgcaagtttgcgtgcagcacttaaaggcgacggttacgagtttttatcagataccgacaccgaagtaatggtgcatttaattcatcagttacgtcagcagcacaccactttattagcgtcagttcaagcagctgttaaacagtttgaaggtgcatttggtacag

SEQ ID NO: 246661 - DNA, 132 bp, Unknown
  Bacterial polypeptide expressing nucleotide sequence isolated from the Sargasso Sea
tattagataatttactttctcctattttgctaacgattccaatccaattattagcttatcatgttgctttattaaaaggttgcgacattgataaaccaagaaatttagctaaatcagtcacagttgagtaat

SEQ ID NO: 246662 - DNA, 634 bp, Unknown
  Bacterial polypeptide expressing nucleotide sequence isolated from the Sargasso Sea
tctacgaaagctttcttaggacaaatacttgttttatatattttagctttaaaaattggatctatatctggtcaaatcgataaaaaaaattatcaagaaaaaattaaaaatcttaaaaatttaccaagcctgatagaaaaaactttattattagataatgatattcaagcaatctcctcaacattcaatgaagctaaaggatctatgtttcttggaagggggttctcttttccaattgctttagaaggagcattgaaactaaaagaattatcttacgtccacgcagagggttatccagcaggtgaaatgaaacatggaccacttgctttaatagaggaggggatgccagttgttgttctagcaccaagagacagttactataaaaaaacaatttctaatatgcaggaagttatagcaagaggtgccaaagttcttttgattactaataaaagcaaggatgagattgtttcagaaaatatttgggaaactattgaggtagaaaatactaacgatgatttactaccattcctattaactgttccacttcaaaaacttgcttattattctgctcttaaaaagggttatgatatagataagccaagaaatttagctaaatcagtcacagttgaataaa

SEQ ID NO: 246663 - DNA, 881 bp, Unknown
  Bacterial polypeptide expressing nucleotide sequence isolated from the Sargasso Sea
gtatggtggcaaaatattgggtttgaaaatttggctcgaattccaaccgaagtagatatcgcttcggagtttcgatatcggaatcccgtattaattaaaaacggggccgctctttttatttctcaatcgggcgaaagtttggatactttaatggcgcaacgttatgccaaagagaatggacaaaatatcattagtctagttaatgttcctgaaagcacgatagcacgcgagtcagatactgtgctaaaaacacaggccggacctgaaatatccgtcgcttcgactaaggcttttacaacacagctgattacattattgactacagcggtgcattggggagagttgcgtggtgtgctgtctgataaagaggccaaagaaataattgataacctttcgaatttaccaagcttgctggcgaaagtgttatctgacgaacttgattggataggtgccagtagcgagttagccttgtcgcaagatgtcatttatttaggacggggagtaaattttcctatcgctctcgaaggcgcgttgaagcttaaggaaatcagttacattcatgctgaaggatatgcggcaggtgaaatgaaacatggtccaatagcactgctagagaagggcgttcctgttgttatggttgccccgcatgacgaatggtttgaaaagacgtcatctaaccttaaggaagctcttgcaagaggcgcccgagtggttttgctttctgatgataaaggcattgaaaagttacacgaagcggcgacatggatttttaggatgccaagagttcatccaatgttaactcccatcctttattcgttgccagttcaactgctagcttaccacacggcaaagaaaaagggtactgagattgaccagccacg

SEQ ID NO: 246664 - DNA, 802 bp, Unknown
  Bacterial polypeptide expressing nucleotide sequence isolated from the Sargasso Sea
acacatggacttccaaacaacataaatgctcaccctcactgctctggaaatgaagaaattgcattggttcacaatggaattattgaaaactacgccattctaaaagaagagctaagttcgagaggtcatgtttttaaaagtgaaacagatacggaagtattggttcatttaattgaagacattaaaaaagaaaacaactgcaatttatttgacgctgttcgaattgccttaaatgaagtagttggagcttatgcaattgtagtaatagacaacaacaacccagaagagcttattgccgcaagaaaaagtagtccattagttattggccttggtgaagatgagtattttcttgcttctgacgcaactcctattgttgaatacactaagaacgtagtttatttagatgatggtgaaattgcaagaattagcctagcgaaaggtctatctttaaaaaccattcaaaacaaaaataaaactccttacattcaggaattagaaatgcacttagaagctcttgaaaaaggcggatatgagcacttcatgcttaaagaaatatacgaacagcctcagtcaattaaagactctatgagagggcgtttaaaagccaataaaagtttggttgggcttggtggaattaaagattttgacgacaaaattttagctgccaatcgtttgatttttgttgcttgtggcacgtcatggcatgcaggtttagtaggagaatacttatttgaagaaattgcaagaataccagttgaagtagagtatgcttctgaatttcgttatagaaaccccatcatca

SEQ ID NO: 246665 - DNA, 752 bp, Unknown
  Bacterial polypeptide expressing nucleotide sequence isolated from the Sargasso Sea
aatgtgcggaataattggcttagtaagtaaaaaagaggtttcttctactttagtggagggattaaaaaggctcgaatacaggggttatgactcttctggcatagcaacaataagtaatgaaaaaattgaaagagttaggtcaaaaggtaatttaaagtttttagaggaaaagctactaagcacatcattaccaggtaatataggtattggtcatactcgttgggcaactcatggaactccagaagaaaaaaatgctcatccacatattaccgataaagttgctgtagttcataacggcattatagaaaataataatcagctcagaaatcaattaattgaggcgggtacaaaatttgccagcgatactgatactgaagttgtttgccatattattacttcctacattaactcaggattaagcgcttatgactctataagggcttctatcaatgatataaggggtacttatgcttttggtgttttaatagcaagtgaacctaataaattatttgctgttagagggggaagcccaattgcaattggttcagctgacgaagaaaactacattgggtcggatacatactctttaagcgcatattcagataacattacttatttaaaagatggcgatatagctataattgaaaataaatcttatgaaatatttgatcagtctaattcattagtcgagagagaaaagcagagtattattgagagtgttactctatctgaaaaaggaatttttaagcatt

SEQ ID NO: 246666 - DNA, 465 bp, Unknown
  Bacterial polypeptide expressing nucleotide sequence isolated from the Sargasso Sea
aagctagcaaagcttttataaaggcaaaaggttccatgtttttaggtagaggttactcttttcctatagctttagagggagccttaaaattaaaagaacttgcctatgtacatgcagaaggatatccagctggtgaaatgaaacatggacctttagcactaattgaagaaggtatgcccgttgttgttttagctcctagagataatcattacaaaaaaacaatttcaaatatgcaagaagtaattgcgagaggagctaaagttttgcttgtaacaaataaaagtaaagacgaaattcaatcagaaaatatttgggaaacaatagaggttgaaaatttaattgaagatttgcttcctttcttgacagctatacctcttcaaaaattagcctattattctgctttgcaaaatggatatgatatagataaaccaaggaaccttgccaaatctgttacagttgaataat

SEQ ID NO: 246667 - DNA, 911 bp, Unknown
  Bacterial polypeptide expressing nucleotide sequence isolated from the Sargasso Sea
aaatggaataaaagaatatctagataattcaaataacaatattaatatttataattttccttggaaaacaaatgagatttccgcaataactttaataggttgtggaaccgcttatcattcatgtctaatggcaaaatactggtttgaagaattaacctctttggatgtgaatattgatatagcatctgaatttagatatagaaagaatagatttaaaaaagaaactttgtatgtttttgtctctcaatctggcgaaacagcagatacttatgctgcgctagatttgtgcaatcaaaataatatgaaaacatgctcagttgtaaatgtaattgagagttcaattgctagagaatctaaatttgttttaccaatacattgtggaactgaaataggtgttgcttctacaaaggcttttattggccaaatgcttatcctttatatattgaccctaaaacttggattaatgagaaaagatattaaaaaagaaatattccttgaaaaaattatagatcttaaaaaattaccagaacttgttaagcaaactttgttaactgacaataagatacaaacaatatctagtacttttaatgaagccaaaggatctatgtttttaggaagaggattttcatatccaatcgcattagagggtgctttaaaacttaaagaactgtcatacgttcatgctgagggttatcctgctggtgaaatgaaacatggaccacttgctttaatagaagaaggtatgccggttgttgttttagcacccagagataactattataaaaaaactatttcaaatatgcaggaggtaattgctagaggagcaaaggttttattaattacaaacaaaagtaaagatgaagttatttcagaaaaatatttgggaaactatagaagtagaaactactaat

SEQ ID NO: 246668 - DNA, 710 bp, Unknown
  Bacterial polypeptide expressing nucleotide sequence isolated from the Sargasso Sea
catgggcggcgtcacagaacccaatgcccatccgcatatctgcaacggcactttggcgctcgtgtgcaacggcatcgttgaaaatcacgagaccctgcgcgatgcacagcgtgcggcgggtctcagttttacttccgaaaccgatacagaagtcgtggtgcaccaggtctatcttcaccttcagcaggggttggatctggccgatgcggttcgcgccacgatggcggagctgcacggcagttttgcactggctgtggtgcatgccggcgagccaggccggcttgttgcggcccgccagggcccgcctcttctgctcgggcagtcgggtgaagagaactttgtggcgtccgatatcaacgccctgttgccagtgacccgcgagtaccaggtgcttgaaaacggggatgtggcagatattcgcggccccgattgcctgattcgtgaccaagccggccaaatagtcgagcggaccgtgcacagcagcacgcagtcgggtgagagcgcagacctgggcgaataccgccatttcatgcaaaaagaaatccacgaacagccccgggcggttgccgataccctcgaagggcgtctgctgggtgatcacgttctggaagaatctttcggcagccgcgctcaggagatctttgatgcgacccggcaggttcagatcattgcctgcggaacgagttatcacgccggcttggtcgctcagc

SEQ ID NO: 246669 - DNA, 901 bp, Unknown
  Bacterial polypeptide expressing nucleotide sequence isolated from the Sargasso Sea
gttgcagctaactgggttttcagcaatttcagaacttcctactcaaatagactatgcttccgaatatagatatagaaatccccatgtagacgatgattctcttctggtcacaatttctcaatctggagaaacagctgacacccttgctgcattgagatatgcacaagaaaaggattatctatcgaccctttgtatttgtaatgttcctacaagttctcttgcaagagaatcagagtattcaatatttactaatgctggacctgaaattggagttgcttctacaaaagccttcacaactcaacttacagctttaatgctgctagctttgtctcttgcaaaaagcagaggaaaaaatccaaagttaagaacaagagtaataacagcattaagatcattaccagaaacagttgaagaaactttaaagcttaaagatataattctagaaatcgcacctcaaatagctaataaagataatgctttgtttttaggaaggggtattttttatccaatcgctaaagagggagcactaaagcttaaagaaatttcttacattcatgctgaagcttatcctgctggcgagttaaaacatggacctcttgctttaatagatgaagaaattccagttattgctttagcgccagagagcgagatagctgaaaaattagtttctaatctcgaagaagttaaagctaggggcggaactctatatgtattttctgatccttcaatttcaatggatttaaagtctggaagactcatcaatatgccaaagtgcgacttccttttgactccgatcatttatacgatacctcttcaaatactttcttatgaagtagctttgttaagaggaaccgatatcgatcaaccaagaaatctagcaaagtcagtcactgttgaatag

SEQ ID NO: 246670 - DNA, 852 bp, Unknown
  Bacterial polypeptide expressing nucleotide sequence isolated from the Sargasso Sea
gaggtgggccacccacggtgtcgcgagcacctctaacgcccacccacattcaactgacttggttgctttggttcataacgggataatcgaaaactttctcgaactcagagccaagcttgaaagacaaaaatatcgctttgaaagtgaaaccgataccgaagtaattcttgccctcattgatggctatcttagaaagggtatgtcacctgcagaggcgactcgtgccatgcttaagcaggttgaaggagcttttgcccttgccattatttttactggtcatgaaaacctaatgataggggcccggcgaggctgccccttagttgtaggatatggtaacgatcaactatttttaggctccgatgctctcgccctagttcctcttacaaaacgtatttcatatctagaagaaggtgattgggttgaactacaggataacattgtcacagttcatgctcggacgggagaagttgtaaataggccgataagagaaattgatgtagctaatagtgctgttgaaaagggcaaccatgctcactttatgttaaaggaaatttacgaacagcctgtggtgattggtgattgtcttcaaagccttttcaatccggtgaagaggagcattaatttgccacaactaaatattgatttttctgattatgaaagagtaagcgtggtggcatgcggcacctcctattacgctgggttagttgcccgctattggtttgagtctctttccggccttccagtggatatagacgttgcatccgaatatcgataccgtgccgtgccaaggcaagagcgcactctggggctgtttatttcacaatctggcgaaactgccgatacacttgctgc

SEQ ID NO: 246671 - DNA, 888 bp, Unknown
  Bacterial polypeptide expressing nucleotide sequence isolated from the Sargasso Sea
ttttaaactcacttagaaaattagagtatagaggatatgattcagctggtgttgcaacattaaatagcggacacatacaagaagtgaagtgcgagggaagagtagacaatctcgaaaaaaatattattaaaaataaattgctaggaaatgtaggaataggacatgttagatgggctactcatggtattccgagtactttaaatgctcacccgcattcttctgaaaatgtttcagtggttcataatggtattatcgaaaactcaactttattaaaaaaatttttagtaaaaaaaggacatagatttaaatctcaaacagatacagaagtaattgtacatttaattacagaatatttaaaaaaaaataatttaatagatacattaactaaagtattaaaaaaacttcacggtagttatgcattaggaataatttttaaagatgaaccagacttaattgttggtgcaagaagaggctcacccttagcagttggttatggtcctggtgaaaattacctaggttcagattcttatgcattaaaatctatgactaataaaataacttacttagatgatggtgaattttgtataatcaaaaaaacagaagtaagcttctttaatgaacaaggaaaaaaaataaataaaaagatactttcattaacaactaatgaacaaaattacgacaaaggtgattacaaacactttatggctaaagaaattgacgaacagccactaacaataaaaaattgcataaatgaatatattgataaaaaaaataatgaaataagtatttttaattttccgtggaaaataaaagatatatcttcaattacattaataggttgtgggactgcttatcattcttgtttaattgcaaaaatattggtttgaa

SEQ ID NO: 246672 - DNA, 817 bp, Unknown
  Bacterial polypeptide expressing nucleotide sequence isolated from the Sargasso Sea
aaaatctcatatcttgatgatggagatgtatgtatcttatctaaagatgagataaaattttataattcaaaaaaagaaaaaataaataaagaaatttttacactttccgaggacaaatcttctgttagcaaaggtaattttaaaaactttatgataaaagaaatttttgaacaacctaccactgctaaaacctgtttaaaggaatatatagataaaattagagaagaaataaatttttataatcttcctattgatcctaaaaaaataaataaaatagtacttattggatgtggaactgcgtaccattcctgtttaattgcaaaatattggttagaagaatttacatccttaaatgttgaaacagatattgcctctgaatttagatatcgcagagttaggttcaatagggaaaacttatatatatttatatctcaatccggagaaacagcagatactttcgctgcattagatctttgtaaaaaagaaaatgttaaaacatgctcaatagtaaatgttgttgagagcacaattgctaggtattcagattgcgttatgccaattcacgctggaccagaaataggagttgcatcaacaaaggctttcttaggacaaatgcttgtactatatcttctttcccttaaaatttcagagataaggaaagacattgaaaccaaagaatataaaagaaaaattaatgaattaaaaaaaataccagaactaatttcagatagtcttaagcaagaagaaaaaatccaattaatcgcaaaagatatctataaatctaaaggatcgatgtttttaggaagaaggtttgtct

SEQ ID NO: 246673 - DNA, 388 bp, Unknown
  Bacterial polypeptide expressing nucleotide sequence isolated from the Sargasso Sea
tatgtgcggaattattggcattacagggaatacagaagttcaagaccatattatagatagtcttaaacgtttggagtatcgaggatatgatagttctgggattgcaactgtttttgaggataaactagttgtggaaaaggctgagggaaaattaaaaaatttaaatgaaaagttgaagagaaaatcaacaaaaggtaatattggtataggtcacacccgatgggctactcatggaaacgtttcagaagtcaatgcccaccctcatgtgtctggtcgagtggcaattgttcataatggtatcattgaaaattatattgaaataaaagatcaacttataaaaaatggtagagagtttatatcatcgactgatagtgaggttatagcacat

SEQ ID NO: 246674 - DNA, 236 bp, Unknown
  Bacterial polypeptide expressing nucleotide sequence isolated from the Sargasso Sea
tatgtgtggtattgtaagctatattggcccaaaggatcctgtcccaatattattaaaaggtttaagaagattagaatatcgaggatatgattctgctggagttgctttattgaataaaaacaatctgcaatatttaaagaaagctggcaaagtttcttatcttgaatcagttattgatgactctgtgattaatggtttttgtggtattgctcatactagatgggcaacacatggag

SEQ ID NO: 246675 - DNA, 460 bp, Unknown
  Bacterial polypeptide expressing nucleotide sequence isolated from the Sargasso Sea
agcaaagaatttttcaaataaacatcatgctcttttcttgggaagagggatacaaaatccagtagcaatggagggagcccttaaattaaaagaaatatcttatattcatgctgaggcctatgcagctggtgagctcaaacatggacctctcgcattagttgacgaggatatgcctgttgtagcggtagcgccagatgacaggttacttgaaaagcttaaaagtaacttgcaagaagttaaagcgaggggcggagagttatatgtttttactgatccaagggttacatttgttgatgatgaagtgactcataacagtgtcatgcccgttgcaataaaagaatttcaaggtccaattctttattccataccattacaactccttgcatatcatgttgctgttattaagggcactgatattgatcaaccaagaaatttagctaaatcagtaacggtggaataa

SEQ ID NO: 246676 - DNA, 316 bp, Unknown
  Bacterial polypeptide expressing nucleotide sequence isolated from the Sargasso Sea
aatgtgtggaattattgggattgcgagcaataaacctgtttctactaatattattaattctttaaaaaaattagaatatagagggtatgattctgcaggattagcgactttagataacaacttgatagatgaaaaaaaatgctctggaagagtcgatgaacttgagaaaattttattcaagaacccttcaaaaggaaatatcggaataggtcatgtaagatgggctactcatggagttcctaatattattaatgctcatcctcactcatcagaagaagtttctgtagttcataatggaataattgaaaattcagat

SEQ ID NO: 246677 - DNA, 962 bp, Unknown
  Bacterial polypeptide expressing nucleotide sequence isolated from the Sargasso Sea
taaaccaaaagccaagtctggcatagctcacacaagatgggcaactcatggggcgccctcagaagaaaacgctcatccccacggttcacataatgaaatctatattgttcataacggaataattgaaaatcacgatgaaattagagagaaacttaaagaaaaaggctacaagattgcttctgaaacagactccgagcttatagctcatttaatccatttaaacaaaatagacgcgtcttcaactcttgaagctttaataaaggcaaccaaagaacttaaaggagctttttcaatagctgcaatatcatcacaagaaaaaggcaagatttatgcagccaaacaaaagagcccactattgattggaaagggtattgaagaaaatttagttgcatcagacccattagcgattgccaacataactgaaaaattttatctattagaagatggtgactttgcagaaatcacaaaaaatgacattaaaatttttaatagtaatggtgagcccgttcagagagaagagaccaaaatagatgctacaccaacatcaacaagcaaaggcaactacacgcatttcatggaaaaagagatttatgagcaaccagatgcattaggaaacaccataaatggcaggcttggtgagaatgatgttttagataatatttttggtttgggatcgagtgatgcatttaaaaaagtaaaaaggatccagtttgttgcatgtggcaccagccttcatgcagcaaaaactgccagaaagtggtttgaagaaatatgtcagataccttgctatatagatttcgcaagtgagtacagatacaggaatccaattgttgaagaccacacactgtttgtaacaatctctccatctggtgaaacagctgatacattggctgctttagaatatgctcgagctgaaaagtatgttggtattgtgacaatctgtaatgtccaaacaagcacca

SEQ ID NO: 246678 - DNA, 912 bp, Unknown
  Bacterial polypeptide expressing nucleotide sequence isolated from the Sargasso Sea
attaataaaccaaaatgatttaccaggaaagatcggtataggtcacacacgttgggctacgcatggcattccaagtgaagataatgcacatcctcatcatataggatcggttgtaggcgtacataatggtataattgaaaattttagagagattaaagaagaattatctcaaaaaggttatcagttttattctgataccgatactgaagttattattcagctttgttcatactacattgaacaaggcttcagtaataaagatgcttttttgagaacaattaatcgtttaaaaggtgcatttgcaatatgcttaatgtttaaagacgatgacaagagattgtatgtaactaagcgtagcgcccctttagtaattggatatgggaaaagtgatatatatgtaggatcagatgcagttagtttatctaatctgataaataaggtgatattccttgatgaagacgatgtggctgtaataagtaaacaagaaacagagatttttgacaaaactggtcaaaaaattgaaagaaagaaaaagtctgtagaattaaatagtgaagcaataaataaaggcaactatcaacatttcatgttgaaagaaatttatgaacagccagaagtatttacatatgctacgtccagttttattaactttaagcagcaaaaaatagaaatgcttcatgaatttaatgaatttgttaatattgacagaataatttttgttgcatgtggaactgcattttatgcgtgtgcagtagccaagtattggtttgaaaaatatgttaaagttccagttgaaattgatgtcgcatctgaatttagatatagagataattcatttggaaaaaatgaatatgctatttttgtaagtcaatcaggtgagacagctgatacgttagcagcattaaggaaagt

SEQ ID NO: 246679 - DNA, 923 bp, Unknown
  Bacterial polypeptide expressing nucleotide sequence isolated from the Sargasso Sea
gaaaattatttgtctcttaaagacttccttgcaaaggagggttattctttttcatctgaaacggactctgagctcattgctcatttgttagattattttttaactacaaacatttcaatgcttgatgctatgtacttaatgatagaaaagcttgaaggtgcttatgctatagcagcaattgatagaaatgatgaatcaaatatagttattgcaaggaataaatcacctctacttattggattgggtgaagatgaacttcttgctgcatcagatcctttggcaataggacagctaaccaaccaatttatatttttagaggatggtgatgttgcaaatatttcagcagatagttaccaaatttatgattctttaaaaaataagataaaacgagaaatatcagagattgatatatcaagcgaggcatcatcaaaaggtgaatataagcactttatggaaaaagaaatttttgaacaaccagtcgcggttttaaatacaattgatggaagagtaggtggagatgatgtccttgaaaatatttttggtattggttcatcggatgtctttagcaaagttaagagaattcagattgttgcatgtggaactagtcttcacgcagcaagggttgctgcaaactggttctcagcaatttcagagctgccaacacaaacagactatgcatctgaatatagatacagaaatccgcacgttgatgaagacactctttttgttactatttcacaatctggagaaactgcagatacacttgcagcattaaaatatgcaaaagaaaaagatttcttatcaacagttactatctgtaacgtaccaacaagcaccattgcaagagaatcagaattctctatttttacaaatgctggacctgaaattggagttgcttctactaaagcattcaccactcagtt

SEQ ID NO: 246680 - DNA, 355 bp, Unknown
  Bacterial polypeptide expressing nucleotide sequence isolated from the Sargasso Sea
acacgccgaagcttatgcatccggcgagctcaagcacggccccattgccctcatcgacaagaccatgccggtggtggtcatggcaccctgcgatgccctcttcgacaagaccgtctccaacatgcaggaggtcatggcccgcggcggcaaggtcatgctgatctccgatcgcgcgggcgccgaggccgccaatgatggtgtctggacacaaatcaccctgcccgatgtcgatccggtcctgtcgcccatcctctatgccctgcccgcgcagcttctggcctatcacacggccgtcgcgaaaggcaccgacgcggatcagccgcgcaacctcgcgaaatccgtgaccgtggaataa

SEQ ID NO: 246681 - DNA, 709 bp, Unknown
  Bacterial polypeptide expressing nucleotide sequence isolated from the Sargasso Sea
gaagataccctttttgttactatttcacaatcaggagaaacagcagatacactcgcagctttaaaatatgcaaaagaaaaaggctttttggcgactctcactatttgtaatgttccaacaagtacaattgcaagagaatcagagttttctatttttacaaatgctggtccagaaattggagtagcttctacaaaagcattcacaactcagttagttgcattaatgcttttggctttatctcttgccaaaagcagatcaagaaatccaaagcttagaggaagggtcatttctgcgcttagacagttgccagatattgtaagtgagacactgaagttaaaggattcaattgtaaaaattgcacctgaaattgcctctaaagacaatgcattatttcttggaagaggtattttttaccctatagcaaaggagggcgccctgaagttaaaagaaatttcatatattcatgcagaggcctatccagcgggagaattaaaacatggacctctcgcattaatcgacgaaaatatgcctgtaattgcattatgtccagaaagtgaaatagctgaaaagttagtttcaaatttagaagaagtcaaagcacgaggtggaactatatacgtattctctgatccatcgatcacattagagctaaaatctggcaaattaattaatatgcctaaatgtgattttttattaactcctattattt

SEQ ID NO: 246682 - DNA, 634 bp, Unknown
  Bacterial polypeptide expressing nucleotide sequence isolated from the Sargasso Sea
tgcttcactaaagcatttttaggacaaatgcttgtattatatttactctctcttaaaatatcagaaataagaaaagatattgatcataaacaatacaaaagtaaaataaatgaattaaaaaaattaccaaaattaattttagactctttaaaagaagaagaaaaaatacaactgattgcaaaagatatttataaatcaaaaggatctatgtttttaggtagaggctcgtcttttccaatcgcacttgaaggtgctcttaaattaaaagaactttcttatttacatgcagaaggttatccagcaggtgaaatgaaacatggacctttggcgttaatcgaagatggtttaccagttgtagtaattgcaccaaaagataaatattttgaaaaaactttatcaaatatgcaagaggtaatagcaaggggaggtaaagttttgttattaacaaattcaaccagcaaagtcataagtgaaaatataaggtttcaaattaatcttcctgattctcatatttcacttacaccatttttatttaccattcctcttcagctcctttcatatcatgtagcattatttaaaaaatgcgatattgataaacccagaaatcttgctaaatctgtaactgttgaataat

SEQ ID NO: 246683 - DNA, 631 bp, Unknown
  Bacterial polypeptide expressing nucleotide sequence isolated from the Sargasso Sea
atgtgtggaattattggaattaatagcaataagcctgtatcagcgactataattaattctctcaaaaaattagagtatagaggttatgattcagctggtgtggcaactctctttaatggattgataaatgaggtaaaatctgagggaagagtagaaaatttagaaaaaaattccttagttcaaagtatggagggaactattggaattggtcatgtgagatgggcaacacatgggctccctaatagcattaatgctcatccacattcttcacaaaatgtttccgttgttcataatgggattattgaaaactcgacaatattaaaaaaatttttaattggaaaaggtcacaaatttaaatctcaaactgatacagaggtaatagtccatttaattactgaaaatcttaaaacagaaaatattgttaattcaattcaaaaaactttgaagtcgttacatggaagctttgcacttggtataatttttaaagatcaaccagatttaattgttggtgcaagaagaggttcaccattagctgttggttatggtcccaatgagaattatctgggttcagactcatatgcgcttaaatccatgacaaataagattacatatttaaatgatggtgaattct

SEQ ID NO: 246684 - DNA, 598 bp, Unknown
  Bacterial polypeptide expressing nucleotide sequence isolated from the Sargasso Sea
tatgtgtggaatagttgctgttactggttataaaaaagctttaccattattaatgaatggtttagaaaaacttgagtataggggatatgactctgctggtattgctattgtaaatcctgagacaaaaaatattatttgtaacaaagcagagggaaagcttaaaaatttaatcaaaaatcttaatgataagaatatgccaggtactgtaggtattgggcatacccgttgggcaactcatggaaaacctgaaataaaaaatgctcatcctcatactaatagttcaggaactattgcagttgttcaaaatggtattattgaaaattttcaagacttaaaaaataaattacaaaaagagggcgttatattcaattctgatacagataccgaggtaattccccatctaattcaaagagaattaaatacattaagtaaacttaatcttgataaaaatggttcaacattattagttgctgtgagaaatgtaatatctgatttggaaggatcgtatgcattagcagttttatgggctgatgctccaactgctcttgtagttgcaagaagacaagcaccattaattattggtttggggaaaggagaa

SEQ ID NO: 246685 - DNA, 193 bp, Unknown
  Bacterial polypeptide expressing nucleotide sequence isolated from the Sargasso Sea
ataactaacaataacgatagcgttattagtgaaaatgttagatttacaattaatttaccatctatcgaaaaatctttatctccatttttgagcacgatacctcttcaactacttgcttatcatgttgcgttactgaaaaaatgtgacatagataaacctagaaatcttgccaaatcagtaactgttgaataaa

SEQ ID NO: 246686 - DNA, 580 bp, Unknown
  Bacterial polypeptide expressing nucleotide sequence isolated from the Sargasso Sea
aaatttaataatatcacaacatatcaaataaaaaaaatttgtttaaacatacaagctctgcctagtgctattgcaaaaatgttaaatatggaaaatgagataaagttggtagctcagaatataaaaaatgcaaagagcataatatttcttggaagaggacttttgtatcctcttgcattagagggtgcattgaagttaaaagaaattagttatatccatgctgaaggatttgcagcaggtgaaatgaagcatggtccaattgcgcttattgaagatcaagtgccagtaattatgtttttagtatcggatggtaatgaagataaagcaataagcaacttgcaagaagcttactcaagaggtgcgaagattattttaattgcagataaacactgtattcaaaaggcttcttttgctcattataaaatcgaaatcccaaattttgaaactgattttaaatcattactatcaccatttcttatggcaataccagctcagttattagcttatcatgttgctaatgaaaggggcactgatgttgatcaaccgcggaatttagcaaaatcagttacagtggagtgaa

SEQ ID NO: 246687 - DNA, 815 bp, Unknown
  Bacterial polypeptide expressing nucleotide sequence isolated from the Sargasso Sea
aggtcttaaaattaataaaaaaattttatatttatcatcaaatgaacaaatctatgacaaaggtgattacaaacacttcatggctaaagaaattgaagaacaaccaacaacaataaaaaattgtattaatgaatatattgatagaataaatagttctattaatatttttaattttccatggaaaacgaatgaaatttcttcaataaccttaattggttgtggtactgcttaccactcatgtttgatggcaaaatactggtttgagcaactaacttcaataaatgtaagtgttgatatcgcatctgagtttagataccgtaaaaataggtttaataacgaaacactctatatttttgtttcacaatctggtgaaactgcagatacatatgctgctctagatttatgtaataaaaataaaatgaaaacctgtagcgttgttaatgtagtagaaagttctattgctagagagtctaaatttgtacttccaattcattgcggtccagaaattggagtagcatccactaaagcttttttaggacaaatgttggttttatacatcttttgtttaaaaattggaaaaatgagaaatgatataaacaaaagagtatatcttgaaaaaataaaatcactttttaatttatctaaattaactaaaaaatcattagagacagaaagcaaaatagaatcaatctgcaattcttttgtaaatattaaagggtcaatgtttttaggaagaggatattcttttcctatagctttagaaggagctttaaagttaaaagagctagcctacgttcatgcagagggttatcctg

SEQ ID NO: 246688 - DNA, 601 bp, Unknown
  Bacterial polypeptide expressing nucleotide sequence isolated from the Sargasso Sea
aacggcattaatgcttctagtttttattcttggtaaaaaatttgaaataactgatgatttagagaattctttatgtactcagcttaaaagtttgccagaaaaaataaaaagcactttagcgcttgatgatcagattgcaaaactcgcaaaagttttttctgataaggagcacgcgctgtttttaggaagaggatcgcactttcctattgcaagagaaggggctttaaaattaaaagaaatatcctatattcacgcagaagcttaccctgctggtgaactcaagcatggacctttagccatagttgatgaaaatatgccagttgttgcagtggcaccaaataatgttgtgttagagaaacttaagtctaacttggaagaagtaaaagctcggggtggcaaactttatatatttgcagataaaaaagctggctttaaaagtgatgaaatatctcaagtatttgagatagatgctccaatgaaccctgtggcaccaatattatttactataccattacagttattagcatatcactgcgctttaattaaaggcactaatgtcgatatgccaagaaatcttgcaaaatccgttaccgtggaataa

SEQ ID NO: 246689 - DNA, 156 bp, Unknown
  Bacterial polypeptide expressing nucleotide sequence isolated from the Sargasso Sea
aaacgcaggttatatccatgcctgcctgcggccaattcattgcaccgcttgtttacgtcataccaatgcaactactctcttactatgttgctatccataagaaaactaatattgatcagcctcgtaatttggcgaagtcagtaacagtggagtaac

SEQ ID NO: 246690 - DNA, 364 bp, Unknown
  Bacterial polypeptide expressing nucleotide sequence isolated from the Sargasso Sea
atttcctacatacattgcggaagcctatccagccggagaactgaaacatggtccattggctcttgtcgattcagaaatgcctgttgttgcagttgctcctaatgatgatctgcttgcaaaacttcaatcaaacctagaagaagttagagcgcgaggaggaaagctatatgtatttggacactcagcagctcatcaggaagatgaatccataactaagtttattgaactgcctgaagtccctgagctgattgctcctctaatttactcgataccattacagttacttgcttatcatgttgccatccttaaaggcactgacattgatcagccgagaaacctcgctaagtctgtaacggttgaatag

SEQ ID NO: 246691 - DNA, 736 bp, Unknown
  Bacterial polypeptide expressing nucleotide sequence isolated from the Sargasso Sea
aatgtgcggaatcgttggttatactggtcacaatgcagccagtgagataataatagactcgctcaaaaagttagagtatagaggatatgattcggcaggtctcacacttcacggtaaaaaattggttacaactaagaaggaaggacctattgcaaatttagaagaagttttagagaaatcaagtgctacaatgggtatcggtcacacacgttgggctacacatggcataccttcagatgctaatgcacatcctcatatggatgaatctgagaaaatcgcggtagttcataatggaacaatagataattatctaacgattagggagcaattagaggcagagggccataaatttttgagcgattctgacactgaagtcttgcccattttattgtccaataattacaacggcaatcttgtcgaggcaatgtctaagatattggatcaaattgaaggtatattcacaatagcagcaattcatttggataatccggatgaaatagtgtcggtcaggtatgaaacacctttagttataggtcttggaaatgatgaaaactacgttgcaagtgatgtatatgcaatactaaagtatacccagcagatcatatatcccaaagattatgaaatagtaagagtaacatctgaatctatagaagtatttgatagatcattgagcaaattagattatgaaattgagactgtggaagaatatactgaggtcgctgaaaaaggaggttcg

SEQ ID NO: 246692 - DNA, 925 bp, Unknown
  Bacterial polypeptide expressing nucleotide sequence isolated from the Sargasso Sea
aaagatataaatatttttaattttccttttaaggaaaaagaaattaactctataacattgataggttgtggtacggcttaccattcatgtctaataacgaaatattggtttgaacaattaacctcaattgacgtcaacatcgatatagcatcagaatttcgttatagaaaaaataagtttaagaaagattgtctttatgtttttgtttctcaatcaggcgagactgccgatacttatgcagcattagatctttgtaacaaaaataaaatgaaaacttgttcagttgtaaatgttattgaaagttcaattgcaagagactccaaatttgttttgccaattcattgtggtccagaaattggcgttgcatctacaaaagcttttttaggacaaatgcttgttttgtatatactttgcttaaaattggctcaaaaacgaaaagatataaataaaaaagattatttaattaagattaaaaatttactaaatctagcggaacttgttaaacattctttagcaactgaagacaaaattcaatcaatatgcaattcgttcgtagatgcaaaaggttcaatgtttttgggaagaggttattcatttccaattgcattagagggagcacttaaattaaaagaattagcttatgttcatgctgagggttatcctgcaggtgaaatgaagcatggaccgttagcactcatcgaagatggaatgcctgtcgttgtgattgccccaagagatcaacactacaaaaaaaccatttcaaacatgcaagaagttatagctaggggagcaaaagttttacttattacaaacaaaagcaaagatgaagtatattctgagaacatttgggagactattgaagttgaaaacacagcagatgatttgtttccctttttaattactatccctttacaaaaacttgcct

SEQ ID NO: 246693 - DNA, 822 bp, Unknown
  Bacterial polypeptide expressing nucleotide sequence isolated from the Sargasso Sea
atactttgactcaatatatttgacaaaagaaaagctagagggagcatatgcaatagctattttagatatagaagatgaaaataatatttatgtggcaagatgcaaatctccgctacttgtcggccaaggtgaaaatgagaattttgccgcatcagaccccttagcaattggaaaactggcaaatgaatttatttttctagaagatgaggatgttgcagttatttcaaaaaatagaattcaaatatatgatgaacaaaaacaacctatacacagagaagtaacggaaatagactctgaatatcaaaccatttcaaagggtgaatacactcactttatggaaaaagaaatatatgaacaaccccaagcaattctaaatactcttgatggcagagtggggggtgacgatgttagagatgatatattcggtattggatcttcagaattattcaaaaaggtaaaacgcatacaaattgttgcctgcggaacaagtttacatgcaggaagagtagctgctaactggttatcagcaattgcaggcatcccaactcaggtagattatgcatcagagtatagatatagaaatccacatgtagacgaggattcccttttagttacaatctcacaatctggagagacagctgatactattgcagctttgagatacgcaaaagagaaagattacctatcaactatcaccatatgcaatgtcccaaccagttctcttgcaagagagtctgatttttttctctacacaaatgctggtcccgaagtcggagttgcatccacaaaagctttttcaacacagttaacaggtttaatgtt

SEQ ID NO: 246694 - DNA, 754 bp, Unknown
  Bacterial polypeptide expressing nucleotide sequence isolated from the Sargasso Sea
tgaaaattatctgggttcggactcatatgctttaaaatcaatgactaataaaatttcttatctagatgacggagagttttgttttgttaaaaaggatcacatagaattttttgatagtgaagggacaaaaattaataaaaaagtaatgaatttatctaaggatgaacttaactacgataaaggtgattataagtactttatggaaaaagagatagatgaacaaccctctaccataaataattgtataaatgagtatgttgataagtttaataatcaaatcaatatctacaattttccttggaaattgagttgtattaaatctgtaatgttaattggctgtggcactgcctttcactcttgcttaattgcaaaatattggatggaacaaaatacaaatttagatgtaaatgttgatatagcctctgaatttagataccggaaagttaaatttaaaaaggattgtctgtatatttttgtttctcaatcaggagaaactgctgatacttttgcagcattagatttatgtaaaaaaaataaaatgaaaacttgcgcagtggttaatgttatagagagttctattgcaagagaagctgatttagtattacctatctattgtggacaagaaattggagtagcttcaactaaagcatttatgggtcaaatgctagttttatatattttatcgacaaaaatttcttttgaccaaaaatgcattgataaaaaagaatataagctaaaggtaaaaaatatatta

SEQ ID NO: 246695 - DNA, 868 bp, Unknown
  Bacterial polypeptide expressing nucleotide sequence isolated from the Sargasso Sea
atgtgtggtatagtagcatataaaggacataaaaattgttatccaatattgttaaatggattgcataagctagagtatagaggttatgattctgctggcgtagcttgtttaaccgaagatggaaaaattgtagttacaaaaagaagcggaaaagtaaaacagcttgaagatagattaaaaaagagtaatttaatagaaagttgtaatggttccggtattgcacacactagatgggccactcatggaaagccaaatcaactaaatgcccacccacataaagatcaatctggaaatattgtattagttcataatggaattattgaaaattatgatccaattaaaaaatttctaaaatcaaagaatgttaagtttaaatctgaaactgatacagaggttttagttcaattaatcggatacttttttaataaagggaaaatgaattttgagcaatcagttagagctgccttgcagagggtagatggagcatatgcaattgtagttttaaatagaaaagagccagataccatgattgcagcaagaaaaggtagccctttagttcttggattaaaagataaagagttttttattggaagtgatatttccccaattataaaacatacccaacagattatatatcttgaagatgctcaaatggctattgttcaaggagataaatataaaataacatcaataaataaggatgttagcttgccaacaaaggttgaaaaaattgactataaaattgatgattatgacaagggaaagtttaaatactttatgcataaagaaattcatgaacaagttgatacaattcgaaatacagttaccggaagaactaacagagatggtattctgcttcatggttgat

SEQ ID NO: 246696 - DNA, 857 bp, Unknown
  Bacterial polypeptide expressing nucleotide sequence isolated from the Sargasso Sea
tgccgttggatactcaaataatgaaaattatttaggttccgactcatatgcgcttaaagctatgacaaataaaatttcttatttagatgacggagagatatgcaagataacaaaagatagtgttgaattttttgatgtttctaaaaataaaattaataaaaaaatattagttttatctgaagataaaaatgaagcaaagttgggtgattataaaaattttatgtctaaagaaatttttgagcaaccaactactattaaaaattgtttgaacgaatatatagacaaaataagaaatgatataaatctttatgattttcctattgacccaaaaaaaattaataaaatattccttgttggatgtggtaccgcttatcattcatgccaagttgctaaatattggatagaagaattaacagatttaaacgtagaaactgaagtggcttcagaatttagatatagaaagataagatttaaccctaatactttatatatatttgtgtctcaatctggagaaacagcagatacagcagcagctttagaaatagctaaaaaaaataaaatgaaaacttgttctgttattaatgtagtagaaagctcaatagctaggaattctgattgggttgttcctattcatgcgggcccagaaataggcgtagcatctacaaaagcttttataggtcaaatgttagttttgtatataatgagtttaaagatatctaaaataagagggaatattgataataaaaattatattgaaaaaattaaaaatcttaaaaatctaccccaaggaattgagaattcattgaagaccgaggaattaattcaaatatttgctaaagactttttatcagccaaag

SEQ ID NO: 246697 - DNA, 307 bp, Unknown
  Bacterial polypeptide expressing nucleotide sequence isolated from the Sargasso Sea
ccaatagctttattagataaaaaagtacctgtaatttctattgcctccccaggtgaagtttttgataaagttatcagtaatgctcaagaagcaaaagctagagattcatatttgatagggattgctcctgaatgtaatggaactgaaatctttgattatttaatgaaagttccttcctctaatgaattgatttcacctctacttaatatattgccattacaattattgagttaccatatcgcagctcacaggggacttgatgtggatcaaccaagaaatttagctaaaagtgtaactgtggaataat

SEQ ID NO: 246698 - DNA, 949 bp, Unknown
  Bacterial polypeptide expressing nucleotide sequence isolated from the Sargasso Sea
tattctttaggtaattattgtaatgaagttacctatttaaaagatggtgacatcgcaatcataaaaaacgatacttttgagatatttgataatcaaaatgaatttataaatagaaaatctcaaataatagataagaccgttaccttagcagaaaaaggtgtatttaagcactttatgtcaaaagaaattcatgaacagccaagtgttattcaagattctatcagtcattatattaataatgaagacttaacagtgaatttaccaaaattcccatttaatattactaatttaaaaaatattactttagttgcatgcggaagctcatattattctggattagttgcccgtgaatggtttgagaaacttgctcgcgtgaaggttgatgttgaaattgcttctgagtttaggtatcgagaagctccgatggattcaagcggattaaccgtatttatttctcagtcaggtgaaacagctgatactttagcagcgttgaggcattgtaaaaaacttaatcaaaaaactatttcaatagtgaatgttccaaattcttctatgtgcagaaattctgattcatctcttaaaatttttgccggacctgagataggtgttgcatcgaccaaggcatttacctgccaacttgtagttttagcatctttagctattcatattggaagaactaatggtaacctatcagatgatgatgaaaataattatgtaaaatcattacttgatgttccaagattaatttctaatgttttggatcaggaagaagaccttattaaaattgtaaaagaattaaatccaattaaaaatgctttatatcttggaagagggcagatgtatcctgttgctcttgagggggcattaaaactaaaggaaatttcttatattcatgcggagggttatcctgctggtgaaatgaagcatggtccaatagctcttttggaaa

SEQ ID NO: 246699 - DNA, 937 bp, Unknown
  Bacterial polypeptide expressing nucleotide sequence isolated from the Sargasso Sea
aaaactaatataaaatttaatgaattttacaatattattttagtagcttgtggaacagcttatcattcttgtatggtagcaaaatattggttagaagaaatgactgattttaatgtgtcaattgatattgcttctgaatatagatatcgcagaagtaaagttgataaaaattctcttgcaatagttgtatcacagtctggtgaaaccatggacacattaaaatgcttaaataaatttaaaaaaaataatattcccacaatatctgtagtaaatgttataaatagttcaattgcaagattaagtgatttcatcttacctactttagctggtcctgaaattggtgttgcttcaacaaaagcatttacttcccagttatctgtattggcactatttgtacttaaccttcaacaagaatatagaaatattaataaaatcttttttaattctattttcaatattcatagttctgttaaagaaattctaagaaaagaaaaagagtttaagaaaatagctgaaaaattggttaatactaaaagcattttttatattggtagaggcgttatgtatcctattgcattagagggagctttaaagttaaaagaaatcacttataaacattgtgaaggatatgctgcaggagaactaaagcatggtccgttagctttaattgaaaataatgtgcctgttatagttttagcaccttgtgatgaaaattattctaaattactctccaatatacaggagattaaagctcgaggtggcagaattattatgattacagataaggaaggtgcaaaaaaaggaaaaaaatattgtgatcaagtaacaataatacctaaaacaaattttttaacctcaccaataatatatactctacctattcagttaattgcttattatttagcagtttctcttgggactgatgttgatcaaccaa

SEQ ID NO: 246700 - DNA, 472 bp, Unknown
  Bacterial polypeptide expressing nucleotide sequence isolated from the Sargasso Sea
acatatgcagctcttgaaaaatgtaaaaaaaggggattaaaaacttgcggtatagtaaatgttgttgaaagttctatagcaagattgtcagattttgttttaccaatacatgctggtcccgaaataggagttgcctccacaaaagcgtttattggtcaaatgatggtattactattgttaactttaaaaatttcaaaagagagaaatgatctgaatgaaaataactataaaaaattaataagtgaaattaaaatcttgccaagtttaatcaaaaaaacattgtcgaagcaaaaggagattcaagaaatagcaagagattttattaatgcaaaaggaacaatgtatctaggtagaggatattcgtatccaattgctatggaaggcgcccttaaattgaaagaactttcatatattcatgcagaaggatatgctgctggtgagatgaaacacgggccattagcattaattgaag

SEQ ID NO: 246701 - DNA, 388 bp, Unknown
  Bacterial polypeptide expressing nucleotide sequence isolated from the Sargasso Sea
atgtgtggaataattggtattacaagcgctaaaccagtttcatcatcaataataaattccttaaagaaacttgaatatagaggttacgactctgctggaatagcaacattgttagatggtaaaattaatgaggtaaaatgcgaaggtagagttaaagccttagaaacaaatatttctaaaattaaaatgcttggaacggttggcattggtcatgttagatgggcaacacacggggttcccagtactttaaacgcacatcctcactcatctgaaagtgtatctgttgtacataatggaattattgaaaattcaactttactaaaaaaatttctggttgaaaaaggccacaaatttaaatcacaaactgacacagaggtgattgttcacc

SEQ ID NO: 246702 - DNA, 833 bp, Unknown
  Bacterial polypeptide expressing nucleotide sequence isolated from the Sargasso Sea
tcttgagcaggcttttggtatagaaagtaagcaggtattcgaccaggcggatgcgatcaccatcgtcgcatgcggcactagcttttatgcggcttcagtggcgcgttattggatagaagacttggttggcattccgtgtaatgttgagatagctagtgagtttaggtaccgaaagtcggtggttttgccgaacagcttatttgtcacgataagtcaatccggagagactgccgacactctagcggctctgaggctttccaaggctataggtttttttgcaactttaactatttgtaatgtatctacatcctcaatggttagagaaagcgatttatgccttttgcttcagataggcagtgagatcggtgtcgcgtcaacgaaggctttcagtgcccaattagtcaatctgctccttttagccattcttctaggaaggagaaagggcctaaaacaagagagagaaaaagaacttgtagagagcatccattcacttccactccttctgaccaaggttttaggattgaatgaagacatagcgagtgttgctaggcggtttgttgaaaagactaacgctttattccttggaaggggggttatgtatcctgttgctttagagggtgcattgaaattaaaggaaatttcttatgtacatgcagaaggttacgcggcaggtgagctaaagcatgggccactcgccttggtggacaaaaatatgcctattgttgcgatagcgcctcgcgacgagctaatcgaaaaacttaaatcaaacttgaaggaagttgaagcgaggggtggggagctaatcgtatttgctgaggatgaaaaaagctttg

SEQ ID NO: 246703 - DNA, 328 bp, Unknown
  Bacterial polypeptide expressing nucleotide sequence isolated from the Sargasso Sea
aatgaaacatggacctttagcattaatagaagaaggtatgcctgtagtggtattagctccaagagacagttattataaaaaaactatttctaatatgcaggaagtagttgcaagaggtgcaaaagttttattaataacaaataaaagtacagatgaggttttatctgaaaatatttgggaaacaattgaagtcgaaagtacgaatgatgatttattaccttttcttttaacaattcctcttcaaaaacttgcttattattcagctcttaaaaaaggttatgatatagataaaccaagaaatttggcaaaatctgttactgttgaataa

SEQ ID NO: 246704 - DNA, 637 bp, Unknown
  Bacterial polypeptide expressing nucleotide sequence isolated from the Sargasso Sea
atgttggaaaaattacttgttcaaggccttcataaaatggaataccgcggttacgattctgcaggtattgctcttcatcaaacagaccaaatcgctcatcttagaaccctaggaaaagtaaaacttcttgaagaaaaaatgatagctgaaaagccaaaaagcaagcttggtattgctcacacaaggtgggcaactcatggagaaccgtcagaagaaaatgcacatccacatatgtcaaatgaaagagtatatattgttcacaatggaataattgagaattatttagatcttagagattttttaaaaaaagaaggttattcgttttcatctcaaacagactctgagctaatagcccatcttcttgaatattttcttaataaaggaaacagcatgttggattcgatgtatctaaccaaagaaaagcttaatggtgcatatgcaatagcagccatagataaagaagatgatcaaaatattattattgctagaagcaaatctccacttctaattggaattggtatggatgagtttttggctgcatcagaccctttagcgatcggccaactgacaaatgagtttatttttttagaagaccgagacgtagcagaattatcatctgagagatatactatttttg

SEQ ID NO: 246705 - DNA, 929 bp, Unknown
  Bacterial polypeptide expressing nucleotide sequence isolated from the Sargasso Sea
ttcggtgtattgctactattctgttgttaattctattctagaaggtctaacaaaacttgaatacagaggctatgattcatcaggaatttcaatactagataaaaataaaaaacttaaaacaattagatctaaagggaaattaataaacctaaaaaataaattaaaaaaaattaacgttaatggaaaaattggtatcggtcatacaagatgggcaactcatggtgttccctcaactttaaatgcacaccctcatacctctgataaagtttctattgttcataatggaattatagaaaactactcaatattgaaaaaagaacttcaaaaaaaaggttacaaatttaaatcgcaaactgatagtgaagtgattgcgcatttacttgactcagaattaacttttgaggaacctgttatagcaataagaaaaacacttgctaaattagaaggagctttcgctatagcaattatttttaaagatcttaagttacttgctggggcaaggaaaggaagccctcttgcaattggtatttctgatgaagcgacatttattggctctgattctgtagctttagcaccattcacaaaaaaaattatttttttagaggagggtgatagtgtgattattaaagataattcctttgatatttttaatgaaaattttaggaaaatcaaaaggacaatatcttattcatcttattcaaaaaataattttgacaagggaaattttaaacattttatggaaaaggaaatttttgagcaacctcatattattggtgactcactttcaaggtttcttgatcctataaataaaactataaatatacctcaactcaaggttgattgggcgaaaatatcaaaaataaattttatagcatgtggtacttcatattttgcatgccaagttgcttgttactggtttgaaaaaatgg

SEQ ID NO: 246706 - DNA, 949 bp, Unknown
  Bacterial polypeptide expressing nucleotide sequence isolated from the Sargasso Sea
cttgacagtgagccagttcaaagagagaaaaccattatagacacaagcgttaaagaggcatccaaagacggttacaaacacttcatggaaaaagagatatacgaacaaccaaaagccatagcaaacgccattgagggaagaacaacagacggggaggttttagacaatatatttggattaggatcgtctgaatcattcaaaggggtaaaaaggattcagtttgtagcctgtgggacaagcctgcatgctgcaaaaacagctagaaaatggtttgaagagctttgtgagaccccatgttacatagactttgcaagcgaatacagataccggaaccctttggttgaagaggatactttatttgtgtgtatttcgcagtcaggagagaccgctgatactatggcggcgttgaactatgcaaaagaagaaaaatatttaggtattgtgaccatttgcaatgtacccacaagcaccatggcaagagagtctgattggaaaatatttacaaacgcaggccctgaaatcggcgttgcctcaaccaaagcatttacaacacagcttgcagcactaatgctgttggcttgttcaatatcaaaaagcaaaggcataaatggggataaaagggcagaagccattaaggatcttgttaatacaccagcgcttgtgaaagaagcgtttgggctaaaaaaacacatagacgatattgttgagaaaattgcagataaaaagaatgcattgtatttaggcagaggtgtttacttctcaattgcacaagagggagcattgaaattcaaggagattacatatattcatgctgaggcatacccagcaggtgagttaaaacatgggccacttgcacttgttgatgagatgacacccgttgtagcccttgcgccagaagatgagctcgtagaaaagctcgtctcaaatctcgaagaagtcaaatcaagag

SEQ ID NO: 246707 - DNA, 538 bp, Unknown
  Bacterial polypeptide expressing nucleotide sequence isolated from the Sargasso Sea
atgtgtggaataataggagtagcttccagcaaaccctcagtagataaactgctaatagggcttttacgtcaggaatacagaggttatgactcagctggtcttgctatcttcgatgaaacagagcaaatacaggtatttaagagtactggcaaggtagctgagctgcaaaattctattcaagaaaatcctgtaaacggcaatacgggcattgctcacaccagatgggcaactcacggccttccaaccaagacaaacgcgcatcctcaccattctaataataatattttcgttattcataatgggattattgaaaaccatcaagaaattcgtacaacgcttaaagccttaggttatgtttttgaatctgaaacagatacagaagtcatagctcatttgattcatgcaaaaatgaatgaaaacaaattatctctgatcgaagctttgagggctgccgtgaaagatcttaagggagcttatgcaataggtgcagtttgtgagagcgaaccaggcattttggcttcggctagaaaaggaagtc

SEQ ID NO: 246708 - DNA, 124 bp, Unknown
  Bacterial polypeptide expressing nucleotide sequence isolated from the Sargasso Sea
ttagcatttacgccattcatatttaccgttccattgcaattattgtcttatcacgtagcattatttaaaaaatgcgatatagataagccaagaaacttagcaaaatctgtaactgttgaataaa

SEQ ID NO: 246709 - DNA, 886 bp, Unknown
  Bacterial polypeptide expressing nucleotide sequence isolated from the Sargasso Sea
ggacccaacgaaaattatctaggttcagattcttatgcattaaagtcaatgacaaataaaatcacatatcttgacgataatgaattttgtataattaaaaaagaccaagtttttttttttaatgaatatggaaagaagataaataaaaaaattctagaactttcatcaaatgaggctagttatgaaaaaggtgattttaagcattttatggcaaaggaaattgaagagcaaccaacaacagttaaaactggaataaaagaatatgtagataaaacgaattcagaaattaatatctataatttcccatggaaaattagtgaaataaattcaattacattaataggttgtggaaccgcttatcattcctgtctaatggctaaatattggtttgaagagttaactcaacttaatgtctctatagatattgcatcagagtttaggtatagaaaaaatagatttaaaaaagatactttatatatatttgtctctcaatctggagaaacagcagatacttacgcagcactagatctttgtaacaaaaacaatatgaaaacttgtgctgtagtaaatgtaattgaaagttcgattgcaagagatgcaaattttgtattaccaattcattgcggcccagaaattggtgttgcatctacaaaagcttttttagggcaaatactaattttatatattttagctttaagacttgggtctttgagaaatgaaattaataaagaaaattataaagaaaagattaaagacttacagaagttaccaagtttaattgaaaaatctttattaatagataatgatattcaggctatatcctctacctttaatgaggcaaaaggctcgatgtttttaggaagaaggtttttcatacccccatagc

SEQ ID NO: 246710 - DNA, 851 bp, Unknown
  Bacterial polypeptide expressing nucleotide sequence isolated from the Sargasso Sea
gatgaatttatttaaatcaattgtgctgattggttgtggaacggcctatcattcttgtttagttgcaaagtattggattgagcaaaatacaagtcttgacgtaagtattgatatagcttcagaatttagataccgaaaagttagattcaaaaatgattgtctgtatgtttttgtttcgcaatctggtgaaactgctgacacttatgcagccttggaattatgtaaaaaaaataaaatgaaaacatgtgcagtcgtaaatgtggttgaaagttctatagcaagagaggctgatttagttttgcctatttattgcggtcaagaaattggtgttgcatcaacgaaagcatttcttggtcaaatgttagtattatatatattgtctataaaaatttcctttgatcaaaaatttattaataagcatgagtatcagtctaaaattaaaaatttacttttattgtctaattcagccaaaaaaacattaaaactagatcacaaaattttgaatattggtaaagtttttgctcatgccaaaggttgtatgtttttgggaagaggatattcattccctattgcattagagggagctttgaaacttaaagaattagcctatgtccacgctgagggttatccggcaggtgaaatgaaacatggaccattagctttgatagaagagggtatgcctgtagttgtcatagctccaagagacgatcattataaaaaaacgatgtctaatatgcaggaggtcattgcaagaggagcaaaggttttattgattactactaagagcaaggatgaaattacatcagaaaacatttgggaaattatcgaagtagatcaacttaataacgaat

SEQ ID NO: 246711 - DNA, 505 bp, Unknown
  Bacterial polypeptide expressing nucleotide sequence isolated from the Sargasso Sea
atgtgtggaatcatagctgctgcctctacccgtaatgttggaaaactcttggttcaaggtctccatagaatggagtaccgaggctatgactcagcaggtattgctctgcatcaattaaatggcgttgcacacttaagaacactgggcaaagttcagcttcttgaagataagatgattgaagaaaaacctagaagtaaacttggcatagctcacacgcgttgggcaacgcatggagagccatcggaaactaatgcccacccacacaaatcaaatgatgaagtatttattgttcacaatggcattattgaaaatcatttggagttaaaagctgaattagaaaaagaaggttattcttttgcatcacaaacagactcagaaattattgcgcatctactagactttaacttaaagcaaggcatgacgatgatagaggcaatgtttgcttctaaagaaaagcttgatggtgcatatgcaatcgctgcgatgcatagggatgagaaagcaa

SEQ ID NO: 246712 - DNA, 802 bp, Unknown
  Bacterial polypeptide expressing nucleotide sequence isolated from the Sargasso Sea
atgtgtggaattatagctgctgcctcaaatcgtaacgttggaaagttgcttgttcaaggacttcataaaatggaataccgtggatatgattctgctggaattgctcttcatcaaacagaccaaattgctcatcttagaaccttaggaaaagtaaagctacttgaagaaaaaatgattgctgaaaagccaaaaagtaagcttggcattgctcacacaagatgggctactcacggagaaccatcagaagaaaatgcacatccacatatgtcaaacgaaagggtttatattgttcacaacggaataattgagaattatctagaccttaaagattttttaaaaaaggaaggttattctttttcatctcaaacagactctgaattaatagctcaccttcttgaatattttcttaataaaggaaacaacatgttggattcgatgtatttaaccaaagaaaagcttgatggtgcatatgcaatagcagccatagacaaagaagatgatcaaaatattattattgctagaagtaaatctccacttttaatagggattggaatggatgaatttttggctgcttcagatcctctagcaattggccagctgacaaacgagtttatttttttagaagacggagacgttgcagaattatcatctgagagttataccatttttgatgagtcaaagaagaaagttgaaagagagatttctcaaatagatatttcaagtcaagctacatctaaaggtgaatatcggcacttcatggaaaaagaaatttatgaacagccagaagctatcttaagactat

SEQ ID NO: 246713 - DNA, 472 bp, Unknown
  Bacterial polypeptide expressing nucleotide sequence isolated from the Sargasso Sea
atgtgtggaatagtaggaatagttagcaataaatcagtttcatcatcaataataaatgctttaaaaaaattagagtatcgaggttatgactccgccggcatttctactattaacaataaaggacaaatcaatgaacaaaaatgttcgggtagagtagaaaatttagaaaaaattctttttcaaaatccttcaaatggggagctaggtattggtcatgttcgttgggccactcatggcataccaaacaaaattaatgcacatcctcattcttcagatgtagtttcagttgttcataatggtataatcgaaaattctgataagttaagaaaagattatgaaaataaaggttatacttttaaatctcaaacagatacagaagttataactgttatcttaacagattttttaaaaacacataatttaatagattgtattcacaaaactttagaaaaattagaaggtagttttgctt

SEQ ID NO: 246714 - DNA, 880 bp, Unknown
  Bacterial polypeptide expressing nucleotide sequence isolated from the Sargasso Sea
tgcttggttgcaaaatattattttgaacaacatgcaagactgcccgttgagtgcgatatggcgtccgagtttagataccgcgatcctgttcttgataataaggcattatatatatttgtttctcaatcaggtgaaaccgcagatacaaaagcggcattagattattgcaaagacgccaaggttagaactctcagtattgtaaatgttatgaatagctcaattgcacgcgaaagtgattattgtttatatactaaagcgggagcagaaattggcgtagcttccacaaaagcatttacggcacaaatatcagttctgttatcaatggcgctgcattgcggcaccaaaaataacaatgttacaattgagcagaatagagagatttgcaaagaaatcatgcaggctcctcaaattctagagaaggcaataaaaagatcttacgaattaaaagagactgcaaaagctataatagattctaaaggtgtaatgtatttgggaagaggcactgcttttcccctagcactagaaggcgcactcaaatttaaagaaatctcctatatacatgcggaaggttatccagctggagagatgaaacatggtccacttgccttgattgagaaagatttgccagtagtatgtattgttccaccaggccctctattccataaaacagtgtcaaatattcaagaggttattgctcgaggtggtagaatattaatgattacagatgatgaaagccttgaatccagttcagaaaatatatggaagatttttagattgccaaaaacaccaaaatctattgaagctattgtgtattctgttccaattcatatgttggcatattacacagctgttgaactaggcaatgatgtagatcaacccc

SEQ ID NO: 246715 - DNA, 280 bp, Unknown
  Bacterial polypeptide expressing nucleotide sequence isolated from the Sargasso Sea
gctggacccagtttcagttgtacataatggtattatagaaaattcaacaatattaaaaaaaattttagaaaaaaaaggttacaagtttaaatctcagacagatacagaagtaattgcacatttagttactgattatttaaaaaaagataatttaaaaaatacaattattaaagttttaaaaaaattacatggaagttttgcattaggaattatatttaaagatcatccagatttaattgtgggagctagaagaggatcacctttggctgttggatatggt

SEQ ID NO: 246716 - DNA, 378 bp, Unknown
  Bacterial polypeptide expressing nucleotide sequence isolated from the Sargasso Sea
tatgtgtggaataattggaatcaacagtagtagacctgtctcatcaacaataattagctctttgaaaaaattagaatacagaggatatgactcagctggtatagcaacgctttcaaacaatgaaattaacgaagttaaatctgaaggaagagttgataatttagaaaataatcttttagttcaaaaaatggaaggaaccattggtataggacatgttcgttgggctacacatggtttaccaaacagtattaatgctcacccacactcttcgcaaaatgtctctgtagttcataatggaataattgaaaattctacgttattaaaaaaatttttggtaagcaagggtcataaatttaagtcacaaactgatactgaagt

SEQ ID NO: 246717 - DNA, 238 bp, Unknown
  Bacterial polypeptide expressing nucleotide sequence isolated from the Sargasso Sea
atcaaacgttgaagaagtgcgcgctcgtggcggtttaatgtatgtatttgccgacaaagacgctgaatttgagtcagacgacaccatgaaggttatcccagtaccacattgcgatgaattcatggcaccactgatttacaccatcccattgcagttattgtcataccacgtggcattaattaaaggtacggatgtggatcagccacgtaacctagcaaaatcggtgacggttgagtag

SEQ ID NO: 246718 - DNA, 853 bp, Unknown
  Bacterial polypeptide expressing nucleotide sequence isolated from the Sargasso Sea
tatgactaataaaatatcttatctcgatgatggtgatttttgtattctattcaaagagaaagttgaattttataattcagataaaaaaaaaattaataaagaaattctcgaattaccttatgaagacaatactgcagaaaaaggtgattatagagattttatgtccaaagagatcaatgaacaatcatacacaacaaaaaaatgtattaatgaatatttaaatacatctaaaaatgaaattaatatttttaacttacccctagaggcaatgaagataagaaaaattagattaattggctgcggtacagcttatcattcgtgtttaatggctaaatattggatagaggaatttacatcgttagatgttgatgcagatattgcatcagaatttagatatagaaaaataaaattagatcctaatgatctttatatttttgtttctcaatctggagaaactgcagacacacttgctgctttagaaaaatgcaaaaaaaataatctaaaaacatgtggaattgtgaatgttttagaaagctcaatagcaagaaactctgaccttgttttgcctatacatgcaggcccagagataggagttgcttctacaaaggcatttataggacaattaacagttctatatttattaactctaaaaatatcaaatgatagaagtgacatatcctataaagaatactctaaattaattttagatttaagaaatattcctgacttaattgaagaaacgcttaataaacaaaaagatattcaagaaatagcaagggattttataaaagcaaaaggaactatgtatttaggtagaggtttatcttttcctatagcgatggaaggcgctctt

SEQ ID NO: 246719 - DNA, 862 bp, Unknown
  Bacterial polypeptide expressing nucleotide sequence isolated from the Sargasso Sea
aataatagagaattaccaacagttgaaggaagagtttgccaacgacggcgttacaatgcaaacagagactgatacagaggttgtggcgcatctagctaacgcatatttgcaagctgggatgcaaccaaaagatatgatgcaggcgttactctcgaaaatacaaggagcatttgcgttacttattatgatggctcagcatccggacacattactggctgctcgaaaatattccccactggccattgcctacggggatgacgaaatgtttttggggtcagacgctttagcgctggcacatttatccagaaaaattagttacttagaagatggcgattgggcgatcattacgaaagacgaagctaagatttttaatctaaagaatgagatcgtagaaagaccttcgaaaattacagatgcatcaaataaaacacctgataaaggaaaatacgctcattacatggagaaagagattaatgagcaaccagaagtcatcgggtatacatttgcatcatattgtagcccaacaaccggaaaaattactttacctaaatttaaattttgcccttcagagttgccaaaactcacgatagttgccgctggaactagtttttatgctggtatggtggccaaatattggtttgaaaatttggctagaattccaaccgaggtggatatcgcttccgagtttcgatatcggaatcccgtactaattaaaaacggggccgcactttttatttctcaatcgggcgaaagcttggatactttaatggcgcaacgttatgccaaagacaatggacaaaatattataagtctagttaatgttcccgaaagcacgatagcacgtgagtcagatactgtacta

SEQ ID NO: 246720 - DNA, 977 bp, Unknown
  Bacterial polypeptide expressing nucleotide sequence isolated from the Sargasso Sea
agatattgatgagattgaattttctcttgagcaaatagagaaaggtaattataaatatttcatgttaaaggaaatatttgaacaaccaaactctgttaaagattcaattagaggtagaattttagaagataatactgtgaaactaggtggaatttatgagaagactcaagatgttttgaatgcaaaagatatatatattactgcatgtggtacttcttggcatgcagctcaaataggtagctatatattagaaacagtattgtcgaaacctattaaggtagaatatgcatcggagtttagatataggaataaacatttaaattctgattcattggttatatcaattagtcaatctggtgaaacagcagatactttatctgctattagaaaagcaaaagaacatggagccttaactctaggtatagtaaatgtggtaggcagtagtatagctagagaaactgattgtggaatttatatgcatgcaggtccagaaattggtgttgcatcaacaaaagcatttacttcacaagttgttattttatcattattaggtaattatttagcccaacaaaaaggaattgaggattcatataaaataatttcagatatacagaaaattccaattcttatggaagaattattaaaattatctgatcctatatatgaaatttcaaaacagtattctaatgcatctaattttttatacttaggtagaggttatcaatttccagtagcattagaaggagctttgaaattaaaagaaatatcatatatccatgcagaaggttatcctgcagctgagatgaagcatggcccaattgctttaattgataataaaatgcctgtagtagttattgtgactaaaaaagggtatgataagatactttctaatatccaagaggttaaatctagaggtggaaaaataattactattagtactgaagcaactaatgatctaaaagaattgtctgaacatt

SEQ ID NO: 246721 - DNA, 325 bp, Unknown
  Bacterial polypeptide expressing nucleotide sequence isolated from the Sargasso Sea
gaaacatggtcctttagctttaatagaagacggtattccagttgttgtattagcaccaagagatagttattataaaaaaactatttcaaatatgcaggaagttatagctagaggtgctaaagttttattaattactaacaaaagcaaagatgaaattgtttcagaaaatatatgggaaaaaatcgaagttgaaaataccagttatgatttaatgccatttttattaaccattcctttgcaaaaattagcgtatcattcagctttaaaaaaaggttatgatatagataagccacggaatttggccaaatcagtcactgttgaataa

SEQ ID NO: 246722 - DNA, 466 bp, Unknown
  Bacterial polypeptide expressing nucleotide sequence isolated from the Sargasso Sea
attgatgagatagttgagaaaatcgctgacaaaaagaatgctttgtatttgggtagaggcgtttacttctcaattgcacaagagggcgcactaaagttcaaagagattacatatattcatgctgaggcatacccagcgggagagctaaagcacggaccgcttgccctggttgatgagatgacacctgttgtggcccttgcgccggaagacgaactcgtggaaaaactcttgtctaacctcgaagaagttaagtcaagaggaggaactctttatgtctttggaaatgcaacctcaaagatcaaaattgaaaaaggcaaattcatgaatatgcccgattgtggttactacaatgcaccaattgtttatacgatccccttgcaaattttggcatatgaagttgcatgctcaataggaacagacctagaccaacctagaaatttagcaaaatcagtgactgttgaatgag

SEQ ID NO: 246723 - DNA, 612 bp, Unknown
  Bacterial polypeptide expressing nucleotide sequence isolated from the Sargasso Sea
tatgtgcggaattgtaggagtagcctcaaataagccttcagttgataaactggtggttggattactgcgccaagaataccgtggatacgattctgctggcttggctatttttgatgaatctgaagaaataaaagtttataaaagcacaggcaaggtctctgaattacaaagctcaatagaccaaaaccccgtcaatggaaacaccggcatagcacacaccagatgggcaactcatggcttgcctactaccgagaatgcacacccacaccattctaataaagaaatttttgtgattcacaatggcatcattgaaaatcatcaagaaataagaactacactaaaagcgctcggttatagttttgaatctgaaactgacacagaagtcatagctcacttaattcatgcaaagatgtatcaaaacaatacttccttggtcgagtcgttaaaagctgctgtaaaagatctaaggggagcatatgccatcggtgctatgtcgtcaaaagagcccggtcttgtggctgccgccagaaaaggaagcccactggtggtaggccatggccatggagaaaacttcatagcttctgatcaattagcgctagcagattttgccga

SEQ ID NO: 246724 - DNA, 640 bp, Unknown
  Bacterial polypeptide expressing nucleotide sequence isolated from the Sargasso Sea
aataggggttgcttcgacaaaagccttcacttcgcaggtagcagtgctttttttactctctttatgttttggtagaaaaaacaagctctcagctttgacgggtcaaaattttgctcaagctttaatgaatattggcaatcaggttaaaattattctagatgattcagaatcaatacttgaagttgcaaaatctactgtgcataatgaaaattttctttatttaggtcgcggattgaatttccccgtggcgctcgaaggagcattaaaactaaaagaaatttcatacattcatgctgaagggtacccagctgctgaaatgaagcacggccccatagcgctgatagatgaaaatatgcccgttgtttgcctagcgcctcatgatgatacctttgataaggttttatcaaatattcaagaagttaaagccagaaaaggagttataattactgtaaccgataaaagaactaaagagcttgaaaaagtatctgactatttaatagatgtaccttcaacacacccaaagatatttccaatgcttgcatctatatctctacagcttttagcgtatcacctagcagtgcttagggggtgcgatatagatcagccaaggaatctagcaaaaagtgttaccgtagaataa

SEQ ID NO: 246725 - DNA, 789 bp, Unknown
  Bacterial polypeptide expressing nucleotide sequence isolated from the Sargasso Sea
tttaactcctttaggaatagaaatttatgattctaataacgaaagacaatatcgaaatccaatttctttacaaactgcagagcaagtaagtgataaaaagaattttaaacactacatgttaaaggaaatctatgatcagcctaatattgctaaatattggttagaaaaatatttaattaaagattcaaagactgatcaatttcaaattaattactcttttgatacagagtttcttaattctattgaaagaatagaaatcgttgcttgtggtacaagtaaacatgctgcgatggtcggaaaatatttattagaacaattctcaggtataccaacaaatgtttattatgcgagtgagtttagatactcccctccgccattacttcctaatactttaacaattggagtcactcagtctggagaaactgcagatactattgctgctataaatatggaaattaaaaggagatcttcaattgaggatagaaactttaaaccaaatttaattgctattacgaacagaattgaaagctcaattggtagactaataccaaatattattaatattagtgctggaattgaaattggtgttgctgcgacaaaaactttctttgctcaacttctttccttttatggattagctataaaattttctcaaattaaaggaagtcaaagtaatgaaagtattaatcaattgatttcagaattaactaaattacctttattagttgaagaacttttagaaaaacataatgaatcttctgaaaaacttgcacatgattttttcaatat

SEQ ID NO: 246726 - DNA, 528 bp, Unknown
  Bacterial polypeptide expressing nucleotide sequence isolated from the Sargasso Sea
tcttagatcttataaaacttccagatttaattaaagaaacactatctaaacaaaatgatattcaggtaatagcaagagattttattacagcaaaaggtactatgtatttaggaagaggctattcctatcctattgctatggaaggagcccttaagttaaaagaattatcttacatacatgccgaaggttatgctgctggcgaaatgaaacatgggcctcttgccttaatagaggatggaatgccggtaattgttttggcgccaaaagatagattttttgaaaaaactgtatcaaacatgcaagaggtgattgctagaggaggaaaagtaataatgattactgacgatgcttctgaaactacaaatgaaaatattagatttaaatttaaaataccaaaaacaaattctactataaattcttttttgttaagcattccaattcagtttttagcgtatcacgtcgctttactgaaaaattgtgatattgataaacctagaaacttagcaaaatcagtaacagttgaataaa

SEQ ID NO: 246727 - DNA, 847 bp, Unknown
  Bacterial polypeptide expressing nucleotide sequence isolated from the Sargasso Sea
tattggtcatggtcagaatgggcaacacactggtgtgcccaatactgttaacgcgcatcctcattcatcagataaagtttcagtagttcataatggtataatagaaaattcaactattcttaaaaaactattaatcaaaaaaggatatgtttttaaatcacaaacagatacagaagtcattgttcatttaattactgactatttaaaaaaaaataatcttaaaaattctataattaaaatgcttaaaagagttcatgggagttttgcattaggaataatttttcaggacgaacctgatttgattgttggtgcaagaagaggatcgccacttgcagttggttatggcccaaatgaaaattatcttggatctgattcctatgcattaaaatctatgactaataaagttacatatttagatgatagtgaattttgcattataagaaaagatggagtggatttttttgatgaaaaaggaaataaagttaacaaaaaaattttagagctttcaaaaagtgagcaagaatacgaaaaaggtgaatacaaacattttatggccaaagagattgatgaacagccgataacaataaaaaattgtgttaatgaatatattaataaaattagtaattctataaatatttataattttccgtggaaatacaaagatatatcatcaatattattaataggatgtggcacagcttatcattcttgtttaatggccaagtattggtttgagcagatgacaagccttgatgtaaatgtagatatagcctctgaatttagatatagaaaaaatagatttaagaaagattgcttatatatattcgtgtctcaatcaggcgaaaca

SEQ ID NO: 246728 - DNA, 454 bp, Unknown
  Bacterial polypeptide expressing nucleotide sequence isolated from the Sargasso Sea
atgtgcggaattgtcggtggcgttagtcacaaaaatattggtgatgatctcattgattgcctcaaattccttgaatatcgtggatatgattcagctggcgtagccactctcagccatgacagcatcaattgcacaaaatgtgaaggaaaaatcaaccaattgacaaaaaaatataaaaaatctcagcacaaagatggtctcattggtattgctcatacccgctgggccacgcatggcaaaccctcagaaagaaatgcacacccattgtgctcacaaaattctgtggccgttgttcacaatggcatcattgaaaactctagtgaactcaagaaaaccatactcaaagattaccaattccattcagaaacagattcagaagtgattgcccacctctttcattgtacttacgcaaactcccaatgtcctctgtccgcgctcaaacaaaccatcgatc

SEQ ID NO: 246729 - DNA, 643 bp, Unknown
  Bacterial polypeptide expressing nucleotide sequence isolated from the Sargasso Sea
tggagtagcttctacaaaagcatttttaggacaaatacttgttttatatattttagcactaaaatttggatcattgagaaatgaaattaaaaaagaaaaatatcaacaaaagattaaagacttaatagatttacccaggttaatagaagaaacattaattggtgacaataatattcaagcaatatgctcgacatttaacgaagctaaaggctcaatgtttttgggcagaggtttttcctacccgatagctttagagggagctttaaaattaaaagaactttgttatgtgcatgctgaaggatatccagctggtgaaatgaaacatggaccattagctttaatagaagaaggtatgccagtggtagttttagctcctaaagataattattataaaaaaactatttcaaatatgcaggaagttatagcgagaggagcaaaggtattactaataactaataaaagtgcagacgatgttgtttcagaaaatatttgggaaacaattgaagtagaaaatactaatgatgacttacttccatttcttttaacactgcctcttcagaaattagcttacttttcagctcttaaaaaaggctatgatattgataagccaagaaatttagctaaatctgttactgttgaataa

SEQ ID NO: 246730 - DNA, 955 bp, Unknown
  Bacterial polypeptide expressing nucleotide sequence isolated from the Sargasso Sea
gaaaataatctaggttcagattcttatgcattaaagtcaatgacaaataaaatcacatatcttgacgatggtgaattttgtataattaaaaaagaccaagttcttttttttaatgaggatggaaagaagataaataaaaaaattctagaactttcatcaaatgaggctagttacgaaaaaggtgattttaagcattttatggcaaaggaaattgaggagcaaccaacaacagttaaaactggaataaaagaatatgtagataaaacgaattcagaaattaatatctataatttcccatggaaaattagtgaaataaattcaattacattaataggttgtggaaccgcttatcattcttgtctaatggctaaatactggtttgaagagttaactcaacttgatgtctctacagatattgcatcagagtttaggtatagaaaaaatagatttaaaaaagatactttatatatatttgtttctcaatctggagaaacagcagatacttacgcagcactagatctttgtaacaaaaataatatgaaaacttgcgctgtggtaaatgtaattgaaagttcgattgcaagagatgcaaattttgtattaccaattcattgcggcccagaaattggtgttgcatctacaaaagcttttttgggtcaaatactaattttatatattttagccttaaaacttgggtctttgagaaatgaaattaataaagaaaattataaagaaaaaattaaagacttgcagaagttaccaagtttaattgaaaaatctttattaacagataatgatattcaggctatctcctcaacctttaatgaggcaaaaggctcgatgtttttgggaagaggtttttcataccccatagcacttgaaggtgctttaaaattaaaagaattatcttatgttcatgcagagggttatccagcaggagaaatgaagcatggtc

SEQ ID NO: 246731 - DNA, 979 bp, Unknown
  Bacterial polypeptide expressing nucleotide sequence isolated from the Sargasso Sea
atcattattggagggttcttacgcactagctatcatctttagtgaccttaaggataaaataattggcgcaaggaatggaagtcctttggtagcgggaactgacggcaactccagctcattaggatctgactcaatagcattaagttcaattgccaaacaggtatgttatctagaagatggtgacattgttgtgctaagtagagaaaatgttgagatctataactcatcaggagatcgagctaatagagaatttgttgacattggtattatggatacagaagtcagcaaaggatcatacaatcattttatggaaaaagagattcatgagcatcccaaggctgttggtgaaacatttagacaattcattgatcatgatcagggtataatttcagttgatgatataggactaaatttcaacgatatttcaaaggtacatttaattgcctgtggtacagcatactactcttgcttggttgcaaaatattattttgaacaatatgcaagactgcccgtagagtgtgatatggcatctgagtttagataccgtgaccctgttcttgataatagggcattatatatatttgtttctcaatcaggtgaaacagctgacacaaaagcggcattagattattgcaaagacgccaaggtcagaacactcagtattgtaaatgttatgaatagctcaattgcacgcgaaagtgattattgtttatatactaaagcgggagcagaaattggcgtagcttccacaaaagcatttacggcgcaattgtcggtgctgttgtcaatggcactacattgtggcaccaagaataacaatgttacaattgagcagaatagagagatttgcaaagaaattatgcaagctccacaaattctagataaggcaataaaaagatcttatgaattaaaagaaactgcgaaagcgattatagattcaaaaggtgtaatgtatttagggagaggcacatcccttcct

SEQ ID NO: 246732 - DNA, 899 bp, Unknown
  Bacterial polypeptide expressing nucleotide sequence isolated from the Sargasso Sea
taaatcagtttcatcaagcatcataagcgctttaaaaaaacttgaatatcgtggatacgactctgctggcatctcaacaattagcaatggtcatatcaatgaaaaaaaatgttctggaagagtagataatttagaaaaaattctttttcgaaacccatcaagtggcgatcttggcattggtcatgtacgttgggcaacacacggaattccaaatcaaattaatgcccatccacattcttcagatgtggtttcggttgttcataacggtattatcgaaaactcggacattttaagaaatgaatataaaaaaaaaggatatttatttaagtctcaaacagacactgaagttataacaataatgttaacagattttttgaagacagataatttaatcgattgtattcataaaactttagaaaaacttgaaggaagttttgcattaggagtaatttttaaagactacaataatgtcgttgttggagcccgaagaggcagcccattagcggttggttatggtcataatgaaaattttataggatcagactcatatgctttaaaagcaatgacaaacaaaatttcgtatttagatgacggagatttttgtcttctttataaagagaaaattgagttttataattcagataaaaaaaaaattaataaagagatatttgaattatctaatgatgataatattgcagataaaggtgactacaaagattttatgtcaaaggagattgacgaacaatctataacaacaaaaaaatgtattaatgaatatttggataaaaatagagatgaaataaatatttataatttgccaattaaaccaacagagattaacaaaataagactgattgcctgtggaacagcctatcattcttgtttaatggcaaagtatt

SEQ ID NO: 246733 - DNA, 379 bp, Unknown
  Bacterial polypeptide expressing nucleotide sequence isolated from the Sargasso Sea
atgtgtggaatagtaggttatattggttcaaatccagcaaaggattttttaattaatggattaaaaaaacttgaatacagaggatacgattcatctggaattattctttttaatcaaaaagcttatttaaagaaatgcaaagggaaaattgcaacactagagaaaactttaattgaacctgaacttgattttgcaacaactggtataggacatacaagatgggctactcacggaattccaagtaaaataaactctcacccacacagttctaactcaggagaattattcattgttcacaatggaattatagaaaattatgaagcaattaaagaagttttaaagaaaaagggctatatatttaaatctgaaactgacaccg

SEQ ID NO: 246734 - DNA, 289 bp, Unknown
  Bacterial polypeptide expressing nucleotide sequence isolated from the Sargasso Sea
ctaccggtgatagttatttcaccacatgataaatattttcataaaacagtttctaatatgcaggaagttattgctagaggtggaaaaattttacttattacagatagcaacgataatgttataagtgaaaacgtaagatttacaattaacctaccttatctcgaaaaatctttatctccatttttaagcacattgccacttcaattgctcgcttatcatgttgcactattgaaaaaacgtgacatagacaaacctagaaatcttgctaaatcagtaacggttgaataaa

SEQ ID NO: 246735 - DNA, 637 bp, Unknown
  Bacterial polypeptide expressing nucleotide sequence isolated from the Sargasso Sea
gcttcaacaaaggctttcacatgccaattagttacattagctgctttttcaatctctctaggggttgcaaaaaataatataaataaaaatcaagcaaagaaattatctagagcaatttcagaaataccatcaaaaatatcagatatattaagtgatggtttgaatatcaaattaattgcggaaagcttatctaaagtgtcaaatgttttatatattggccgggggtcagagtatccaattgcgttagaaggagctctaaaattaaaagaaatttcatatattcactcagaaggttttgctgctggagaattaaagcatggtcctattgctttaattgaaaaaggagtcccagtaattgttattgctcctaaaggtgatttatacgaaaaaactatatcaaatatgcaggaagtcattgctcgaggtgctaaggtaatacttttaacagactccaaaaatgataaaaatatagatgaaaaagtttggaaggttatttcgatgcctactgttgaaaattttgttaacccaattttgtattctataccagtgcagttaatcgcctatcatgttgctgtcgcaaagggaactgatgttgatcaaccaagaaatttagcaaaatctgtaactgtggaataaa

SEQ ID NO: 246736 - DNA, 968 bp, Unknown
  Bacterial polypeptide expressing nucleotide sequence isolated from the Sargasso Sea
cataatagatacaagcgtgaaagaagcctcgaaagatggttacaaacacttcatggaaaaagaaatatatgagcaacctcaagcaataacgaatgctattgagggaaggacagcagatggagaggttttagataatatatttgggctgggatcatcagaggcgtttaagggcgtcaaaagaattcagtttgtagcctgcggcacaagcctacatgcagctaaaacagccagaaaatggttcgaagaactctgtgagacaccatgctatatagattttgcaagcgaatacaggtaccgaaacccacttgttgaagacgatactttgtttgtatgcatatctcagtcaggagaaacagccgacactatggcagcgcttaattatgcaaaagatgagaagtatttaggcattgtcacgatttgcaatgttcctacgagcaccatggccagagaatctgattggaagatattcacaaacgcaggcccagagataggtgttgcttcaaccaaggctttcactacacagcttgcagcattgcttttgttggcttgttccatatcaaaaagtaaaaacataaataaagacaaaagagcagacgcaatcaatgaccttctcaacacaccttcgcttgtgaaagaatcatttgggctaaaaatgcatatcgatgagatagttgagaaaattgctgacaaaaaaaatgctttgtatttgggtagaggtgtttacttctcaatcgcacaagagggtgcattaaagttcaaagagattacttatattcatgctgaggcatatccagcgggagagctaaagcatgggccgcttgccttggttgatgaaatgacacccgttgtggcacttgccccagaggatgagctggtagaaaaacttttgtctaacctcgaagaagttaagtcaagaggaggcacactttacgtctttggaaatgcaacctcaaagatcaaaattgaaa

SEQ ID NO: 246737 - DNA, 878 bp, Unknown
  Bacterial polypeptide expressing nucleotide sequence isolated from the Sargasso Sea
catggtagttttgctctagggattatatttaaagatcaaaataatttaatggtaggagcaagaagaggctcacctttagcagttggatatgggcctaatgaaaattatcttggatcagactcatatgcgctaaaatctatgacaaataaaatctcatatttagatgatggagaattttgttttgttaaaaaagatctaatagaattttttgatagtgaaggtgtaaaaataaataaagaagtaatgaacttatctaaagaggaccttaattatgataaaggtgattataaatattttatggagaaagaaattgatgagcagcctacaacaataaatgcatgtataaatgagtatattgataaatataataaacagattaatatatataacttcccttggaaaattagttccattaaatctgttatgttaattggctgtggcacagcttatcactcttgtttaattgcgaaatattggatggaacaaaatactaatttagatgtaaatgttgatatagcttctgaatttagatatcgaaacgttagatttaaaaaagattgtctatatatttttgtatctcagtcaggtgaaactgctgatacttatgcagcattagatttatgtaaaaaaaataaaatgaaaacttgtgcagtggttaatgttatagaaagttcaattgctagagatgctgatttagtattgcctatctactgtggtcaagaaattggagtagcttcaactaaagcatttattggtcaaatgttagttttatatattctatcaactaaaatttcttttgatcaaaaaattattaataagttagagtataaatcaaaggtaaaaaatatattaaatttatctaattcagctaaaaaaac

SEQ ID NO: 246738 - DNA, 185 bp, Unknown
  Bacterial polypeptide expressing nucleotide sequence isolated from the Sargasso Sea
gatgtgtggaattgttggtgttgtcgggcaggaaccggccgcccctgtgctcatggaggggctgaaacggctcgaataccgaggttacgattccgcaggcgttgccacgctggtgaatggcagcatcgaccggcgtcgagcggaagggaagctgttgaatcttcaggctctgctcgatcaagcgc

SEQ ID NO: 246739 - DNA, 763 bp, Unknown
  Bacterial polypeptide expressing nucleotide sequence isolated from the Sargasso Sea
gcagttggatatgggccaaatgaaaattatttgggttcagactcttatgcattgaaaacaatgacaaataaaatttcatatttaaatgatggagaattttgtattttaaaaaataataccgtagactttttcgataaaaaaggaactaaagtaaataaaaaaatacttaagctatctgaaaataatgaaaattatgaaaaaggtgattttaagcattttatggctaaagagattgaagaacaaccagttacaattaaaaattgtgtaaatgaatatattgataaaattaatagtgatataaatatttttaactttccatggaagattaaagatatttcttctgtagtgttaattggttgtggtacagcctatcattcatgcttaatggcaaaatattggtttgagcaattaacctctttagatgtgtcagtggatatagcttcggaatttagatacagaaaaaatagatttaaaaaagatgcattatatgtgttcgtttctcaatctggagaaactgccgatacttatgcgtctttagatctttgtaataaaaataaaatgaaaacatgtagtattgttaatgtagtagaaagctccattgcaagagactctaaatttgttttaccaattcattgtggaccagaaattggtgtagcttcaacaaaagcctttttaggacaaatgttagttttatatattttatcattaaaaatttcttacatgagaaaagatataaataaatcatcttatgctaaaaagatta

SEQ ID NO: 246740 - DNA, 843 bp, Unknown
  Bacterial polypeptide expressing nucleotide sequence isolated from the Sargasso Sea
aatgtgtgggattattggctactgtggcaaagatgatgctggtgagacaatactacgaggattagaagccttggagtacagaggttatgattcttctggaatagcgcttgcagatcaaaatggatcaatgtcagttacacgatcagttgggaaaatttcagcattaatcgaaaaaactaaacccaatcttatttcatcttcatgcgggatagggcacacgcgatgggctacacatggtgcagtaaatgaagcaaatacacatccccataccgatcaattgaacaaagtagctatcgtacataatggaataattgaaaattttgaggaattaaaagaaaattttcctcctgaaatttttacttcagaaacagatactgaagttattgcgcatatggttgcactcgaaatggataatggtgaaaacatattgcacgcattacaaaacacactcgaaaaagcaactggctctttttcgatagtagttctcagtgaattaaatccaaataaaatagtcgctgccagaaaaggtaatgcgagtggactagttgttggcttcgcaaaagatgcaatttgtgttgtttctgacatcactgccctcacagatattgttgaacatattacatttttggatgccaatgaatatgtcgaattttcatcaaaagaagcgattttctataatgatactggagagaaaatcgataaaaaagagctacgacttccctttgagcataatgtacaaagtcttggtcagtttaaacattacatgttgaaggaaatcaatgaacaacctgaaaccatactagatacaataagaggaagatatcagtcagataccggcagtat

SEQ ID NO: 246741 - DNA, 877 bp, Unknown
  Bacterial polypeptide expressing nucleotide sequence isolated from the Sargasso Sea
aaagatatgccggatttaatagttggtgctcgaagaggatctccattagctgttggatatggtccaaatgaaaactatttgggatcagattcttatgctttgaaatcaatgacgaataaaattacttatcttgacgatggtgagttttgtattgttaaaaaagatcaagttgttttttttaatgaggagggaaaaaaagttaataaaaaaatattagaattatcatcagatgaagcaaattatgataaaggtgattttaaacattttatggcaaaagaaattgaagagcagccaaaaacaattaaaactggaataaaagagtacatagataatgtaaataaagatatcaatatcttaaattttccatggaaaatagaggacattaaatcaataaccttgattggatgtggaacagcatatcattcttgcttaatggcaaaatattggtttgaagaacttacaactttagatgttagcatagatatagcatcagaatttagatatagaaaaaatagatttaaaaaagacacactatatgtttttgtttcacaatctggagaaacagctgatacttttgcagccttagatctttgtaataaaaataacatgaaaacttgtgcagttgttaatgtaattgaaagctcaatagcaagagattctaattttgtattaccaattcattgcggacctgaaattggtgtggcatcaacaaaagctttcctcggtcaaatacttgttttatacattttagctttaaaactaggatcattgagaaaagaaattgaaaaaaaagaatatcacgaaaaaattaaagatttaaaagatttaccaaatttaatagaaaaaacattacttcacgacaatgatattcaggcta

SEQ ID NO: 246742 - DNA, 735 bp, Unknown
  Bacterial polypeptide expressing nucleotide sequence isolated from the Sargasso Sea
aaaaagtaaaaacatgttcagttgtaaatgttgttgaaagttcaatagccagacactctgattgtgttttaccaattcatgccggaccagaaattggtgttgcatctactaaagcatttttaggtcaaatgcttgtattgtatttgttttctcttaaaattgcagaagtaagaggagatatagacaagaaagattacaaaaagaaaataacagaattaaaaaaaataccggaattaataacagattctttaaaagaagaagaaaaaatacaattaattgcaaaagacatatataaatccaagggctcaatgtttctgggcagagggtcttcgtatccaattgctttagaaggagctttaaaactaaaagaactttcatacttacacgccgaaggttacccggctggagaaatgaagcatggaccattggctttgatagaggatggattgccggttgttgttattgcaccaaaagataaatattttgaaaaaactttatctaatatgcaagaagtaatagcaagaggaggtaaagttttattgctcactaactcaggtggcaaagtaataagtgaaaatataagatttcaaattgatttgccagattctgatttaacactcacgccttttttatttactattccacttcagcttctttcttatcatgtagcattgttcaaaaaatgtgatattgataaacctagaaatttagctaaatcagttactgtggaataaa

SEQ ID NO: 246743 - DNA, 712 bp, Unknown
  Bacterial polypeptide expressing nucleotide sequence isolated from the Sargasso Sea
tggaatagtaggaattacaagtaataaagaagtaacagcgagaataattaactcattaaaaaaattagaatatagaggttatgactcagctggaatggcaactcttgaagatggaattattaaagaagtaaaatgtgaaggaagagtagatatcttagaaaaaaatatttcaaaaataaatattaatggtgaaattggtattggacatgtaagatgggctacacacggcaaaccaagtacactaaatgcacatccacattcttcagaagtagtctctgttgttcataatggcataatagagaattcaacaatattaaaaaaactattagaaaaaaaaggccataaatttaaatctcaaactgatacagaagttatagcccaccttgttacagattatttaaaaaaaaataatttaaaaaatacaattgtaaaagttttaaaaaaattacatggcagttttgctcttggcataatatttaaagatcaacctgatttaattgtaggagcaagaagagggtctccattagcagtaggatatggaccaaatgaaaattaccttggatctgactcgtatgctttaaaatctatgacaaataaagtttcttatcttaatgatggtgagttttgcttgattaaaaaggacaatattgatttttttgataccaaaggaaataagattaataaaaaaatattaaatttgtctaaagacgat

SEQ ID NO: 246744 - DNA, 807 bp, Unknown
  Bacterial polypeptide expressing nucleotide sequence isolated from the Sargasso Sea
attaatattgagaatattgaaaaaggtaattttgatcattttatgttgaaagaaatatttgaacaaccttcagctattgttaatgcaattagaggaagggtagattataataataatagtataaaattgggtggcatcaatgactatgcccttgatataatcaattcagatatgatctatattacggcttgtggtacttcgtggcatgctgcattgataggtagttatattttagaaaatttacttgatatccccgttaaagttgaatatgcttctgagtttagatatagaaaaacagctattactgctaattcgactgttattgttattagtcagtctggagaaactgctgatactttagctgctttagaaaaagcaaaatcaattggcgctaggactttaggtgttgttaatgttgtaggaagctctatagcaagaaaagctgattgtggtgtatatatacatgctggtcctgaaattggcgttgcatcaactaaagcttttacttctcaggtagttactttaaatcttataagtctattcttatctcaaataaaaaatcctgatgaacttaaaataaataaactgattgcagaaatatcttcaataccagataaaattgaaactattctatcttattctgatgatataaagaaaatagcaaaagactatcaagatgcaaataattttctttatttagggagaggttttcaattccctgtagctttagaaggggcgttaaaattaaaagagatttattatatacacgctgaaggttatcctgctgctgaaatgaagcatgggcct

SEQ ID NO: 246745 - DNA, 410 bp, Unknown
  Bacterial polypeptide expressing nucleotide sequence isolated from the Sargasso Sea
ttatgagagaaatataaacagatctaatattaaaggcgttattggtataggccacgtgaggtgggcaacacatggtaaaccaagtaaaattaatgctcatccacattcttctgaggaagtttcagtcgtacataatggaattatagaaaattcaacattattaaaaaaatatttagaaaaaaaaggttatgtgttcaaatcacaaacagatacagaggtaatagctcatttatttacagattatttaaaaaagaattctttaaaagatacaataattaaagttcttaaaaaacttcatggtagttttgcgcttggaattatatttaagaaccaaaatgatttaatgataggagcaaggagaggatctcctttagcagttggttatggtccaaatgaaaattatcttggct

SEQ ID NO: 246746 - DNA, 712 bp, Unknown
  Bacterial polypeptide expressing nucleotide sequence isolated from the Sargasso Sea
tattaatgtcgttgaaagcactatagctagaaactccgattgggtaatacctatacatgctggtccagaaataggcgtagcttcaactaaagccttcataggtcaaatgctagttttgtatataatgagtttaaaaatttcaaaaattagaggaaatattgatgaaaaaaaatatatacaaaaaataaaaaatcttaaaaatttacctgaaggtattgaaaattctttaaaaacagaggaattcatagagatctttgctaaagattttttacaagcaaagggatcaatgtttttaggtagagggtcttcgttccctatagcattggaaggcgcattaaaattaaaagaattatcatacctccatgcagagggttatccagcgggtgagatgaaacatggcccactcgctttaatcgaagatggtttgccggtaattattttaggacctaaagataaatattttgaaaaaactatttcaaatatgcaagaagttatcgctagaggaggaaaggttttgttaataacagaccaacatgacgacgtaattaatgaaaacataagatttaaaattgaaatgcctcatatagatgaactgctaaatccttttttattaactataccacttcaactattagcttatcatgtggctctattgaaaaaatgtgatatcgataaaccaagaaatttggcgaaatcagtaactgttgaataa

SEQ ID NO: 246747 - DNA, 661 bp, Unknown
  Bacterial polypeptide expressing nucleotide sequence isolated from the Sargasso Sea
tttgttactaaagccggaccggaaattggtgtagcttcaaccaaagcttttgttacccaattagcttgtttaaatctattgcttttaactttgatgagagtgcacaacaaattaccagcagcaagaaagaaaattaccgcagcactgagggatttgcctaaattaattgataagactttaaaaatgacaggcgaatacaagaaagtggcaaagctactttttaaaagaaacagcgcattatttttaggtcgtggtttgtattttcctattgccagagaaggggcccttaagctcaaagaaatatcttacatccatgctgaagcctatccaggcggagaattaaagcatggaccactggcactgatagacaaaaatatgccagtaatagctttagctccagacaatgaacacttagataaaattacatcaaacattgaggaagtggcagcccgaaaaggcaaggttattactatagggccactaggcagaacaaaaatagataaaaatggcggccacattaagattcctaagacattggatctgcttaatccgattgtctccgtggtgccaatgcagttgattgcgtactacaccgcagtctttaaaggcactgatgtagataagcctcgcaaccttgcgaaaagtgttacggtcgagtaag

SEQ ID NO: 246748 - DNA, 351 bp, Unknown
  Bacterial polypeptide expressing nucleotide sequence isolated from the Sargasso Sea
aatgtgtggaatcatcggtgcagcctccactagaaacgtaggaaaaatcctagtaaatggactaaagaaaatggagtatcgcgggtatgactctgcaggacttgttttaaacaaagaaaaaaaagcgatccaactaagaacgcttgggaaagtatcaaaactagaagaactgatggcccaaaaaaagcccagagccaaatcgggcatcgcacacactagatgggccacacacggagagccttctcaaacaaatgcccaccctcattcttcaaacggaagcatttacattgttcacaacgggataatcgaaaaccacgatgagctcagagaaaggtttgtcaaatggcggct

SEQ ID NO: 246749 - DNA, 307 bp, Unknown
  Bacterial polypeptide expressing nucleotide sequence isolated from the Sargasso Sea
gctctaattgatgaaaatataccagtagtatttattgcacctcatgatgaaacatttaataaggtcctgtcaaatatagaagaagtcaaggcccgtggaggaatagttatttcaatcactgataaaattaataattcactaaaaaaattatcagattttgtattaatagcacctcagacacataaatatgtatttccaataacgtgttctataattttacaaatgttagcatatgaacttgcagtttgtagaaaatgtgaaattgatcaaccaagaaacttggcaaagtcagttactgtggagtaaa

SEQ ID NO: 246750 - DNA, 880 bp, Unknown
  Bacterial polypeptide expressing nucleotide sequence isolated from the Sargasso Sea
cttgaaatcaatgacgaataagattacgtatcttgaagatggtgaattctgtgttgtaaaaaaggatcaggttctttttttcaatgaagatggaaaaaaagttaataaaaaaatattagaattatcatcagatgaagcaaattatgataaaggtgattttaaacatttcatggccaaagaaattgaagaacagccaacaacaattaaaactggaattaaagaatacgtagataatgtaaataaagacattaatattttcaattttccatggaaaatagaggaaattaattcaataactttaattggctgtggcacagcatatcattcttgtttaatggctaaatattggtttgaggaacttacaaccttagatgttaacatagatatagcttcagaatttagatacagaaaaaatagatttaaaaatgacagtttatatgtttttgtttcacaatctggagaaacagcagatacttatgcagccttagatctttgtaataaaaacaatatgaaaacatgttctgttgttaatgtaatagaaagttcaattgcaagagactctaattttgttttaccaattcattgtggtcctgaaattggagtcgcatcaacaaaagcatttctaggtcaaatactagtattgtatattttagccttaaaacttggatcattaagaaaagagattgaaaaacaggaatatcaagaaaagattaaagacttaaaagctttaccaggattaatagaaaaaactttgttacatgataatgatatacaagcaatatcctcaacatttaacgaagcaaggggctcaatgtttttaggaagaggctattcatatccaatagctttagaaggtgcattaaaacttaaagaactttca

SEQ ID NO: 246751 - DNA, 634 bp, Unknown
  Bacterial polypeptide expressing nucleotide sequence isolated from the Sargasso Sea
tggtgttgcatctacaaaagctttcacaactcaattggcagcattgatgctattagcattatcgctcgcaaaaagtagaaatttaaacccaaaacttagaggaagagtagttcaagctttaagatcgttaccagaaactatagccgaagctttaaattcaaaagacatgatgattgagatagctccagatatagccaacaaagataatgctctatttttaggaagaggaattttttatcctattgctaaagagggagcacttaaattaaaagagatttcctacattcatgctgaggcatatccagctggagagctaaagcatggcccacttgcattaatagatgaaaatatgccagttattgctttggctcccgagagtgaaatcgcagaaaaattaatttctaatcttgaagaggttaaagctagaggcggaactttatatgtttgcgctgacccttcagttaatatggatgttaagtctggaaaattaatacatatgcccgaatgcgacttttttatgtcacctattgtatataacattccattacaaattctttcatacgaagttgctctcctaagaggaacagacattgatcagccaaggaatcttgctaaatcagtaacggtggagtag

SEQ ID NO: 246752 - DNA, 894 bp, Unknown
  Bacterial polypeptide expressing nucleotide sequence isolated from the Sargasso Sea
ctcgatcccacaacggtgacaagcctcacccttattgcctgcggaacatcttattatgcttgcctaacggctaagtactggttcgaaaccatcgctcgaattccggtggaggtggatattgcatctgagtttcgctatcgcgaggcgccgctgcccgccggcagcgctacactggttatctcacaatccggggaaaccatagatactttggccgcactgcgctatgcgcagtctcaagatcagaagatcctctcgatagtgaatgttccggaaagcaccattgcccgagagtcggacgccatcttacaaacctatgctggccccgagatcggtgtggcctcaaccaaggcattcaccactcagttaactgttctagcctgcctggcaatcgccatggcacacgtccggggaactatagatgactccgagcgcggtcgccttgtcggtgcacttacagaagtcccggctcgagcagcagagatccttaatcacgacgaacaaatcagcatgatcgctaacgacatggcagaggcccgggacgtcctgtatctaggtcgtgggaccagctacccgttagccttagagggtgcactcaaacttaaggagatctcgtacatccatgccgagggctacgcagcgggagaaatgaaacacggccccattgcccttatagacgaaaacgtccctgtggttgtggtcgcgcctacggataatctgatcgacaagaccgtatcaaacgttcaagaggtaatggcgcgcggtggcagggtagtcttactgtctgatatggtcggtgtatctcggttgggtgctgcggtggaagcgacagtgaccctaccatccgtagatcccttcgtgacacccctgctttacgctatcccggtgcagttgttg

SEQ ID NO: 246753 - DNA, 250 bp, Unknown
  Bacterial polypeptide expressing nucleotide sequence isolated from the Sargasso Sea
atatgagaaatctatttctaatgcagaagagattgctgctagaaatggtaaggttataatcttatcgagtgttaaaattcacagaaaatcattaaatactcataatgtaagcctacctaaagaaaactttattgacacacctttcatttatactattcctcttcaactcatatcatattactttgctctacataaagggactgatattgatcaacccagaaatttagctaaatcagttacggtcgaatag

SEQ ID NO: 246754 - DNA, 544 bp, Unknown
  Bacterial polypeptide expressing nucleotide sequence isolated from the Sargasso Sea
atgtgtggaattataggagcggcatcatctcgcaacgttggcaagttattagttcaaggcctacacaagatggaatatcgaggctatgattctgccgggatcgcactccaccaaaaagatagtatcttcagcctaagaactttaggcaaagttagtttgcttgaagatgggatgatagagcagcgtcctaaaagtaaactcggcattgcccatacccgctgggccacgcatggcaaaccctctgaaaaaaatgcccacccacacgcatccagtggagaggttcacattgttcacaatggaatcatagagaactatcttgagctaactaaaaaattaaccaaagatggctatacgtttcactcagaaactgactcagaggtaatagcgcatttacttcatcaacatctccaatcctccggagacttgcttgctgcaatgcatgatgtaatcaaagagttagatggggcttatgccatagcagctattcatattgctgacaaaagcagactcattgttgcaagaaataaaagcccgctcttaattg

SEQ ID NO: 246755 - DNA, 316 bp, Unknown
  Bacterial polypeptide expressing nucleotide sequence isolated from the Sargasso Sea
aatgtgtggaataatcggaataataagtacaaaagaagtttctaatagaataattaattcattaaaaaaactagaatatagaggatatgactctgcaggaattgcaactctggttgatggaaatattaatgagataaaatgtgagggtagagttgatgtattagaaaaagatatatcaaaatttaatcttaaaggagctctcggtattggtcatgttagatgggcaactcacggtaaaccaagtaaaattaacgctcatccacattcatctgaacaggtttcagttgttcataatggcataatagaaaattcaaca

SEQ ID NO: 246756 - DNA, 664 bp, Unknown
  Bacterial polypeptide expressing nucleotide sequence isolated from the Sargasso Sea
atgtgtggaatagtaggtattacagcaaatgaatctgtttcttcaaacataattggagccttgaagaaacttgagtatagagggtacgactcagctggcatagctattaatactgaaagccaaattcaccaaaaaaaagcaaaaggtaagcttgataacttaatactatcccttaaaaaagatggttttgatggaaaggttggaattggccatacgaggtgggctacacatggcgagccatcagaaagaaatgcccatcctcactcgtcacgaaaagtttcgctcgtccacaatggaattattgaaaatgcatcagagctcaaaagtagagcagaattaaaaaactataattttgagtctgatactgactctgaagttataacagcgctgataactcattatctcaatgaaggtcatgatcacatggagtcggttaaacaaacaatttcacttttagagggttcttatgcgctagctatcatctttagtgaccttaaggataaaataataggtgcgaggaatggaagtcctctggtagtgggaactgatggcaactccagttcattaggatctgattcaatagcattaagctcaattgcaaaaaaagtatgttacttagaagatggtgacattgttgtgctaagtcgagaaaatgttgagatct

SEQ ID NO: 246757 - DNA, 602 bp, Unknown
  Bacterial polypeptide expressing nucleotide sequence isolated from the Sargasso Sea
catggattcccgcgacccgtccacgctgctggccgcgcgttccggtagcccgatggttatcggcctgggcatgggtgaaaactttatcgcttccgatcagctggcactgctgccggtaacgcgtcgctttatcttcctcgaagagggggatatcgccgaagtgactcgccgcagcgtaaccgtgttcgataccaaaggcgagcaggtgaaacgtcaggagatcgaatcgaatctgcagtacgacgcgggcgacaaaggcgcttaccgtcactacatgcagaaagagatttacgagcagccaaacgccatcaaaaacaccctgaccgggcgcatcagccatggtgaagtggatctgagcgagctgggcgttaacgcgaacgaactgctcagcaaggttgagcatattcagatcgtggcctgcggcacctcctacaactccggtatggtctctcgctactggtttgaatctctggcgggcgtgccgtgcgacgtagaaattgcgtctgagttccgctatcgcaaatctgccgtgcgtcgtaacagcctgatgatcaccctttcccagtcaggtgaaacggcagataccctggcggcgctgcgtc

SEQ ID NO: 246758 - DNA, 598 bp, Unknown
  Bacterial polypeptide expressing nucleotide sequence isolated from the Sargasso Sea
attttatgatttaaatcaaaataggataaacaaaaaaattcacaccgtatcagaagatgaaaatatttcagataaaggagactttaaaaactttatgtccaaagaaatttttgaacaacctgttacaattaaaaaatgtttaagcgaatacatcgatagtcttaaaaaagatataaatatatataattttccaattgatcctaaaaaaattaataaaattattttaattggatgtgggacggcttaccattcatgtttagtagcaaaatattggttcgaggaactaacctccatcgatgttgaaatcgatatagcttcagaatttagatatagaaaattaaaatttaactctaataacctatatatttttgtatctcaatctggtgaaactgcagatacagcagctgcgctggatatatgtaaaaaaaataaagtaaaaacttgctcaattgtaaacgttgtagaaagtacgattgcaagaaattctgactgggtgctacctatacatgctggtccagaaataggagtagcttccacaaaagcttttctaggacaattaatagtcttgtatattctaaatttaaaacttgctcttaat

SEQ ID NO: 246759 - DNA, 244 bp, Unknown
  Bacterial polypeptide expressing nucleotide sequence isolated from the Sargasso Sea
cactctcaaatacacagggaagttatagctagaggaggaaaaattttttttatcactgatataaaaaaaaggcttttaagtacaaatataagactcaggttaagagtgccacacttagataattttttatctccaatcttattaactatacctttgcaattattggcttatcatgtagcattattaaaaagctgtgatattgataagcctagaaacttagctaaatctgttacagttgagtaaa

SEQ ID NO: 246760 - DNA, 457 bp, Unknown
  Bacterial polypeptide expressing nucleotide sequence isolated from the Sargasso Sea
gatggccccagcaattgccaacaaggataacgcactgtttttagggcgcggtattttttatccagtcgctaaagagggagcactaaaactcaaagagatttcatacattcatgcagaggcttatccggcaggcgagcttaaacacggacccttggcacttattgatgaaaacatgccagtcatagcgctggcacctgaaagcgagattgcggaaaaacttgtctctaatttagaagaagtcaaagcccgtggtggaaccctatatgtgttttcagatccgagtgtctccatcgatgtaaaatcaggaagtcttgtcccaatgccaaagtgcgattttttattaacaccaatcatctacacgatcccactacaaattctttcctatgaggtcgcgttgctaagaggcactgacatagatcagccaagaaacctagctaagtcagtcacggtggagtaa

SEQ ID NO: 246761 - DNA, 538 bp, Unknown
  Bacterial polypeptide expressing nucleotide sequence isolated from the Sargasso Sea
tatgtgtggcattttagggataattagtaaaaaagatattattactcctatgattgagggtttaaaaaagcttgcttatagaggatatgactcttctgggatagctactatcaatgaccatacaattataaaaagaagagcttcaggaaaaatagaaaatttagaaaaacttttagaatgtgatcctataaaaggtaatttgggtatagcgcatactagatgggcaacacatggtgcacctaatgaaatgaatgcacatcctcatgcaacaaaaaaagttgcaattgtgcataatggtatcatagaaaattataaagatttaatagcaggtttaaaaaacaaatctcttttaaatagtgaaacagacagtgaagttatagctcatttactaactaattacttagaagatggtttgaatattcataatgctataactaagctattagataaactacaaggggcatttgctctaggaattttaatttctaatgaaaataaacttattgctgtaaaaaaaaggaagtccattagcaatagg

SEQ ID NO: 246762 - DNA, 745 bp, Unknown
  Bacterial polypeptide expressing nucleotide sequence isolated from the Sargasso Sea
tatgtgtggaattataggaatagcaagtaacaagccagtttcaataaatataattaattctttaaaaaaattagaatacagaggttatgactcagctggtttggctacaattcaaaataacgaaataaatgaaaaaaaatgctcaggcagggttgtagagttagaaaaaattttatttaaaagtccttctgatggaaatcttgggattggacatgtaagatgggcgacacacggaattccaaacattattaatgctcatccacattctactgacattgtatcagtggtacataatggaataattgaaaattcaaatgaattgaaaaaaaaattggaattaaaaggtttaaagttcaaatctcaaacagacacagaagtaattaccttattaataactgaggcattaaaaaaaaatgaagcaattgactcagtttttaaaactttaaaacagcttaaaggaagttttgcccttggaattatttttaaaaatcatcagaatattataataggagcccgaaggggaagtcctttagcggtaggttactcaaaaaatgaaaattatctaggctctgattcctatgcacttaaatcaatgactaataaaatttcatatcttgatgatggagacctatgcgttctatctaaagataaagtagatttttatgatgtaaatcaaaaaaaaataaataaaaaagtctatacactatctaatgatgaaaacttaagtgacaaaggtgattacaaa

SEQ ID NO: 246763 - DNA, 118 bp, Unknown
  Bacterial polypeptide expressing nucleotide sequence isolated from the Sargasso Sea
actgcaccatttatttatactattccttaccaactttttgcatatcatacagctcttcttaaaggaactgatgttgatcaaccaaggaatttagctaaatcagtaactgtggagtaat

SEQ ID NO: 246764 - DNA, 595 bp, Unknown
  Bacterial polypeptide expressing nucleotide sequence isolated from the Sargasso Sea
tatgattagcactatattaccaacatatgcgcgagcagatttagaatttgtgaaaggcgaaggttcttggttaacggaagcagacgggcgtcactttttggacctggcatctgggattgcagtaaattccttaggccatgctcaccctgatcttgttaatattataaaatcacaggcagaaaagctctggcacgtgtcaaacctttatgaaattcctcagcaacaagctctagcagatatattagttgcaaactcgtttgctgacactgttttttttacgaactcaggaactgagtcctgcgaattagctattaaaatggcgcgaaaatattggtttgaaaagggttatcccgataagtttgaaataattacatttgaaggttctttccatggtcgttcttccgcaggtatagcagcaacggcatctgaaaagatgacaaaaggtttcggacctttattacctggcttcgtgaacataaatttgaacgatcacgaggcaattaaaaccgcaatttcggataaaactgctgcaatcttaatcgaacctattcagggagaagggggtattagagtattaccccgaatccttttttga

SEQ ID NO: 246765 - DNA, 253 bp, Unknown
  Bacterial polypeptide expressing nucleotide sequence isolated from the Sargasso Sea
tttgaaaaaacaatctcaaatatgcaggaagtgatagctagaggaggtaaagttttattaatatcaaatgaaaataataaaattattagcgagaatataagatttactttacagattccaaaaacagatgattatttaaacccaatattgatgactattcctttgcagcttttagcttatcatgtagcctcactaaagaattgcgatatagataaaccaagaaatctcgcaaaatctgttacagtagaataaa

SEQ ID NO: 246766 - DNA, 711 bp, Unknown
  Bacterial polypeptide expressing nucleotide sequence isolated from the Sargasso Sea
ttaatgtagtagaaagctcaatagctagaaattctgattgggttatccccattcatgctggcccagaaataggcgtagcatctacaaaagcttttataggtcaaatgctggttttatatataatgagtttaaaaatatctaaagtaagaggaaatattgatgataaaaaatatattgaaaaaattaaaaatcttcaaaatctacctcagagtattgaaacttcattacaaactgaggagcttatccaaatatttgctaaagattttttatcagccaaaggatcaatgtttttaggaagaggattatcatttccaatagcactagagggagcattaaaattaaaagaattgtcatatcttcatgcagaaggctaccccgcaggagagatgaagcatggcccacttgcattaatcgaagatggtttacctgtaattattttggcaccaaaagataaatattttgaaaaaaccatttccaatatgcaagaagttatagcgagaggaggaaaagttttattaatatcagataagcacgatgaagtaataaatgaaaatataagatttaaaattgaaatgccttttattgatgagcttctaaatccttttctattaaccataccacttcaattattagcttatcacgtagctctattaaaaaagtgtgatatagataaaccaagaaacttagctaaatctgtaacagttgaataaa

SEQ ID NO: 246767 - DNA, 628 bp, Unknown
  Bacterial polypeptide expressing nucleotide sequence isolated from the Sargasso Sea
cgtcgtctcggaatatcgtggttatgactctgctggtctggccgtcttcgatgctgaaggtaacatgacccgtctgcgtcgtctgggtaaagtgcagatgctgactgctgctgcggaagaacatccgttgcatggtggtacaggtatcgctcacacccgctgggcgacacacggtgaaccttcagaagcgaacgcgcatccccatgtttctgaacacattgttgtggtgcataacggcatcattgaaaaccatgaaccactgcgtgagctgttgaaaacgcgtggctatacctttgtttctgaaaccgacaccgaagtgattgctcacctggtgcactgggaactggaacagggtggaacgctgcgtgaagccgtgctgcgtactattccacagctgcgcggtgcctacggcacggtgatcatggatacccgtaatccggaaaccctgctggcggcccgttctggtagcccgctggtgattggtctgggtatgggcgaaaacttcatcgcttccgatcagctggcgctgctgcatgtaacccgtcgcttcatcttcctggaagagggtgacatcgcggaagtgactcgtcgttctgtctctattttcgacaagtctggcgcagaagtt

SEQ ID NO: 246768 - DNA, 775 bp, Unknown
  Bacterial polypeptide expressing nucleotide sequence isolated from the Sargasso Sea
gattcttatgcacttaaatctatgactaataaaatatcttatcttgatgatggtaatttttgtattctatacaaagagaaagtcgagttttataattcagataaaaaaaaaattaataaagaaatttttgaattatcttatgaagataatactgctgaaaaaggtgattatagagattttatgtccaaagaaatcaatgaacaatcatacacaacaaaaaaatgtattaatgaatatttaaatacatctaaaaatgaaattgatattttaaacttacctttagaagctaaaaagatacggaaaattagattaataggctgcggtacagcttatcactcgtgtctaatggctaaatattggatagaggaatttacatcattagatgttgatgcagatattgcatcagaatttagatatagaaaaataaaattagatcctaatgatctttatatttttgtttctcaatctggagaaacggcagacacacttgctgctttagaaaaatgcaaaaaaaataatttaaaaacatgtggaattgtgaatgtattagaaagctcaatagcaagaaattctgaccttgttttacctatacacgcaggcccagaaataggagttgcttctacaaaagcatttattggacaattaactgttctatatttgttaactctaaaaatagcaattgatagaaaagatatatcacctgaagaatattcaaaattaattttagatttaagaaatattcctgatttaattgaagaaacacttaataaacaaa

SEQ ID NO: 246769 - DNA, 795 bp, Unknown
  Bacterial polypeptide expressing nucleotide sequence isolated from the Sargasso Sea
ttcaaaatttaatcttaaaggagatattggtattggccatgttagatgggcaactcacggcaaaccaagtaaaattaatgctcatccacattcgtcagaacaggtttcagtagtacataatggtataatagaaaattcaactattttaaaaaaactattagaaaaaaaaggatatgtatttaaatcacaaaccgatactgaggtcattgctcatcttgttacggaatatttaaaaaaaaattctttgaaagatagtattattaaggttttaaaaaaacttcatggtagttttgccctagggataatttttaaagatagaaatgatttaatggttggtgctagaagaggatcacctttggctgttggatatggaccaaatgaaaattatctaggatcagattcatacgctcttaaatctatgacaaataaaatctcttatttagatgatggagaattttgtattattaaaaaagatcaaatagagttttttgaatctaatggagtaaaaataaataaaaaagtaatgaatctttctaaagaagatattcattatgataaaggcgattataaatattttatggaaaaagaaatagatgaacagccgtctactattaatgattgcataaatgagtatgttgacaaatacaataatcaaataaatatttataattttccttggaagataaattcctttcaatcaattgtactcattggctgcggtacagcttatcactcttgtttagtagcaaagtattggctggaacaaaatacaaatctagatgtgagtatcgatat

SEQ ID NO: 246770 - DNA, 844 bp, Unknown
  Bacterial polypeptide expressing nucleotide sequence isolated from the Sargasso Sea
cacatatcttgatgatggtgaattctgttttgttaaaaaagaccaggttattttttttaatgaagaaggaaaaaaagttaataaaaaaatattagaattatcatcagatgaggcaagttatgataaaggtgattttaaacatttcatggctaaagaaattgaggaacagcctaggactattaaaatcggagtaaaagaatacttagataatgttaataatgatattaatatatttaattttccatggaaaataagtgacattagctctgttactttaataggatgtggaacagcatatcattcttgcttaatggcaaaatattggtttgaggaacttactactttggatgtgaatatcgatattgcatctgagtttagatatagaaaaaatagatttaaagaaaacagtttatatgtttttgtgtctcaatcaggagaaacagcagatacttatgcagctctagatctttgcaataagaaaaatatgaagacttgtgctgttgtaaatgtaattgaaagttcaatagcaagagactctaattttgtattacctattcattgtggtcctgaagttggtgtggcatcaaccaaagcatttcttgggcaattacttgttttatatattttagctttgaaattaggatcattaagaaacgaaattgagaaaaataaataccaagagaaaattaaagatttaaaaaatttaccaagtttaatagaaaaaacactgttatatgataatgatattcaagcgatatcttcaacatttaatgaagccaaaggttcaatgtttttaggaagaggtttttcttacccaatagctttagagggtgcattaaaactt

SEQ ID NO: 246771 - DNA, 817 bp, Unknown
  Bacterial polypeptide expressing nucleotide sequence isolated from the Sargasso Sea
gttgataataagagtgttgtaattgctatttcacaatcaggtgaaactgccgatactcttgctgcaattaagaaagctaatgattatggggcaataacagttggaatttgtaatgttcctggaagttcagtttctagagaaactaattgcggtatttttacaagatgtggtcacgaggtaggagttgcttctacaaaagcttttacagcacagtgtactatactttatttactagctttaaaattagctgattcaaatgatactttgtcaaaaaaagctattagagaaaacttagattttgtctcagagttcaataaaattagaagtattcttaaaaaagaaaatgaaatcaaaaaaattgctctcaagtacaaaaatgctaatgattttttgtatctaggaagaggtctgaattttcctgttgctcttgaaggagcactaaaattaaaagagatatcatacattcatgctgaaggatatcctgcagcggagatgaagcatggtccaatagccttagttgacaaagatatgcctaatgtttttatagttccgaaagataagacatatgaaaaaatcatttcaaatattgaggaaataaaatcaagaaaaggtaaaattattatcgttacagattctaaagataaaattttaaaagatcttgccaatgatttgatatatgtaccaaaaacaaatcattacatgttttgtgtgttagcaacaatcgtccttcaattatttgcttattatattgcagtaggtaaaaaattaaacgtcgatagacctcgcaatcttgccaaatcagttactgtggaataga

SEQ ID NO: 246772 - DNA, 697 bp, Unknown
  Bacterial polypeptide expressing nucleotide sequence isolated from the Sargasso Sea
atgtgtggaatagttgctgttactggatataaaaaagctttaccattattaattaatggtttagaaaaacttgaatacagaggttatgactctgcaggtattgcaataataaatgccgaaacaaattctattacttgcaataaagcagaaggaaaactcaagaatttagtaggtaatcttaatgattttaatattcctggaactgtgggaataggacatactaggtgggcaactcatggaaagcctgaggttaaaaatgcacatcctcataccgatagttcaggaaatattgcagttgttcaaaatggcattattgaaaatttccaagatttaaaaaataaattagaggaagagggcattatttttaattctgatacagataccgaagtaattccccatctaattcaaaaagagttgaatacattaagcaaactcaatcttgagaataatgggtcaacattattagtagctgtaagaaatgtattatcggatttagaaggatcttatgctttagcagttttatggtctggtgctccaacctctttggtagtagcaagaagacaagctcccttaattattggtttgggtgaaggagaatttatttgtgctagtgatactccagctattgcaaacttcacgaatattattttgcctatggaggatgaagaaatagctttgttgactccgctggaatgaa

SEQ ID NO: 246773 - DNA, 344 bp, Unknown
  Bacterial polypeptide expressing nucleotide sequence isolated from the Sargasso Sea
tatgtgtggaataattggtattgctagtaaaaatgattgtatcaatgatataatatcaggtttatattctcttgaatacagaggttatgattcatcaggattagcaactataaaaaacaatcagtttcaatgtaataaaagtataggtaaaattttaaacctagagaaatctgtaaaaaatagaaaattaactggtaaaattgcaattgctcatactaggtgggcaactcatggtaaacctgctttaaagaatagtcatccatttataaaagataacactgttttagttcataatggaattatagaaaattatacagatttattaagtcaatattctataaata

SEQ ID NO: 246774 - DNA, 313 bp, Unknown
  Bacterial polypeptide expressing nucleotide sequence isolated from the Sargasso Sea
atgtgtggaatagttggaataacaagcggtaaaccagttacatcttctataattaactctcttagaaaactggagtacaggggttatgactctgcaggtattgcaacactagataatggttttattaacgaagttaagtgtgaaggcagggtggataatttagaaaaaaatttatcaaaaaaaaaaatgttaggaaatgttggaataggacatgtcagatgggccactcatggaatgcctagctttgcaaatgctcatccacattcatcagagaatgtttcagtagtacataatggaattattgaaaattcta

SEQ ID NO: 246775 - DNA, 897 bp, Unknown
  Bacterial polypeptide expressing nucleotide sequence isolated from the Sargasso Sea
ttacgactctgctggaatagctactctatcaagtggtttgattaatgaaattaaatctgagggtagagtagataatttagaaaaaaattcacttgtccaaaaaatggaggggaccataggtatcggtcatgttagatgggcaacacatggaatacctagcagtttaaatgctcatccgcattcatcccaaaatgtttcagtggtacataatggtattattgaaaattcaactatcttaaaaaaatttttaattggtaaaggccacaaatttaaatctcaaacagatacagaagttattgttcatttaataactgagcatttaaaaacagaaaatataataaactctataaaaaaaactttaaaattacttcatggaagttttgctttaggaattatttttaaagatcaaccagatttaatcataggagctagaagaggttcacctttagctgtcggttatggtccaaatgaaaattatttaggttcagactcttatgctttgaaatcaatgacaaacaaaattacttatctaaatgatggtgaattttgtgtgattaaaaaagatctagtagaattttttgatgagaagggaaaaaaaattaacaaaaaagttttagaactatctagtgaggagcaaaaatacgataaaggagattacaaacattttatggctaaagaaatagacgaacaaccactgtcaataaagaatggtattaaagaatacttagatacagcgaacgatgatattaatatatttaattttccttggaaggctgaagatatttcctcaataatattgataggatgtggtaccgcatatcactcatgtttagtggccaaatattggtttgaagaactaacttctttagatgtaagtgtagatatagcctcagaatt

SEQ ID NO: 246776 - DNA, 925 bp, Unknown
  Bacterial polypeptide expressing nucleotide sequence isolated from the Sargasso Sea
ttccctgaaaatcaacgaaattaaatcaaatactttaatcggctgtggtactgctacccattcttgcttaatggccaaatattggtttgaagaattaactactttagatgttaatatcgatatagcctctgagtttagatatagaaaaaatagatttaaagaagatagtttatatatttttgtttctcagtctggtgagactgcagatacttatgcagctttagatctttgtaacaaaaataatatgaaaacatgtgctgtagttaatgtaattgaaagctctatagcaagagactcgaattttatattaccaattcactgtggacccgaaattggggttgcatctacaaaagcgttcttaggtcaaattcttgtattatatattttagctttaaaaattgcatctttatctaatcagattgataaaaaaaattatcaagaaaagattgaagatcttaaaagcttaccaagcttaatagaaaaaactttattagtagataatgatattcaaactatttcctcaacattcaatgaagctaaaggatctatgtttctaggaagaggtttctcttttccaatagctttggaaggagcattgaaattaaaagaattatcttatgttcatgctgaaggttatccagcaggtgaaatgaaacacggaccacttgcattgatagaagaggggatgccagttgtcgttctagcacctagagacagttactataaaaaaacaatttcaaatatgcaggaagttatagcaagaggtgcaaaagttcttttaattactaataaaagcaaagatgagattatttcagagaatatttgggaaactattgaggtggaaaatactaacgatgatttattgccattcctattaactgttccacttcaaaaacttgcatattattctgcacttaaaaagggt

SEQ ID NO: 246777 - DNA, 798 bp, Unknown
  Bacterial polypeptide expressing nucleotide sequence isolated from the Sargasso Sea
tattaatatttataattttcctattgaacctaaaaaaattaataaaatagttctgattggatgcggcacagcctatcattcgtgtttagtagcaaaatattggcttgaagaacttacaactattgatgcagaaatagatatagcctcagaattcagatataggaaactaaaatttaatactaacaatttatatatatttgtttcacagtctggtgaaactgctgatactgccgctgcattagatatatgtaaaaaaaataaagttaaaacttgctctattgttaatgttgtagaaagtacaattgcaagaaatgctgattgggttttgcctattcacgctggtccagagattggtgttgcttcaactaaagcttttttaggacaattaatagttttatacatcttgtctctaaaactatctataattagaggtgatataaataaagataagtacaatgaaaacttaagaaatctacataaacttccagagtcgattaaaaacacttttaaactagaaaatgaaattcaattgatggctaaagaatttttagatgcaaaaggttcaatgtttttaggaagaggaaattctttccctattgctcttgaaggtgcgctgaaattaaaagaactctcttatctgcatgctgagggatatccagctggagaaatgaaacatggacctttagctttgattgaagaaggcttacctgtgatagtaattgcgccaaaagataaatactatgaaaaaaccttatctaacactcaagaagttatagctagaggaggtaagattttttt

SEQ ID NO: 246778 - DNA, 731 bp, Unknown
  Bacterial polypeptide expressing nucleotide sequence isolated from the Sargasso Sea
attgtgtggaattataggcattgtttctaaaacagaagttgtcaacaggctaattaaaggattaaagcagttagagtatcggggatatgatagctcgggagttgttatagcaaatacaaattccctttgtcgacgcagaagtagtggaaaattacttaatttaaaaagacgaattaaagaaaaaccaatttcaggaaaaataggaattgcgcatacgaggtgggccactcatggaaaacccacagaaaaaaatgcgcacccgcatttaacagataatgtgggattagttcacaatggtataatcgaaaatcacttagaacttaaggaaagcttaaaactaaaaggggtaaaattcagttctgaaacagatactgaggttattgtcaaattagtggagattgagcttactgaccgcggtttgactccagaagaggcagtaaaagttactctaaaaaagttaaagggttcattcgctctttgttttgtttttcgtggttttgaaaaccttctcattgcaacaaagagaggctctccgcttgcactaggatatgggaaagaagaaatgtttgttggttctgacgctaacgctctatcactatttaccaaaaatatttgttatttggaggaaggggattttgcaataataaaaaaagagaagatctctatttatgattataatgataatgaaattaacagaaaaattgtttatattagaggtgatgctagcgttt

SEQ ID NO: 246779 - DNA, 146 bp, Unknown
  Bacterial polypeptide expressing nucleotide sequence isolated from the Sargasso Sea
tattgaactgcctgaagttcctgagctgattgctcctctaatctactcgatcccattacagttgcttgcttatcatgttgccatccttaaaggcactgacattgatcagccacgaaacctcgctaagtctgtgactgtcgagtagt

SEQ ID NO: 246780 - DNA, 559 bp, Unknown
  Bacterial polypeptide expressing nucleotide sequence isolated from the Sargasso Sea
atgtgtggtattattggttatttaggtaagaaagatccagtacccatcttattgaaaggtctgaaacgccttgaatacaggggatatgattcagctggtattgcattgctaaatggtaatgaattaacccaaataaaaaaagctgggaaagtatcagatcttcagttaatgattgatgattcaccaatgaaaggtaattgtggaatagctcacacccgctgggcaactcatggagaacctaatgatatcaatgctcatccccatcttgatcaaacgggtaaaatttctcttgtccataatggtataattgaaaatcacgacatcatcaaacaggtacttcgagaacaaggcgtctcatttacaagcgatactgataccgaagtgatatctcaattaatatctacgctttactttggtagctcaaaaattagttttgaaaatgctgttcgtttagcattgcaagaaattgttggagcctatgggattgtagtattgtgtgcagatgaaccagaaacattagtggcagcaaagatgggtagccccctcagtatttggaatt

SEQ ID NO: 246781 - DNA, 751 bp, Unknown
  Bacterial polypeptide expressing nucleotide sequence isolated from the Sargasso Sea
tatgtgtggaataatcgggtactcaggccctaaagaaccattaccaattctaattaatggtttatcacgtttagaatatcgaggatacgactcagctggaattgcaatttctgatggtaataaaattactgttgagaaaaaagagggtaaacttgagattttaaaaaatcatttaaaagataataatataaaaggcaacataggtattggacatacaagatgggcaactcatggagttcccaatgacgttaacgctcatccacattccgacaataatgaagaatttgcaatcattcataacggaataattgaaaattatgcagagattaagaaagatcttttagaagaaggttttgaatttaaatctgataccgacacagaggttgttgcagttgaattaagtagaaaatggaatggtcaattgttgaaaactgtaacggatgtagcaaaaactttagaaggaacatatgctcttgttgtaactactacaaaagaagaaggaacaattgttgcaggccgtttaatgagccctcttgtcttaggtgttggagaaaacgaagtatttctagcatctgattcagcagctattttagaacacacaaataaaatgatttttttggaaaatggagattttgtagaaattaaaaatggtcaatataagttgtttgattcagaattgaacgagattgaaagagaaattcaagaaatagactgggaggtctccgaggctgaaaagctagggcatgaccac

SEQ ID NO: 246782 - DNA, 340 bp, Unknown
  Bacterial polypeptide expressing nucleotide sequence isolated from the Sargasso Sea
tatcctgccgcagaaatgaagcatggtccaattgctctaattgatgaaaatatgccagtagtatttattgcacctcatgatgaaacatttaataaggtcctgtcaaatatagaagaagtcaaggcccgtggaggaatagttatttcaatcactgataaaattaataattcactaaaaaaattatcagattttgtattaattgcacctcagacacataaatatgtatttccaataacgtgttctataattttacaaatgttagcatatgaacttgcagtttgtagaaaatgtgaaattgatcaaccaagaaacttggcaaagtcagttacggttgagtaat

SEQ ID NO: 246783 - DNA, 916 bp, Unknown
  Bacterial polypeptide expressing nucleotide sequence isolated from the Sargasso Sea
acactagtaaatggtgatattaatgaggttaaatgcgagggtagagttgatatattagagagagatataaataaatttaaccttagaggtgatattggaataggccacgtaagatgggccacacacggtaaaccaagcaaaattaatgcacaccctcactcatctgatcaggtttcagttgtacataatggcatcattgaaaattcaacaatattaaaaaaatttttagaaaaaaaaggctacattttcaaatcacaaacagatacagaagttatagcgcacctggtaacagaatacctaaaaaagaattcattgaaagacacaattgtaaaagttttaaaaaaacttcacggaagttttgctttaggaatcatatttaaagatcgaagtgattttattgttggagcaagaagaggttctcctttggcagttggttacgggccaaaagaaaattaccttggatctgactcatatgctcttaaggcaatgacaaataaaatctcatatttagatgatggtgaattttgttttgtgaaaaaagaccaaattgaattttttgatagtgagggagtaaaaataaataaaaaagtaatgaatttgtctaaagatgagcttaattatgacaaaggtgattataaatattttatggagaaagaaattgatgaacaaccaactacaattagagattgcttaaatgagtatatagacaaatataataatcaaataaatatttataattttccttggaaaatagcttcttttaaatctgttatgctaattggctgtggaacagcttttcactcttgtttaatagctaaatactggatggaacaaaatacaagtttagacgtaagtgttgatatagcctctgaatttagatacagaaaagtaagatttaaaaaagattgtctatacc

SEQ ID NO: 246784 - DNA, 892 bp, Unknown
  Bacterial polypeptide expressing nucleotide sequence isolated from the Sargasso Sea
tgtagcaaaatattggatggagggactggcaggaatttcttgtagcgtagatgtggcaagtgaattcagatacagaaatgttgttgtaagagaaggtaccctctttgttactatatctcagtcgggagaaacggcagatacactagcctgtttaagagacattagtgattcaggatatatgtcaagcctggctatatgcaatgtacctaccagttcattggttagagaatcagaactagtttttttaaccagagcaggccctgaaataggagtcgcctctacaaaagccttcaccacacagcttctaagcttattaatgctaacattggttctaggaagagagcatggactttcacaagcagcagagaattcaattaataattcccttagagaccttcctgagcttcttgagaaggtaatggcattagagcctgagattattaagatggccgaagattttgatgacaaggagcacgcactttttcttggaagaggaattcattaccccgtagccatggaaggtgcattaaagcttaaagaaatttcttacattcatgcagaggcatatccagcaggcgaattaaagcatggccctttggctttagtggatgacagcatgccagtagtagcggttgcgcctaatgacgatctactagaaaaactccattccaatttagaagaagtaaaggcaagaggaggaaagctttatgtgtttggacacaccgatgcctaccatcaagggtttgcagagaaatttattgagctaccagagatccctgagttaatagcccctttaatttatactattcctcttcagctactttcttatcatgttgccgttctaaaggggacagatattgatcagcctagaaatctagctaagtctgttacg

SEQ ID NO: 246785 - DNA, 856 bp, Unknown
  Bacterial polypeptide expressing nucleotide sequence isolated from the Sargasso Sea
gttgcttcagaatttagatatagaaaaatcagatttaataaaaaaaacctatatgtctttgtatcacaatctggagaaactgcagatacatttgctgcccttgaattatgcaaaaaaaacaaggtaaagacttgttcaattgtaaatgtagttgaaagttctatagccagaacttcagattttgttttaccaattcatgctggtcctgaaattggcgttgcatcaactaaagctttcattggacaaatgttagtactttatattttagcaattaaaatctctgaagttagaaatgagatttctaaatcagattttgaaaaaagaattaatgaaattaaaaaactccctgatttaataaaaaaaacattaaactattgtgaaaaccatataccagtaattgccaaagattttttaaaagcaaaaggagtaatgtttttaggtagaggtttgtcttttccaatagcgctagaaggagctttaaaacttaaagaattatcatacctccatgcagaaggttaccctgctggagaaatgaaacatggtcctttagctttaatagaagaaggtttaccagttgtcattttagctccaaaagataaatattttgaaaaaacaatttctaatatgcaggaagtaattgctcgaggcggaaaagtcattttattaacaaatgaaaataataaaattattagtgaaaatgtaagatttacattggaaatgccaaagacgaacacagatctaacacctttcttactaacagttcctcttcaattattagcttatcatgtagcttcactaaaaaattgtgacatagataaacctagaaatttagcaaaatcagtaactgttgaataaa

SEQ ID NO: 246786 - DNA, 753 bp, Unknown
  Bacterial polypeptide expressing nucleotide sequence isolated from the Sargasso Sea
aaattatttgggttcagattcttatgctcttaaatctatgactaataaaatttcataccttagcgatggtgaattttgtgtaataaagagaaatgacgttgagttttttgatggtaatggaaataaaattaacaaaaaaattttagtattatcctctaatgagcaaaattatgacaaaggtgagtataaacatttcatggcaaaagagatagaagaacaaccaacaactattatgaactgtattaatgaatatatagataaaatcagcaatgagattaatatttcaaattttccatggaaaaaagaacaaatatcttcaataaaatttataggttgtggaacagcatatcattcatgccttttagccaaatattggtttgaacaactttctaatcttgatgttgaggtcgatatagcttcagaatttaggtatagaaaaaatagatttaagaaagattgcctgtatgtatttgtttcacaatcaggagaaactgctgacacttatgcagctttagatttatgtaataaaaatgatatgaagacttgcagtattataaacgttgttgaaagttctattgcaagagactctaattttgttttaccaattcattgtggacctgaaattggtgtagcttccacaaaagcttttcttggacaattattagtcttatatattttatgtttaaaaatctcatttttacgagaggatttaagaaaaattgattataaaaataaaattaaagatctattagg

SEQ ID NO: 246787 - DNA, 196 bp, Unknown
  Bacterial polypeptide expressing nucleotide sequence isolated from the Sargasso Sea
ctgatcggtgtggcgcccgaagggcccgataccgatttgtttgatgaactgctgccggtgccttctgtaagcgagtggctcagccctttgctcacggtggtgccgatgcagttgttgagctatcacatcgccgcccatcgaggcctggatgtggatcaaccccgcaatttggccaagagcgtcacggtggaataag

SEQ ID NO: 246788 - DNA, 946 bp, Unknown
  Bacterial polypeptide expressing nucleotide sequence isolated from the Sargasso Sea
aggcatcaccttaataggatgtggaacagcgtatcactcttgtttaatggcaaaatattggtttgaagaacttacaaatttagatgttaatatagatatagcttctgagtttaggtacagaaaaaatagatttaaaagggacactttgtatgtctttgtttcgcaatctggggaaacagcggatacttatgcagctttagatttatgtaacaaaaataacatgaaaacatgtgctattgttaatgtaatcgaaagttcaatagcaagagattctaattttgttttaccaattcattgtggtcccgaaattggagttgcatcaacaaaagcatttctaggtcaaatacttgttttatatattttagctttaaaacttggatcaatgagaaatgaaattgaaaaaaaagaatatcaagaaaaaattaaagacctaaaagccttgcctggcttaatagagaaaacattgcttcatgataatgatatccaggcaatatcttcaacatttaacgaagcaaagggttcaatgtttttaggaagagggtattcatatccaatagctttagaaggtgcattaaaacttaaagaactttcatatgttcatgccgaaggatatccagcgggggaaatgaaacatggacctttggccttaatagaagagggcatgccagtagttgttttggccccgagagataattattataaaaaaacaatttctaatatgcaggaagttattgctagaggagccaaggtattattgataactaacaaaagtaaagatgaagttgtgtcagaaaatatttgggaaactattgaagttgagaatacaaatgatgacttacttccattccttttgactattccacttcaaaaacttgcttattactctgctctcaaaaaaggttatgacattgataagcctagaaatttggctaaatctgtcactgtt

SEQ ID NO: 246789 - DNA, 865 bp, Unknown
  Bacterial polypeptide expressing nucleotide sequence isolated from the Sargasso Sea
attagatccattaaaagcagtatttgaaactataggcatgctcaaaggtagttttgctttaggtataatatttaaaaatcataaagaattcgttattggagccagaagaggcagccctttagctgttggttattcaaataatgaaaattatttaggttcagactcatacgctttaaaatcaatgacgaataaaatttcgtatttagacgatggtgatgtatgcgttttatcaaaagatgaagttaagttttataatcataatcaacataaaattaataaggaaatttttacactttctgaggataaagcatcagttagtaagggaaattacaaaaattttatgataaaagaaatttttgaacaacctgttactactaaaacttgtttaaaagaatatattgataaaattagagaagaaataaacttttataaccttccattagatccgaaagaaatcaacaagatagtattgattggttgtggaactgcttaccattcttgtttagtagctaaatattggtttgaggagttcacatctataaatattgaagtcgatatagcatcagaatttagatatagaaaagttagatttgacaaaaaagctttatacatatttgtatcacaatctggtgaaaccgctgatacttatgctgctttagatttgtgcaaaaagcaaaatgttaaaacctgttcagttataaatgtcgttgaaagttcaatagccagaaattcagattgtgttttaccaattcatgctggtccagaaataggagttgcatctacaaaagcatttcttggtcaaatgttagttttatacttactttctttaaaaatttctgaagttagaaatgatatgcaaaaaaag

SEQ ID NO: 246790 - DNA, 809 bp, Unknown
  Bacterial polypeptide expressing nucleotide sequence isolated from the Sargasso Sea
caaaacaccttcagatggaaatcttggtattggacatgttagatgggcgacccatggtatacctaatttagtaaatgcacatcctcattcatcagaaattgtttctgttgtgcataatggtattatcgaaaattcagatgaaattaaaaaagatttagaagccaaaggtctaaaatttaaatctcagacagatacagaagttataactctattaatcactgaggctctgaaagacaacgaacctttagactctgtttttagtactttaaaaaaattaaaaggtagttttgctcttggaattatttttagagaccataaagattttataataggtactcgaagaggaagccctttggctgtaggttattctaataaagaaaattatcttggttcagactcttatgcacttaaatctatgactaataaaatttcttatttagacgatggcgatctatgtgttttatcaaaagataaagttgaattttatgacgaaaatgaaacaaaaattaataaaaaagtatatgtgttatctgatgatgaaaatatttctgataaaggagattataaaaactttatgtcaaaagagatatttgagcaaccatcaacagcaaaaaattgtattaatgaatatatagataacttaaaaaaggatattaatatttataattttcctataaggcctgaaaaaattaacaaaataattcttataggatgcggcactgcatatcattcatgtcttgtggctaaatattggtttgaagaactaacatctattgatgtagaaattgatattgcctcccgagtttaga

SEQ ID NO: 246791 - DNA, 601 bp, Unknown
  Bacterial polypeptide expressing nucleotide sequence isolated from the Sargasso Sea
atgtgtggaatagttgcatataagggcccaaaaaattgttatccaatcttaatagatggattgcatcgtttagaatatcgagggtatgattcagcgggtgttgcttgtcttaatgatggaaaaatttcaattacaaaaagaagaggaaaggttattcagctagagcaagggcttaaaaccgacggaaaatttcaaaattgtgatggttcaggcattgcacatacacgctgggctacacacggaaagccaaatcaaatcaatgctcatccacacaaagatcaatcaggaaatattgtattagttcataatggaattatagaaaattataatccaattaaaaaatttttaaaatcaaaaaaaataaaatttaaatctgaaactgatacagaagtattagttcaattgatcggctatttctttaacaaaggaaaactgaattttgaacagtctgtaagagcagcccttcaaagagtagatggggcttatgcgattgttgtcttaaataagaaagagcctgatgttatgatcgcagctagaaaaggtagtccgctagttttaggtgtaaaagataatgaattttttgttggtagtgatattctcc

SEQ ID NO: 246792 - DNA, 914 bp, Unknown
  Bacterial polypeptide expressing nucleotide sequence isolated from the Sargasso Sea
gactgggccgttctgcaatcaacggaagtggaaatttttaatgcttcagggctccccgtcaaacgagaggtgcaaatttctgccttatcagaaactagttttggcaaaggtggttatcagcactttatgttgaaggaaatatatgaacagcctcaagtcatcggagataccttaaatacactaataaaccccaccaaaagaactatttcactgcccccactagagtttgatatctccaagatttctaaactcacactagttgcatgtggaacgtcgttttatgcttgtatggttgcaaaatattggtttgaaagaatttcaagaattcccgttgaagtcgacatcgcgtcagaattcaggtacagagacaatattatggaagatgggggagccacgttattcatctctcaatctggagaaacaattgatactcttgcagccctgagacacgcaaaaaatcaaaagcaaaaaattatttccattgttaatgtgttagaaagtgccatagcccgagagtctgatgcagttctccaaactcaagctggtcctgaaattggggttgcttctaccaaagcatttacaactcagctaactatattagcatgcttctgtatagctgtagctgtggctcggaaaacaatttctcgtgaagagaacgtgcgactaataagcgctcttactgaaactccctcaagagtttcagaaattttaaatcacgatagcagactctcaaaacttgccaagtcgatctctaatgtgacggacgccctttatctaggacgaggtactaatttcccaattgcattagagggcgcattaaaactgaaagaaatttcttacattcatgcggaggggtatgctgctggagagatgaagcatggccccattgcactggttgatgaaaaaatgcccgt

SEQ ID NO: 246793 - DNA, 989 bp, Unknown
  Bacterial polypeptide expressing nucleotide sequence isolated from the Sargasso Sea
tttgaaaataatttttgatttaaaaaatttaaaaggaaacataggcattggacacgttagatgggctacgcatggtgtaccaaatagtgtaaatgcacatccacattcatctcacaatgtttcagttgttcataatggaattattgagaattctacaatattaaaaaaacatttagtcagcaaaggtcataatttcaaatctcaaactgatacagaagtcattgttcatcttataacagaacatttaaagtcatcagaattagaagaagctattacaaatactttgaaaaaacttcatggcagttttgccctaggaattgtttttaaagacatgccagatttaattgttggcgccagaagaggctctcctttagctgtcggttatggtccaaatgaaaactacctagggtcagattcctatgctttgaagtcaatgacaaataagatcacatatctcgatgatggtgaattttgtattgttaaaaaagatcaagttcttttttttaacgaggaaggtaaaaaaattaataaaaaaatattagaattatcatcagatgaagcaagttataataaaggtgattttaagcattttatggctaaagaaattgaggaacagcctacaacaattaaaactggaattaaggaatatgtagataatgttaataaagaaataaatatctttaattttccatggaaaataagtgaaattaaatcagttactttaataggatgtggaactgcatatcattcttgcctaatggcaaaatattggttcgaggaacttactacattggatgttaatatagatatagcttctgagtttagatatagaaaaaatagatttaaagaagatagtttgtatgtttttgtttctcaatcaggagaaacagcagatacttacgctgctctagatctttgtaataaaaacaatatgaagacttgtgctggtgttaatgtagttgaaagctcaatagcaagagactctaatt

SEQ ID NO: 246794 - DNA, 403 bp, Unknown
  Bacterial polypeptide expressing nucleotide sequence isolated from the Sargasso Sea
ttatcccatagcaatggaaggagcacttaaacttaaagagttaagttatattcatgcagaaggataccctgcaggtgaaatgaaacacggtccaatatctctaattgattcaaatatgcctgtgttcaatattgtaacggatggtccgtatttaaataaaatgatttctaatataagagaaattcaatcaagaaaaggtaaaattattgttctgacaaattgtcctgaaaaattagatccttcttggtacaatgacattattatttttgacaaaactgatgatctattatctccattcttatctactgtttgcattcaattatttgctatgtatttagcaacacagcgtaagttagatattgatcaaccaagaaatctggcaaaatctgtaacagtggaataa

SEQ ID NO: 246795 - DNA, 256 bp, Unknown
  Bacterial polypeptide expressing nucleotide sequence isolated from the Sargasso Sea
ttataaaaaaacaatttctaatatgcaggaggttatagctcgaggagctaaagttttattgattacaaataaaagtaaggatgaggtagtttcagagaatatttgggagactctcgaagttgaaagcactaatgatgatcttcttccttttcttttaactattcccttgcaaaaattagcttattattctgctcttaaaaaaggttatgatatcgataaaccaagaaatttagctaaatctgttaccgttgaataa

SEQ ID NO: 246796 - DNA, 886 bp, Unknown
  Bacterial polypeptide expressing nucleotide sequence isolated from the Sargasso Sea
tttaaaaatatccattcaattgatctaaaatctattaatcgctttgttattcaagcatgtggcacatcatggcacgcagggcttattggaaaatatttatttgaattttatgcaaaaacattaacagaagtagatatctcttcagagtttcgctatagacgtatgatttcacacagtaacgatgtcttacttgccatatcccaatcaggagaaacagctgatacactagcaggaattcgtgaagcaaaagcaaatttctttccagtaatttcgtttgttaacgtaaaaaatagttctatggacagagaatctgatggtgtagtctacagttactctggtcaagaagttggtgtagcctcaactaaaaattatctttcacaactaacaacactttatttattttctatccatctagcgctaacaaaaaatgaactgtcgcaagaaaaagcaaacatgcttattcaagaactaaaaaaaatacctgactacatagaaagtctgttaaaccaagaaaaagaaataaaaaaaatagcagataaatactataaaaatgatcaatttttatttatcggaagaggcttaaactacccaagtgcactagaaggagctctaaagttaaaagaaatctcctatattcatgcaacgggatatgccgcaggcgaattaaaacatggacctattgcattaattgattcaaagcttcctgttgtctgtatagctccaaacacagcaaactatgaaaagatgcaaagcaatattgaagaagtctgcgcaagaaaaggtaaaacaatcattattgctagcgaaaacaacaaaaccataaaaaaattcgcagaagacattctttatattccaaatacaaccgaagagctttctccactacttg

SEQ ID NO: 246797 - DNA, 705 bp, Unknown
  Bacterial polypeptide expressing nucleotide sequence isolated from the Sargasso Sea
aatgtgtggaatagttggaataacaagtaataaagaagtaacgacaagaataataaattcacttaagaaattagaatatcgagggtatgactctgctggtatagcaactcttaaaaatggatatataaacgaagtaaagtgcgaaggtagagtagaagcattagaaaaaaatgtttcaaaaactaatcttcagggtgatattgggataggacacgtaagatgggcaactcatggaaaacctagtcatgtaaatgcacatcctcattcatctgaaaaagtttcagtagtacataatggaattatagaaaattcaacaattttaaaaaaaatattagaaaaaaaaggatataagtttaagtcacagacggataccgaagtaattgcacatttggttactgattatttaaaaaaaaataatttaaaagatacaataattaaagttttaaaaaaattacatggaagctttgcattaggaattatttttaaagattacccagatttaattattggtgcacgaagaggctcacctttagcagttggttatggacccaatgaaaactatcttggctcagactcttatgctttaaaatctatgactaataaaatttcatatcttaatgatggtgatttttgcttaataaaagaaaaccaagttcaattttttaatcacactggaaaaaaagtaaataaggaaattttaaactt

SEQ ID NO: 246798 - DNA, 901 bp, Unknown
  Bacterial polypeptide expressing nucleotide sequence isolated from the Sargasso Sea
tttaatggctaaatattggtttgaagagcttacaaccttagatgttaacatagatatagcgtcagaatttagatacagaaaaaataggtttaaaaaagacactttatatatttttgtttcgcagtcgggagaaacagcagatacatatgctgcactagatctttgtaacaaaaataagatgaaaacatgcgctgttgttaatgtaatcgaaagttcaatagcaagagacgctaattttgttttaccaattcattgtggtcctgaaattggagttgcatcaacaaaagcatttttaggtcaaatacttgttttatatattttagctttaaaacttggatcaatgaaaaatgaaattgaaaaaaaggattatcaagaaaagattaaagacttaaaagctttgcctggcttaatagagaaaacattacttcatgataatgacatacaggcaatatcctcaacatttaatgaggcaaagggctcaatgtttttaggaagaggttattcatatccgatagctttagaaggtgcactaaaacttaaagaactttcatacgttcatgccgaaggatatccagcaggagaaatgaaacatggcccattagctctaattgaagagggaatgcctgtagtagttttggctcctagagataattattataaaaaaacaatttcaaacatgcaggaagttattgctagaggtgcaaaggtattattaataactaataaaagcaaagatgaaattgtttcagaaaatatttgggaaactattgaagttgagaatacaaatgatgacttacttccgttccttttgactattccacttcaaaagcttgcatatttctctgctcttaaaaaaggttatgatattgataagcctagaaatttggctaaatctgtcact

SEQ ID NO: 246799 - DNA, 930 bp, Unknown
  Bacterial polypeptide expressing nucleotide sequence isolated from the Sargasso Sea
ttatcttggctcagactcttatgctttaaaatcaatgactaataaagtttcatacttaaatgatggagagttctgcattattaaaaaagatagtattgagttttttgatgaagacgcaaaaaaaataaataaaaaaatactagaactttcctcaaatgaaaataattatgacaaaggtgaatacaaacattatatggccaaagagattgatgaacagccagtcacaataaaaaattgtatcaacgaatatatagataaaattaacaatgatataaatatttttaacttcccatggaaatccaaagagatttcctcaatagttttgattggatgtggtacagcataccattcttgtttaatgtctaaatattggtttgaacaacttacatcatttgatgtttctgttgatatagcttcggaatttaggtatcggaaaaataggtttaaaaaagacgcattgtatatatttgtttcacaatcgggtgaaacagcagacacatatgctgctttagatttatgtaacaaaaatgacatgaaaacatgctcaattgtaaatgttgttgaaagctcaatagcaagagattcaaaatttgtgcttccaatacattgtggacctgaaattggtgtagcatcaaccaaagcattcattggccaaatgttagttttatatttactatgtgttaagttagccaaaaatagaaaagatatatcagatgaaaattttataaaaaaaataaattctttaaaattgttatctggacttattaaagaaagtttaaaaactgaaaatgaaatccaatcaatttgcaattcgtttgtagaggcgaagggttcaatgtttttgggaagaggttactcctatccaatagctcttgaaggagcattaaaattaaaagaattagcatatgttcatgcagaaagttatccggc

SEQ ID NO: 246800 - DNA, 823 bp, Unknown
  Bacterial polypeptide expressing nucleotide sequence isolated from the Sargasso Sea
gtttgtagaaaaaaaagattttaaaattaaaggtaagttcaagcatttcatggaaaaagaaatttttcaccaacctataagccttgaagacacaattttaaattttgctgataaaaaaactaattcagtttttttgcccaaaaacaaaattgattttaatgatatctctaatgtaattttggtagcttgcggcaccgcttaccattcatgcatgatagctaagtattggttggagcaaatgactgataagaatgtctcaattgatattgcttcagaatatcgatacaaaaaaaataatattgataaaaattctattgccatagttatttctcaatccggtgaaacaatggatacacttgaatgtttaaaaaagtttaaacagaatgatctaattacaatctcgatagttaatgttcttaacagttcaatagctcgaatgagtgactatgtattgcctacattagcaggtccagaaataggagtagcttctacgaaagcatttacagcacaattagctgttttggccttattaggtttgcacattcagcaacaaaacaatgatatagaaaaaaatgtttttaattccctttttagtattcatgaatcaataaaaaaaattttaaatgattttaaaaggtttgaagaaatagcccatagtttaagagatgcaaaaagcatattttatattggtagaggtattatgtatcccatagcgttggaaggggcacttaaattaaaagaaattacatacaagcactgtgaagggtatgcagctggcgaattaaaacacgggcctttagcgttaatagaagatcaaatacca

SEQ ID NO: 246801 - DNA, 772 bp, Unknown
  Bacterial polypeptide expressing nucleotide sequence isolated from the Sargasso Sea
gcagatacagcagccgcattagatatatgtaaaaaaaataaagtaaaaacctgttcacttgtaaacgttgtagaaagtacaatagctagaaattccgattgggtgttacctattcatgctggtccagaaattggagtagcttctacaaaggcttttctaggacaactaatagtcttatatatacttactttaaaacttgcaatttacagaggagatattgataaaaaaaattacgataataatttacaaaacttacaaaaacttccagatgcaattaaaaatactctaaaacttgagagtgaaattcagttaatggctaaagaatttttagatgctaaaggatcaatgtttttaggaagaggaaattcttttccagttgcccttgaaggtgctttaaaattaaaggaactttcttatttacatgccgaaggatatccggcaggtgaaatgaaacatggacctttagctttaattgaagaaggcctaccagtaatagtaattgcacctaatgatagatattatgaaaaaactttatcaaatactcaagaagtaatagcaaggggaggtaaaattttttttataactgataataagaaaagactattaagtacaaatattagatttagattgagagtacctcgtgtagataatcttttatcacctttattactaacaattcctctacaactattagcttatcacgtagcgttattaaaaaattgtgatattgataaacctagaaatttagcaaaatcagttacagtagaataaa

SEQ ID NO: 246802 - DNA, 907 bp, Unknown
  Bacterial polypeptide expressing nucleotide sequence isolated from the Sargasso Sea
tatgtcaaaggagatatttgaacaatctataactgcaaaaaattgcattaatgaatatattgatagtttaaaaaaagatatcaatatttatgattttccagttaaaccagaaaaaattaacaagattgttttaataggatgtggaacagcctaccattcatgtctagttgcaaaatattggtttgaagaacttacaactattgatgttgaaattgatatagcttctgagtttagatacagaaagttaaaatttaattctgacaatttatatatttttgtttctcaatcaggtgaaactgctgacacagcagcagcattagatctatgtaaaaaaaataaagtaaaaacttgctcagtggtgaattctgtagaaagcacaatagcaagaaattctgattgggtccttcctattcatgctggtcctgagattggtgtagcttcaacaaaagcttttttaggtcaaatgatagttttgtatatcttgtgtttaaaattagctcaaagaagaaaagatataaatatttcatcatatcaaattaatataaaaaacttaaaaactcttccggaggcgatcaaaaaaagccttaaagtagaaaacagtattcaagctatggcaaaagaatttcttgatgctaaaggatcaatgtttttaggaagggggttatcttttccaattgcactagaaggagctttaaagttaaaagaattgtcttatttacatgcagaaggttatcctgcaggtgaaatgaaacatgggcctttagcactaatcgaagaaggattgcctgtaattgtaatagcccctaaagataaatattttgaaaaaaccctttcaaacatgcaagaagttattgcaagaggaggaaagattttatttattacagatcataaaaaagaagtaatttaa

SEQ ID NO: 246803 - DNA, 795 bp, Unknown
  Bacterial polypeptide expressing nucleotide sequence isolated from the Sargasso Sea
ttggatctttaggaattggtcatgttagatgggctactcatggagttcctaaccaggtaaatgctcaccctcattcttctgatgaagtttccgttgttcacaatggaataattgaaaattctaatgatttaaaaaaagatctagaaaaaaaaggttataaatttaaatcacaaactgatactgaggttattacatttcttcttacagattttttaaaagattttgatctagtagatgcgataaataaaactttaaaaatacttaatggaagttttgctgtgggaattctttttaaaaaatataaaaatattgttgttggtgcaagaagaggaagtccacttgctgtcggatatggacctgaagaaaattatttaggctcagactcttacgccttaaaatcaatgacaaacaaaattacttatttagatgatggtgatatatgtatattgacaaataataagattgatttttataattctaaaaataaaaaaataaataaagaaattttaactctttccaatgataaacataccgcagaaaaaggtgactataaagattttatgtctaaggagattaatgagcaaaacgtgactaccaaaacttgtattaaggaatacgttgatcaacttagaaaagatattaacctatataattttcctatcagtcctaaagatattaaaaaaatagttttaatcggatgcggtaccgcctttcattcctgtgctattgcaaaatattggtttgaggaacttacaaatattccagtcgaaagtgatattgcttcaggaatttaga

SEQ ID NO: 246804 - DNA, 801 bp, Unknown
  Bacterial polypeptide expressing nucleotide sequence isolated from the Sargasso Sea
aacttacaaattttagatgttaacatagatatagcgtcagaatttagatatagaaaaaatagatttaaaaaggacactgtatatgtctttgtttcacaatctggggaaacagcggatacctatgcggctctagatctatgtaataaaaataacatgaaaacatgtgctgttgttaatgtaatcgaaagctcaatagcaagagattctaattttgttttaccaattcattgtggccccgaaattggagtcgcatcaacaaaagcatttctaggtcaaatacttgttttatatattttggctttaaaacttggatcaatgcgaaatgaaattaaaaaaaaagaatatcaggaaaagattaaaggtttaataaccttaccaagtcttatagagaaaacattgcttcatgataatgatatccaggcaatatcctcaacattcaacgaagcaaaaggttcaatgtttttaggtagaggttattcatatccaatagctttagaaggtgcattaaaacttaaagaactttcatacgttcatgctgaaggatatccagcaggtgaaatgaaacatgggccattagctttaattgaagaaggaatgcctgtagtagttttggcccctagagataattattacaaaaaaacaatttcgaatatgcaggaggttattgcaagaggagcaaaggtattattgataacaaataaaagcaaagatgaagttgtgtcagaaaatatttgggaaactattgaggttgagaatacaaatgatgacttgcttccatttcttttgacaataccacttcaa

SEQ ID NO: 246805 - DNA, 298 bp, Unknown
  Bacterial polypeptide expressing nucleotide sequence isolated from the Sargasso Sea
tgaagatggtatgccggtaattgtattagcaccaaaagatagatattttgaaaaaactatttcgaatatgcaggaggtaatagctagaggcggtaaagttataatgataactgatgatacatcgacaacaatgagtgaaaatataagatttaaattccaaattccaaaaacaaattcaactcttaacccttttttattaagtatcccacttcaatttttagcttatcatgtagcattgttaaaaaattgtgatatagataaaccaagaaacttagcaaaatcagtaacagtagagtaa

SEQ ID NO: 246806 - DNA, 802 bp, Unknown
  Bacterial polypeptide expressing nucleotide sequence isolated from the Sargasso Sea
tttatttgtgtgtatttcgcagtcaggagagaccgcagacaccatggcggcattgaactatgcaaaagaagaaaaatatttaggtattgttacaatttgtaatgttccaacaagcaccatggcaagagagtccgattggaaaatatttacaaacgcaggccctgaaatcggcgttgcctcaaccaaagcatttacaacacagcttgcggcactaatgctgttggcttgttcaatatcaaaaagcaaaggcataaatggggataaaaggtcagaagccattaaggacctcgctaatacaccagagcttgtgaaagaagcgtttgggctaaaaaagcacatagatgatattgttgagaaaattgcagacaaaaagaatgcattgtatttaggcaggggcgtttacttctcaattgcacaagagggagcattgaaattcaaggagattacatatattcatgctgaggcatatccagcaggcgagttaaaacatgggccacttgcacttgttgatgagatgacacccgttgtagcccttgcaccagaagatgagctcgtagaaaagctcgtctcaaatctcgaagaggtcaaatcaagaggaggcacgctttacgtctttggaaacgcaacatcaaagataaaaattgaaaaaggaaaatttatgaacatgccagattgcggttactacaatgcaccaattgtttacacaataccattacaaatattagcctatgaggttgcatgctcaataggaacggacttagatcaaccaaggaacctagcaaaatcagtcactgtggaataa

SEQ ID NO: 246807 - DNA, 807 bp, Unknown
  Bacterial polypeptide expressing nucleotide sequence isolated from the Sargasso Sea
aatattgaaaaagttcttagaaaaaaaaggttacatatttaaatcacaaactgacactgaagtaatagcccatttagttaccgaatatcttaaaaaaaattcattaaaagattcaataataaaagttctcaaaaaacttcatggaagttttgcactaggaataatatttaaagatcaaaataatcttatggtaggagcaaaaagaggatctccattagccgtaggttatggcccaaatgaaaactatcttggttcagattcatatgcattaaaatctatgacaaataaaatttcttatttagatgatggagaattttgtattgttaaaaaagatgaaattgaattttttgatactgaaggcacaaaagtaaataaaaaagtgatgaatttatctaaagatgaaatcgactacgataaaggtgattataaatattttatggagaaagaaattgatgaacaaccatcaacgattactgactgtataaatgagtacgttgataaacataacaagcaaatcaatatttataattttccatggaaaataagctctattgattcgataatgctaataggttgtggaacagcttttcactcgtgtttgatggctaaatattggatggaacaaaataccaatttagacgtcagcgttgatatagcttctgaatttagatatcgaaaagttagatttaagaaaaactgcctatatattgttgtttcacaatccggggaaacggctgatactcacgcagcattagatttatgtaaaaaaaataatatgaaaacttgtgcagttataaatgttattga

SEQ ID NO: 246808 - DNA, 564 bp, Unknown
  Bacterial polypeptide expressing nucleotide sequence isolated from the Sargasso Sea
tatgtgcggaattattggtgtagtaggaaaaaataaagcagaaggtcttttattagaaggccttagaagattagaatatagaggatatgattccgcaggaatagctactttagttgataataaaattgataaaagaagagctagtggtaaaatttctaatttaactaaattattaaaagagaatccattgcctggttcaacaggcattgctcatactagatgggctacgcatggtgcaccgaatgaaaataatgctcaccctcatgcaaatgataaagttgcaatagtccacaatggaattatagaaaattatatagaaatacgtgaagaattaattgcaaaagggcataaattccatacagagactgatagtgaagtaattgttcatttaatctcaaattatatccaaaatggaatggataatgtttcagctgttagaaagtcaataaaaaggttggatggtgcatttgcattaggaatattattagcaggtaaagaagatatcttgatagccgcaagacaagatagtccattagctataggttatggaaaggatgaaatgta

SEQ ID NO: 246809 - DNA, 845 bp, Unknown
  Bacterial polypeptide expressing nucleotide sequence isolated from the Sargasso Sea
tatgaaaggtactattggaattggccatgtgagatgggcaactcatggtttaccaaacagtattaatgcacatccacattcatcacaaaatgtttctgtagtccataatggaataattgaaaattcaactttattaaaaaaatttctagttagtaaaggtcatcagtttaaatcacaaactgatactgaggtaatagttcatttgatcacagaaaacttaaaaactgaaaatattgttaattcgattaagaaaactttgaaatctttgcatggaagttttgcactaggaataatatttaaggatcaaccagatttgattataggagctagacgaggctctcctcttgctgttggctatggtcctaatgaaaattacttgggatctgactcgtatgccctaaagtcaatgactaataagattacttatttaaatgatggtgaattttgtgtaattaaaaaagatcatgtagagtttttcaatgatgatggaattaagataaataaaaaagttttagaattatcttcttcagaggaaaaatatgacaaaggcgattataagcacttcatggcaaaagaaatagaggaacaaccaaatactcttaaaaatggaattaatgaatatatagatacatcaaataataatataaatatttataattttccttggaaaattgaggaaatttcatctgtaactttaattggttgtggaacagcttatcactcatgcttaatggctaagtattggtttgaagaattaacatcactagatgttaatgtagatatagcatctgaatttaggtacagaaaaaatagatttaaaaaagatactttgtatgtgtttgtat

SEQ ID NO: 246810 - DNA, 466 bp, Unknown
  Bacterial polypeptide expressing nucleotide sequence isolated from the Sargasso Sea
atgtgtggaattataggaattaacagtaagaaacctgtatcagcatcaataattaattctctaaaaaaattagagtatagaggctacgactcagcaggaattgcaactctttcagatggttttataaatgaagtaaagtcagagggtagagttgataatcttgaaaaaaattctgtagtccaaaatatggtaggaactataggtatcgggcatgttagatgggcaacacacggactaccaaataggattaatgctcatcctcattcctcacaaaatgtgtctgtcgtacacaatggaattattgaaaactcaacattattgaaaaaatttttagttagcaaaggtcataaatttaaatcacaaacagatacagaagtaattgttcacctaattactgagaatttaaaaactgataatattgttaattcaattaagaaaactttaaaatctcttcatggaagttttg

SEQ ID NO: 246811 - DNA, 676 bp, Unknown
  Bacterial polypeptide expressing nucleotide sequence isolated from the Sargasso Sea
tttgtattaccaattcattgtggacctgaaataggtgtagcttcaacaaaagcttttttaggtcaaatgttggttctctatatactttgtctcaaattagcttatgacagaaaagatattgataaaaaaattgttagctcaaaagtaaaatctttattagatttatcaaaaaacgttaaaaaaacactatttactgaagatcaaattcaattagtttgtaaaagttttgtagatgcaaaaggatctatgtttctaggaagaggtttttcttaccctatagctttagagggggctcttaaattaaaggaattagcttatgttcatgctgaaggataccctgctggagaaatgaaacatggaccacttgcattaattgaagatggaatgcccgtagtagttttagcaccaagggacgaatatttcaaaaaaactatttcaaatatgcaagaggtaatcgcacgtggcgcaaaagttctattaattactaacaagagcaaagatgaagtagttcatgaaaatatctggcaatcaatagaggtagaaaacacaaatgatgatctattaccttttttaataactattcctttacaaaaactggcatatcattctgctttaaataaaggttatgatatagataaaccaagaaatttagcaaaatctgtcactgttgaataat

SEQ ID NO: 246812 - DNA, 868 bp, Unknown
  Bacterial polypeptide expressing nucleotide sequence isolated from the Sargasso Sea
aatggtttagaaaaactcgaatacagaggttatgattctgcaggtattgcaataataaattccgaaactaattgtatttcttgtaataaagcagaaggaaaacttaagaatttaataagtaatcttaatgatcataatattcctggaactgtcggtataggacatactagatgggcaactcatggaaaacctgaagttaaaaatgcacatcctcacattgatagttcaggaaatatagcagttgttcaaaatggcattattgaaaattttcaagatttaaaaaataaattagaggaagagggcattatttttaattctgatacagataccgaggtaattccccatctaattcaaagagagttaaataatttaagtaaacttaatcttgagaataatggttcaacattattagtagctgtgagaaatgtattatcggatttagaaggatcttatgctttagcagttttgtggtctggtgctccaacctctttggtagttgcaagaagacaagcgcccttgattattggtttgggtgaaggagaatttatttgtgctagtgatactccagcaattgcaaactttacgaatattattttgcctatggaggatgaagaaatagctttgttgactccacttggaattgaaatatatgactcaggcaatgagaggcagtatagaaatccagtttctttaaaagtctcagagcaaataatagataagatgaatttcaaacactacatgttgaaagagatatatgatcaaccacagactgcaaaaaactggttggaaaattatttaattaagaactcagataatgatcaatatcaaattaactatccctttgatacagagtttttgaatcaataga

SEQ ID NO: 246813 - DNA, 787 bp, Unknown
  Bacterial polypeptide expressing nucleotide sequence isolated from the Sargasso Sea
tctaaagaagaacttaattacaacaaaggtgactataaatattttatggaaaaagagatagaggaacagccctcaactattaatgattgtattaatgaatatgtagataaatataataatcaaataaatatttataattttccatggaaaatcagttctttaaaagctattgtactgataggctgtggaacagcatatcattcttgtttggttgccaaatattggttagagcaaaatacaaatttagacgtgagtatagatattgcttctgagttcagatatcgaaaagttagatttaaaaaagattgcttatacgtatttgtatctcaatcaggtgaaacagctgacacgtatgcggctttagaattgtgtaagaaaaataaaatgaagacttgttcagttgtgaatgttgtcgaaagctcaatagcaagaaacgcggatttagttttacctatatattgtggacaagaaataggggttgcatctacaaaagcttttcttgggcaaatgttagtactttatatattgtccttaaaaatttcatttgaacagaaagtaattacaaagaaaacatatcactcaaagattaaaaatttactattgttgtcaaattcagcaaaaaaaacacttaaattagatcataaacttttaaaaattggtaaagtttttgctcaagcaaaaggatgtatgtttttaggaagaggctattcttttcccattgctctagagggtgcattaaaactaaaagaattagcctatgtgcatgccgaaggttacccagcaggga

SEQ ID NO: 246814 - DNA, 893 bp, Unknown
  Bacterial polypeptide expressing nucleotide sequence isolated from the Sargasso Sea
aaaaagcaagcttggaattgcacatacaaggtgggcaacccatggtgagccttctgaagaaaacgcgcatcctcacaaatcaaacgaaagggtgtatatcgttcacaatgggataattgaaaattacttagatttaaaagattttttaaaaaaagagggatattcatttacatctcaaacagactcagagctcattgctcatatgcttgagcattttttaaatcagggaaactctatgttaaattcgatgtatttaacaaaagacaagcttgatggtgcatacgccatcgcagccatagatttagaagatgatcaaaatattatcattgccagaagtaaatcaccgttattaattggaataggcatagatgagcttttagcagcttcagacccgctagctcttggagaactaaccaatgaattcatttttttagaagatggtgatgttgctgaattatcctcggacaactattcaatttacgacattaacaaagaaaaagttgaaagagaaatttctaaaatagatatttctagccaatcaacctcaaaaggcgaatacaagcattttatggaaaaagaaatttatgaacagcctgaggctatattaaacactattgatggaagagttgggggtgatgatgttttagataatatttttggacttggatcatcagaaatgtttgaaaaaattaaaaggattcaaatcgtagcttgcggaactagtcttcatgcaggaagagttgcagcaaactggctctcatcaatatcagagctaccaactcaaatagattacgcatctgagtatagatacagaaatccacatgttgacgaggactctttgctagtaacaatttctcaatcaggtgaaactgcagatactttagcagctctca

SEQ ID NO: 246815 - DNA, 264 bp, Unknown
  Bacterial polypeptide expressing nucleotide sequence isolated from the Sargasso Sea
ataattattataaaaagactatttcaaacatgcaggaagttattgctagaggagcaaaagttttattaattacaaacaaaagtaatgatgagataatttctgagaatatctgggaaacaatagaagttgagagcactaatcaggatcttcttccttttcttttaacaataccgttgcagaaacttgcttattattctgctcttaaaaaaggttttgacatagataaacctagaaatttggcaaaatctgtaaccgttgaataat

SEQ ID NO: 246816 - DNA, 391 bp, Unknown
  Bacterial polypeptide expressing nucleotide sequence isolated from the Sargasso Sea
agagagggtgccttaaagttaaaagaaatttcctatatacacgcagaagcttatgcagctggagaattaaagcatggcccacttgcaatagtagatgaaaatatgccggtagtagctgtagctccgaacaacgtcgttctagaaaaacttaaatctaatttagaagaagttaaagctcgaggtggaaaactttatatttttgctgataaaaaagcaggttttaaaagtgatgaaatatcgcaagtttttgaaattgatgctccaatgaatccagttgccccaatattatttacaatacctcttcagcttctcgcgtatcattgcgcaattattaagggtactaatgtagatatgcctaggaacttagcaaagtcagtcacggtggagtagt

SEQ ID NO: 246817 - DNA, 391 bp, Unknown
  Bacterial polypeptide expressing nucleotide sequence isolated from the Sargasso Sea
gctaaagagggagcactaaagcttaaagaaatttcttacattcatgctgaagcttatcctgctggcgagttaaaacatggacctcttgctttaatagatgaagaaattccagttattgctttagcgccagagagcgagatagctgaaaaattagtttctaatctcgaagaagttaaagctaggggcggaactctatatgtattttctgatccttcaatttcaatggatttaaagtctggaagactcatcaatatgccaaagtgcgacttccttttgactcctatcatttatacgatacctcttcaaatactttcttatgaagtagctttgttaagaggaaccgatatcgatcaaccaagaaatttagcaaagtcagtcacggtggagtagt

SEQ ID NO: 246818 - DNA, 251 bp, Unknown
  Bacterial polypeptide expressing nucleotide sequence isolated from the Sargasso Sea
aaaaacaatttcaaatatgcaggaagtaatatctagaggtgcaaaagttttattaataacaaacaaaagcactgatgaaatttattctgaaaatatatgggagcaaatagaagttgataatatatcagacgaacttattccttttttgaccactatacctttgcaaaagttagcatattactctgcactagataaaggatacgatatagataagccaagaaacttagctaaatctgtcactgttgaataaa

SEQ ID NO: 246819 - DNA, 823 bp, Unknown
  Bacterial polypeptide expressing nucleotide sequence isolated from the Sargasso Sea
ttaacggatttagatatatctgtagatattgcatctgaatttagatataggaaaaataaatttaaaagtgaaagcttatacatatttgtatctcaatcaggtgaaactgccgatacttatgcagcgttagatttatgtaataaaaataaaatgaaaacctgcagtgttgtcaatgtagttgaaagttcaattgctcgcgactctaaatttgtacttcctatacattgtggtccagaaattggtgttgcatctacaaaagctttccttggtcaaatgttagttttatatttattttcaattaaaatagcttttgttagaggcagtattgataaagataagtaccaaacaaaaattaaatctcttttaagtctagcggatctagtaaaaaatacattagacactgataatcaaattcaatcagcatgtaattcatttgttgatgcaaaaggatcaatgtttttaggaagaggaagttcattcccaatagccttagaaggtgctcttaaattaaaagaattggcttatatacatgctgaaggatatccagctggggaaatgaaacatggacctcttgctttaatagaagatgggatgccagtagtcgttattgctccaagagattattattataataaaacaatttcaaatatgcaggaagtcatcgcaagaggcgcaaaggtattgctaataaccaataaaagtacagatgaaatattttctgaaaatatttggcaaaagatagaagttgaaaatacagatgaagatcttttacctttcttaataacaattccattacaaaaacttgcttatcattctgcattaa

SEQ ID NO: 246820 - DNA, 469 bp, Unknown
  Bacterial polypeptide expressing nucleotide sequence isolated from the Sargasso Sea
atgtgtggaattataggaattgcaagtacaaaaaatgtttcagcatcaatactgaattcattaagaaaactagagtacagaggatacgattcagcaggtattgcaactttagaaagtggaatcataaaagaagttaaatgcgaaggtagagtagatgctcttgaaaataatttatcaaaacaaaaaattgatggaaatattggtataggacatgttagatgggcaacacatggcgtgccaagtacagttaacgcgcacccccactcatcggataaagtttcagtagttcataatggcattatagagaattcaacaattcttaaaaaactattaataaaaaaaggttatatttttaaatcacaaacagatacagaggtaattgttcatttaataactgactatcttaaaaaaaataatcttaaaaattctataattaaaatgcttaaaagagttcatggaagttttgcat

SEQ ID NO: 246821 - DNA, 738 bp, Unknown
  Bacterial polypeptide expressing nucleotide sequence isolated from the Sargasso Sea
gatgtgtgggattatagctgctgcctcaaatcgtaacgttggtaagttactagttcaaggactccataaaatggaatatcgtggatacgattctgcgggcatagcacttcatcaaaaagaccaaatagctcatttaagaacactaggcaaagttaaattgctagaagaaaaaatgattgctgaaaagccaaaaagtaaattgggcattgcacacactagatgggcaacccacggcgagccatcggaagaaaatgcacatccacataaatccaatgacagggtgtacatagttcataatggaattattgaaaattatcttgacctaaaagaatttcttaaaagagaaggttataccttttcatctcaaactgactcagaactaattgctcacttacttgaacattttcttagcatgggcaattcaatgatcgactcaatgtatttaacaaaagaaaagcttgatggagcatatgcaatcgcagcaattgatagagaggatgaacaaaatatagtgattgccagaagcaaatcacccctgttaattgggattgggacagatgaatatttagccgcctcagacccgcttgcaatagggcaactaaccaataaatttatatttcttgaagatggtgatgtcgctgaacttacttcaaaaagctatacaatttttgatgatgataagcaaaaagttagtagagaaattacaaatattgatattttcaatcaagcaacatcgaa

SEQ ID NO: 246822 - DNA, 306 bp, Unknown
  Bacterial polypeptide expressing nucleotide sequence isolated from the Sargasso Sea
tatgtgtggcatagttggcgcagtagcgcagcgtgatgtagtagacattttggtagaaggcctgcgccgcttagagtaccgcggttatgactcggccggtgtggcagtcgtcaccgaaagtggcgaacttacccggctgcgccgcttaggtaaggtaaaagagttagccgatgcggtcgctgaaaagccggtagttggtggtactggtattgcccatacccgttgggccacccacggcgagcccagcgagcgcaatgcccacccgcatgtctccagcaatatcactgttgtgcataacggcattat

SEQ ID NO: 246823 - DNA, 773 bp, Unknown
  Bacterial polypeptide expressing nucleotide sequence isolated from the Sargasso Sea
tcatgttgaaagaatctatgaacagccgcaggtcattggcgataccctgcattcatacgtgaacccggtcacccgggcagtcagtctgccggagttgggttttgaccccgcatcggtgacgcgccttaccctaatcgcctgtggcacctcttattacgcttgcctaacggccaagtactggttcgaaaccatcgcccgaattccggtggaagtcgatatcgcctccgagttccgctaccgcgaggcgccgctgcccgctggcggcgctaccctggtcatctcacaatcgggggagaccattgacaccttggcagcgctgcgctacgcgcggtctcaagatcagaaaatcctctccgtcgtgaacgttccggaaagcgccatcgcccgagaatcagatgccgtcttacaaacctacgccgggcccgagatcggcgtggcctccacaaaagcgttcaccacgcaattgaccgtcctggcctgcctggccatcgccatggcacacgcccgggaaatgatagatgacaccgagcgcggtcgccttgttggcgcgcttacggaagtcccggcccgggcggcggagatccttaatcacgacgaacaactcgcccagatcgcccatgacatagcggaggcccgcgacgtcctgtatctgggccgtgggaccagctatccgttggccttggaaggggcactgaaactcaaagagatttcctacatccacgccgaaggctacgccgcaggcgaaatgaagcacggcccaatcgctctgatcg

SEQ ID NO: 246824 - DNA, 274 bp, Unknown
  Bacterial polypeptide expressing nucleotide sequence isolated from the Sargasso Sea
ctcattcctaaagacgctgtctacgaaaaagttcttcttaacctcgaagagaccaaggcacgaaaaggcccgattattgctgttgttagtgaaggagatgatcgtgtccaacaccttgctgatgaagtaattgagctacctgaatgccctgactttcttaatccgattgttgcatcaatcccccttcaacttctcgcctatcacattgccgtatttcgtggatgcgatgttgataaacccagaaatcttgccaaaagtgtcacggtagaatgaa

SEQ ID NO: 246825 - DNA, 604 bp, Unknown
  Bacterial polypeptide expressing nucleotide sequence isolated from the Sargasso Sea
tgtagcgtgtggaacaacctataatgcatcacttgtagcaaagtattggatagaagaagtttctgatattatgtgtaccgctgagattgccagtgaatatagatatagaaccattaatgttcctaaagacacattattcgttgcaatatctcagtctggagagacagctgacacgatctactcaataaaaaaagcaaaacagagtaactatagttctgtattatcaatctgtaatgtacccgagagcacaattaccagactttctgactatagttatttgatgcaagccgggccagagataagtgttgcatcaactaaagctttcacatcacaattgatagctttattgttacttgcgaccactttatctaggacatcagatgtaaaacttgaagctaaaattattggtcaaattaaatcacttccaaaaatattaactaagacatttgagcttgaaaaaagcatgcagtccatggctaggctatttaagaataagaatcatactctatttttaggcagaggggcgtcctatccgattgcacttgaggctgctctcaaacttaaagaaattagttatattcacgcagaaggttatgcagctgga

SEQ ID NO: 246826 - DNA, 362 bp, Unknown
  Bacterial polypeptide expressing nucleotide sequence isolated from the Sargasso Sea
aatgtgtggaataatagctgctgcctcaaatcgtaatgttggaaagttgcttgttcagggtcttcataaaatggaataccgcggttatgattctgctggaattgctcttcatcaaacagatcaaatagcccatcttagaaccctaggaaaagtaaaactacttgaagaaaaaatgattgctgaaaagccaaaaagtaagcttggtattgctcacaccagatgggcaactcatggagaaccatcggaagaaaatgcacatcctcatatgtcaaacgaaagggtctatattgttcacaatggaataattgagaattatctagatcttaaagatttattaaaaaaagaacgttattctttgtcat

SEQ ID NO: 246827 - DNA, 307 bp, Unknown
  Bacterial polypeptide expressing nucleotide sequence isolated from the Sargasso Sea
aatgtgtggaatagtaggaattacaagcaataaagaagtcactactagaataatcaactctttaaaaagattagaatatagaggatacgattcagcgggtatagcaactcttaaaaatggttttattaatgaagttaaatgcgaaggaagggtagaagctttagaaaaaaatattataaactcaaatttacaaggcgtaattggaataggccatgtaagatgggccacacatggtaagcctagcaccataaatgcacacccacattcatctgaaacggtatcagtagttcataatggtattatagaa

SEQ ID NO: 246828 - DNA, 613 bp, Unknown
  Bacterial polypeptide expressing nucleotide sequence isolated from the Sargasso Sea
taccactcagctcgttggcttattgatgttaactttaattctcggaaggcatcatggtctatcctcggctgcagaaaataccataaataattcacttagagcacttcctgattctttagattcggtgatgttgcttgaagatcaaattattgaaatggcagaggattttgatcagaaggaacatgcactctttttaggtagaggcattcattatccagtagctatggaaggtgcattaaaacttaaagaaatttcctacatacatgcagaagcatatcctgcaggagaactaaagcatggaccattggctcttgttgattcagaaatgcctgttgttgcggttgctcctaatgatgatctcctcgcaaaacttcaatcaaacctagaagaagttagagctcgaggaggaaagctatatgtatttggacactctgcagctcatcaggaagatgaatcaataactaagtttattgaactgcctgaagtccctgagctaattgctcctctaatttactccattccattacagctacttgcttatcatgttgccatccttaaaggcactgacattgatcagccacgaaacctcgctaagtctgtgacggtggagtag

SEQ ID NO: 246829 - DNA, 740 bp, Unknown
  Bacterial polypeptide expressing nucleotide sequence isolated from the Sargasso Sea
tggattaccgaatagtattaatgcacatcctcattcatctcaaaatgtttctgttgttcataatggtataattgaaaattcaactttattaaaaaaatttttagttggcaaaggacacaaattcaagtcccaaacagatactgaggtaattgtacatttaattaccgaaaacttaaaatctaatgatattgtaaattctttgaagaaaacacttaaatctcttcatggaagtttcgcattaggaataatatttaaagatcaaccagatttaattgtaggagcaagaagaggatcacctttagcagttggttatggtccaaatgaaaattatttaggctcagattcatatgcacttaaatcgatgactaataaaattacttatcttgacgatggtgaattttgtataattaaaaaagatcaagtagagttttttaatgaagatggaattaagataaataaaaaagttttagaattatcatcaaaagaagaaaagtatgataaaggagattataaacatttcatggctaaagaaatagaggaacaacctgttactttgaaaaatggaataaaagaatatttagataatataaataatgatatcaatatttataattttccttggaaagtgaatgaaattgagacaataaccttaattggttgtgggacagcttatcatagctgtttaatgtctaaatattggtttgaggaattaacctcattagatgtgaatgtagatattg

SEQ ID NO: 246830 - DNA, 805 bp, Unknown
  Bacterial polypeptide expressing nucleotide sequence isolated from the Sargasso Sea
tcatatgcacttaaatctatgacaaataaaatatcttacttaaatgatggagatttttgcattgttaaaaaagatcaagttgaattttttgacattaatggaaataaagtaaataaaaaaatattaaaactttcctctaatgaacaagattacgacaaaggtgattacaaacacttcatggctaaagaaattgaagaacagccaattacaataaaaaattgtgtaaacgagtatataaataaaattagtagggaaattaatatttttaattttccatggaaagtaaatgaaatttcttcagtggtgttgataggttgtggaacagcatatcattcatgtttaatggctaaatattggtttgaacaactaacaaatttagatgttagtgttgatatagcttcagaatttagataccggaaaaatagatttaaaaaagatgctctttatatatttgtttctcaatcaggtgaaacggcagatacttttgcagctttagatttgtgtaataaaaatagaatgaaaacttgtagcgttgttaatgtagttgaaagttcaatagcaagagagtcgaaatttgtgctaccaattcattgtggtcctgaagtcggagtggcttcaacaaaagcttttttaggccaaatgttagtattatatatcttatgcttaaaatttgctctcatgagaaaagaaattaaaaaaaatgtatatatggaaaaaataaaatctcttatttcactttcaaatttaacaaaacaaactttagaaactgatagtaaaatacaatcaatttgtagttcattcagtg

SEQ ID NO: 246831 - DNA, 859 bp, Unknown
  Bacterial polypeptide expressing nucleotide sequence isolated from the Sargasso Sea
ctctcaaaaaatgctcacccgcacgcatcaaatggaaccatttatattgttcacaatgggataattgaaaaccacgatgaacttagaaaaagactatcaaatgatggctataagattgaatcagaaacagattcagaactcattgcccacttgatctactccaataaggaaaatggtaaaagcacactagaggccttaattgaggcaacaaaagaacttcatggggcatactcaatcgctgtgattgacacagaacaaaaagggaaaatatttgcagcaaaacaaaaaagcccccttttgattggcagaggcatagaagaaaatttcgtagcctctgacccactagcaatagcaggtcttgctgaatcgttctaccttttagaggacggggactttgcattaattactcaagatgaaatcaaaattgttggttctgacagtgagccagttcaaagagaagaaactattatagacacaagcgttaaagaggcatccaaagacggctacaaacactttatggaaaaagagatatacgaacaaccaaaagctatagcaaatgccattgagggaagaacaacagacggggatgttctagacaatatatttggcttaggatcatctgaatcattcaaaggggtaaaaagaattcagtttgttgcctgcgggacaagcctgcatgctgctaaaacagctagaaaatggtttgaagaactttgtgaaactccatgctacatagattttgcaagcgaatacagataccggaaccctttggttgaagaggatactttatttgtgtgtatttcgcagtcaggagagaccgcagacaccatggcggcattgaactatgcaaaagaagaaa

SEQ ID NO: 246832 - DNA, 778 bp, Unknown
  Bacterial polypeptide expressing nucleotide sequence isolated from the Sargasso Sea
taattactgtaatgaagttacgtatttaaaagatggggacatcgcaatcataaaaaatgacgcttctgagatatttgataatcaaaatgaatttataaatagaaaatctcaaataatagataagaccgtgaccttagcagaaaaaggtgtatttaagcactttatgtcaaaagaaattcatgaacagccgagtgttattcaagattctattagtcattatattaataacgaagatttaacagtgaatttaccaaaattcccatttaatattactaatttaaaaaatatcactttagttgcatgcggaagctcatattattctggattagttgcccgtgaatggtttgagaaacttgctcgcgtaaaggttgatgttgaaattgcttttgagtttaggtatcgagaagctccgatggattcaagcggactaactgtatttatttctcaatcaggtgaaacagctgatactttggcagcgttgaagcattgtaaaaaacttaatcaaaaaactatttcaatagtgaatgttccaaattcttctatgtgcagaaattcagattcatctcttaaaatttttgctggacctgagataggtgttgcatcgaccaaggcatttacctgccagcttgttgttttagcatctttagctattcatattggaaggattaatggcaatctatcagatgatgatgaaaataattatgtaaaatcattacttgatgttccaagattaatttctaatgttttggatcaggaagaagttcttattaaaattgta

SEQ ID NO: 246833 - DNA, 517 bp, Unknown
  Bacterial polypeptide expressing nucleotide sequence isolated from the Sargasso Sea
aatgaggtctttgtcagatactattaacgaaaccttaaaactcaaagatgaaattttagaaatcgctcctgaaatcgccaataaagataatgctttgtttttgggaagggggattttttacccaattgcaaaagaaggcgcattaaagttaaaagaaatctcttatatacatgctgaagcatatcctgctggcgagttaaaacatggaccattggcccttattgatgaaaatatgccagtaattgccttagcgcctgagagtgaaatagctgaaaaacttgtctccaaccttgaggaagtaaaagcaagaggtggaactttatatgtattctccgatccatctgtcacaatggaactaaaatcaggaaaggtaataaaaatgccaaaatgtgattttttactcaccccaattatttatactattccattgcaaatcctttcttatgaagttgccttattaagaggcacagacattgatcaaccaagaaatttagccaagtcagtgacggtggaatga

SEQ ID NO: 246834 - DNA, 724 bp, Unknown
  Bacterial polypeptide expressing nucleotide sequence isolated from the Sargasso Sea
ttatcaacaacaaccatatgtaacgttcccaccagctcacttgcaagagaatctgatttctttctttatacaaatgcaggtcctgaaattggtgtagcatcaacaaaagcatttacaactcaactaactggcttaatgttgttagtcctatctctagcaaaaagcagaaagatgaacccaaagcttagaaaaagaataatcacagcgttaagaaagttacctgaaaaaattgagaaagcattagagttaaaacagcaaattattaaaatagcacctgaaatagcaaaaaaagaaaatgctctttttttagggcgaggtattttttacccgatatctaaggaaggcgcacttaaacttaaagaaatctcttacatccatgcagaggcataccccgcaggtgagttgaaacatggtccacttgccttaattgatgaaaatatgccagttattgctcttgctcctgagagtgaaatagttgaaaagcttgtatccaatctagaagaagtaaaagccagaggtggaatgctttatgtattttcagatacctctataaagatggatctaagctcaggtaagttcataaatatgccagagtgtgactttttactaaaacctattctttacaccataccacttcaaattttagcctacgaagttgctcttctcagagggacagaaatagatcaaccaagaaaccttgctaagtcagtgactgtagaataaa

SEQ ID NO: 246835 - DNA, 907 bp, Unknown
  Bacterial polypeptide expressing nucleotide sequence isolated from the Sargasso Sea
aaaaatgaagcaaagttaggagattataaaaattttatgtctaaagaaatatttgaacaaccaaatactattaaaaattgtttaaatgagtatatagataaaataagaaatgacataaatctttatgattttccaataaatcctaaaaaaattgacaaaatatttcttgttggttgcggtactgcttatcattcatgccaagtagctaaatactggatagaagaactgtctgatttaaatgtggaaactgaagtagggtcagaatttagatacagaaagataaaatttaaccccaatactttgtacatatttgtatctcagtctggagaaacagcagatacagctgcagctttagaaatagccaaaaaaaataaaatgaaaacttgttctgtaattaatgtagtagaaagctcaatagcaagaaattctgactgggttgtccctattcatgctggccctgaaattggtgtggcatcgactaaagcttttataggccaaatgctagttttatatataatgagtttaaaaatttctaaaattagaggaaacattgatgataaaaaatatatcgaaaaaattaaaaatcttaaaaatctaccagatagcattgaaagatcattaaaaactgaagaacatattcaaatatttgctaaagattttttatcagccaaaggatcaatgtttttaggtagaggaccatcttttccaatagcattagaaggagctttgaaattaaaggaattatcatatcttcacgctgaaggttatcccgcaggagagatgaagcatggcccacttgctttaattgaagatggtttgcctgtaattattttagcaccaaaagataaatattttgagaaaactatttctaatatgcaagaggttatagcaagaggaggaaaagttt

SEQ ID NO: 246836 - DNA, 931 bp, Unknown
  Bacterial polypeptide expressing nucleotide sequence isolated from the Sargasso Sea
ggtgattttaaacatttcatggcaaaagaaattgaagagcagccaataacaattaaaactggaattaaagaatacgttgataatgtaaataaagatataaatatccttaattttccatggaaaattaatgatattaaatcaataactttggtgggatgtggaaccgcatatcattcttgtttgatggctaaatattggtttgaagaacttacaactttagatgtcaacattgatatagcatcagagtttagatatagaaaaaataggtttaaaaaagatactttatatatttttgtttcacaatcaggggagacagcagatacttacgcagctttagacctttgtaacaaaaataacatgaaaacatgtgctgttgttaatgtgattgagagttcaatagcaagagattctaattttgtattaccaattcattgtggacctgaggttggagtggcatcaacaaaagcttttttaggacaaatacttgttttgtatattttagcattaaaacttggatcattgagaaatgaaatagaaaaaaatcaataccaagaaaaaattaaagacttaaaagatttacctggattattagaaaaaactttactacatgataatgatatccaagcaatatcctcaacatttaacgaggcaaagggttcaatgtttttagggagaggttattcatatccgatagctttagagggtgcgctaaaacttaaagaactttcttacgttcatgccgaaggatatccagctggtgaaatgaagcatggtccattagctttaattgaagagggaatgcctgtagtagttttggcacctagagataattattacaaaaaaacaatttctaacatgcaggaagtaattgctagaggggcaaaagtgttattgataactaataagagtaaagatgaagttatatcagaaa

SEQ ID NO: 246837 - DNA, 548 bp, Unknown
  Bacterial polypeptide expressing nucleotide sequence isolated from the Sargasso Sea
tgaaacagagcaacaacaaatgatgcctgcattacatttacccgttgctcttggccaagctttagagctatcgaatcaagtagaagagattgcaagccgttatcattcttttggtgattttctatttttaggacgggggctaggtttccctatagcaatagaaggagcactcaaacttaaagaaatttcttatattaacgcaataggatatgcagctggagaaatgaaacatggtcctattgccttgatagacagccaaatgcccacaatagctatagcgccaagagacactgtatttgaaaaaatggtctcaaatatccaacaaatacgtgcacgccaagggaaagtaatcgctttggtatcgcatggtgaaaaatcattaaatgatcttgcagatgaaattatagaactacctgaaattgatccattgttatcaccgatagtaactgtcgttccgcttcaattacttgcatatcatatagcacaaaaacgaggcttagacatcgaccaaccgagaaatttagcaaaaacagttactgtggaataaa

SEQ ID NO: 246838 - DNA, 836 bp, Unknown
  Bacterial polypeptide expressing nucleotide sequence isolated from the Sargasso Sea
ggaattatagctgctgcctcaaatcgtaacgttggtaagttactagttcaagggctccataaaatggaataccgtggatatgattctgcgggtatagcgcttcatcaaaaagatcaaattgctcatttaagaaccttaggtaaagtcaaattgcttgaagaaaagatgattgctgaaaagccaaagagtaaactcggtattgcacataccagatgggcaacccatggtgagccatcggaagaaaatgcacatcctcataaatccaacgaaagggtttatatagttcacaatgggatcattgaaaattatcttgatctaaaagaatttctcaaagacgaaggttactctttttcatctcaaaccgactcagagctaattgctcacttgcttgaatattttctaaacaagggcaattcaatcgtcgactcaatgtatttaacaaaagaaaaacttgacggagcatatgcaattgcagcaatcgatagagaagatgacagcaatatagttattgctagaagcaaatcaccccttttaattgggatcggcacagatgaatttttagccgcctcagacccacttgcaataggccaacttaccaatgaatttatatttcttgaagacggtgatgtcgctgaacttacttcagaaagctatacaatttttgataatacaaaacaaaaggtcactagagaaattacacatattgatatttcaaatcaagcaacctcaaaaggtgaatataaacacttcatggaaaaagaaatctatgaacaacctgatgcaatattgaatactatcgatggaagagtgggtggagatgatgttttggaaaatat

SEQ ID NO: 246839 - DNA, 446 bp, Unknown
  Bacterial polypeptide expressing nucleotide sequence isolated from the Sargasso Sea
aatgtgtggaatcataggcgcagcctcctctagaggcgttggaaagatcttagtcaatggactaaagaaaatggagtatcgcgggtacgattcagcaggccttgttttaaataatgaaagcgaagctatccaactaaaaacgcttggcaaagtcgccaaactagaagatctaatgatcgaaaaaaaacccagagcccaatcaggtatagctcacacaagatgggctacacacggagaaccctctaaaaaaaacgctcacccgcacgcatcaaatgaaaccatttatattgttcacaacgggataattgaaaaccatgatgagcttagagaaagactgctaaatgatgactataagattgaatcagaaactgattcagagcttattgcccacttgatctattccaagaagaaaaatggtaaaagcacactagaggccttaattgagg

SEQ ID NO: 246840 - DNA, 844 bp, Unknown
  Bacterial polypeptide expressing nucleotide sequence isolated from the Sargasso Sea
ttcgtctcaaattataaattcattaaaaaaattggaatacagaggttacgactctgcaggtatagcaacgattgactcaggcttcattaaagaagttaaatgtgagggtagggttgaaagtttggaggaagccgtttcaaaatcaaagttaacaggaaatgttggaattggacatgtacgatgggcaacccacggtattccaaacacaattaacgctcatccacattcatcagaaaatgtatctgtggttcataatggaataattgaaaattcaacattgctaaaaaagtttttagttaataaaggacataagtttaagtcccaaacagatactgaagttattgttcatcttattactgaatatttaaaaaaagataatcttaaagatgcaattattaaagttttaaaaaaacttcatggaagttttgctttaggtataatttttaaagataatccgaatttaataattggtgcaagaagaggttcgcctttagctgttggctatggtcctggagaaaattatttaggatcagattcttatgctctaaaatctatgacaaataaaatttcatatcttaacgatggggagttttgtattattaaaaaagataatgttgagttttttaatcagagcggaaaaaagataaataaaaaaatattacatttatcatcaaacgaacaaaattatgaaaagggtgactacaaacatttcatggctaaagaaattgatgaacagccaaataccatcaaaaattgtgtcaatgaatacattgacaaaatcaataatgatataaatatttttaattttccatttaaagaaaaagaaattaattctattacatta

SEQ ID NO: 246841 - DNA, 703 bp, Unknown
  Bacterial polypeptide expressing nucleotide sequence isolated from the Sargasso Sea
atgtgtggaataattggtattacaagcactaaaccagtttcatcatcaataattaattccttaaagaaacttgaatacagaggttacgactctgctggaatagcaacgttgttagatggtaaaattaatgaggtaaaatgtgagggtagggtaaaagcactagaaaataatatttctaaaattaaaatgcttggaacagttggcattggtcatgttagatgggcaacacacggggttccgagtacattgaatgcacacccacattcatctgaaagtgtttcggttgtacataatggaattattgaaaattcaactttactaaaaaaatttctggttgaaaaaggtcacaaatttaaatcacaaactgatacagaggtgattgttcaccttattacagagtatttaaaagaaaatgatttgaaaaattcaattttaaaaatgctaaaaaaacttcatgggagttttgccttaggaattatttttaaagatcagccagatttaattgttggtgcaaggagaggatcacctttagccgtaggttatggaccaaatgaaaattatttaggatcagactcttacgctcttaaatcaatgacaaataaaattacatatcttgacgatggtgaattttgtattttaaaaaaaaatagtgttgaattttttgatgatactggaaaaaaagtaaacaagagtgttctagagt

SEQ ID NO: 246842 - DNA, 721 bp, Unknown
  Bacterial polypeptide expressing nucleotide sequence isolated from the Sargasso Sea
cagctgggcgtgaccaaccgtccggagagttcgctctcccgtcaggtccctcacatcctgaacattggtgccggaattgaagtgggcgtggcggccaccaaaacctttattgggcagttgctggctttctacggcctggccatttccttcgccgcacgccgtggcagccgctcagaagcagagattcaggctctggtggatgaactgcgcaggcttcctcagcagctgcaggagctggtgtcgctccatgatcagcgctcggaagaactggcccatcgcttcgccgaaacccaggacgtgatcttcctgggacggggaatcaactatccgatcgcactggagggagccctcaagctcaaggagatcagttacatccatgccgagggctatccggccggcgagatgaagcacggacccattgccctgttggatgcccacgtgccggtcgtgtcgattgctgtgcctggaccggtgttcgagaaagtgctcagcaatgcccaggaggccaaggcgagggatgcgcggttgatcggggtggctcctcagggcccggacacgaccttgttcgatgacctgctgccggtgccggaggtcagcgagtggatcagcccgcttctgacggtggtgccgatgcagctgctgagctaccacatcgcagctcatcggggtctggatgtggaccaaccacgcaatctggctaagagtgtgactgtggagtaag

SEQ ID NO: 246843 - DNA, 841 bp, Unknown
  Bacterial polypeptide expressing nucleotide sequence isolated from the Sargasso Sea
atgtgtggaatagtaggtgctgtagcacaacgtgacgtagtagacattctggtggaaggcttacgccgtctggaataccgtggttatgactctgccggtgtggcgatcatcagcccaacaggcgaattacaacgtatccgccgtttaggtaaagtaaaagaactgtctgacgcagtaaaattaacccctgttgttggcggcactggtattgcgcacacccgctgggctacacacggcgaaccttcagagcgtaacgctcacccacacgtttccggcaatatttctgtggtgcacaacggcattatcgaaaaccatggcccgctgcgtgaaatgttaaaagccaaaggttatgtgtttaattcagacactgacactgaggttattgcgcacttagtggctgaagaaatgaaaaccgctggttctttgttagctgcagtacaaactgcggtaaaacaatttaacggcgcttacggcactgtattgatggaccaaaacgacccaagccatttagttgtggcccgttcaggcagcccattggtgataggttttggtatcggcgagaactttatcgcttctgaccagttagctctgttacctgtaacccgtcgttttatgtttttagaagaaggcgacgtggccgaaattacccgtaccagcgtgactgtgtacgacaaaaacggcaaacaagtagagcgcactattactgaatccaccgccagctacgacgcaggtgacaaaggtcagtaccgtcactttatgctgaaagaaatctacgaacagccacatgccatcaacaacaccttagaaggtcgtttaggttctgattcagtgctgacgaaac

SEQ ID NO: 246844 - DNA, 914 bp, Unknown
  Bacterial polypeptide expressing nucleotide sequence isolated from the Sargasso Sea
acccaaatacaatattttgcggcatgtaaaggaagcccacttatcataggcaaaggtataaatgaaaactttattgcatctgatataacacccatactttctgatacacaacagtacataactttagatgatgatgaatttgccaaaatcacgcctaccaagactttaatttataatgctaataaaaaaataattagtaagaaagtaaatatctccaaaataaagagtaagcattcatctctttcaggtcataagcactttatgcataaagaaatatatgagcaaaagtctattttaaaagaaatggcaaatcgttatgtaggtactaacaaaatattaccgaatatctttggtcctggaactgataaaattcttgcaaatattgatcatattcattttgttgcctgcggcaccagctatcacgcatctttagttgctaaagattggatagaagaatatacaacaattacctgcacagcagaagttgctagtgaatataaatacaaaaagattaacgttttacctagaacactatttgttagcatctcgcaatcaggtgaaacggctgacacaatttcatctttaaaaaaagcactaaagcttagttattcaaacacactagccatatgtaatgtggcagaaagcacattgactcgattatccaagcttgtgtttttgatgaacgccggccctgaaataagtgtagcttcaaccaaagcatttacatctcaactatttactctcttgttactcactatcgttgtgtcaagaaaatttggaaacatagaaaatcgcatggtcaaggacattggcaaaatcaatgaaataatagacagtctttacaagctagaagctgatattaaaaaaatctcaacaaagttcaaaaacaaagaacacactatatttttggggaa

SEQ ID NO: 246845 - DNA, 588 bp, Unknown
  Bacterial polypeptide expressing nucleotide sequence isolated from the Sargasso Sea
ctatcgctattggtcgggaccgcggtaatcttactagagcacaagaagaggagatgtcctcggcacttacggaggttccatcccgagctgcggaagttctaaatcatgatgcggctctaagaaatttggctgaacaaatctacgaggaaagagacgttctctatataggtagagggactagtttcgctatcgccttagaaggtgctttgaaattaaaagaaataagttacattcatgcagaaggatatgcggctggtgagttaaaacatggtcctattgcactgattgacgatggagtgcctgtgatagtcattgctccaaatgataattccttcgaaaaaacagcagctaacatgcaagaagtattagcacgtggcggacgagttatccttttttccgatgaggatggggtaaataaggtaggtcttcaggcttttgcctcgataacattaccgaaagtttcgccactggtcgcacccatactgtatgctattcccattcaattacttgcatatcatgttgctgctttaaagggaaccgatatagatcagccaagaaatttggctaaatctgtgaccgtggaatgat

SEQ ID NO: 246846 - DNA, 460 bp, Unknown
  Bacterial polypeptide expressing nucleotide sequence isolated from the Sargasso Sea
atattttgttgagaaaattgcagacaaaaagaatgcattgtattttggcaggggcgtttacttctcaattgcacaagagggagcattgaaattcaaggagattacatatattcatgctgaggcatatccagcaggcgagttaaaacatgggccacttgcacttgttgatgagatgacacccgttgtagcccttgcaccagaagatgagctcgtagaaaagctcgtctcaaatctcgaagaggtcaaatcaagaggaggcacgctttacgtctttggaaacgcaacatcaaagataaaaattgaaaaaggaaaatttatgaacatgccagattgcggttactacaatgcaccaattgtttacacaataccattacaaatattagcctatgaggttgcatgctcaataggaacggacctagatcaaccaaggaacctagcaaaatcagtcaccgtggagtaa

SEQ ID NO: 246847 - DNA, 687 bp, Unknown
  Bacterial polypeptide expressing nucleotide sequence isolated from the Sargasso Sea
gcttgttcttgggctttcaaaagaaagacagtttttttcgagtgaccccatctctcttttaaaatttactcaagattttatctatcttgaagatgaagatctagcttgtttgcgtccttcaggcgttgaaatctttgatgctcagttaaatccagtagcaagaaagtcctcaagacttgagcttgatgaagagtcaagtggcaaagctcactttcgtcattacatgctcaaagagatttacgagcaagaaaaggttttttgtgagacaatgtctcgcctccttaacgaagataaaacaggctttgatcttagccagtggccccttaaaaatcttgatcccaaaaagtttgatagagttcacattattgcctgtggtacagcttactactcaggtcttatggggcaatatgttctagaagaggctttttcttgtccggtcacagtggagcttgcaagtgagtttcgttataaaaagacttttttaaatgaaaaaactcttctcattgcaatcagtcagtctggggagacagcagacacgctttctgggcttgagcatgcaaagaaactgggagccacaactctttgtctttgcaatagcccgcgctctgcaattgacaggcaagcagacttatctcttctcatgcaagcaggtcctgagattggggtagcctcaaccaaagctttcag

SEQ ID NO: 246848 - DNA, 325 bp, Unknown
  Bacterial polypeptide expressing nucleotide sequence isolated from the Sargasso Sea
aagcatggcccaattgctttaattgaaaaagatgttccggtaattgttattgcaccttcaggtgagttgtatgaaaaaacattatctaatatgcaagaggtgatagctagaggcgctaaggttattcttttaactgactcacaaggaaaaaaagaaattggtgaagaagcttctgatattatagagcttcctgttattgatagttttgtagcgcctatattatattctgttcctgtacagttactcgcttatcatgttgcggttgcaaaaggaacagatgttgaccaacctagaaatttagctaagtctgtgactgtcgaatagt

SEQ ID NO: 246849 - DNA, 885 bp, Unknown
  Bacterial polypeptide expressing nucleotide sequence isolated from the Sargasso Sea
tcggatatttttgaaaaagttaaaagaattcaagttgtagcatgtgggacgagtctccatgccggcagagtagcagctaattggttttcagcgatttcagagctgccaacgcaaatagattatgcatcagaatatagatatagaaaccctcatgttgatgaggactctttactagttacaatttcacagtcaggcgagactgccgacacacttgctgcattaaggtacgcaaaagaaaaagattatttatcaacactaacaatttgcaatgttccaaccagctcccttgcaagagagtctgactattctatttttacaaatgcaggaccagagataggtgtggcatcgaccaaagcattcacgacacagctcgccgctttaatgttgttagctttgtctttagcaaaaagtagaggtaaaaatccaaaattaagaaccagagtaattacagccatgcgctctttagcggacacggtcgaagaaactttaaaacttaaagatgccattctcgagattgctccagaaatagcaaacaaagacaatgcactgtttcttggaagaggtattttttatccaattgccaaagaaggtgcattgaagttaaaagagatttcatatattcatgccgaagcatacccggctggtgagttaaaacacggcccgctagctttaatagatgaagacatgcccgtgatcgctctggctccagaaagtgagattgctgaaaagcttgtttcaaaccttgaagaagttaaagctagaggcggaactctttatgtgttttcagatccttctatttctatggatttaacctcaggcagactaattaatatgcctaagtgtgattttttattaacccccaattatttatacaattcctcttca

SEQ ID NO: 246850 - DNA, 640 bp, Unknown
  Bacterial polypeptide expressing nucleotide sequence isolated from the Sargasso Sea
atgtgtgggattattggaattgcaagtaataaacctgtatcaattaatataatcaattccttaaaaaaactagaatacagaggatatgacagtgcaggtttagcaactttaagtagtaacttaattgatgaaaaaaaatgctctgggagagtagacgaacttgaaaaaattttgtttaaaaatccctcaaatggtaacataggaattggtcacgtaagatgggctactcatggagttccaaatatagtcaatgcacatcctcattcctcagaagtagtttcagttgttcataatggaataattgaaaattcagacgaattaaaaaaagatttagaagctcaaggattaaagtttaaatcacaaactgacactgaagtaattactcttttagtaactcagtttttacaaaattcaaaacctttagagtcagtatttaaaactttaaaaaaattaaaaggtagttttgcattaggcattatatttaaagatttttcagacattattattggagcgagaagaggaagccctcttgctgttggctactcaaaagaagaaaactatttaggttcagactcctatgctttgaaatctatgacaaataaaatttcttatttagacgatggtgaattatgtatgtgaa

SEQ ID NO: 246851 - DNA, 902 bp, Unknown
  Bacterial polypeptide expressing nucleotide sequence isolated from the Sargasso Sea
cctttagccgttggttattctaataatgaaaattatttaggttcagattcgtacgcacttaaatcaatgacaaataaaatttcttacttagatgatggagagctatgtgttttaacaaaaagtgaagtaagtttttataatgataaaaaaaataagattaataaaaagattcatatagtttctgatgaagaaaatatagcggataaaggagactataaaaatttcatgtccaaagagatttttgagcaaccaatcacagcaaaaaaatgcgttaatgaatacatagatagtttaaaaaaagatataaacatttacaattttccaattaatccaaaggatctaaaaaaaataattttaattggctgtggtacagcttatcattcatgtctggttgcaaaatattggcttgaggaactaacaaaaattgatgtggaaatagatattgcatctgagttcaggtatagaaatcttaaatttaataataaaaatttgtatatatttatctcacaatcaggagaaacggcagatacggcagcagctttagatatttgtaaaaaaaataatgtaaaaacttgtgcgattgttaatgtaatagaaagtactatagcaagaaatgctgattgggttttgccaattcatgccggaccagaaattggagttgcatcaacaaaagcttttttaggtcaattaatagttttatatattttaagtttaaaactttcttcaaaaagaaatgaaattaatcaaacaacttacaatcaaaacattgaaaatttaaaaacactacctaaatttttgaaaaaaacattagatttagagacgaatattcaacttttagctaaagaatttctagatgctaaaggttcaatgtttttaggaagaggaagttcattcccaatagc

SEQ ID NO: 246852 - DNA, 394 bp, Unknown
  Bacterial polypeptide expressing nucleotide sequence isolated from the Sargasso Sea
tttagaaggtgcattaaaattaaaagaattatcttacatacatgctgaaggttatccagcaggagagatgaagcacggacctttagctttaattgaggatggtatgccagttgttgtgttagcaccaagagacaattattataaaaaaacaatttctaatatgcaggaagtaattgcaagaggagcaaaagttttattgattaccaacaagagtaaagatgaaatagtttcagaaaatatttggaagacgatagaggttgagacaacaaacgaagatctattgcctttccttttaaccatccctcttcaaaaactagcttattattcagcacttaaaaaaggttttgatattgataaacccagaaatttagctaaatcagttacggtagaataa

SEQ ID NO: 246853 - DNA, 610 bp, Unknown
  Bacterial polypeptide expressing nucleotide sequence isolated from the Sargasso Sea
aatgcttgtgttatacttgctttgtacaaaaatttcttacgaacaaaaaacaattataaaaaaaacatatcaaaataaaattaaggatttgttgttactttctaaatgtacgaaagaaacattaaatatagatgacaaaatatataatttaggaaaagattttgctaattctaaaggatcaatgtttttaggaagaggttattcttatccaattgctcttgaaggtgctctaaaactaaaagaacttgcttatgtacatgccgaggggtatccagctggtgaaatgaagcacggcccccttgctcttatagaggaaggtatgccagttgttgtaattgcaccaagagatgtgcattacaaaaaaactatttcaaatatgcaagaagttatatcaagaggtgctaaagtattgcttataactaacaaaagcactgatgaaattttttctgaaaatatttgggagcaaattgaagttgaaaatatatctgatgaacttcttccttttttaactacaattcctttacaaaaattagcttattattcagctttagataaaggctttgatatcgataaacctagaaatcttgctaaatccgttactgttgaataa

SEQ ID NO: 246854 - DNA, 634 bp, Unknown
  Bacterial polypeptide expressing nucleotide sequence isolated from the Sargasso Sea
tgcatcaactaaagcttttttaggtcaacttacagtgctctatattttatgtttaaaattagctttttccagaaaagacatagatgaaaatacttatgttaaaaatataagtaatttaaaaaaaatacctgaagcaattaagaaatgcatcaaaagtgagagcgatgttcaactcatggcaaaggaatttatatcagcaaagggatcaatgtttttaggaagaggatcctcttttccaattgctttagaaggtgcattaaaattaaaagaattatcatatctacacgcagaaggatatccagcaggtgaaatgaaacatggacctttagctttaattgaagagggtttaccagtaatagttattgcaccaaaagataaatattttgagaaaacaatttctaatatgcaagaagtcatagcccgaggtggcaaaatactttttatcacagataataaaaaagaatctttaaatgagaatataagatttggtttacgagttccacatattgataattttttgtcaccaatattattatcattgccacttcaaatgctagcatatcacgttgctttattaaaaaactgtgatgtagataaacctagaaatttagcaaaatcagttacagttgaataa

SEQ ID NO: 246855 - DNA, 900 bp, Unknown
  Bacterial polypeptide expressing nucleotide sequence isolated from the Sargasso Sea
cttgaaggcagactcacaaaaaatgaaagccaagagggaatttttggagttggttttgagaaagaaatgaaaaatatcacaaacatacaggttgttgcttgcggcacaagctttcatgcaggcagaatatttgaattttggtcgcataagttcttaggaataaattgtcgagttgattatggcagtgagtaccaatatcaagaaccaataaaaaccgataaaactttattagtaacaatatctcagtcaggcgaaacggcggacacactttcatctttaaagtttgcaaaaaaatcaggcgatccagttactttaaccatttgtaatgttgctaatagctctttgtgtagagaatcagactatgctttattaactaaggccgggccggaaattggtgtagcctcaaccaaagcttttgttacccaattagcctgtttaaatctgttgcttttaactttgatgagagtgcacaacaaattaccaacagcaagaaagaaaattaccgcagcactgagggatttgcctaaattaattaataagactttaaaaatgacaggcgaatacaagaaagtggcaaggctgctttttaaaagaaacagtgcattatttttaggtcgtggtttgtattttcctattgctagagaaggagcacttaagctcaaagaaatatcttatatacatgctgaagcttatccaggcggagagttaaagcatggaccattggcactgatagacaaaaatatgccagtaatagctttagctccagacaatgaacacttagataaaattacatcaaacattgaggaagtggcagcccgaaaaggtaaggttattaccataggaccactaggcagaacaaaaatagataaaaatggtgggcatattaagattcctaagaca

SEQ ID NO: 246856 - DNA, 107 bp, Unknown
  Bacterial polypeptide expressing nucleotide sequence isolated from the Sargasso Sea
tttattcactattccacttcagcttctttcatatcacgttgcattgcttaaaaagtgcgatatagataagccaagaaatctagcaaaatctgtcactgttgaataaa

SEQ ID NO: 246857 - DNA, 139 bp, Unknown
  Bacterial polypeptide expressing nucleotide sequence isolated from the Sargasso Sea
aatgcccgattgccctgatctaatagcacctattttgtatattatcccagcacaactcttgagttatcatgtagctcttaagaaaaaaactgatgtagacaagcctagaaacctagcaaaatcagtcacagtggaataa

SEQ ID NO: 246858 - DNA, 844 bp, Unknown
  Bacterial polypeptide expressing nucleotide sequence isolated from the Sargasso Sea
gcaattgcattaattttttcttcagataataataaaatttatggtgctagaagtggcagcccattagcagttggttgggggaaaaatgagatgtttttaggttctgatgctgccgcgctttctaatgaaactataaatatatcttatttggaggagggtgattgggttgaattaagtagagatggagcaaatttttggaataaaagtggtcaagcagtaaagagagaaattgtagaaacaaaatttaaccccattcaaattgctaagggaaattttcctcattatatgttaaaagaaatttacgagcaaccaacagttataggcgataccctaaatactttttttaatccagctgaatcagaaattaaacttcctgatttaggagtaaacttagaagaaatttcaaaagtaactattgttgcttgtggtagctcttactttgcaggtctggtagcaaaattttggatagaacgctatgctagagtttcggttgaagttgatatctcatctgaatttagatatcgtgaaacacctttacctaaagatggtcttactcttttcatttcacagtcaggtgaaactgcagatacattagctgccttaagatatgcaaaatcacaatcccaacatatattgtctctggtcaatgttagagaaagtactattgcaagggaaagtgatggtttgcttttaattaatgctggtccagaaattggtgtggcttcaacaaaagcttttacatgtcaattagttgctttggcagcttttacaatttctataggggtgtcaaaaaaaataattgatgaaaatcaagccaagaaattatcaaaagcaatttcagaag

SEQ ID NO: 246859 - DNA, 475 bp, Unknown
  Bacterial polypeptide expressing nucleotide sequence isolated from the Sargasso Sea
taaagatgaaatattagaaatagcacctgaaattgcatcgaaagataatgctttattccttggaagaggtattttttatccaattgcaaaagaaggagccttaaaattaaaagaaatttcttatattcatgctgaggcttatccagcaggtgaacttaaacacggaccacttgcacttatcgatgaagagatgcctgttattgcactagcaccagagagcgagattgcagaaaaattagtctctaatcttgaagaagtaaaagctagaggcgggactctatatgtgttttctgatccctcaatctcaatggatttaaaatctggcagattaataaatatgcctaaatgtgattttctcttaactcctattatttacacaattcctcttcaaatactttcttatgaagttgcattacttagaggaacagatattgatcaacctagaaacttagcaaagtcggtcacggtagagtaa

SEQ ID NO: 246860 - DNA, 854 bp, Unknown
  Bacterial polypeptide expressing nucleotide sequence isolated from the Sargasso Sea
agctcgcatttcactaaggactctcggtaaggtttcaaaccttgaagacgcaatgattgagcaaaagcccaaagcccattctggcattgcgcacactaggtgggcaacgcatggaattccatcggagaaaaatgcacatccccatgggtccaatagaaacatctatattgttcacaatggaatcattgaaaaccacgatgagttgagagaaaggctcgtaaatgaaggctatgagattcagtcacaaaccgattcagaattgattgctcacctgatccatttcaataaagaaaaaggcaaaaccacattggacgcactaattgagacaacaaaagagcttgatggcgcatactctattgctgtaatcgacacagaggaaaaaggaaaaatatttgcagccaaacaaaaaagcccgcttttagttggaaaagggatagaggaaaattttatcgcctcagacccgctcgctatagctggccttgccgaatctttctatctacttgaagatggcgactttgcagaaatcaccaaagatgaaattaaaattgttggcagcaacggtgaagcgctctcaagagaagagaccataatagacacaagcgtgaaggaggcatcaaaagatggttacaaacacttcatggaaaaagaaatatatgagcagccaaaagcaataacaaatgctattgagggaaggactgctgatggagaggttttagataatatatttggattgggttcgtcagatgcattcaagaatgtcaaaagaatccagtttgtggcctgtggcacaagcctgcatgcagctaaaaccgccagaaaatggtttgaagaactctgtgagacaccatgctata

SEQ ID NO: 246861 - DNA, 616 bp, Unknown
  Bacterial polypeptide expressing nucleotide sequence isolated from the Sargasso Sea
ataggccaaatgttagttttgtatataatgagtttaaagatatctaaaataagagggaatattgacgataaaaattatattgaaaaaattaaaaatcttaaaaatttgcctcaaggaattgaaaattcattaaagaccgaggaacttattcaaatatttgctaaagactttttaacagccaaaggatcaatgtttttaggaagaggatcatcattccctatagcattagaaggagcattaaaattgaaagaattgtcttatcttcacgctgaaggttaccccgctggagaaatgaaacatggtccgctagctttgattgaagatggtctacctgtaattattttagcacctaaagataaatattttgagaaaacaatttctaatatgcaagaagttattgcaagaggaggaaaggttttattaatatccgataaacatgacgaagtgattaatgaaaatatcagatttaaaattgaaatgccttttatagatgaattgcttaatccttttttattaacgataccacttcaattattagcttatcatgtggctcttttaaaaaaatgtgacatcgacaagccaagaaacttggctaaatctgttactgttgagtaat

SEQ ID NO: 246862 - DNA, 224 bp, Unknown
  Bacterial polypeptide expressing nucleotide sequence isolated from the Sargasso Sea
aatgtgcggcattgttggcggaacttcgaacagaaatattcttcctattcttgttgaagggttaagaagactagagtacagaggatacgactccgcaggagtagcctataaagctaatggaaaaatttctttagtaaaaaatgcaggcagagttgaagatcttgccgaaaaactaaatctagaaaagaataatgcgaaaataggaattgctcatactagatggg

SEQ ID NO: 246863 - DNA, 853 bp, Unknown
  Bacterial polypeptide expressing nucleotide sequence isolated from the Sargasso Sea
aggggcgctttcgctatcactgtgatgcatgttgattacccgagaaaattactggccgcccgggttgggagtccattagttgtaggtatcggtatcggtgaaaacttcgttgcatctgatgttcaagcattgaggcccgtaaccaatcgcttcttgttccttgaagaaggcgaaattgttgaacttacttcaaccgatatctcaataaaggggctgaacagagcggcaataggtagtcgaacgatagagttggaagacgttcaagatactgcaatcagcaaaggtcattttcgtcatttcatgttgaaggagatttatgatcagcccgatgccctgcggcaaaccctagaaggtcgacttacgagcgacagtgtccttgtaccgtcttttggtgtgaatgcagagtctatctttcagaaagtaaaagccgtgcaaatcgttgcgtgtggcagtagttattatgctgggatggtagcgagatattggtttgaagaaattgctaggattccctgtaatgtagaagtggccagtgaattgagataccgtaaaatcactgtcttgccgaatacattgctcgtcacaatttctcagtcaggggaaaccgcggatactttggccgctcaaagagccgcgaacgacagaaattacttggcaagtctttgtatctgtaatgtaccaaatagcaccatggtcagagaagccgatctttctttgatgattaatgctggaattgaggtatgcgtcgcgtcaaccaaggcttttacgaatcagttaaccgatctcatgatgctagttatggccttgggtcattacaatcatatgacgccatctacccataaagagatcgtacaaa

SEQ ID NO: 246864 - DNA, 799 bp, Unknown
  Bacterial polypeptide expressing nucleotide sequence isolated from the Sargasso Sea
tttgtctctcaatctggcgaaacagcggatacttatgctgcgttagatttgtgcaatcaaaataatatgaaaacatgttcagttgtaaatattattgagagttcaattgctagagactctaaattcgttttaccaatacattgtggaactgaaataggtgttgcctctacaaaggcttttgttggtcaaatgctaattttatatatattagcattaaaaattggattaatgagacaagacataaaaaaagaagtattcgttgaaaaactcatagatcttaaaaaattaccaaaactagttgagcaaactttattgactgacaataagatacaagcaatatctagcacttttaatgaagcaaaaggatctatgtttttaggaagaggattttcatacccaatcgcattagagggtgccttaaaacttaaagaattatcgtatattcatgcagaaggttatccagctggtgaaatgaaacatggcccacttgctttaatagaagaaggtatgccagttgttgttttagcgcctagagacaactattataaaaaaactatttcaaatatgcaggaagttattgctagaggagcaaaagttttattgattactaataaaagtaaagatgagataatctctgaaaatatttgggagacaatagaagtggaaactactaatgatgatcttttaccttttcttttaacaatacctttacagaaattagcttattactctgcattaaaaaaagggcatgatatagataaaccgcgtaatttggccaaatcggttaccgttgaataat

SEQ ID NO: 246865 - DNA, 352 bp, Unknown
  Bacterial polypeptide expressing nucleotide sequence isolated from the Sargasso Sea
catgcagcaaggatatcatgctgcagaattgaaacatggacctattgcattattagaaaaaaatactcctgtagtatctcttttaaatgatgtaccaggaaaaaagaaaactcgaaataacacagaggaatgtattgtaagaggtgctaaaattatagcgatagttacagagggcgatcaagataccaatgatgattttaagaataaaattttaattcctaagtgtccagaaatgatcagtacaattccaacagtaatagcattacaattattagcttatcatgtagctgtatttcgtggttgtgatgtagatcaacctcgtaatttagcaaaatcagtaactgttgagtga

SEQ ID NO: 246866 - DNA, 883 bp, Unknown
  Bacterial polypeptide expressing nucleotide sequence isolated from the Sargasso Sea
atgtgcggaatagttggatatttagggaaaaaagattcagtaccaataatattaaatggtctacatcgtttagaatacagaggttatgattctgctggtattgctgtaattggagatgatggggttcaatatgttaaaaatgctggtaatgtttctgaattatctaaacttattgatgattcagtattaaatggttctatcggtattggtcatactcgttgggcaactcatggtgaacctaataatattaatgcccatccgcattttgataaaactggaaagattgcattaattcataatggtataattgaaaattataattcaattaaagaagttttattaaagaaagattttgaatttaaaagtgaaactgatactgaagttctcgtccaattaatttcagaaatctattactcagatggtttaaactttgaacaagctgtgcaatcagcactaaatcaagtaattggtgcttatggaattgttgcattttgcttagatgaaccaaataaattagttgcagcaagacatgggagcccattagtaattggaattggagatgaagaatattttgtggcaagtgatgcttcgccgatcgttgagcatactagaaacgttatttatttagatgaaggtgaaatagtaactatcacaaaatctgggcatgaaattcgatctattgttgatgacaatattataaataaaatttcaactgagatagaattgtcaatagatgaaattgaaaaaggtgaattctctcatcatatgcttaaagaaattcatgatcagacccatactataactgatactatgagaggtagaattgacccattagatggttcagctcatttgggtgggataacagaacaaatgatcgaataaa

SEQ ID NO: 246867 - DNA, 497 bp, Unknown
  Bacterial polypeptide expressing nucleotide sequence isolated from the Sargasso Sea
aacgactttattaactgataataagatacaggcaatatcaaatacttttaatgaggctaaaggctcaatgtttttaggaagaggtttttcttttccaatagcactagagggtgcgttaaaattaaaagagttatcttatattcatgcggaaggttatccagctggagagatgaaacatggaccacttgctctaattgaggaaggaatgcctgtagtagttttagcaccaagggacaattattataaaaaaactatatctaatatgcaggaagtaattgctagaggagcaaaagttttattgataacagacaaaagtaaagatgagattgtttcagagaatatttgggaaaaaatagaagttgaaagtgctaatgaagatcttttgccatttctattaacaataccactacaaaaattagcttattattcagcactaaaaaaaggatatgatatagataagccgcgtaatttagccaaatcagtaaccgttgaataat

SEQ ID NO: 246868 - DNA, 511 bp, Unknown
  Bacterial polypeptide expressing nucleotide sequence isolated from the Sargasso Sea
aatgtgtggaatagttggaattacaagcaataaagaagtaaccacaagaatagtaaattctcttaagaaattagaatatcgtggatatgattcagcaggtattgcaactcttaaaaatggaaatttaaacgaagtaaagtgcgaaggaagggttgaagaattagaaaaaaatattttaaaaacaaatttacaaggtgaaattggaattggacatgttagatgggcaacacacggcaaaccaagcactattaacgcgcacccacattcatctgaaaaagtgtcagttgttcacaatggcattatagaaaattctacaattttaaaaaaaatattagaaaaaaaaggtcataattttaaatctcaaacagacacagaagtaatagctcatttggttacagaatatttaaaaaaaaataatttaaaaaaagctattgttaaagttttaaaaaaactacatggcagttttgctttaggtataatatttaaagattatccagatttaattgttggt

SEQ ID NO: 246869 - DNA, 589 bp, Unknown
  Bacterial polypeptide expressing nucleotide sequence isolated from the Sargasso Sea
aagtttaaaaatagcaaaaatgagaaaagaaattgataagaaaatttatcaagaaaaaataaattcactatttgatttatcaaaattaactaacaattctttagaaacagatagtaaaatacaatcggtttgtagttcttttgttaatataaaaggatcaatgtttttaggaagaggtttgtcttttccaatagctcttgaaggagcattaaaacttaaagagttggcatatgtccacgcagaaggttatccagctggagaaatgaaacatggtcctttagcattaatagaagaaggtatgccagttgtagtattagctccaagagaccagtattacaaaaaaacaatttctaatatgcaggaagttatagcaagaggcgcaaaagttttattaatcacaaacaaaagcaaggatgaaattcattcagaaaatatttggaaaaaaattgaagttgaaaatacctctgaagatttactgccatttttaataactatacctcttcagaagcttgcttattactcagcatttaaaaaaggttatgatatagataaaccaagaaatctagctaaatctgttactgttgaataa

SEQ ID NO: 246870 - DNA, 690 bp, Unknown
  Bacterial polypeptide expressing nucleotide sequence isolated from the Sargasso Sea
aatgtgtggaattgttggcataaccagtacaaaaagtgtttcaagtttaataattaattcactaagaaaactagaatatagaggttatgactctgctggtatttcaactttagaaaaaggattaattaaagaagtgaaatgcgaaggtagagtagatgttttagagtcaaatctattaaaaaaaaaattagagggaaatgtgggcattggccatgttagatgggccacacatggtataccaagttctgtaaatgcgcatccacattcttcagaaaaagtatctgttgttcataacggtattatagaaaattcaactattctaaaaaaatttttaacaaaaaaaggttacgtatttaaatctcaaactgacacggaagttatagttcatttaataactgattatttaaaaaaaaatgatttaaaaaattcaataattaaaatgcttaaaagagttcatggtagttttgcattaggtataatttttaaagatcaaccagatttaattgttggagcaagaaggggctcacctttggctgtaggctacggtccaaatgaaaattatttgggatcagactcatatgcattaaaatctatgactaataaagtaacttaccttgatgatagtgaattttgtattgttaaaaaagacagtgtagaattttttaatgaaaaaggaaatagagtaaacaa

SEQ ID NO: 246871 - DNA, 515 bp, Unknown
  Bacterial polypeptide expressing nucleotide sequence isolated from the Sargasso Sea
aatgtgtggaattgttggcattgcaagcaaaaatgattgtattgataatatattgtctggattatattctcttgagtacagaggttatgattcatcaggattagcaacaataaaaaataataattttcaatacaataaaaatattggaaaaatttctaatttagaaaaatctattaaagataataaaataactggaaatgttgtagttgctcacactagatgggcaactcatggcaagccctctataaagaattgtcatccatttattaaaaataattgtgttttggttcataatggtatcatagaaaattatacagatttaataaaatatttttcaattaaacaaaaaaatattaaatcagatacagactctgaaattattgctgaaatttataataagttattgaataaatttaataatccaattgaagctattaaaaatttaaataaaaaaataataggatctttttcttttgcttttttagtgcatggttcaaaatcaatatatgtaacaa

SEQ ID NO: 246872 - DNA, 541 bp, Unknown
  Bacterial polypeptide expressing nucleotide sequence isolated from the Sargasso Sea
ttgtgcggtataattggcatagtttctaaaagacaggttgtagaccgcttaataaatggtttagagcgactagaatacagaggctatgacagctcaggagtagctaccattaaaaacttcaatatatactgcactaaaagtacaggaaaacttatctctctaaaggaaaagctaaaaaatgaagatatagatggatgtgtgggaataggccacaccagatgggctactcatggtgaaccaacagaaatcaatgcgcatccacatgtaacaaaaaatgttgctctagtgcataatggaattattgaaaattttgctgaatttaaagatgacttgcttggaaaaggaataagttttaattcccaaacagatactgaagttatagcaaagcttgtagaagaaaaaatttcccaggataaatgtgagcctttagaagcagttcgacttgtagttaaacaattaagtggatcttttgctttgtgctttattttcagaggaattgagaaccttatcattgctacgagaagagggtccccattagcac

SEQ ID NO: 246873 - DNA, 330 bp, Unknown
  Bacterial polypeptide expressing nucleotide sequence isolated from the Sargasso Sea
tatgtgtggaatagtaggtattgtaagtaataaatctgtatcatcgagcatagtagatgctttaaaaaaacttgaatatagaggatacgattccgctggtatttcaactttaaataaaggctttatcgatgaaaaaaaatgttctggaagagttgaaaatttagagaaaattttatttgaaaatccttcaattggtgatcttggaattggacatgttcgatgggcaacgcatggagttccaaatcaaataaatgcacatccacattcgacagagcaagtctctgtagttcataatggaataatagaaaattctgataaattaaaaaaaga

SEQ ID NO: 246874 - DNA, 838 bp, Unknown
  Bacterial polypeptide expressing nucleotide sequence isolated from the Sargasso Sea
gaacaaaaagggtataaatttaaatcacaaactgacaccgaggtaattgtttacttaattacagattacttaaaaaaatacgatcttaaagaaacaattttgaaaacgctagataatttaaaaggtagttttgctttaggtgtaatttttaaagatgatccaaatacgttagttggggcaagaagaggttcaccacttgcggttggatacggtccagacgaaaattacttaggatcagattcttacgcacttaaatcaatgactaacaagatatcatatttaaatgatggagagttttgtatagttaaaaaaaataatgttgaattttttaacaataaatcaattaagattaataaaaaaatactagaactttcttctaacgaaaaaaattacgacaaaggtgactataaacatttcatggcaaaagaaatcgaggaacaaccgatcacaattaaaaattgcataaatgaatatattaataaaataagcaatgaaataaatatttcaaattttccatggaaaaaagacgaaatatcctcgataaagttgattggatgcggcactgcttatcactcatgtttgttagcaaaatattggtttgagcaaatttctaaccttgatgtagaaatagatatagcttcagaattcaggtatagaaaaaatagatttaaaaaagattgtctgtatatattcgtttctcaatcaggagaaacagcagatacttatgcagctttagatttatgtaataaaaatgaaatgaaaacttgtagtatcataaatgtggttgaaagttcaattgctagagattcgaaatttgtattacccaataccactgtgg

SEQ ID NO: 246875 - DNA, 733 bp, Unknown
  Bacterial polypeptide expressing nucleotide sequence isolated from the Sargasso Sea
aatgaaaacttgcagtattgttaatgttgtagaaagctctatagcaagagattctaaatttgtcctaccaattcattgtgggccagaaattggtgtagcttccacaaaggcctttttgggacaaatgttagttttatatattttgtctttaaaaatttcttttatgcgaaaagatattgataaggaaacatatgttaataagattaaatcactatttacactttcagatttaattaaaaaaactttagaaactgatagtaaaactcaattagtttgtaattcatttgttgatattaaagggtctatgtttttaggcaggggctactcttaccctatagcgcttgagggtgctttgaaattaaaagaattatcttacgttcacgctgaaggatatccagctggtgaaatgaaacatggaccattagctcttatagaagagggaatgcctgttgtagtaatagctcccagagatgagtactacacaaaaacaatttcaaatatgcaagaggttattgcaagaggagcaaaagttttattaattacgaataaaagtaaggacgaaatttattcagaaaatatttgggagtatatagaagtagaaaataccacagatgatctactaccatttttgattacaataccactgcaaaagttagcttattattctgctcttaaaaagggttacgatatagataaaccccgtaatttagcaaaatcagtcacagttgaataa

SEQ ID NO: 246876 - DNA, 656 bp, Unknown
  Bacterial polypeptide expressing nucleotide sequence isolated from the Sargasso Sea
gggtcttgaaattggagtagcttctactaaagcatttctaggccaaatacttgttttatatattttagcattaaaatttggatcattgagaaatgaaatagaaaaaaaaatatatcaagaaaaaattaaagatttaaaagatttaccaagattaatagaaaaatctttattacacgacaatgatattcaatcaatatcttctacattcaatgaagctaaaggatctatgtttttaggaagaggtttttcttatccaattgccttagagggcgcattaaagcttaaagaactttcctatgttcatgctgaaggatatccagcaggtgaaatgaaacatgggccattagcactaattgaagagggtatgcctgtagtagtattagcgcctagagatagttattataaaaaaacaatttcaaatatgcaggaagttatagcaagaggtgctaaagtactattgattacaaataaaagtaaggatgaagttttctcagaaaatatttggcaaactattgaggttgaaaatacaaatgacgacttacttccattccttttaactatcccacttcaaaaactcgcatattattctgctcttaaaaaaggttatgacattgataagccaagaaatttagctaaatctgtcactgttgaataaa

SEQ ID NO: 246877 - DNA, 742 bp, Unknown
  Bacterial polypeptide expressing nucleotide sequence isolated from the Sargasso Sea
attgggagcaagaaatggaagccctttaattattggcattggcaataaagagaattttatagcctcggatatacaagctctcataaagcatactgacaaatttgtatatttagaggatggtgatttggtaactattacatccgaggaagttaaaatatttgataaaaataaaaaaaatatacgaagagaaactaaaaaaagtagcttgacgtcaaatagtaattcaaaaggtgattttgatcattttatgttgaaagaaatctttgaacaaccagaagcagttaaatcaacaattcaagatagaatcattaataactttgttccaaaagagattttaggtccaaacgctgaaaaatttttaaaaaaatttaaggtagtacagattattgcatgcgggacaagttatcatgcagctttagtggcaaaacattggcttgaaaggttagctggtattccctgccatgcggagattgctagcgagtttagatatagaagacatgctgtgcaaaaagatacacttttagtatgtatatcgcaatcaggtgaaactgcagatacgctatctgcgttaagagagataaaagaagaagattattatgttggcacagttgcggtttgtaatgttcctgaaagttctctagcaagagaatgcgattcaattttaattactcatgctggaccagagattggggtggcatctacaaaagcatttactactcaattaactgcattaatgcttcta

SEQ ID NO: 246878 - DNA, 589 bp, Unknown
  Bacterial polypeptide expressing nucleotide sequence isolated from the Sargasso Sea
atgtgtggaattattggaattgcaagtaataaaccagtttctattaatataataaattcattaaaaaagttagaatatagagggtatgattctgccggaatagccactcttaaagataattcaattgatgaaaaaaaatgttcagggagagtagacgaattggaaaaattacttctaaagtcaccttcaaatggaaatattggtattggacatgtacgatgggctactcatggcattccaaatactgtgaatgcccacccacattctactgaaaacgtctctgttgttcataatggaattattgaaaattctgatgatcttaaaaaagaattagaaactaaaggatatatatttaaatcgcaaactgatactgaagtaattacaatgcttttaactgagtccttaaaaaatactgatccacttgattctgtttttaaaactttgagtaaattaaaaggaagttttgctttaggaattatttttaaaaatttttcagatataattattggagctaggcgaggcagcccgttagctgtcggttactccaatgaggaaaattatctaggttcagactcttacgctctaaaat

SEQ ID NO: 246879 - DNA, 811 bp, Unknown
  Bacterial polypeptide expressing nucleotide sequence isolated from the Sargasso Sea
atgtgtggaattataggtatagctagcaataaatcagtatcgataaatattataaatgccttaaaaaagttggagtatagaggatatgactcagccggtttggcaactattgcaaatggagaaattaatgaaaaaaaatgtcccggaagagtggagaaacttgagaaaattttatttcaaaatccaagtgagggaaatttaggcataggacatgttagatgggcaacacacggtgttccaaacgaagtaaatgcccatcctcattctagcgatatggtttctgtagttcacaatggaataattgaaaattctgatgaattaaaaaaaaaattagaattatctggaaaaactttcaaatcacaaactgacacagaggttataacaattttattaactgaaaaattaaagacattagatccgttaaatgctgtatttgaaaccttatcggtacttaaaggtagttttgcgttaggtattatttttaaaaattttaaagatatcgttattggcgctcgtagaggtagtccactagcggtaggttattctgataatgaaaattacttgggctcagactcttatgcattaaaatcaatgacaaataaaatttcatacttagatgatggcgatgtatgtgttttatccaaagatgaagtaaaattttacaacactaaaaaagacaaaattaacaaggaaatttttactctttcagaggataaatcatctgcaagtaaaggaaactataaaaattttatgataaaagaaatttttgagcaaccaaaaaccataaaaacctgtcttaaagaatatattg

SEQ ID NO: 246880 - DNA, 412 bp, Unknown
  Bacterial polypeptide expressing nucleotide sequence isolated from the Sargasso Sea
atgtgcggaatagttggtgggatttctgaaagaaatattttacccattttggttgagggtctcagaagacttgagtacagaggttatgattcagcaggcgtcgcatttaaaaaaaatggctcaatttctgtgactaagaacctcggcagagtagaccaattaacaaaaaaactcaacttaaaaaccaaccaaagcaatttagggatagctcatacaagatgggcaactcatggcatcccatctgaaaaaaacgctcacccccatcacagtaaaaatatttttgttgttcataatggtattatagaaaatcatgacgacttaagggcttatctcaaggcagagggcataagattttctactcaaaccgatactgaagttataggacatcttatcagaacttttacagaaataa

SEQ ID NO: 246881 - DNA, 781 bp, Unknown
  Bacterial polypeptide expressing nucleotide sequence isolated from the Sargasso Sea
caaacggatactgaagttattgtccacttgataactgaacatttgaaaaactcagaacttgaggatgctataacgaaaactctaaaacaacttcatggtagttttgctcttggaattgtttttaaaaatatcccagatttaatagttggagcgagaagagggtcacctttagcagttggttatggtccaaatgaaaactatttaggttccgactcatatgctttaaaatcaatgacaaacaaaataacatatcttgatgatggtgaattttgtattgttaaaaaagatcatgtacttttctttaatgaaaaagggaataaagttaacaaaaaaatattagaattatcttctaacgaagcaagttatgacaaaggtgattttaaacattttatggcaaaggagattgaagagcaacccacaacaattaaaactggaataaaagaatacgtagataatgttaacaaggagataaatattttaaatttcccttggaaagcaattgatataaaatctataactttaataggatgtggaactgcttaccattcatgtttaatggcaaaatattggtttgaggaattaacgtatttagatgttaatatagatattgcttcagaatttagatatagaaaaaatagatttaaaaaagattctttatatgtttttgtttcacaatctggtgagacagcggatacctatgcagctttagatctatgtaacaaaaataatatgaaaacttgtgctgttgttaatgtaattgaaagttcaatagcaagagact

SEQ ID NO: 246882 - DNA, 843 bp, Unknown
  Bacterial polypeptide expressing nucleotide sequence isolated from the Sargasso Sea
tatgtgtggaattattggaatatcaagtaacaaacctgtttctgcaaatataattaattcattaaaaaaattagaatacagaggatatgattcagcaggtatagctacactttcagatggtgaaattaatgaaataaaatctgagggaagagtagataaattagaaaataattttgatttaaaaaacttaagaggaaacattggtatagggcatgtaagatgggctactcatggaattcctaatagtttaaatgcacatcctcattcctctcataatgtatcagtagttcacaatggaattattgaaaactctacaatattaaaaaaacatttagttaataaaggtcataaatttaaatcacagacagataccgaagtaatcgttcatttaataacagaaaatttaaaaacttcagaacttgaggaagctataacaaaaacattaaaacaactccatggcagctttgctcttggaattgtttttaaagatatgccagacttaatagttggtgctagaagaggatcaccgttagctgttggctatggtccaaatgaaaattatctaggatcagactcttatgctttgaaatctatgacgaataagattacgtatcttgatgatggtgaattctgttttgtaaaaaaggatcaagttattttttttaatgaagaagggaaaaaagttaataaaaaaatattagaattatcatcagatgaagcaagttatgacaaaggtgatttcaaacattttatggcaaaagaaattgaagaacaaccaacaacaattaaaactggaataaaagaatacgtagataatgtaaataaagagataaatatttttaa

SEQ ID NO: 246883 - DNA, 430 bp, Unknown
  Bacterial polypeptide expressing nucleotide sequence isolated from the Sargasso Sea
catgtttttaggtagaggctattcatttccaatagcattagaaggagctttaaaattgaaagaattagcttatgtacatgcagagggttatcctgcaggtgaaatgaaacatggacctctagctcttatagaagatggaatgcctgttgtggtgattgctccaagagatcaacattataaaaaaaccatttcaaacatgcaggaagttatagcaagaggagcgaaagttttgcttgtcacaaataaaagtaaagatgaggtttattctgaaaatatttgggagactattgaagttgaaaatactgaagatgacctcttcccgtttttagtaacaattcctttacaaaagcttgcatattattctgcactaaaaaaaggttatgacattgataaaccaagaaatttagctaaatcagtaacagtagaataa

SEQ ID NO: 246884 - DNA, 898 bp, Unknown
  Bacterial polypeptide expressing nucleotide sequence isolated from the Sargasso Sea
ttatccttcaatagctataggtcatacaaggtgggctacacatggtaatattaacagtgaaaatgctcatccattgacaagtgaaaataaagtagcagttgttcataatggaattattgaaaattatgaatcaataaaaaattcacttgagtcagaaggatatacttttagaagtcaaaccgacactgaggtattgcctcatctctttatgaaatatataaaattaggaaataattttttgcaagcaggaagacttgtcttaaaagaaataaaaggcgcatttgcctttgttgcaatgagtttagattttccaaatgaattatttgtatctagaaattcgtcaccattagccattggtataggtgacaaatcaaattttgttggttcagacgctcactcaatagatcatttaacccaaaaaataatttatctagaggatggtgatcatgctttgattaatttggagaatattgagatttttaatattaatggagaaaaagttaataggaaaattattaatataaaagctgaaattggtttaataacaaaaggtggttataaacattttatggaaaaggaaatttttgaacaaccttcagtaattcctcaaacgatttcgacttttatcaataatgacactgaaataaaaatagatctaaataaattaggatttaaaaataaaaatactttgcttatttctgccgctggaactagctactatgctgcaatggttggtaaatattggattgaacatattgctgatttacccgttataatcgatttagcttcagaatatagatatcgaaaaccatccgtttttggtcaaagcgctatgttggttatttcacagtctggtgaaagtttggatactcttatggcattaaggcatggtaaagag

SEQ ID NO: 246885 - DNA, 912 bp, Unknown
  Bacterial polypeptide expressing nucleotide sequence isolated from the Sargasso Sea
caatatcaaattaaatatccttttgatacaaatttttttgaatctattgaaagaattgaaattatcgcttgtggtacaagtaaacatgctgcaatggtgggtagctttttattagaacaattttcaggaatccccacacatgtcttttacgcaagtgaatttcgatactcaccacctccactgctcccaaacacattaactattggtgtcactcaatctggagaaactgctgatacaatcgcagccatcgagatggaaattaaaagacgatcttcaattgaagataaaaattttaaacccaatcttatagcaattacaaatagaaaagagagctcgataggaaggctggtcccaaatataattgatatctgtgcaggaatagaagtaggagttgcagcaacaaaaacattttttgctcaattactttctttttatggattagctataaaatttgctcaaattaaatgcagtcaaagtccagatgaaataggtaaattaataactgaacttacaaaactgcctccattattagaagatcttttggagagtcataacaaaacttcagaaaaactagcacatgatttttttaatattaaagacgttatctttttagggagaggcataaattatcctatcgctcttgaaggagcgttaaaactcaaagaaattagttacattcatgctgctggatatcctgctggtgaaatgaaacatggaccaatagctttgttagataaaaaagtacctgtaatttctattgcctcccctggtgaagtttttgataaagtgattagtaatgctcaagaagcaaaagctagagatgcatatttgattgggattgctcctgaatgtaatagaacccaaatctttgattatttaatgaaaattccttcttctaatgaatgggtttcc

SEQ ID NO: 246886 - DNA, 610 bp, Unknown
  Bacterial polypeptide expressing nucleotide sequence isolated from the Sargasso Sea
aatgtgcggtattgttggtggtgtttcagatagaaatgttttaccaattttaattgaaggactaaaaaggctggaatatcgtgggtatgattctgctggagttgcttttagagaaaacagcaaaatttcacttataaaagcaaagggcagagttctagatctcgagaataaacttcctgaaatgaaagttaaaagcaatcaaggaattgcacatactagatgggcaacacatggcgtgccatcagaaaaaaatgcgcacccacaaatttctgaaaataagatttttgttgttcataacggcattattgaaaatcacttgaaccttaaagaaaaactgcaaagtgaaggagtgaaatttagatcagatactgatactgaagttgttgctcatctcattaacttgcatatgcaaaagggcatggatttcgattcggcaacacttaaagctatttcacaactcaaaggagcttatgcactagcggttatagataaagacaatccggatttaattattggtgcaagaaatcaaagtcctcttgttattggagagggatacgatgagaactttgttgcttcagacataatggcactttgctccagtgacaaataa

SEQ ID NO: 246887 - DNA, 763 bp, Unknown
  Bacterial polypeptide expressing nucleotide sequence isolated from the Sargasso Sea
gcttcagaatttagatatagaaatttaaaatttaattctagtaacctatatatttttgtttcacaatctggtgaaactgctgatacggcagccgcattagacatatgtaaaaaaaataaagttaaaacttgctcaattgtaaatgttgttgaaagcacaatagcaagaaattgtgactgggttttgcctattcatgctggtccagaagtaggtgtagcctctacaaaagcttttcttggacaattaatagtcttatatatccttgctttaaaacttgctattactagagaagatattgataaaaaagattacaataataatttaaagaatttacaaaaacttccagaagccattaagaatacattaaaacttgagagcgaaattcaattaatggctaaagaatttttagacgctaaaggatcaatgtttttaggaagagggaattcttttccagttgcccttgaaggtgctcttaaattaaaagaactttcttatttacacgctgagggatacccagcaggcgaaatgaagcatggacctctagcattaattgaggaaggcttacctgtaatagtaatagcaccaaacgatagatattatgaaaaaactttatcaaacactcaagaagttatagcaaggggaggaaagattttttttattaccgataataaaaaaagactattaagtacaaatattagatttaggctgagagttcctcgtgtagataatcttttatcacctctattactaacaatcccgtaca

SEQ ID NO: 246888 - DNA, 791 bp, Unknown
  Bacterial polypeptide expressing nucleotide sequence isolated from the Sargasso Sea
aatgtgtggaataattggaatagttagcaataaatctgtgtcagcaagtattgttggggctttaaaaaaacttgaatatcgaggatatgactctgcaggcatatcaacaataagtaatggacaaattaatgaacaaaaatgttcgggaagggtagataacttggaaaaaatacttttccaaaatccttcgagtggagatcttggtattggtcatgttagatgggcaactcatggagtaccaaatcaagttaatgcacatccacactcatcagagttggtttcagttgttcataatggaattattgaaaattcagataagctaagaaaagaatttgaacaaaaaggatatttatttaaatctcaaacagatacagaggtaataacagttatgttgactgattttttaaaaaaagaaaatttaattaattgtattcataagactttagaaaaattagaaggaagttttgcattaggagtcatttttaaggactttaataatttagtagtgggcgcaagaagaggaagccctttagcagtaggttatggacataatgaaaattttattggctcagattcttatgcgctaaaatcaatgacaaataagatttcttatcttgatgatggagatttttgcattctttataaggaaaaagttgaattttataattctgataagaaaaaaataaataaagaaatttacgaattatctaatgaggaaaatattgctgacaagggtgattataaagattttatgtcaaaagaaattaatgaaacatcagtcactacaaaaa

SEQ ID NO: 246889 - DNA, 919 bp, Unknown
  Bacterial polypeptide expressing nucleotide sequence isolated from the Sargasso Sea
agtaggatacgtaggctctaaacaaatcggtacccgtttgatagaaggtctaaaacgattagagtacagaggttatgactcttcaggcctttctataattgaaaacaaacaactccaacacaccaaacgagttggtcgcgttaaaacccttgaagcatcactgcctgaaaattaccttaaggcacggacaggaatctgccatacccgttgggctacccatggagacgtcactgaaaaaaatgcacaccctcatatcagtagcgatcagtgctttgccttagtacacaatggtgtaatcgaaaactacttacaaattaagcactatcttgaatctaaagagtatacctttgcatccgacacagattccgaagcaatcgtgaacttaattgcttaccactacgaaaaagaacccgatgcccctgattcaaatcgttttttagaatccgttcgcaaagcattactccatctcgaaggcacctttggcattgctgttatttcaaaagattatcccgatgaaatgatttgtgcccgccgtggctcacccctcatcatcggagtgggtaaaaacgaacacctcattgcctctgatgtgaatgccctcacccattgcacgcaaaatgtcgtctatctcaatgataacgagatcgtgctcctcacagctgaagatttttccatttcaaccatcagtaaagtatcggttgatgccgtcattcaaacagttgattgggataccagtgatactgaacttggtgatttccagcacttcatggaaaaagaaattttcgaacaacccactgccttagaaaatggaatgcgaggacgcttttctgatgatggtagcaccgcacttttcggtgggctcaacattcatccacaagaactcagccaaattgatcgcatcattttcattgcctgtggg

SEQ ID NO: 246890 - DNA, 861 bp, Unknown
  Bacterial polypeptide expressing nucleotide sequence isolated from the Sargasso Sea
tggaattattgagaactatgctgagttaaaagatgatttaattcaaaatgattatagctttatttcggaaaccgacacagaggttgttgctgttgagttgagtagaaaatggaatggtgagttgttagatactgttttggatgtagctaaatcacttgaaggtacctatgctcttgttgtaacttcaacaaaacagccaggcacaattgtagctggaagaatgatgagtccattagttctaggtgttggtgagggggaggtctttttagcatctgactctgcagcaattttagaatatacaaacaaaatgatattcctagagaatggtgactttgtagaaattaatgatggaaattttactttgtacgatatagagaaaaatgcaataacaagagatattcaagttatagactgggaggtctctgaagcggaaaaagctggtcatgaccatttcatgtataaagaaatacttgaacaagcagaagtaattgagagaacaattacggggagaattgaaaaaaactcaacagaaataccaatacatttagataaagcaaaaaagtttgaaaagatatggattgttgcttgcggtactgcttatcatgctggtttatttggtaaagatttatttgaaaaagttcttggagttcctgtaagtgttgaacttgcttctgagtttagatatcgagagccaatcataggcaaaaatgatcttgctattgttatatctcagtctggtgaaactatggatacaatcgcagcaacagaattactaaaagaaaatggatctcatgtgttagctttagtaaatgttgttgggagctcacttgcaagaatggcagatagtgtattttatcttca

SEQ ID NO: 246891 - DNA, 784 bp, Unknown
  Bacterial polypeptide expressing nucleotide sequence isolated from the Sargasso Sea
gatgaacaaccagttatagtaaagaattctataaatgagtatattgataaaataagtagacagataaatatttataattttccttggaaaattaatcaaataagttctatttttttggttggatgtggtacggcatatcactcttgtttagtagcaaaatattggtttgaagaatatacaaatttcgatgttactatagatatagcttctgaatttagatatagaaaaattaattttaaaaataattgtttatatgtttttgtatcacaatcgggcgaaacagctgatacttatgcagctttagatttatgtaaaaaaaataaaatgaagacatgttcaatagttaatgtagtggaaagttctattgctagagattcagattttgtattgccaattcactgcggaccagaaattggagttgcctcaactaaagctttcctaggtcaaatgttagtattatatatgttgtgtataaaactgtcttttgatcagaaaaaaattaacaaaaaaaattatcaggaaaaaattaaaaatttactttctttatctaatttatgtaaaaaaactttattaattgatagcaaaattcaaaaagcaagcaaagcttttattaaagcaaaaggttcgatgtttttaggaagaggttattcatttcctattgctctcgaaggagctttaaaattaaaagagcttgcttatgttcatgccgaaggttaccctgcaggtgaaatgaaacatggacctttagcattaatagaggaaggaatgccagttgttgttcttg

SEQ ID NO: 246892 - DNA, 223 bp, Unknown
  Bacterial polypeptide expressing nucleotide sequence isolated from the Sargasso Sea
agttaaagccagaaaaggtgttataatcactgtaactgataaaagaactaaagagcttgaaaaagtttctgattatttaatagatgtgccttcaacccacccaaagatatttcctatgctagcatctatatccttacaacttttagcatatcacctagcagtgcttagggagtgcgatatagatcagccaaggaatctagctaaaagcgtcacggttgagtga

SEQ ID NO: 246893 - DNA, 670 bp, Unknown
  Bacterial polypeptide expressing nucleotide sequence isolated from the Sargasso Sea
ttacctatttattgtggtcaagaaattggtgttgcatctactaaagcatttcttggtcaaatgttagtgctatacattctatctataaaaatttcttttgatcaaaaatttattacaaagaaagattatcaatctaaaattaaaaatttattatcactatctcattcagcaaaaaaaacacttaaattagatcacaaacttttaaatattagtaaagtttttgcacacgccaaaggatgtatgtttttaggtagaggatactcatttccaattgccttagagggtgccttgaagttaaaagaattagcctatgttcatgcagagggttatcccgcaggtgaaatgaagcatggaccattagctttgatagaagaaggtatgccagtagttgttatagcacctagagatgatcattataaaaaaacaatgtcaaatatgcaggaggttattgcaagaggggcaaaggttttactaataacaaataaaaataaagatgaggttgtttctgaaaatatctgggaacaaatagaagttgataaattaaatgatgaattaattccgtttctagcaactatacctcttcaaaaactcgctttttattcagcacttgaaaaaggttatgatatagataaaccaagaaatttagcaaaatctgtaacagttgaataat

SEQ ID NO: 246894 - DNA, 712 bp, Unknown
  Bacterial polypeptide expressing nucleotide sequence isolated from the Sargasso Sea
aacattatcaaaactaaaatatctggctctattggtatcggacatgttaggtgggcaactcatggaaaacctagttcaataaatgcacatcctcattcatcagaagatgtatctgtcgttcataatggtataattgaaaattcaactattctaaaaaagttgttagaaaataaaggttataagtttaaatctcaaacagacacagaagtaatagttcatttggtaactgattatttaaaaaaaaatgaccttaaaaatacaattataaaagttttaaaaaaattacacggtagttttgcgctaggaataatatttaaagaccaaccagacttaatagttggagcaagaagaggctctcctcttgcagttggttatggtccaaatgaacactatcttggttcagactcttatgcattaaagtcaatgactaataaaatttcatatttaaatgatggagaattttgcatattaaaaaaagatcaagtcgaattttttgatgctgatggaaccaaagtaaacaaaaaaattttaaatctttctaaagatgatcaaaattatgaaaaaggagattacaaatattatatggctaaagaaatagatgagcagccgattaccttaaaaaattgtgtaaatgagtacatcgataaacataacaaagaaataaatatttataattttccttggaaaataagtgaaatttcatcagtggttt

SEQ ID NO: 246895 - DNA, 364 bp, Unknown
  Bacterial polypeptide expressing nucleotide sequence isolated from the Sargasso Sea
tatgtgtggaatagttagttattttggaaagaaagactcagtaccttttttaatcaatggccttaggcgtttagaatatagagggtatgactctgctggtatagctttaatggaaggcaactctattaaagcagttaaaaaagcaggtaaagtagatgagctcgataaaaaaataaaagaatttccaattaaaggttcaatcggtatcgcacatacaagatgggcaactcatggcgaaccaaatgatattaatgctcatccccaccaagatataacaagcaaaatctacttaatacataatggcattattgaaaattattcaaccctaaaagaagttttaattagaaaaagggtttcaatttaa

SEQ ID NO: 246896 - DNA, 910 bp, Unknown
  Bacterial polypeptide expressing nucleotide sequence isolated from the Sargasso Sea
ggtaagaaaattaacaaaaagattttagaattatcatcaaatgagtcaaactatgacaaaggtgacttcaaacactttatggctaaagaaatagaagagcagcctgcaacaataaaaactggaattaaagaatatttagatagtgtgaataatgagataaatatttttaattttccttggaaaatcaacgaaattaaatcaattacattaattggctgtggtactgcttaccattcttgtttaatggctaaatattggtttgaagaattaactactttagatgttaatatcgatatagcttcagagtttagatatagaaaaaatagatttaaaaaagatagtttatatatttttgtttctcagtctggtgagactgcagatacttatgcagccttggatctttgtaataaaaataatatgaaaacatgtgctgtagttaatgtgattgaaagctctatagcaagagattcgaattttgtattaccaattcattgtggaccagaaattggggttgcatctacaaaagcattcttaggacaaatacttgttttatatattttagctttaaaaattggatctttatctggtcaaattgataaaaaaaattatcaagaaaaaattaaagatcttaaaaacttaccaagcttgatagaaaaaactttattagtagataatgatattcaagcaatttcctcaacattcaatgaagctaaaggatctatgtttcttggaagaggcttctctttcccaatagccttagaaggagcactgaaattaaaagaattatcttacgttcatgcagaaggttatccggcaggtgaaatgaaacatgggccacttgcattgatagaagaagggatgccagttgtagttctagcaccaagagacagttactataaaaaaaccattc

SEQ ID NO: 246897 - DNA, 388 bp, Unknown
  Bacterial polypeptide expressing nucleotide sequence isolated from the Sargasso Sea
ggtgcgctaaagttaaaagaaataacttataagcattgtgagggctttgctgctggcgaattaaaacatggaccacttgccttaattgaaaaaaatataccagttattgttttagcgccttatgatgaaaattattttaaattaatttcaaatattcaagaaattaaagcaagaggaggaagaataatcatgattactgataaaatgggtgcaaagatagcaaaaaaatattctgataaattaattatagttcctaaaacaaattttttgacatctccaataatatattcactacctattcaattaattgcttattatttagcagtttttcttggcaccgatgttgaccagccaagaaatttagctaaatcggttaccgtagaataat

SEQ ID NO: 246898 - DNA, 852 bp, Unknown
  Bacterial polypeptide expressing nucleotide sequence isolated from the Sargasso Sea
tggcctgggctcatctgattcattcaaaggggtaaaacgaatacagtttgtggcatgcggtaccagtctccacgcagcgaagactgcaagaaagtggtttgaagaactctccgaaacgccatgctatatagattttgcgagcgaatacagataccgcaaccctttggttgaggacgatactttatttgtatgtatttcgcagtcgggagaaacagcggacaccatggcggcattgaattatgcgaaagaagaaaaatatttaggcattgtaacgatttgcaatgttcccacaagcaccatggcaagagagtctgattggaagatatttacaaatgccggccctgaaatcggcgttgcctcaaccaaagcatttacaacacagcttgcagcactaatgctgttggcatgttcaatatcgaaaagcaaaggcataaataaagacaaaagaactgacgccatcaacgacctcattaacacgccatcacttgtgaaagaagcgtttggcttgaaaaaacacatagatgatattgttgagaaaattgcagacaaaaagaatgcattgtatttaggcaggggcgtttacttctcaatcgcacaagagggagcattgaaattcaaggagattacatatattcatgctgaggcatatccagcaggcgagttaaaacacgggccacttgcacttgttgacgaaatgacaccggttgtagcgctcgcaccagaagatgagctcgtagaaaaactcgtctcaaatctcgaagaagtcaaatcaagaggaggaacgctttacgtctttggaaacgcaacgtcaaagataaaaattgaaaaaggaaaatttatgaacatgccaga

SEQ ID NO: 246899 - DNA, 922 bp, Unknown
  Bacterial polypeptide expressing nucleotide sequence isolated from the Sargasso Sea
atgtgtggaattattggaatagcaagcaataaaccagtttccgtaaatataattaattcgttaaaaaaattggaatacagaggatatgactctgctggaatagcgactttaaaaagtaattttattaatgaaaagaaatgctcaggaagagtggaagaattagaaaagattctttttaagacaccatcagatggaaatattggtataggccatgttagatgggctactcatggaattcccaacgtaattaatgctcacccacattcatctgaaagtgtatcagttgttcataatggaattatagaaaattcagatgaattaaagagagaactagagtcaaaaggattaaagtttaaatcacaaactgatacagaagttataactctccttattactgaagaattaaagaataataaaccacttgagtcagtttttaaaacacttcaaaaacttaaaggaagtttcgcattaggtataatttttaaaaatttctcagatataatcattggagctagaagaggaagcccattggctgttggatattcaaatgatgagaattaccttggttctgactcctatgctcttaaatctatgacaaacaaaatttcatatttagacgatggtgaattatgtgttttatcgagtcgcagtataaatttttatgatgccaataaaaaaaagattaataaaaaagttcatattgtttctgaagatgaaaatatttctgaaaaaggagattacaaaaactttatgtccaaagaaatatttgaacaaccgatgacaatgaaaaaatgcataagtgaatatgttgatacccttaaaaaagatataaatatttttaattttccaatagaaccaaatcaaattaaaaaaatatacctaataggttgcggaacagcttttcattcatgtttagttacaa

SEQ ID NO: 246900 - DNA, 880 bp, Unknown
  Bacterial polypeptide expressing nucleotide sequence isolated from the Sargasso Sea
attggaagaagctataaccaaaacattaaaactacttcatggcagctttgctttaggaatcgttttcaaagatattcctgatttaataattggagctagaaggggctcacctttagcagttggttatggacccaacgaaaattatctaggttcagattcttatgcattaaagtcaatgacaaataaaatcacatatcttgacgataatgaattttgtataattaaaaaagaccaagttcttttttttaatgaggatggaaagaagataaataaaaaaattctagaactttcatcaaatgaggctagttacgaaaaaggtgattttaagcattttatggcaaaagaaattgaggagcaaccaacaacagttaaaactggaataaaagaatatgtagataaaacgaattcagaaattaatatctataatttcccatggaaaattagtgaaataaattcaattacattaataggttgtggaaccgcttatcattcctgtctaatggctaaatattggtttgaagagttaactcaacttgatgtctctatagatattgcatcagagtttaggtatagaaaaaatagatttaaaaaagatactttatatatatttgtctctcaatctggagaaacagcagatacttacgcagcactagatctttgtaacaaaaataatatgaaaacttgtgctgtagtaaatgtaattgaaagttcgattgcaagagatgcaaattttgtattaccaattcattgcggcccagaaattggtgttgcatctacaaaagcttttttaggtcaaatactaattttatatattttagctttaaaacttgggtctttgagaaatgaaattaataaaagaaaatttataaagaaaagataa

SEQ ID NO: 246901 - DNA, 688 bp, Unknown
  Bacterial polypeptide expressing nucleotide sequence isolated from the Sargasso Sea
cacttatgctgcattagatttgtgtaaaaaaaatgaaatgaaaacctgtgcagtcgtaaatgttattgaaagctctatagcaagagactctgagtttgttttgcctattcattgtggaacagaaattggggtagcctcaacaaaggcattcctaggtcaaatattaatattatatattttatctttaaaactaggcttgttaagaaaagatctaaaaaaagatctatttactcaaaaacttaaggatttaaaagagttaccaaaattagtagaacaaaccttacttacagacaataagatacaaactatatctaatacttttaatgaagctaaaggatcaatgttcttgggaagaggattttcatatccaattgcattggaaggagcattaaaattgaaagaattatcttatattcatgccgaaggttatcctgctggagaaatgaagcatggaccattagctctaatagaagagggaatgccagttgtagttttggcaccaagggacaactattataaaaaaacaatttcaaacatgcaggaagttattgccagaggagcaaaagttttattaattacaaataaaagtaaagatgaagttgtttctgaaaatatttgggaaaccttagaagttgaaagtacgaatgaggatcttttaccctttcttttaacaatacctttacaaaaa

SEQ ID NO: 246902 - DNA, 440 bp, Unknown
  Bacterial polypeptide expressing nucleotide sequence isolated from the Sargasso Sea
tatgtgcggtattataggaattaatagtaataaagaagttacatcaacaattttaaattcacttagaaaattagagtatagaggttatgattcagccggtattgcaacattaaacagtggatatattcaagaagtaaagtgcgagggaagagtagataatcttgaaaaaaatattattaaaaataaattgcttggaaatgtaggcataggtcatgttagatgggctactcatggtattcccagcactttaaatgcacaccctcactcatcggacaacgtttcagtggttcataatggtattatagaaaactcaactttattaaaaaaatttttaataaaaaaaggacacgtatttaaatctcaaacagatacggaggtcattgtacatttaattacagaatatttaaaaaaaaataatttaatagacacattaaaaaaag

SEQ ID NO: 246903 - DNA, 676 bp, Unknown
  Bacterial polypeptide expressing nucleotide sequence isolated from the Sargasso Sea
ttttgtattaccaattcattgtggacctgaaatatgtgtagcttctacgaaagcatttttaggtcagatacttgtactttatatacttgctattaaactgggatctttaagaaatgagattgaaaataaagtttatcaagacaaaattaaagatttaaaaaatttaccaaccttaattgaaaagactttattaattgataacgatattcaatctattgcttctacatttaatgaagcaaaaggttctatgtttttaggaagaggtttttcttacccaatagctctagagggtgctttaaaacttaaagaattatcatatgtacatgccgaaggttatccagctggagaaatgaaacatggacctttagctttaatagaagagggaatgcctgttgtggtattagcgccaagagatagttattataaaaaaactatttctaatatgcaggaagtagttgctagaggtgcaaaagttttgttaataacaaataaaagtagagatgaggttttatctgaaaatatttgggaaactatcgaagttgagagtacaaatgatgatttattaccttttcttttaactattcctcttcaaaaactagcttattattcagcccttaaaaaaggttatgatatagataaaccgagaaatttagctaaatcagtaactgtcgaataa

SEQ ID NO: 246904 - DNA, 772 bp, Unknown
  Bacterial polypeptide expressing nucleotide sequence isolated from the Sargasso Sea
atggaggcccagcgccgcaccacccaccctgacccggcctatgcaccgcgccagctgggggtgaccaaccgtccagagagttcgctctcccgtcaggttccccatgtcttggacatcggtgccggcattgaagtgggcgtggcggccaccaaaacgttcatgggacagctgttggccttctatggcctggcgatggccttcgcagcacgccgcggcagtcgttcagccgctgaaatccagacgctggtggatgaattgcgcatgcttccccagcagctacaggagttggtgtcgctccatgatcagcgctcagaagccttggcccatcgctttgccgaaacccaggacgtgatcttcctgggtcggggcatcaactaccccatcgcgctggagggtgctctcaagctcaaagagatcagctacatccatgccgagggctatccggctggtgagatgaagcacggtcctattgccctgttggatgcccatgttccggtcgtgtccatcgcggtgccgggaacagtgttcgagaaagtgctcagcaacgcccaggaggccaaggcccgcgatgctcgcttgattggtgtggccccagagggacctgacacggcgctgtttgatgacttgctgccggtgccggaggtgagcgagtggatcagcccgttgctgacgttggtgcccatgcagctgttgagttaccacatcgcagcccatcggggcctggatgtggaccaaccccgcaatctggctaagagtgtgactgtggagtgat

SEQ ID NO: 246905 - DNA, 247 bp, Unknown
  Bacterial polypeptide expressing nucleotide sequence isolated from the Sargasso Sea
aactatttcaaatatgcaggaagtcatagctagaggagcgaaagttttgcttgttacaaataaaagtaaagatgaagtatattcagaaaacatatggcagactattgaagttgagaatactgaagatgacttattcccttttttggtaacaattcctttacaaaagcttgcatattattctgcactaaaaaaaggttatgacattgataaaccaagaaatttagctaaatcagtaacagtagaataa

SEQ ID NO: 246906 - DNA, 658 bp, Unknown
  Bacterial polypeptide expressing nucleotide sequence isolated from the Sargasso Sea
atttactaatgctggacctgaaattggagttgcttctacaaaagccttcacaactcaacttgcagctttaatgctgctagctttgtctcttgcaaaaagcagaggaaaaaatccaaagttaagaacaagagtaataacagcattaagatcattgccagaaacagttgaagaaactttaaaacttaaagatataattctagaaatcgcacctcaaatagctaataaagacaatgctttgtttttaggaaggggtattttttatccaatcgctaaagagggagcactaaagcttaaagaaatttcttacattcatgctgaagcttatccagctggcgagttaaaacatggacctcttgctttaatagatgaagaaattccagttattgctttagcgccagagagcgagatagctgaaaaattagtttctaatctcgaagaagttaaagctaggggcggaactctatatgtattttctgatccttcaatttcaatggatttaaagtctggaagactcatcaatatgccaaagtgcgacttccttttgactccgatcatttatacgatacctcttcaaatactttcttatgaagtagctttgttaagaggaaccgatatcgatcaaccaagaaatctagcaaagtcagtcacggtggagtag

SEQ ID NO: 246907 - DNA, 634 bp, Unknown
  Bacterial polypeptide expressing nucleotide sequence isolated from the Sargasso Sea
tgttgcttctacaaaagctttcactacacaacttgttggtctattaatgtaactctaatccttggaaggcaacatggcctatccacagccgcggaaaatacaattaataatgcacttagagctcttcctgattctttagactctgtcatgcttttagaagatcaaattattgaaatggccgaagatttcgatcaaaaagagcatgctctctttttgggcaggggcattcattatccaatagctatggaaggtgcattaaagcttaaagaaatttcctatatacatgcagaagcatatcctgcaggagaactaaagcatggaccattggctctcgttgattcagaaatgcctgttgttgcagttgcccctaatgatgatctacttgcaaaacttcaatcaaacttagaagaagttagggcgcgcggaggaaagttatatgtatttggtcattccgcagcccatcaagaggatgagtcaataactaagtttattgaattgcctgaagtccctgagctgattgctcctctaatttactccatcccattacagttgcttgcttatcatgttgccattcttaaaggcactgacattgatcagccacgaaacctcgctaagtctgtgactgtcgagtaga

SEQ ID NO: 246908 - DNA, 445 bp, Unknown
  Bacterial polypeptide expressing nucleotide sequence isolated from the Sargasso Sea
atgtgtggaatagttggaattacaagtaataaagaagtaactacaagaataataaattctttaaaaaaattagagtatagaggatatgattcagcaggaattgcaactcttaaagatggtttaataaacgaagttaagtgcgaaggtagagtagaggcgcttgaaaaaaatatttcaaacactaatatacagggagaaattggaattggacatgtgagatgggccacacatggtaaaccaagtactgttaatgcacacccacattcatctgaaacagtatctgttgtccataatggtattattgaaaattctactattttaaaaaaaatattagaaaaaaaaggttataagtttaaatcccagacagacactgaggtaattgcacatttggttactgattatttaaaaaaaaataatttaaaaaatactattattaaagttttaa

SEQ ID NO: 246909 - DNA, 835 bp, Unknown
  Bacterial polypeptide expressing nucleotide sequence isolated from the Sargasso Sea
ctagaagaattaacatcaattgatgtcgaaatagatatagcttcagagtttcgatatagaaatttaaaatttaaccccaataatttatatatttttgtttctcaatctggtgaaactgctgacactgctgctgctttagatatttgcaaaaaaaataaagttaaaacctgttcaatcgtaaatgtagttgaaagcactattgccagaaactctgactgtgttctacccattcacgctggtccagaaatcggagtggcttcaacaaaagcttttttagggcaattaatagttttatatattctctctctaaaactttctattgtgcgaggtgacgttgataaaaaaacatatgataccaatgtagaaaacttacaaaaacttcctgagtcaatcaaaaatacattaaaacttgaaagtgaaattcaattaatggctaaagaattcttagaagccaagggatcaatgtttcttggaagaggaaattcttttccagtagcactagaaggcgctttaaaactaaaagaactttcttatttacatgccgaaggttatccagcaggagaaatgaaacatggacctttagctttgatagaagagggattaccagtaatagtaattgctccaaaagataaatattatgaaaaaactctttcaaatatgcaggaagtcatagcaagaggaggtaaaatattttttataactgataataataaaagattattaagtactaatattagattcagattaagagtaccaagagttgacagtttattatcacccttattgttaactattcctttgcagcttttagcatatcatgtagcactattaaaaa

SEQ ID NO: 246910 - DNA, 743 bp, Unknown
  Bacterial polypeptide expressing nucleotide sequence isolated from the Sargasso Sea
gataagaccgttaccttagcagaaaaaggggtatttaaacactttatgtcaaaagaaattcatgaacagccaagtgttattcaagattctattagtcattatattaataacgaagatttaacagtgaatttaccaaaattcccatttaatattactaatttaaaaaatatcactttagttgcatgcggaagctcatattattctggattagttgcccgtgaatggtttgagaaacttgctcgcgtgaaggttgatgttgaaattgcttctgagtttaggtatcgggaagctccgatggattcaagcggactaactgtatttatctctcaatcaggtgaaacagctgatactttagcagcgttgaagcattgtaaaaaacttaatcaaaaaaccatttcaatagtgaatgttccaaattcttctatgtgtagaaattcagattcatctcttaaaatttttgctggacctgagataggtgttgcatcgacaaaggcatttacctgccagcttattgttttagcatctttagctattcatattggaaggattaatggcaatctatcagatgatgatgaaaataattatgtaaaatcattacttgatgttccaagattaatttctaatgttttggatcaggaagaagaccttattaaaattgtaaaagaattaaatccaattaaaaatgctttatatcttggaagagggcagatgtatcctgttgctcttgagggggcattaaaact

SEQ ID NO: 246911 - DNA, 892 bp, Unknown
  Bacterial polypeptide expressing nucleotide sequence isolated from the Sargasso Sea
tatgactcagcgggtatagctacactttcagatggtgaaatcaacgaagtaaaatctgaaggtagagtaaataatttagaaaataattttgatttaaaaaacttaaaaggaaatattggcatagggcacgtaagatgggctacacatggtgttccgaatagtgtaaatgctcatcctcattcctctcataacgtatcagtagttcacaatggaattattgaaaactcaacaatattaaaaaaacatttaattaacaaaggtcacaaattcaaatctcagacagatacagaagtaatcgttcatttaataacagagcacttaaaaactttagaactagaggaagcaataacaaaaactttaaaacaacttcatggtagttttgcacttggaattgtattcaaggatatgccagatttaattatcggtgctagaagaggctcgcccttagccgttggttatggtccaaatgaaaactatctaggatcagactcttatgctttaaaatccatgacaaacaagatcacatatcttgatgatggtgaattttgtattgttaaaaaagatcaagtacttttttttaatgaagaaggaataaaagttaataaaaaaatattagaattatcatcagataaggcaaattatgacaaaggtgactttaaacattttatggctaaagaaattgaagaacaaccaacaacaattaaaactggaattaaagaatatgtagatactgtaaataaagacataaacatctttaattttccatggaaaattaaagacattaaatcaataactttagtgggatgtggaacagcatatcactcttgcttaatggcaaaatattggtttgaagaactaacaattttagatgttaacatagatatagcatcag

SEQ ID NO: 246912 - DNA, 857 bp, Unknown
  Bacterial polypeptide expressing nucleotide sequence isolated from the Sargasso Sea
tatagcctctgagtttagataccgaaaacttaaatttaaaagcgattgtttatatgtttttgtatctcaatctggagagacagctgatacgtatgctgctttagatatatgtaaaaaaaataaaatgaaaacttgctctattgttaacgttgttgaaagttcaatagctagagactctaatcttgttttaccaatccattgtggtccagagataggagttgcatcaaccaaggcttttttaggtcaaatgttagttttatacatgctatgtttgaagttatcatttgatcaaaaaattatttctaaaaaaacttatcaggaaaaaattaaaaatttactttctttatctaacttatgtaaaaaaacattgctaacagataacaaaatacaaaaagcaagcaaagcatttatcaaagctaaaggttcaatgtttttaggaagaggttactcatttccaatagctcttgaaggagccttaaaattaaaagaacttgcatatgtccatgctgaaggatatccagctggtgaaatgaaacatggtcctttagcgctcattgaagaaggtatgcccgtagttgttcttgctccaagagacaaccattacaaaaaaacaatttcaaacatgcaagaagttattgctagaggagctaaagttttacttgttacaaataaaagtaaagatgaaattcaatcagaaaatatatgggaaaaaatagaagttgaaaatttaacagaagatttatttccttttttaattacagtacctcttcaaaaattagcttattattcagctttgcaaaacggatatgatatagataaaccaagaaatttagcaaaatctgttacagttgaataat

SEQ ID NO: 246913 - DNA, 325 bp, Unknown
  Bacterial polypeptide expressing nucleotide sequence isolated from the Sargasso Sea
aatgaaacatggtcctttagcattaatagaagatggtttaccagttgttgtaattgcacctaaagacaaatattttgaaaagactttatcaaatatgcaagaggtcatagctagagggggaaaagtgctattgttaactaattcggatgggaaagtaataagtgaaaatattaggtttcagattaatttgccagactctgatttaaccctgacaccttttgtatttactattcctcttcaacttctttcgtatcacgtagctttattcaaaaaatgcgatatagataagccaagaaatttagccaaatctgttacggttgaataa

SEQ ID NO: 246914 - DNA, 574 bp, Unknown
  Bacterial polypeptide expressing nucleotide sequence isolated from the Sargasso Sea
tatgtgtggaatagttgcagtaactggatataaaaaagctttaccattattaattaatggtctagaaaaactcgaatatagaggttatgattctgcaggtattgcaataataaattccgaaaataattcaatttcttgtaataaagcagaaggaaaactcaagaatttaataagtaatcttaacgatcataatatttctggaactgtgggtataggacataccaggtgggcaactcatggaaaacctgaggttaaaaatgcacatcctcataccgatagttcaggaaatatagcagttgttcaaaatggcattattgaaaatttccaacatttaaaaaaaaaattagaggaagagggcattatttttaattctgatacagataccgaagtaattccccatctaattcaaagagagttaaatacattaaataaactaaatcttgagaataatgggtcgacattattagtagctgtgagaaatgtattatcggatttagaaggatcttatgctttagcagttatatggtctggtgctcccagctctttggtagttgcaagaagacaaagctccttg

SEQ ID NO: 246915 - DNA, 861 bp, Unknown
  Bacterial polypeptide expressing nucleotide sequence isolated from the Sargasso Sea
aatttagaaaataattttgatttaaaaaatttaaaaggaaatattggtattggacatgtaagatgggcgactcatggtgtacctaatagtttaaatgcccatcctcattcttcacataatgtttctgtagttcataacggtataattgaaaattctacaatattaaaaaaacatttaattaataaaggtcacaactttaaatctcagacagatacagaggtaattgttcatttgattactgaaaatttgaaaacttcagaattggaagaggcaattacaaaaactttaaaacaacttcatggtagttttgctcttggaatagtttttaaggatatgccagacttaatagttggtgctagaagaggatcgcctttagccgtaggttatggcccaaatgaaaattatctaggatcagactcttatgctttaaaatccatgacaaacaagattacatatctagatgatggtgaattttgtgttgtaagaaaagatcaagttcttttttttaatgaagaaggaaaaaaaattaacaaaaaaatattagaattatcatcggatgaagcgagttatgacaaaggtgatttcaaacattttatggctaaagaaattgaagaacaaccaacaacaattaaaactggaattaaagaatacgtagataatttaaataaagatataaatatcttcaattttccatggaagattaaagatattaaatcaataactttagtaggatgtggaacagcataccattcatgcttgatggccaaatattggtttgaggaactaacaactttagatgttaacatagatatagcttctgaatttaggtatagaaaaaatagattaaaaatgatagtttat

SEQ ID NO: 246916 - DNA, 773 bp, Unknown
  Bacterial polypeptide expressing nucleotide sequence isolated from the Sargasso Sea
tatggaaaaagaaatatatgaacagcctaatgccattcttaacactcttgatggaagaattggtggagaggatgtcttagataatatttttggaattggctcatctgaaacattaagccaagttaaaagaatacaaatagttgcttgtggaaccagtctacatgctgcaagggttgctgcaaattggttttctgcaatttctgaacttcctacgcaaactgattatgcatcagaatatagatataggaatcctcatgttgatgaagatgcactcttagtaacaatttctcaatctggagaaactgcagatactcttgcagcattaaatttcgcaaaagaaaaagactacctatcaacacttaccatttgtaatgttccaacaagttctattgcaagagagtcaaattattcactatatacaaatgcaggccctgaaataggagtagcatcaactaaagctttcacaacacaattagtaggcttaatgctcttagctttatctcttgctaaaagcagaggaaaaaatccaatgctaagaaaaaggatcgtaacagcattaaggcagttacctgaaataattaatgaaacattacaattgaaaaatttaattatggagatagcacccgaagtagccagcaaagataatgccttatttttaggtagaggaattttctatccaatagccaaagaaggggcattgaaacttaaagaaatatcttacattcacgcagaagcatatcctgcgggagaactaaaacatgggcctctagctc

SEQ ID NO: 246917 - DNA, 871 bp, Unknown
  Bacterial polypeptide expressing nucleotide sequence isolated from the Sargasso Sea
ggaaatcttggcataggccatgttagatgggctacacacggcgtacctaacgaagcaaatgctcatccacactcaactgaaatagtttcagtagtacacaatggtattattgaaaactcaagtgaattaaaaaagattttggagaaagaaggaaaaacttttaaatcgcagacagatactgaggtaataacagtgttactgacagaaaaattgaaaaacactgaacctttggaagcagtttttaaaaccctaggtcttttaaaaggcagtttcgcattaggaataatatttaaaaattataaagactttgttattggcgcaagaagaggcagccctttagctgttggatattcaaatgatgagaattatctaggatctgactcatatgctttaaaatctatgacaaataaaatttcatatttagatgacggggatgtttgtatcttatcaaaagatgaagtgaagttttataattcgaataaagaaaaaattaataaagagatatttactctttctgaaaataagtctgaagtaaataagggaaattataaaaactttatgatcaaagagatttttgagcaaccgataacattaaaaacttgtttaaaagaatatattgataaaatcagagaggaaataaatttctataatctcccaattgaaccaaaaaaaattaaaaaaattgttcttataggatgtggaaccgcttatcactcttgtttagttacaaaatattggcttgaggagtttactaatttagttattgagacagacatagcttctgaatttaggtatagaaataataggtttgacaaaaacaatctttatatttttgtttcacaatcgggggaaacagcagatacttttgcag

SEQ ID NO: 246918 - DNA, 640 bp, Unknown
  Bacterial polypeptide expressing nucleotide sequence isolated from the Sargasso Sea
atgtgtggaatagtagcatataagggtccaaaaaattgttatcccatcttaatagatggcttacaccgtttagaatatcgagggtatgattcggcgggtattgcttgtctttcagatggaaaaatctcaataacaaaaagaagtggaaaggttattcagctggagcaaaaacttaaagtcgatggaaaatttcaaaattgtgatggccctggtattgcacacacacgttgggctactcatggaaagccaaatcaaatcaatgctcatccacacaaagatcaatcaggaaatattgtattagttcataacggaattatagaaaattataatccgattaaaaaatttttaaaatcaaaaaaagtaaaatttaaatctgaaactgatacagaagttttggtgcaattgattggttatttatttaaccaaggaaaactaagttttgaacagtcagtaagggcagctcttcaaagagtagacggggcttatgggattgtagttttaaataaaaatgagcctgatgttatgatcgctgcaagaaaaggtagtccgcttgttttaggattaaaaaacgatgaattttttattggtagcgatgtttctcccgattataaaacatactcagcaaattatatatcttgaa

SEQ ID NO: 246919 - DNA, 262 bp, Unknown
  Bacterial polypeptide expressing nucleotide sequence isolated from the Sargasso Sea
ttctcctggtgaggtttttgataaagttattagtaatgcgcaagaagcaaaagctagagattcatatttgattgggattgctcctgaatgtagtggaactgaaatttttgattatttaatgaaagttccttcctctaatgagtggatttcacctttactaaacatagttcctttacaattattgagctaccatattgcagctcatagaggacttgacgtggatcaaccaagaaatttagctaaaagtgtaactgtggaatga

SEQ ID NO: 246920 - DNA, 338 bp, Unknown
  Bacterial polypeptide expressing nucleotide sequence isolated from the Sargasso Sea
aatgtgtggaataattgggataataagttcaaaggaagtttcaactagaatagttaattcactcaaaaaacttgaatatagaggatacgactcggcaggcatagcaactttagttgatgggaatattaacgaagttaagtgtgagggtagggttgaagttttggaaaaagatatatcaaaatttaatttaaaaggagatataggtattggtcatgttaggtgggccacacatggtaaaccaagtaaaattaatgcccatcctcactcgtcagaacaagtttctattgtacataatggtattatagaaaattcaacgattttaaaaaaacttttagaaa

SEQ ID NO: 246921 - DNA, 343 bp, Unknown
  Bacterial polypeptide expressing nucleotide sequence isolated from the Sargasso Sea
tatgtgtggaattattggtattaatagtaagaaaccggtttctgcttcaattattaattctcttaagaagttggaatatagaggctatgactcagcaggtatcgcaactcttcatgctggatctatcaatgaggtaaaatcagaaggcagagttgacaatcttgaaaaaaattcagtagttcaaaatatggtaggtacgatcgggatcggtcatgtaagatgggcaacacatggtcttcctaatagtataaatgcacaccctcactcttctcaaaacgtttcagttgttcataatggtataattgaaaatttcactttattaaaaaaatttttgggtaagtaa

SEQ ID NO: 246922 - DNA, 865 bp, Unknown
  Bacterial polypeptide expressing nucleotide sequence isolated from the Sargasso Sea
ggttaagttttatgatgtttcaaaaaagaaaattaataaaaaaactcatattttatcagaggatgaaaatattactgacaaaggtgagtataaaaattttatgtccaaggaaatttttgagcagcctattactgctaaaacgtgtatcaatgaatatattgatagtttaaaaaaagatatcaatatctataattttccaattaaaccaacaaaaataaataaaatcgtactgattggctgtgggacagcttatcactcatgtttagtagcaaagtattggctagaagaactgacaagtatagatactgaaatagatattgcctctgaatttagatataggaaattaaagttcaactcaaataatctttatatatttgtatctcaatctggtgaaactgcagatactgcggctgctttggatatttgcaaaaaaaataaagttaaaacttgctcaatagtgaatgttgttgaaagcactatagctagaaattctgattgggttttaccgattcatgcagggccagaaattggagtagcatcaaccaaagcattcttaggacaattattagttcttttaattttaagcttaaaacttgctaaagaaagaaacgatataaatgaaaatatatacaatgatattatcaaaaacttaaaacaaattcccgatgctataaaagaaagtttaaaatctgaaaatgaagttcaactaatggcaaaagaatttgaaaatgccaaaggctcaatgtttttaggcagaggatcatctttcccgatagccttagaaggcgctttaaaattaaaagaattatcctatttacacgcagagggatatcctgcaggagaaatgaaacatggtccacttgct

SEQ ID NO: 246923 - DNA, 859 bp, Unknown
  Bacterial polypeptide expressing nucleotide sequence isolated from the Sargasso Sea
ttagagtatcgaggttatgactcagcaggtctagctactatttttaatggccaaattaatgaaaagaaatgtccaggtagagttgaaaaactagaaaaaatattatttcaaaatccaaatgaaggaaacctaggaattggtcatgttagatgggcaacgcacggtgttcctaacgaagttaatgctcatccacattcaactgagatagtctcagttgtacataatggaatcattgaaaattcggatgaattaaaaaaagatttagaaaaatctggtaaaatttttaaatcccaaactgatacagaggtaataacaattttacttactgaaaaattaaaaaaattagatcctttaaaagcagtatttgaaacattaggaatgcttaaaggaagttttgcattgggtattatatttaaaaattttaaagactatgttattggagcaagaaggggcagccctcttgctgttggatattcaaacaacgaaaattatttaggctcagattcctatgctttaaaatctatgactaataaaatttcatatttagacgacggggatgtttgtgtactatcaaaagatgatgtgaaattttataattctaaaaaaaataaaataaataaagaaatattaacattatcagaagacaaatcaacggtaagcaaaggtaattacaaaaattttatgatcaaagaaatttttgaacaacctattacaacaaaaacttgtttaaaagaatacattgataaaattagagaggaaattaatttttacaatctgcccattgatccaaaaaaaataagcaaaataattttgattggatgtggcaccgcatatcattcttgtttggtagcaaaatatg

SEQ ID NO: 246924 - DNA, 944 bp, Unknown
  Bacterial polypeptide expressing nucleotide sequence isolated from the Sargasso Sea
aagaagaaatttcgtagcctcagacccgctagcaatagcagggcttgctgaatcattctaccttttagaggacggcgactttgcagtaattactcaagatgaaatcaaaattgttggttctgacagtgagccggtcttaagagaagaaaccattatagacacaagtgttaaagaggcatccaaagacggctacaaacacttcatggaaaaagagatatacgaacaaccaaaagcgatagcaaatgccattgagggaagaacaacagacggggatgttctagacaatatatttggcttaggatcgtctgaatcattcaaaggggtaaaaaggattcagtttgttgcctgtgggacaagcctgcatgctgcaaaaacagctagaaaatggtttgaggagctttgtgaaacaccatgctacatagattttgcaagcgaatacagataccgaaaccctttggttgaagatgatactttgtttgtgtgtatttcgcagtcaggagagaccgcagacactatggcggcattgaactatgcaaaagaagaaaaatatttaggtattgttacgatttgtaatgttcccacaagcaccatggcaagagagtctgattggaaaatatttacaaacgcaggccctgaaatcggcgttgcctcaaccaaagcatttacaacacaacttgcagcactaatgctgttggcctgttcaatatcaaaaagcaaagacataaatggggacaaaagggccgaagccattaaagaccttgttgatacaccggcgcttgtgaaagaagcgtttgggctaaaaaaacacatagacgatattgttgaaaaaattgcagacaaaaagaatgcattgtatttaggtaggggtgtttacttctcaatcgcacaagaaggagcactaaaatttaaagagatcacatacattcatgctgaggcatacccag

SEQ ID NO: 246925 - DNA, 322 bp, Unknown
  Bacterial polypeptide expressing nucleotide sequence isolated from the Sargasso Sea
atgtgcggaatcattggtgcagcttcctctagaagcgttggaaaaatcttagtcaatggactgaaaaaaatggagtatcgcggctatgactcagcagggcttgttttaaaccaagatgagctcgcatttcaactaaggactctcggcaaggtttcaaaccttgaagacgcaatgattgagcaaaggcctaaagccgattctggcattgcgcacactagatgggcaacgcatggaattccatcggagaaaaatgcgcacccccatgggtccaatagaaacatctatattgttcacaatggaatcattgaaaacccacgatgag

SEQ ID NO: 246926 - DNA, 769 bp, Unknown
  Bacterial polypeptide expressing nucleotide sequence isolated from the Sargasso Sea
atgtgtggaataattggaatagttagtaataaatcagtatcagcaagcataatagaagctttaaaaaaattagagtatagaggatatgattcagcaggcatttcaactattagcaatggagtaattaatgaacaaaaatgttcaggtagagttgataatttagaaaaaattctttttcaaaatccttccagtggtgatcttggaattggacatgttcgatgggcaacacatggaataccaaatcaagttaacgcacatccacattcatcagaagtggtttctgtagttcataatggaattattgaaaattctgacattttaagaaaagaatatttaaaaaagggttatacttttaaatctcaaactgataccgaagtcataacagtcatgttaactgattttttaaaatcagatggattaataaattgtatttataaaaccttaaaaaaacttgaaggtagttttgctttgggagtaatttttaaagattttgacaatgttgttgtgggagcaagaagaggaagtccccttgcagtaggttatggacataacgaaaattttataggatcagactcttatgcattaaaaaaaatgacaaataaaatttcttatcttgatgatggagatttttgcattttgtataaagaaaaagttgaattttataatcatgaaaaaaaaaaaattaataaagaaattttcgaattatcaaatgaagataatttagcagatagaggtgattacaaagactttatgtcaaatagagattgac

SEQ ID NO: 246927 - DNA, 754 bp, Unknown
  Bacterial polypeptide expressing nucleotide sequence isolated from the Sargasso Sea
tatgtgtggaattataggaattaatagcaacaaacccgtatctgcaacaatcattaactctttaaaaaaattagagtatagaggttacgactcagctggaattgcaactctttcaggcggtttaattaatgaagtaaaatctgaaggcagagttgacaatcttgaaaaaaattcattagtcaaaaatatgggtgggaccataggtattggccatgttagatgggctacacatggcttaccaaataccataaatgctcatccacattcatcacaaaatgtttctgtggttcacaatggaataattgaaaattcgacattattaaaaaaatttttagttggcaaaggtcataattttaaatcacagacagatacagaagttattgttcatcttttaactgaaaatttaaaaacagaaaatattgttaattcaataaaaaaaactttgaaatctcttcatggaagttttgctcttggaattatatttaaagacgaaccagatttaattgttggagctcgaagaggctctcctttagctgttggatatggtccaaatgaaaattatttaggctcagactcttatgctcttaagtcaatgacaaacaaaataacttatttaaatgatggagagttttgtattattaaaaaagatcatgtggaattttttaatgaagaaggaacaaagataaataaaaaagttttagaattatcatctgatgaaaaaaatatgacaaaggtgactataaacatttcatgg

SEQ ID NO: 246928 - DNA, 298 bp, Unknown
  Bacterial polypeptide expressing nucleotide sequence isolated from the Sargasso Sea
attgatgaagaaatgccagttattgcgctagctccagagagtgaaatagctgaaaagcttgtttcaaatcttgaagaagtaaaggctaggggcggcaccttatatgttttcgctgatccttcgataacaatggatttaaaatcaggactagttattaatatgcctaaatgtgattttcttttaacgcctattatttatactattccgcttcaaattctgtcttatgaggttgcccttttaaggggcaccgatattgatcaaccaagaaatcttgctaagtcagtcacggttgaataat

SEQ ID NO: 246929 - DNA, 672 bp, Unknown
  Bacterial polypeptide expressing nucleotide sequence isolated from the Sargasso Sea
cagagcatgttctttttactaatgctggcccagaaattggcgttgcatcaacaaaggcatttactacccagctggcaggtttgatgctgttagctatgtctattgcaaaaagcttaaatcaaaataaagaattaagaaaaaaattggctagtgaactaagaaatttgccaaaggtggttgataagacattgaaactatcaaatgagatcatgaagatcgttcctaatattgctgataaacacaatgctttatttttaggaaggggcatgttttttccaatcgttcaagaaggcgcactgaaattgaaagaaatttcatacattcacgctgaggcttatcctgcaggagaactgaaacatgggccattggcattggtcgacgatcaaattccagtggttgcattatcccctgaaaatactttaactgaaaaactagtctccaacctggaggaggtaaaggcaaggggcggcacgctttatgtatttggtggagaaaattcaaaaattaaaatcgaaagaggtgaatacattcaaatgccagaatgtagcgaattgttagccccaattatttataccattccacttcagattcttgcatatcaagttgcatgccaaagaggcactgatttagatcaacctaggaacttagctaaatcagtcacggtggaatgag

SEQ ID NO: 246930 - DNA, 490 bp, Unknown
  Bacterial polypeptide expressing nucleotide sequence isolated from the Sargasso Sea
tatgtgtggtatcattggaatttcaagtaacaagtctgtctctgctagcatcatcagttcattaaaaaagcttgaatacagaggatatgactcagctggaatagcaactctttttgagggtgaaattaaagaggtaaaatctgagggtagggttgacacattagaacaaaactttgatttaaaaaatttgaaaggtaatataggaattggtcatgttagatgggcaacacatggagtaccaaatagtgttaatgctcatccacattcttctcacaatgtttcagttgtccataacggaattattgaaaactcaacaatattaaaaaaatacttaatcagcaaaggacacaaatttaaatctcaaactgatacagaggttatagtacatttaattacagagaatttgaaaactacagaaatagaggaagcaatcacaaacacattaaaacaacttcatggtagcttcgctctaggaattgtttttaaagat

SEQ ID NO: 246931 - DNA, 505 bp, Unknown
  Bacterial polypeptide expressing nucleotide sequence isolated from the Sargasso Sea
ttaatagaaaaaactttactactcgataatgatatccaggcaatatcctcaacttttaatgaagctaaaggttctatgtttttaggaagaggtttttcttatccaatagctttagaaggtgcattaaaattaaaagaactttgttatgttcatgctgaaggttatccagcaggtgaaatgaaacatggacccttggctttaattgaagatggtatgcctgttgtggtcttagctcctagagataattatcataaaaaaactatttctaatatgcaggaagttatagccagaggagcaaaggtattattaataacaaacaaaagcaaagacgaaattgtttctgaaaatatttgggaaactattgaggttgaaaataccaataatgacttacttccatttttgttaacaatacctcttcaaaaattagcctactactctgctttgaaaaaaggttacgatattgataagccaagaaatttggctaaatctgtcactgttgaataaa

SEQ ID NO: 246932 - DNA, 775 bp, Unknown
  Bacterial polypeptide expressing nucleotide sequence isolated from the Sargasso Sea
ctggaatattattttgatcaaaaaacaggagaagtaacgcttcccaataaattaaatttaaactttaatgattttgaccaaatttctttagttgcatgcggcacggctttttacgcttgtcatgttgcaaagtactggtttgagaatattgcgcggatcccagtcgaaattgatatcgcatcagagtttagatatcgggagccaccaatcaagggaaacacattggcaatttttgtcagtcaatcaggggaaacagctgatactttggccgccctcagatattgctccggaaaggcaaaaaaaatattatcaataactaatgtagcagaaagttctatttcacgcgaaagtgatcattctttacctatactggccggtgtggaaatcggagttgcatctacaaaagcgttcacttgtcagctttccgttctgtttgcattgtcaatcaaagcagccactgatacacataaaatttcaaaaaaagagcaaaaaaatatatattcgcatttcttaaaaataccttccatgatcaatcaaatcctgggtaagaaagatatgttcattgcactcgcgaataaattatcagaagcacgtgatatcttgtttcttggcagaggcctttcttatccgttagcgcttgaaggttcactaaaattaaaggaaattagctacatacatgccgaagcttatgcgtctggtgagttgaagcatgggccaattgcattaattgacaaatcggtacctgtaataattctagccccgaaagataaattat

SEQ ID NO: 246933 - DNA, 864 bp, Unknown
  Bacterial polypeptide expressing nucleotide sequence isolated from the Sargasso Sea
cagacagatactgaggtaataacagtgttgctgacagaaaaattaaaaaatacagaacctttggaagcagtttttaaaaccttaaatcttttaaaaggtagtttcgcattaggaataatatttaaaaattataaagattttgtaattggcgcaagaagaggcagtcctttagctgttggttattcaaatgatgagaattatctaggatccgactcttatgctttaaaatctatgacaaataaaatttcatatttagatgatggtgatgtttgtattttatcaaaagatgaagtgaagttttataattcaaataaagaaaaaataaataaagagatatttactctttctgaaaataagtctgaagtaagtaagggaaattataaaaactttatgatcaaagagatttttgaacaaccgataacattaaaaacttgtttaaaagaatatatcgataaaattagagaagaaataaatttctataatctcccaattgaaccaaaaaaaattaaaaaaattgtgcttataggatgtggaactgcttatcactcttgtttagttacaaaatattggcttgaggagtttactagtttagttattgagacagacatagcttctgaatttaggtatagaaataataggtttgacaaaaacaacctttatatttttgtttctcaatcaggtgaaacggcagatacttttgcagcattagatctttgtaaaaaagaaaatttaaaaacatgttctgtagtaaatgttgtagagagctcgatagctagacaatcagattgtgtattgccaattcatgcaggacctgaaatcggtgtagcttcaacaaaagcttttttaggtcaaatgcttgttctg

SEQ ID NO: 246934 - DNA, 835 bp, Unknown
  Bacterial polypeptide expressing nucleotide sequence isolated from the Sargasso Sea
tatgtgtggaatagttggcattactggaaaaaaacaagtcacatctgaaatcttaaattctttaaaaagattagagtacagaggttatgactcagcaggtatcgcaacattaaataatgaccaaataaatgaagtaaaatgcgaaggtagagttgatgtactagaaaaaaatcttttaaaattagacattaatggaaacgttggtattgggcatgttagatgggccacacatggagcgcctagtgatatcaatgcacacccacattcatctaaagaagtatcagttgttcataatggaataattgaaaattcaatgttacttaaaaaagacctcctcaaaaagggatataattttaaatcacaaactgacacagaagttatagttcatcttatgtctgaatatttaaaacgttataaaataaaaaatgctgtaatgaaaatgctcaatagtttacagggcagttatgctttaggtatgatttttaaagatcatcccaatattattattggagccagaagaggatctcctttagctgttggttatggcccaggtgaaaactatttaggctcagattcttatgcactgaaatcaatgacaaataaaatttcttatttaaatgatggtgaattctgtattataaataatgatcaagttgaattttttgatgaacaaggtgctaaaattaataaaaaaattttgaccttatcttcggatgagaaaaagtatgataaaggtgattacaagcactttatggctaaagaaatagatgaacagccaaatgtaataaagaattgtgtaaatgagtatgttgataagataaataatgaaataaat

SEQ ID NO: 246935 - DNA, 733 bp, Unknown
  Bacterial polypeptide expressing nucleotide sequence isolated from the Sargasso Sea
atgaaaactgcttgtattgtcaatgttgtagaaagttcaatagcaagagattctaatttcatcttaccaatacattgtggaccagaaattggtgttgcatcaaccaaggcatttcttgggcaaatgcttgttttatacatattaatattaaaaatttcatatttaagaaaagacatcaataaaagtacgtatattgagaaaattaaatttttaaaagaattaccaaaattaattgaaaaaacacttttaattgaaagtaaaatacaatctatttctggaacttttattgaagcaaaaggctcaatgtttttaggtagaggattttcttacgctatagctttggagggagctttaaagttaaaagaactttcttatgttcatgccgaaggttatccagcaggagaaatgaaacatggtccattggcacttatagaagatggtatacctgttgtgatattagcacctaaagataattattataaaaaaactatttcaaatatgcaggaagttattgctagaggtgcgaaagttttattaattaccaataaaagcaatgatgaagttgtatcagaaaatatttgggaaaaagttgaagttgaaaatactaatcatgatttgatgccattcttattaacaattccactacaaaaattagcctactattcagctttgaaaaaagattatgatatagataagccaagaaatttagcaaaatctgtaactgttgaataat

SEQ ID NO: 246936 - DNA, 814 bp, Unknown
  Bacterial polypeptide expressing nucleotide sequence isolated from the Sargasso Sea
attgtcctcacaggatgcggcacgagttggcactctgcccttgtgggtgaatacctgatagaagaattcgcgaggcttcctgttgaagtggaatatgcgagtgagcttcgatatcgcaatccaccactggataagggaacattgctttttgcaattacgcaatctggagaaacagccgacacccttgccgcgcttcgggagatgaaacgaaaaggtcattcaactctcgccatttgcaatgcaataggaagcacgattgctacagaggctgacggcggaatctatttacatgcagggccagaaatcggtgtagcaagtacaaaagcctttacgagccagtgcattgttcttgcaatgctagcgttatacttcggacgattgcgtcacatgagctacgagcaaggcttggagtttattaatgcactcgaacagctccccgaactcattcgaaaggccttggcagcagaatcgactattcgtgatattgctgaacgataccgaaacgcaaatacatttctctatctgggacgacagtataattttccacttgctctagaaggggcactcaaacttaaggaaattagttacatacacgccgagggttatccggcagcagagatgaagcatggtccgatcgcccttgttgacccactgacaccgagcgttttcctcatccccaaggacgctgtttacgaaaaagtcctccttaaccttgaggagaccaaggccagaaaaggaccgattattgcagtagtcagcgagggagacgatcgtgttcagcaccttgctgatgaaataattgagctccctgaat

SEQ ID NO: 246937 - DNA, 627 bp, Unknown
  Bacterial polypeptide expressing nucleotide sequence isolated from the Sargasso Sea
ttctggaatagctactattaacaataatcaaattaactgtgtaaaatctcaaggtaaccttgatcaacttcaaaaaaaattaataaatgaagaattaataggtaatgttggcatagggcatactcggtgggctacgcatggcgttccaaatgaatcaaatgctcatcctcattttactgatgaagttgctgttgttcataatggtattattgaaaattattctttgcttaaaaatcaaattgtagaggccggaattagtttcaaaagcgaaactgatactgaagctattgcgcatcttataactctttatttaaagtcaggaatgggaagttatgaggctataagggcaacaactgaagatattaaaggttcttatgcactagctattataatgcgttctgaaccaaataaattgtttgccgttagaaagggtagtcctcttgcagttggttcttcagaaaaagaaaattatattggatcagatggttattcattaggtaattattgtgatgaggttacttacctcaaagatggtgatatcgctataatcgacaatacttcttttgaaatttttgataaccaaaacgaatttataaaaagaaaatcacaaattatagataagactgt

SEQ ID NO: 246938 - DNA, 775 bp, Unknown
  Bacterial polypeptide expressing nucleotide sequence isolated from the Sargasso Sea
gaaggcgatgtgcagaaatacccgccacagcgtgcccattttgacaagacgtcccagcccgtagagcgagaagtgcacgagtctaacgtcagctacgacgctggcgacaaaggccagtaccgccactttatgcttaaagaaatctacgagcagccgcatgcgattaataacacgctggaaggccgcttaagtgctgattcggtactggatgaaaccttcggcaacggcgcggctgaactgtttaaacaggttaaacacgtgcaaatcgttgcctgtggtaccagttaccactccggtatggtggcgcgctactggttagagtcgttaggcggcatttcctgtaacgtcgaaattgcctcagagtttcgttaccgcaaatcgttcgtgcagccaaacagcctgctggtcagcatttcgcaatcaggcgaaaccgccgacacgctagccgcgctgcgtttagccaaagaggccggctatcttggcagcttaaccatttgtaacgtggccggctcatccctggtacgcgaatcagatttagcttttatgacccgcgctggcgccgaaatcggtgtcgcctcaaccaaagcctttactacccagttagttggtttggcgatgctaacgatggcgattggtaagtacaacggcttaaccgccgcgcagcagcgcgaactgaccgatgcattaaagagcctgccagccaaactggagcaaaccttaaccttagcgccgcaaattgaagcgttggccgaagagtttgccgacaagcatcact

SEQ ID NO: 246939 - DNA, 913 bp, Unknown
  Bacterial polypeptide expressing nucleotide sequence isolated from the Sargasso Sea
aaaagtatggaagggactattggtattggtcatgtacgttgggcaacgcatggtttaccaaatagcataaacgctcatccgcattcttctcaaaatgtttctgttgtgcataatgggataattgaaaactctactttattaaaaaaatttttagtaagtaaagggcataagtttaagtcacaaactgatactgaagttattgttcatcttattaccgaaaatcttaaaactgaaaatattgtaaactcaataatgaaaactttaaaatcattacatggcagttttgctttaggtataatatttaaagatcaaccggatttaattgtcggcgctagaagaggatcacctcttgcagttggttacggtccaaatgaaaattatctaggatctgactcttatgcattgaaatcaatgaccaataaaataacttatttgaatgatggagagttttgtattgttaaaaaagatcatatagaattttttaatgaagatggaataaagataaataaaaaagtcttagaattatcatctgatgaagaaaaatatgacaaaggtgactataaacattttatggcaaaggaaattgaagaacagcctattactttaaaaaatggaattaaggagtatgttgatcattcaaataacaacattaatatttttaattttccatggaaaaataaagaattttcatcaattaccctaattggttgtgggacagcatatcattcatgcttgatggcaaaatattggtttgaagaactaacttcattagatgtgaatgtagatattgcttctgaatttagatacagaaaaaatagatttaaaaaagaaactttatatatatttgtctctcaatctggagaaacagcagacacatacgcagctttagatttatgtaaaaaaaatgaagaaa

SEQ ID NO: 246940 - DNA, 841 bp, Unknown
  Bacterial polypeptide expressing nucleotide sequence isolated from the Sargasso Sea
ttagctgttggttatggtcctggtgaaaattatttaggatcagattcttatgctttaaaatctatgacaaataaaatttcatatctcaacgatggtgaattttgtattatcaaaaaagataatgttgaattttttaatcagagtggaaaaaaaataaataagaaaatattacttttgtcttctggtgaacaaaattacgaaaagggtgattataaacatttcatggctaaagaaatcgatgaacagccaaacaccattaaaaattgcgtaaacgaatacatagacaaaatcaataaagatataaatatttttaattttccatttaaagaaaaagaaattaattctataactttgataggatgtggtacagcttatcattcatgcattattgcaaaatactggtttgagcaattaacatcatttgatgttagtgtagatatagcttcagagttccgttatagaaaaaataaatttaaaaaagattgtctttatgtttttgtttctcagtcgggtgaaactgccgatacttatgcagctttagatctttgtaataaaaataagatgaaaacatgttcagttgtcaatgttattgaaagttcaatcgcaagagactctaagtttgtcttaccaattcattgtggaccagaaattggtgttgcatcaactaaagcttttttgggacaaatgcttgttttatatatactttgcttaaaattagctcaaaaaaggaaagatataagtaaaaaagattatttaaataagataaaaaatttatttaatctcgcaaaattagttaaacattctttagaaactgaaaataagatacaatcaatatgtagtt

SEQ ID NO: 246941 - DNA, 644 bp, Unknown
  Bacterial polypeptide expressing nucleotide sequence isolated from the Sargasso Sea
aatgtgtggaatagtaggaataactagtaatgaagaagtaacttctagaattatcaactcacttaaaaaattagaatatagaggttatgattcagctggaatagcaacgcttaaagatggaaacattaatgaagtgaaatgcgaaggaagggttgaagttctagaaaaaaatatttcaaaaacaaatttacaaggagttattggaataggtcacgtaagatgggctacgcatggaaaacccagtatgataaatgcacatccgcattcttcagaagaagtttctgtagtgcataatggaataatagaaaattcgacaatactaaaaaaactattagaaaaaaaaggacacaaatttaagtcccaaacagataccgaagtgattgctcatttagttaccgattatttaaaaaaaaataatttaaaaaatacaattgttaaagttttaaaaaaattacacggtagttttgcattagggattatatttaaaaaccaaccagatttaattattggggctagaagaggatcgcctctagctgttggatatggaccaaacgaaaattatcttggctccgattcttatgcattgaagtcaatgacaaacaaaatatcctatttaaatgatggagaattttgcattattaaaa

SEQ ID NO: 246942 - DNA, 463 bp, Unknown
  Bacterial polypeptide expressing nucleotide sequence isolated from the Sargasso Sea
cttcttcagtacttttattgaggctaaaggttcaatgtttttgggtcgaggattttcatatcctattgctttggaaggagctttaaaattaaaagaattatcttatgttcatgccgaaggttacccggctggtgagatgaaacatggaccattggctttaatagaaaaaggtatgccagttgttgtgttagcccctagagacaattattacaagaaaacaatatcaaatatgcaggaggtaattgctagaggagctaaggttttattaattacaaataaaagtaaagatgaagttttttcagagaatatttgggaaactatagaagtagaaagtactaacgaggatctattaccttttcttttaacaatacctttgcaaaaattagcttattattcagctttaaaaaaaggttatgatatagataaaccgagaaatttggctaaatcagtaaccgttgaataa

SEQ ID NO: 246943 - DNA, 619 bp, Unknown
  Bacterial polypeptide expressing nucleotide sequence isolated from the Sargasso Sea
aaagcttttgttacccaattagcctgtttaaatctgttgcttttaactttgatgagagtgcacaacaaactaccaacagcaagaaagaaaattaccgcagcactgagggatttgcctaaattaattaataagactttaaaaatgacaggcgaatacaagaaagtggcaaagctactttttaaaagaaacagcgcattatttttgggtcgtggtttatattttcctattgccagagaaggggctcttaagctcaaagaaatatcttacatacatgccgaagcctatccgggcggagaattaaagcatggaccactggcactgatagacaaaaatatgccagtaatagctttagctccagataatgaacacttagataaaattacatcaaacattgaggaagtggcagcccgaaaaggcaaggttattactatagggccactaggcagaacaaaaatagataaaaatggcggccacattaagattcctaagacattggatctgcttaatccgattgtctcagtggtgccaatgcaattaattgcttattacaccgcagtctttaaaggcaccgatgtagataaacctcgtaacttagcaaaaagcgtcacggtggaataat

SEQ ID NO: 246944 - DNA, 903 bp, Unknown
  Bacterial polypeptide expressing nucleotide sequence isolated from the Sargasso Sea
ggcacttgctccagtgacaaataaatttaaatttatggaagacggtcaggtggcatttataactaaagagaaaaaccatgtcataacatcaaatggcaatgccgcaaaattaaaaacacaggaaatagactcaaattcttatacaaacgatttgggtggctataaccatttcatggaaaaagaaattttcgaacagcctgatgctatttctaaatctattgaaggcaggcttggtaaaaatgaaactcaagagggtatttttggttcaggttttgaagaagctgtaaaagatgtcacgaacattcagattattgcttgtggcaccagctttcattcaggcagaatttttgaatattggtctcataaatttttgggcattaattgtcgtgttgattatgggtctgaatatcaatatcaagaaccaattaaaacaaagaaaactttattagttaccatttcacagtctggtgaaactgcagacactctatcatcattaaaattcgctaaaaaaactggttcgcctgttacattaacaatttgtaatgttgcaaatagttcattgtgcagggagtctgactatacattgctaacaaatgcaggtcctgaaattggcgtggcctcaaccaaagcctttgtaacgcaactggcatgtttgaatttactgctactaaccttaatgagagtgcataatcaaacgcctaatgctagaaagaaaattacggctgcactcagagatcttcctaaacacatagataaaactttgaaaatgacagatgtctataaatctactgctaaacttttatttaaaagaagcagcgctctttttcttggcagaggtttatattttccaatagctagagagggcgccctaaaattaaaagagatttcatacattcatgcaga

SEQ ID NO: 246945 - DNA, 736 bp, Unknown
  Bacterial polypeptide expressing nucleotide sequence isolated from the Sargasso Sea
tatgactcagctggtattcgctacactttttaatggctcaatcaatgaaattaaatctgagggaagagtagacaatcttgaaaaaagttctttagcaaaaaatatggaaggcactgtaggtatcggccatgtaagatgggcaactcatggattaccaaatagtataaatgctcaccctcattcatctcaaaatgtttcggttgttcataatggaattattgaaaactcaacattattaaaaaaatttttagtagggaaaggtcataaatttaaatcgcagactgataccgaagtgatagttcatttaataacagagaacttaaaaacagaaaatattgttgagtcaattaaaaaaacattaaattctcttcatggaagttttgcattaggaattatatttaaagatgaaccagacttaattgttggagcaagaagaggctctcctcttgctgttggatatggtcctaatgaaaattatttaggttcagactcatatgcacttaaatcaatgacaaacaagatcacttatttaaatgatggagaattctgcattattaaaaaggatcatgtagaattttttagtgaagatggaacaaaagttaataaaaaagttttagaattatcatcacaagaagagaaatatgacaaaggtgactttcaacatttcatggcaaaagagatagaggaacaaccaattacacttaaaaatggaattaaagaatatatcgatacatca

SEQ ID NO: 246946 - DNA, 945 bp, Unknown
  Bacterial polypeptide expressing nucleotide sequence isolated from the Sargasso Sea
aatgtgtgggatagtggaataataagttcaaaagaagtttcaagtagaataataaactctctaaaaaaacttgaatacaggggatatgactccgctggcatagccactttagtgaatgggaacattaatgaagttaaatgtgagggaagagttgatctgttggagaaagatatcagcaaactcaacctaaaaggtgatattggcattggacatgtcagatgggcaacacatggtaaaccaagtaaaataaatgcacatccacattcgtctgagaaagtttcagttgttcataatggtataattgagaattctacaatattaaaaaagtttttggaaaaaaaaggatatgtatttaaatcacagacagatactgaggtaatagcacatttagttacagattatttaaaaaaaaattctttgaaagatacaataattaaagttttaaaaaaacttcatggaagttttgcgttaggattaatatttagagagcaaaatgatttaatgataggtgctagaagagggtcaccacttgcggttggttatggtccaaatgaaaattatctcggctcggattcatatgctttaaaatctatgacaaataaaatttcttatcttgatgatggggaattttgttttgtaaaaaaagatgaaataaatttttttgatagcaatggtgtaaaaattaataagaagatcctgaatttgtctaaagatgaccttaattatgataaaggcgattataaatattttatggaaaaagaaattgatgagcaaccaacaacaattaatgcatgtgtaaatgaatacgtggataagattaacaatcaaattaacatttataattttccttggaaaataagctcttttaagtctgctatgttaattggatgtggtacagcctttcattcttgtttattagcaaaatattggatggaacagaacact

SEQ ID NO: 246947 - DNA, 889 bp, Unknown
  Bacterial polypeptide expressing nucleotide sequence isolated from the Sargasso Sea
ttcagcagttataagcactatagcaaaactcaaaggagcttatgctcttggcattctagataaaaacaatcctgatactttaattggcgtaagacaacaaagcccgctcgttattggtgaaggttttgaagagcaatttattgcttctgacattatggctctgtctaacattactaataaattcaaatttatggatgatggacaaatagctattcttgataaaggccatgtagctgtgacttcttcttctggggtggcagcaaaattaaaaacccaagaggtggactcaaatgcttacaccaatgatctaaaaggctacaaccattttatggagaaagaaatatttgaacagtcagatgttatcaaagactctcttgaaggcagactcacaaaaaatgaaagccaagaaggaatttttggggttggttttgagaaagaaatgaaaaacatcacaaacatacaggttgttgcttgcggcacaagctttcatgcaggcagaatatttgaattttggtcgcacaagttcttaggaataaattgtcgagttgattatggcagcgagtaccaatatcaagaaccaataaaaaccgataaaactttattagtaacaatatctcagtcaggcgaaacggcagacacactttcatctttaaagtttgcaaaaaaatcaggcgagccagttactttaaccatttgtaatgttgccaatagctctttatgcagagaatcagactatgctttattgactaaagctgggccagaaattggtgtagcctcaaccaaagcttttgttacccagttagcttgtttaaatctgttgcttttaactttgatgagagtgcacaacaaattaccaacagcaagaaagaaaattaccgcagcactgagg

SEQ ID NO: 246948 - DNA, 355 bp, Unknown
  Bacterial polypeptide expressing nucleotide sequence isolated from the Sargasso Sea
atccatgcggaagggtatcctgccgcagaaatgaagcatggtccaattgcgctaattgatgaaaatatgccagtagtatttattgcaccttatgatgatacatttaataaggtcctgtcaaatatagaagaagtgaaagcccgtggtggaatagttatttcaatcactgataaaattaataattcactaaaaaaattatcagattttgtattaatagcacctcagacacataaatatgtatttccaataacgtgttctataattttacaaatgttagcatatgaacttgcagtttgtagaaaatgtgaaattgatcaaccaagaaacttggcaaagtcagtcacagtggagtaag

SEQ ID NO: 246949 - DNA, 853 bp, Unknown
  Bacterial polypeptide expressing nucleotide sequence isolated from the Sargasso Sea
atttatatttttccaattcagcctatgaaaattaataagattatactgatcggttgtggaactgcttatcattcatgtttaattgctaaatattggtttgaagaacttacaacaattgagatagaggtcgatattgcttcagagtttagatatagaaaattaaaatttaataaagataatttatatatttttgtttctcaatctggtgaaactgcagatacagcggcagccctagatatttgcaaaaaaaataaagttaagacatgctcaattgtaaatgctgtagaaagcacaattccaagaaattctgattgggttttacctattcatgccggacccgaaataggtgttgcatcaacaaaagctttcttgggtcaaatgattgtgctttatattttatgtctaaaattagctaaaaatagaaaagatattgatgagaaagtatgccaaaaaaatgttcaaaatttaattaaattgccagaggcaattaaaaaaagttttgaagttgaaaacaatatacaagctatagctaaagaatttcttgatgctaaaggctcaatgtttttaggaagaggcctatcgtatccaattgctttggaaggagctttaaaattgaaagaattatcttatttacacgctgaaggatatccagccggagaaatgaaacacggtcctttagctttaattgaagaaggtctcccagtaattgttatagctccaaaagatagatactttgaaaaaactatttcaaacatgcaagaggttattgctagaggagggaaaattttatttttaacagatcataaaaaagaattgattgatgaaaatattagatttggaattaaagttcctt

SEQ ID NO: 246950 - DNA, 736 bp, Unknown
  Bacterial polypeptide expressing nucleotide sequence isolated from the Sargasso Sea
gattctgcaggtattgccacgatagttgatggagaaattaatgaaaaaaaatgtacaggtagagtagacaatttagaaaaaattttgttaaaaaatccatcaaatggttctttaggaattggccatgttagatgggctacacatggcattcctagtcaggttaatgctcacccacactcatcggatgaagtgtcagtagttcacaatggaataatcgaaaattcgaatgatttaaagaaagatttagaaaaaaaaggttataaatttaaatcacaaacagatactgaggttataacttttcttctaactgattttttaaagaattacgatttagttgacgctattaataaaacattaaaagctcttagcggtagttttgcgttgggaattatttttaaaaaatataataatattgtagtaggtgctagaagaggtagccctctcgctgtcggttatggtcctgaagagaattatttaggatctgactcttacgcattaaaatctatgacaaataaaataacatatttagatgatggtgacgtatgtatattaacaaataataaaatagatttttataactctaaaaacaataaaataaataaagaagttttaacattgtcgaaaaaaaaaattactgctgaaaaaggggactataaagattttatgtcaaaagaaattaatgaacaaaatgttactgtcaaaagttgtgttaaggaatatgttgatcatttaagaa

SEQ ID NO: 246951 - DNA, 682 bp, Unknown
  Bacterial polypeptide expressing nucleotide sequence isolated from the Sargasso Sea
tatgtgtggaataattggaattaacagcaataaacctgtatcagcaactataattaattctctaaaaaaattagagtatagaggttatgattcagctggtatggcgactctttgtaatggattgataaatgaaataaaatctgagggaagagtagaaaatttagaaaaaaattccttagtacaaagcatggagggaactattggtattggtcatgttagatgggcaacacacggacttcctaatagtgtcaatgctcatccacattcttctcagaatgtttctattgttcataatggaattattgaaaactcaacaatcttaaaaaaatttttaattggaaaaggtcacaaatttaaatctcaaactgatacagaggtaatagtccatttaattaccgaaaatcttaaaacagaaaacattgttaattcaattcaaaaaactttgaagtcattacatggaagttttgcgttgggaattatttttaaagatcagccagatttgattgttggtgctagacgaggctcacctttagcagttggttatggtccaaatgaaaattatctgggttcagactcctatgctcttaaatcgatgacaaataaaattacttatttaaatgatggtgaattctgcattattaaaagagatcatgtagaattttttagtgaagaaggaaataaa

SEQ ID NO: 246952 - DNA, 856 bp, Unknown
  Bacterial polypeptide expressing nucleotide sequence isolated from the Sargasso Sea
tgatggtacagtgcatctagggggcatagttgatcagttaagcagaattcaagatgcacataggatttacattacagcttgcggaacatcctggcatgcgggattaatgggcaaatatttaattgaagaatatgcagggattcctgtccatgttgaatatgcctctgaatttcgttatagaaaaccaattatcaattccaagacagttgtgataggaatatcacaatctggggagacagctgatacgcttgcagcaatcagaaaagctaagagttttggtgctttaaccgttggtatttgtaatgttgtcggatcttcggttgccagagaaactgattgcggaatctatacccatgccggacctgaaattggtgttgcttcgacaaaagcctttacttctcaggtagcggtactttttttactctctctatgctttggtagaaaaaataagctttcggctttaacgggtcaaaaatttgctcaagctttaatgaatattggcaatcaggttaaaattattctagatgattcaggatcaatccttgaagttgcaaaatctaccgtgcataatgagaattttctctatttagggcgtggattgaatttccccgtggcgcttgaaggagcgctaaaactaaaagaaatttcatacattcatgctgaagggtacccagctgctgaaatgaagcatggccccatagcgctaatagatgaaaaaatgcccgttgtttgcttagccccccatgatgatacctttgataaggttttatcaaatattcaagaagttaaagctagaaaaggtgttataatcaccgtaaccgataaaagaactaaagagcttgaaaaagtttctgac

SEQ ID NO: 246953 - DNA, 776 bp, Unknown
  Bacterial polypeptide expressing nucleotide sequence isolated from the Sargasso Sea
aatgtgtggaatcattggcgcagcctccactagaaatattggaaaaatcttagtaaatggactaaagaaaatggagtaccgagggtacgactctgcgggacttgctttaaacaaagaaaacaaaactatccaactaaaaacaattgggaaagtatccaaactagaagagctgatggaccaaaaaaaacacagagccaaaacaggcatagcccacacaaggtgggccacacacggagagccttctcaagcaaacgcccaccctcattcgtcaaatggaagcatttatattgttcacaatggaataattgaaaaccactttgagctaagagaaagattattaaatgatggctataagattgaatcagaaacagattcagagcttatcgcgcacttgattcatttcaataaagaaaaaggcaaaaatacactagaagccttaattgagacatcaaaagaacttaacggagcatattcaatcgcagttattgacgcagagcaaaaaggaaaaatatttgcagccaaacaaaaaagccctctcttggttggaaaaggcatagaggagaattttgtagcttccgacccactagcaattgcaggacttgccgaatcattctacctactagaagacggtgattttgcagaaattacacaagaagacattaaaattgttgggattgataacgagtttgtcacaagagaagagaccttaatagatgcaagtattaaagaggcatctaaagacggccacaaacatttcatggaaaaagagatttatg

SEQ ID NO: 246954 - DNA, 866 bp, Unknown
  Bacterial polypeptide expressing nucleotide sequence isolated from the Sargasso Sea
tgggattaaccatgttaagaatgctggtaatgtttctgaattatcaaaacttgttgatgattctgtattaaatggttctataggtatcggtcatactcgttgggccactcatggtgagcctaataatataaatgcccatccgcattttgatagaactggaaagattgcattaattcataatggtataattgaaaattataattcaattaaagaagttttatcaaaaaaagatttcgagtttaatagtgaaactgatacggaagtcctcgtccaattaatctcagaaatctattactcagatggtttaaactttgaacaagctgtacaatcagcactaaatcaagtaatcggtgcttatggaattgttgcattttgcttagatgaaccaaataaattagttgcagcaagacatgggagtccattagtaattggtattggagatgaagaatattttgtagctagtgatgcttcgcccatcgttgagtatactagaaacgttatttatttggacgaaggtgaaatagtaactattacaaaatcagggtatgaaattcggtctattgttgatgataatattattaataaaattgcaactgaaatagaattatcaatagatgaaattgaaaaaggtgaatttcctcatcatatgcttaaggaaatttatgatcagattcatactataactgatactatgagaggtagaattgatccattagatggttcagctcatttgggtgggataactgaacaaattgatcgaattaaaaacgctcataggatatatattacggcatgcggtacttcatggcatgcaggactaatggggaaatatctgattgaagaatatgcccgcattccagtgcatg

SEQ ID NO: 246955 - DNA, 889 bp, Unknown
  Bacterial polypeptide expressing nucleotide sequence isolated from the Sargasso Sea
ccttattttcaaagaacgaataaaaaccattaaaagtgtcgggaaaattttagatctaaaaaataaagctcaaaaagtatcagataaaaatttttatggggtgataggtcatacaagatgggcaacacatggagttgtaagtaaaaataatgcccatccatttgcgaatgacgaccttactttagtttgtaatggcataattgaaaactatagaaaaattcaaaatcgatttgtagaaattcctaaaaatattcagtcagatactgaaatcagtttttattttctaacctatttagtcaataaatataaaaattcagatgaagctataagagtatttaaaagtgtaattaaaggaaactatgcttttgtaatatttataaaaaaaaataattgtttttatttattaaaaaatggcagcccaattgccctttctcataataaaaactcttcttacatatgctcagactcttcaattttatctgattatagtgataagatttatcatcttaaagacggtgatattattaaaattcaacaaactaaaatatctagtctaaataaatccaaaataatctttgaaaaaaatgaaattaaacaaaacccatatgataagggaaaatatcaacattatatgttgaaagagattcatgagcagcctgaagttataaaaactactcaaaaaaactatatacaagaattttttaatgattttgaaggcaaatttagaaatttaattttaaacaaaaaaataatatttgttggatgtggtactgcataccatgcctgtttagttggggagtattattttaataaatatacaaacatagatacttcatcagaattagcttctgagcttagatataaaaaaattaataaagacgaaaaaata

SEQ ID NO: 246956 - DNA, 388 bp, Unknown
  Bacterial polypeptide expressing nucleotide sequence isolated from the Sargasso Sea
catgtgtggaattataggaatatctagcaacaaatctgtatctgcaaatattataaattctttaaaaaaacttgaatacagaggttatgactctgctggggttgcaactctttttgatggcgtaattaatgaggttaaatctgaaggtagagttgataatttagaacaaaactttgatctaaaagctttaaaaggaaatattgggataggtcatgttagatgggctacccatggagctccaaatagtattaacgcccacccgcattcatcagacaatgtctctgttgtacataatggaattatagagaactcaacaattctaaaaaaacatttaattaataaaggtcatacctttaaatctcaaactgatacagaggtaatagttcat

SEQ ID NO: 246957 - DNA, 469 bp, Unknown
  Bacterial polypeptide expressing nucleotide sequence isolated from the Sargasso Sea
attcaagtgatcgcaagagattttttagatgccaaaggttcaatgtcttttggtagaggcatgtcatttccaattgctttagagggagctttaaaacttaaagaactatcctatttacacgcagagggttatccagcaggagagatgaaacacggacctctcgcattaattgaagatggactccctgtcattatattggcacctaatgataagtattttaaaaaaaccatttctaacatgcaagaagtaatagcaagagggggaaaaatattattaattactgatgaaaaaaatgatgtcatcaacgaaaatatcagattcaacataaaagtacccgctgtagaaaactctttatctccattttttctaactgttcccttacagttattagcataccacgttgcattactaaaaaagtgcgatatagacaaacctagaaacttagctaaatcagttactgtcgagtaaa

SEQ ID NO: 246958 - DNA, 925 bp, Unknown
  Bacterial polypeptide expressing nucleotide sequence isolated from the Sargasso Sea
acaatctctaaaaaaaaccttaatgaaaaaaaatgttcaggaagagtagaagagcttgaaaaaatattgtttaattcaccagcccaaggcaatataggaataggtcatgttagatgggctacccatggtgtaccaaatgaaataaatgcccatcctcattcttctgaaattgtttctgttgttcataacggaataatcgaaaactcaaatttgcttaaaaaaaatttagaaaaagaaggatacgaattcaaatctcaaactgatacagaggtcgttacattattaattaccaaacacttaaaagattataatcctatagatgctgttttgaaatctttagaatatcttgaaggaagttttgcactagggatattgtttaaagataaagcagacataattattggagctagacgaggaagccctctagctgttgggtattcaaccaatgaaaactatttgggatcagattcatattcgcttaaagccatgacaaataaaatttcttatttagatgatggagaaatatgtattttaacaaaagatagtgttgaattctttgacgcttcaaaaaataagattaataaaaaaattttaattttgtcggaagataaaaacgaagcaaagcttggcgactataaaaattttatgtctaaagaaatatttgaacaaccaaatacagtgaaaaattgcttaaatgaatatattgataaaataagaaacgatataaatctttttgattttccaattaatccaaataaaattgataaaatttttctaattggatgtggtaccgcttaccattcatgccaagtcgcaaaatactggatagaagaattaacagatttgaatgtagaaactgaagttgcttcagaattcagatatagaaagataaaatttaacaaaaatactttatatatatttgttt

SEQ ID NO: 246959 - DNA, 896 bp, Unknown
  Bacterial polypeptide expressing nucleotide sequence isolated from the Sargasso Sea
ggcgacacatggtgagccaaatgatacaaatgcacatcctcataaagatcaaaccggcaagatttttctcatccataatggaattattgaaaattattcgacgcttaaggaagtgttgattagaaaagggttttcatttaaaagcgaaacggataccgaagcgctggttaatctaatatctgatatatattatgccgatggtttgaattttgaacaagctgttcaagcagctctaaagcaggtcgtaggaacatatggcattgtggcattttgtagcgatgagcctgataagcttattgctgcaagacatggaagtcctcttgttttaggagttggtaatgatgaatattttattgctagcgacgcttcgcctattgttgagcataccagaaatgtaatttttctcgatgaaggagaaatcgcaacggttcagcaaagtggtcatacaataagatctatgaaagatgacgcaatagtcaatcgagaaacaactgaaatagaatttagtattgaagaaatagagaaaggtgaattccctcattttatgttgaaggaaattcacgatcagattttctcaattcaagataccatgcggggaagaattaacccagttgatggtacagcgcatctaggaggaattagtgatcagttaagcaggattcaaggcgctcatagaatttatattactgcttgcggaacatcctggcatgcaggattaatgggcaagtatttaattgaagaatatgcagggattcctgttcatgttgaatatgcttctgaatttcgctatagaaaaccaataattaactccaagacagttgtgataggaatatcgcaatctggggaaacagccgacacgcttgctgcaatcagaaaagctaagagctttggtgctt

SEQ ID NO: 246960 - DNA, 775 bp, Unknown
  Bacterial polypeptide expressing nucleotide sequence isolated from the Sargasso Sea
gaaaatggcctggccatctttatctctcagtcgggagagacggctgatacgcttgccgcattgcggtacgcgcgagatcagggaaaccataccctagcgatcgtcaacgtcgctgaaagtacgatggcccgcgaagcggacgctcttttgcaaacgcatgcgggccccgagattggtgtcgcatccaccaaatccttcacctgccagctcgttaccttggcctgtctggtcattgcaatggcccgtgcgcgcggcactattgaccatgaaatggaagcccatctttcggctgccatcgctgaggtgccggcaagggcagccgaggtattgaaccacgacgaggtattgcgggaactcgcacatgaactcgccgaggcgagggatatcctatacatcggcagggcggctgctttccctattgctctggagggcgcgctcaaactcaaggagatttcttacattcatgccgagggattcgcagcaggcgaactcaagcacggccccattgccctgattgatgaagatgtaccggtcattgttatcgcgccatcggatgatgtcttcgataagaccgcgtccaatatggaagaggttatagcgagaggtgcgcgggtcattttcctgagcgatgttgagggaatttcgcgcctcggtgacatggcggcggcgagtattcagcttccatcagttgatcctgtagtagctcctattctctatgctattcccgtccaactgctggcctaccatgtggccgtaatcaaggggacggacgtgg

SEQ ID NO: 246961 - DNA, 343 bp, Unknown
  Bacterial polypeptide expressing nucleotide sequence isolated from the Sargasso Sea
gaagcgtatccggcaggtgaattaaagcacggacctttagcgctagtagatgatagtatgccggttgtagcagttgcccctaatgatgacctattagaaaaacttcactcaaacctagaggaagtaaaggctagaggaggaaagctctatgtatttgggcacactgatgcctaccatcaaggctttgcagaaaagtttattgagcttccagaaattccagaattaatagctcctttaatttacaccattcctcttcagatgctttcctaccatgtagcaatccttaagggtacggatattgatcagcctagaaatctagctaagtcagtcacggtggaataga

SEQ ID NO: 246962 - DNA, 740 bp, Unknown
  Bacterial polypeptide expressing nucleotide sequence isolated from the Sargasso Sea
taaggaagaaaaatatttagggatagtttcaatatgcaatgtacctaccagcacaatggcaagagaatcagactggaaagttttcacaaatgcgggcccagaaataggagtagcttcaacaaaagcatttacaacccagctcgcagctttattaatattagctctctcaattgcaaaaagtcaggataaaaatccagaaaaacgaaaagaagcagctcaagacttaagagaaaccccagccctcatttcagaagcctttaaattaaaagaagaaataaacacaattaccaacaatatctcatcaaacgataatgcgctattcttaggaaggggtatgtatttttctattgctcaagaaggtgcattgaagttaaaagaaatatcttacattcatgcagaggcatatccagcaggagagctaaagcatgggccgctagcattggttgatgaaactattccggttatagctcttgcgcctgaagacagcctagttgaaaagcttttatcaaacctggaggaagtaaaagcgagaggtggaaccttgtatgtctttggaaatgcatcatcaacaatcgaaataaataaaggtaaatttatcaatatgcctgagtgcggcgattacaatgcacctattgtctatactattccactacaaatacttgcttatgaggtggcctgcctcaggggtacagaccttgatcaaccaaggaatttggcaaagtcagtcaccgtcgaataga

SEQ ID NO: 246963 - DNA, 748 bp, Unknown
  Bacterial polypeptide expressing nucleotide sequence isolated from the Sargasso Sea
ccgtgaagccaaaagtaagttttttaagatcctttcttttgtcaatgtaaaaggcagtagcattgccagagagtcagactctattgtatacacccactcaggcccagaaattggggttgctagtacaaaaaactatattgcccaattattaaacatttacttatttagcctatacctcgcacaaattaaatggacactgactgaagatgaacttgctgaaaaaataaatgaactgaagcatttacctgaaaaaatagaacaaatacttaacttaaatgatcatattaaagccattgctgaaaaatatgttgattctaagaactacctctttattggtcgtcaacttaactatccaacagccttagagggcgcattaaaactaaaagagatttcctatatccacgccacagggtatgcagcaggagaactcaaacatggccctatcgcattaatcgacaaaaatgtccccgtcgtctgtatttgtcctcaaacaagtacttacgacaaaatgatttctaatattcaagaagttaaggcaagagaaggcaatattattgctattggaacaaatggagatgatgtcgaatccattgcagatgattatattccggtccctgaatgttctgaagatattagtccactattaacggttattccgttacaacttttgtcataccatactgccattttattaggctgcaacgttgatcaacctagaaacttggcaaaaagcgtcacggttgaataa

SEQ ID NO: 246964 - DNA, 733 bp, Unknown
  Bacterial polypeptide expressing nucleotide sequence isolated from the Sargasso Sea
tatgaaaacatgtgctgttgtaaatgtcattgagagttcgattgctagagactctaaatttgttttaccaatacattgtgggaccgagataggggttgcctctaccaaagcctttttgggtcaaatccttatattatacattttagctctaaaactaggattattaagaaatgatttaaaaaaagagttattcaatgaaaaacttaaagatcttaaatctcttcctaaattagcagaaaagactttattaactgataataagatacagacaatatctaatacctttaatgaggttaaaggttcaatgtttttaggaagaggcttttcttttccaatagcattagagggtgcattaaaattaaaagaactatcatatatccatgctgaaggctatccagctggggaaatgaaacatggaccactagcacttattgaggaagggatgcctgttgttgtgttagcaccaagagacaattattataaaaaaactatttctaatatgcaggaagttattgcaagaggagcaaaagttttattaataacaaataaaagtagtgacgaggtagtttcagaaaatatttgggaaaaaatagaagttgaaagtgctaatgatgaccttttaccctttcttttaacaatacctttacaaaaattagcgtattattcagctctcaaaaaaggatttgacatagataagcctagaaatttagctaaatcagtaaccgttgaataa

SEQ ID NO: 246965 - DNA, 472 bp, Unknown
  Bacterial polypeptide expressing nucleotide sequence isolated from the Sargasso Sea
atgtgcggaatagttggaattaccagtaacaaacaagtaacaaattcaatcattaattctttaagaaaactagaatacagaggttatgactcagctggaatcgctacattaaataatggtcatattaatgaagtaaaatctgagggaagagtagatgttttagaaaaaaatttatcaaaaagtaacttaaaaggaaatgttggaattggtcatgtcagatgggcaacccatggagttccaagcacaataaatgctcatcctcactcttctgaaaaagtttctgtagttcataatggaataattgaaaattcaactattttaaaaaaatatttgattaaaaaaggtcaccaatttaaatcacaaactgataccgaagtaatagttcatttgattacagaatatttgaaaaaaaatgatttaaaaaattcaatactaaaaatgttaaaaaaacttcatggaagtttgcactagg

SEQ ID NO: 246966 - DNA, 1600 bp, Unknown
  Bacterial polypeptide expressing nucleotide sequence isolated from the Sargasso Sea
ttcattaaaaaaattagagtatagaggatacgattctgcaggaattgcaactatagttgataatgaaatacatgaaaaaaaatgtgctggtagagttgataatttagaaaaattattatttaaaaacccatcaaagggttctttaggtataggccatgttagatgggctacacacggaataccaagtcaattaaatgcacacccacactcttctgatgaggtttcagtagtacataacggaataattgaaaactctactttactaaaaaaaaatttggaagaaaaaggctataaatttaaatcacaaacggatacggaagttattacatttcttcttactgattttttaaaaagttacgacttagtagatgctattaataaaactttgaaagcacttaatggcagttttgctttaggtattttatttaaaaaatatagtaatatcgttgttggagctagaagaggaagtcctttggccgtaggctatggtccagaagagaattatttaggctctgattcctacgctttaaaatcaatgactaataaaatcacatatttggacgatggagatgtgtgcatattaacaaataataaaatagaattttataattctgaaaataaaaaaataaataaaaaaatcttaacactttcagaggataaacaatttacagataagggtgactacaaagattttatgtcgaaagagattaatgagcaaaatattactgccaaaacgtgtgtaaaagaatatgtagatcaattaagaaaagatataaacttatataattttcctataaatcccaaagatattgaaaaaatagttttaattggatgcggaactgcctatcactcttgtattaccgcaaagtattggtttgaggaactcacaaatatcccaattgaaattgatattgcatcagaatttaggtacagaaagattaattttaataataaaaatctctatgtttttgtttctcaatcaggtgaaaccgcagatacatatgcagctctagatctgtgcaaaaaaaataatgtaaaaacttgctctattgtaaatgttgttgaaagttctatcgcaagatcttcggattttgttttgcctatacacgctggtcctgaaataggtgttgcgtcaactaaggcctttataggtcaaatgttagtgctttttattttagcaattaaaatttcagaaatcagaaaagaaataaataaaacagactatgagaataaaattgatgatcttcaaaagcttccagatttaattaaagatacaataaattattgtcaggacaacacgccaataattgctaaagattttattaaagcaaaaggatcaatgtttttaggtcgaggtttatcttttccaatagcattagaaggagctctaaaattaaaagagttatcttatcttcatgcagagggataccctgctggcgaaatgaaacatggaccactagccttaatcgaagaaggtttacctgttgttattttagctccaaaggacaggtattttgaaaaaactatttctaacatgcaagaagtaatagcacgtggtggcaaagtaattttaataacagatgaagataataaaattata

SEQ ID NO: 246967 - DNA, 1393 bp, Unknown
  Bacterial polypeptide expressing nucleotide sequence isolated from the Sargasso Sea
ggttatgactccgcaggtttagcaactttaagcgacaatctaattgatgaaaaaaaatgttctggaagagtagaggaactcgaaaaaatattatttaaaaatccatccaaaggcaacgtaggtattggtcatgtaagatgggccacacatggcgtgcctaatattattaatgcacatcctcattcctcagaggaagtctctgtagtacataatggtatcattgaaaattcagacgaattaaaaaaagatttagaatctcaaggttttaagtttaaatcacaaactgacacagaggtaattactttattagtaacccagttattaaaaaaatttgaacctttagaggcagtatttcaaactcttaaaaaattgaaaggtagttttgctttaggaattatattcaaaaatttttcagacataattgttggcgctagaagaggcagcccattagctgtaggttactctaatgaagaaaattatttaggttcagactcttatgcattgaaatcaatgacaaataaaatttcttatttagatgatggagaattgtgcatgcttacaaaaaataatgtcgttttttatgatgttaatttaaaaaaaataaataaaaaaattcatatagtatcagatgatgaaaacatttctgacaaaggcgattataaaaactttatgtctaaagaaatatttgaacaagctagtacaatcaagaaatgtttaaatgaatatactgacagtcttaaaaaagatattaatatttataattttcctattgatccaaaaaaaattaataaaatagttttaattggatgcggcacagcctatcactcatgtttagtagcaaaatattggctcgaagagcttacaaccattgatgctgaaatagatatagcctcagaattcagatataggaaattaaaatttaacactaacaacttatatatatttgtttcacaatctggtgaaactgctgatactgcagctgcattagatatatgtaaaaaaaataaagttaaaacttgctctattgttaacgtggtagaaagtacaattgcaagaaatgctgattgggttttacctattcacgctggtccagagattggagtagcttcaacaaaagcttttttaggacagttaatcgttttatatatcttatctctaaaactttctataattagaaatgatatagataaagataagtataatgaaaatttaagaaatttacataaacttccagagtcaattaaaaatacatttaaattagaaaatgaaattcaattgatggctaaagaatttttagacgcaaaaggctcaatgtttttaggaagaagggattcattccctattgctcttgaaggggcactgaaattaaagagctctcctatctgcatgccga

SEQ ID NO: 246968 - DNA, 682 bp, Unknown
  Bacterial polypeptide expressing nucleotide sequence isolated from the Sargasso Sea
ttcaaaatttgttttaccgattcactgcggccctgaaattggagtcgcttctactaaagctttcttaggacaaatgttagtactttatattttatgcttaaaattagcatttgaaagaaaggaaatagataaaaaaatatttagttcaaagattaaatctttattagaattatctaagaatgttaaaaaaactcttctaatagatgatcaaattcaacgagtatgtaaaagttttgttgatgtaaaagggtcaatgtttttaggaagaggtttttcttatccaatagcactagagggagcgctaaaacttaaagaactagcatatttacatgctgaaggatatccagctggtgaaatgaaacacggacctttggccttgattgaagatggaatgccagtagtagttttagcgccaagagatgaatattttaaaaaaacaatttctaatatgcaagaggttattgcaagaggagcaaaagtgctattgataacaaataaaaataaagacgaaatagttcacgaaaatatttggcaatcgattaaagtagaaaataccaatgatgatctattgccttttttaatcactatacctttgcagaaattagcatatcattctgctctaaataaaggttacgatatagataaaccaagaaatttagctaaatcagttactgttgaataa

SEQ ID NO: 246969 - DNA, 1787 bp, Unknown
  Bacterial polypeptide expressing nucleotide sequence isolated from the Sargasso Sea
ctgtctctgcaatataattaattcattaaaaaaattagagtacagaggattcgactcagcaggaatagccacactttcagacggtgaaatcaatgaagtaaaatcagagggaagagttgataacttagaaaataattttgatttaaaaaacttaagaggaaatattggcataggtcatgtaagatgggcaactcatggaattccaaatagtttaaatgctcatcctcattcttctcataacgtatctgtagttcataatggaattattgaaaactctacaatattaaaaaaacatttaattaacaaaggtcataatttcaaatcacagacagatacagaggtaattgttcatttaataacagaacatttaaagagttcagaattagaagaagccatcacaaaaactttaaaacaactccatggaagttttgctcttggaattgtttttaaagatatgccagacttaatagttggtgctagaagagggtcacccttagctgttggttatggtccaaatgaaaactatctaggttcagattcttatgctttaaaatctatgacaaataaaattacttatcttgatgatggtgaattttgcattgttaaaaaagatcaagttctttttttcaacgaagaaggaaaaaaagttaataaaaaaatactagaactatcgtcagatcaagcaaattacgataaaggtgactttaaacatttcatggcaaaagaaattgaagagcaaccaataactattaaaactggaattaaagaatatgtagataatgtaaataaagacataaatatttttaattttccttggaaaatagaagagattaattcaatcacgttaataggatgtggtacagcgtatcactcttgcttaatggcaaaatattggtttgaagaacttacaaatttagatgttaacatagatatagcttcagaatttaggtatagaaaaaatagatttaaaaaagacactttatatgtctttgtttcacaatctggggaaacagcagatacttatgcagctttagatatatgtaacaaaaacagcatgaaaacatgtgctgttgttaatgtaatagaaagctcaatagcaagagattcaaattttgttttaccaattcattgtggtcctgaaattggagttgcatcgactaaagcatttctaggtcaaatacttgttttatatattttagctttaaaacttggatcaatgagaaatgaaattgaaaaaaaagaatatcaagaaaagattaaagatttaaaagctttgcctggcttaatagagaaaacattgcttcatgataatgatatccaggcaataagctcaacatttaatgaagctaaaggttcaatgtttttaggaagagggtattcatatccaatagctttagaaggtgcattaaaacttaaagaactttcatatgttcatgctgaaggatatccagcgggggaaatgaaacatggacctttggccttaatagaagagggcatgccagtagttgttttggccccgagagataattattacaaaaaaacaatttctaatatgcaggaagttattgctagaggagcaaaggtattattgataaccaacaaaagcaaagatgaagttgtgtcagaaaatatttgggaaactattgaagttgagaatacaaatgatgacttacttccattccttttgactattccacttcaaaaacttgcttattactctgctcttaaaaaaggttatgacattgataagcctagaaatttggctaaatctgtcactgttgaataaa

SEQ ID NO: 246970 - DNA, 487 bp, Unknown
  Bacterial polypeptide expressing nucleotide sequence isolated from the Sargasso Sea
attattagacaatcatattcaggctatctcttcaacatttaatgaagcaaagggttcgatgtttttgggtagaggtttttcttatccgatagcccttgaaggcgcattaaaacttaaagaattatcatacattcatgctgaaggatacccagcaggtgaaatgaaacatggtccattagcattaatagaagagggtatgccagttgttgttttagctccaagggataattattataaaaaaacaatttctaacatgcaggaagttatagcaagaggagcaaaagttttactgataacaaataagaacaaagatgaagttgtttcagaaaatatttgggaaactattgaagttgaagatacaaataatgatttgtttccttttcttttaactattcctcttcaaaaacttgcttactattcagctttaaaaaaaggttatgatatagataaaccaaggaatcttgctaaatcagttacagtcgagtag

SEQ ID NO: 246971 - DNA, 1096 bp, Unknown
  Bacterial polypeptide expressing nucleotide sequence isolated from the Sargasso Sea
atgtgtggaatagttggaattacaagcaataaagaagtaacaacaagaatagttaattctttaaaaaaattagaatatagaggatatgattcagctggtatagcaactcttaatgatggttttattaaagaagtaaaatgcgaaggaagggttgaagttctagaaaaaaatatatcaagttcaaatttgcatggtgaaattggtataggtcatgtaagatgggcaacacacggaaaaccaagtaccataaatgcacatccacattcgtctgaaacagtttcggtagttcacaacggtattatagaaaattcaacaattttaaaaaaaattttagaaaaaaaaggttataaatttaaatctcaaactgatacagaggttatcgcacatttagtaacagattatctaaaaaaaaataatttaaaaaatacaattataaaagttttaaaaaaattgcatggtagtttcgcgcttggtattatatttaaagattatccagatttaattgttggtgctcgaagaggatcaccattagccgttggttatggtccaaatgaaaattatttaggatcagattcttatgcattaaaatctatgacgaataaagtttcttatcttaatgatggtgagttttgtttaattaaagaaagtatagttgaattttttgacaacaatggaaacaaagtaaacaaaaaaatattaaatttatctcaagataaccagaattatgataagggtgactataaacactttatggctaaagaaatagatgagcaaccaacaacaataaaaaattgtgttaatgaatatgtagataaaataaataaacaaataaatatttacaattttccttggaaaactgatcaaataaaatcaattgttttaataggatgtggaacagcttatcattcttgtttagtggcaaaatattggtttgaggaatacacgtcattagatgtttctgtagatatagcttcagaatttagatatcgaaaacttaaatttaaaagtgattgtttatatgtttttgtatctcaatctggagaaactgcagatacttatgcagctttagacatatgtaaaaaaaataaaatgaaga

SEQ ID NO: 246972 - DNA, 1174 bp, Unknown
  Bacterial polypeptide expressing nucleotide sequence isolated from the Sargasso Sea
agacgatataaaattttacaattccaataaaaataaaattaacaaggaaatttttacattatccgaagataaatcctccgtaagcaagggtaattacaaaaattttatgataaaagaaatttttgaacaacccgtcacaacaaaaacttgtctaaaagaatatattgataaaattcgtgaagaaattaatttttataacctgcctattgaacctaaacaaataaacaaaatagttcttattggatgtggaacagcctaccattcgtgtttggtagctaaatattggctagaagaattcacaactctcaatatagagaccgatatagcatcagaattcagatatagaaaaaatagattcgacaaaaataacttatatatatttgtatcccaatcaggagaaacagcagacacttatgcggctttagatctttgtaaaaaagaaaaagttaaaacatgttcaattgtaaacgttgttgaaagttcaatagctagacactccgactgcgttttaccaattcatgcaggaccagaaattggcgttgcatctaccaaagcatttttaggtcaaatgcttgtattgtatttattttctcttaaaattgcagaggtaagagcagatatagataaaaaagattacaaaaagaaaataaccgaattaaaaaaaataccagaactaataacagattctttaaaagaagaagaaaaaatacaattaattgcaaaagacatattcaaatccaagggttcgatgtttctgggtagagggttttcgtatccaattgctttagaaggagctttaaaattaaaagaactttcatacttacacgccgaaggttacccggccggagaaatgaagcacggaccattggccttgatagaggatggattgccggttgttgttattgctccaaaagataaatattttgaaaaaactttatctaatatgcaagaagtaatagcaagaggaggtaaagttttattgatcactaattcaggcggcaaagtaataagcgaaaatataagatttcaaattgatttgccagattctgatttaacactcacaccttttttatttactattccgcttcaacttctttcttatcatgtagcattgttcaaaaaatgcgatattgataaacctagaaatttagccaaatcagttactgtggaataa

SEQ ID NO: 246973 - DNA, 1207 bp, Unknown
  Bacterial polypeptide expressing nucleotide sequence isolated from the Sargasso Sea
gacaatgaaatcatcgtagcgcgctcaggtagccctcttgtaataggtttaggccttggcgaaaactttattgcgtctgatcagttagcactattaccagttacacgtagcttcatctttttagaagaaggcgacgtagcccgaattacacgtgatactgttgaaatttttgatgaaaatggcgacgctgtagagcgcgaagttattgaatcaaatatcacgcaagacgcttcaggcaagggcgactaccgccactacatgctaaaagaaatttacgagcaaccacttgcggtacgcaatacccttgaagggcgtttaaacgacgaccgcgtagcaattgacgcctttggcgacagcgctcagcaaatatttaaagatgtaaaacacgtacaaattattgcctgtggtacgtcataccattcaggtatggttgctcgttactggcttgagcaatttgcaggcgttagctgtaatgttgagattgcctctgagttccgttaccgccaatcgtatgtacacgaaaacagcctacttgtgactatttcacaatcgggtgaaacagccgatacgctagcggcattacgcttagctaaagagcaaggttacatggcatcaatgaccatttgtaacgtaccgggttcatcgcttgtgcgcgaatctgaccttgcctttatgactaaagccggcgctgaaattggtgtagcttctactaaagcatttacaacacaattagttggtttgttaatgcttactgcgtctatagctcaagaaaaacagcttgatcaaagtgctattgtaaatgctataaaagtacttcctgctaagcttgaagaaacattactactagcagatggcattgcagaccttgcagaagaatttgccgacaaacatcactcactgtttttaggtcgtggctcgcaatacccaattgcaatggaaggtgcgcttaaacttaaagaaatttcgtacattcacgcagaagcctacgcagcgggcgagctaaaacatggcccacttgcacttattgatgccgacatgccaattattgttgtagcaccaaacaatgagctattagaaaagcttaaatcaaacgtagaagaagtacgtgcacgtggcggcattatttacgtattcgcagataaagattcacactttgagtcaaacgacacaatgcgtgtaatcaacgtaaaccacactgacgacatta

SEQ ID NO: 246974 - DNA, 946 bp, Unknown
  Bacterial polypeptide expressing nucleotide sequence isolated from the Sargasso Sea
cgcattcaattcgtagcatgcgggaccagtttacatgctgctaaagtagcaagatcttggttcgaaagaatttgtgagacaccttgttatgtcgattttgctagtgagtatcgttatcgtaatccgttggtagaaaataacaccttatttgtctgtatttcacaatctggagaaactgctgatactttagccgctcttgaatatgcaaaacaaaaagaatatttgggtacggtaactatttgcaatgttcccaccagcacaatggccagagagtcggattggaaaatttttacgaatgccggaccagaaattggagtagcatcaaccaaagcttttactacccaacttgctgccttgcttatgcttgctgttgctattgccaagagtcaaaacaaaaatactgaactacgccaacaagccgtccaagatttacgtaatactcctgcgctcatccaagaggctttcgagctactggaagatataaattacattacaaaaaatatttcagaaaaagaaaattctctgtttttaggtcgaggcatgtactttcccattgcgcaagaaggggccctaaaactcaaagaaatttcttatatccatgctgaggcatatccagcaggggagttaaaacacggtccattagccctagttgatgaagatatccccgttgtagctgttgctccagaggatagcttggttgagaaactgctttctaatcttgaggaagttaaagcccgcgggggcacactttatgtcttcggcaataatcgttccaccatcgaaattaaaaaaggcaagtttattaacatgcctgagtgcggagactttaatgctccgattatttataccatcccattacaaattcttgcctatgaagtagcttgcttgcgaggcactgatcttgaccaaccacgtaatcttgctaagtcagtcacggtggagtaag

SEQ ID NO: 246975 - DNA, 1223 bp, Unknown
  Bacterial polypeptide expressing nucleotide sequence isolated from the Sargasso Sea
caaaatttcgtatttagatgatggagatttttgtattattaaaaaagatcaggtagatttttttgattcaaaaggaaaaaaaataaataaaaaagttttaaaattatcttcaaatgagcaaaattatgaaaaaggtgattataaacattttatggctaaagaaatagaagaacagccgacaactataaaaaattgtgttaatgagtatattgacaaaattaacaatgaaataaatattttaaatttcccatggaaaaaaaatgaaatttcatcaattaaattaattgcatgtggtacagcttaccattcgtgcttgattgctaagtattggtttgaacaattaacattattagatgtagaagtggatatagcatccgaatttaggtatagaagaaatagatttaagaaagattgtttatatatttttgtttcacaatcaggtgaaactgctgatacttatgcagcccttgatttttgtaataaaaataaaatgaaaacatgcagcattgttaatgttgttgaaagctcaattgctagggattctaaacttgttcttccaatacattgtggcctagaaataggtgtggcgtctactaaagcctttttaggacaaatgttagtactttatattctatgtttaaaaattggatatcttagaaaagatttagataaaaaaaaatataatttgaaaataaaaagtctattttctttatcaaaactagttagcaattctctatcaacagaaaatcagattcaatcaatttgtaattcttttacaaaagcaaaaggggctatgtttttgggaagaggttattcatttcctatagcactagaaggagctttaaaattaaaagagttagcctacattcacgcagaaggatatccagctggagaaatgaagcatggaccactagctttaattgaagatggaatgcctgtcgttgtgatagccccaagagatgaatattacaaaaaaactatatcaaatatgcaagaagtaatagcaaggggagccaaagttcttttaataacaaataaaagtgatgaagaaacttattctgaaaatatttgggaaaaaattgaaatagaaaacactgaagaagatttatttccttttttaactactataccacttcaaaaactagcatattactcagctttaaaaaaaggttatgacatagataagccaagaaatttggctaaatctgtgactgttgaataat

SEQ ID NO: 246976 - DNA, 1478 bp, Unknown
  Bacterial polypeptide expressing nucleotide sequence isolated from the Sargasso Sea
tatgtgtggaatagttggatacttaggtaaaaaagattcagtaccaataatattaaacggtttacatcgtctagaatacagaggatatgattctgctggcattgccgtaattggagataatggaattcaacatgttaaaaattctggtaatgtttctgaattatctaaacttattgatgattcagtattaaatggttctatcggtattggtcatactcgttgggccactcatggtgagcctaataatataaatgcccatcctcattttgataggactggaaagattgcattaattcataatggtataattgaaaattataattcaataaaagaagttttatcaaataaagattttgaatttaaaagtgaaactgatactgaagtcctcgtccaattaatttcagaaatctattactcagatggtttaaactttgaacaagctgtgcaatcagcactaaatcaagtaattggtgcttatggaattgttgcattttgcttagatgagccaaataaattagttgcagcaagacatgggagcccattagtaattggaattggagatgaagaatattttgtggcaagtgatgcttcgccgatcgttgagcatactagaaacgttatttatttagatgaaggtgaaatagtaactatcacaaaatctgggcatgaaattcgatctattgttgatgacaatattataaataaaatttcaactgagatagaattgtcaatagatgaaattgaaaaaggtgaattctctcatcatatgcttaaagaaattcatgatcagacccatactataactgatactatgagaggtagaattgacccattagatggttcagctcatttgggtgggataacagaacaaattgatcgaattaaaaacgctcataggatatatattaccgcatgcggtacttcatggcatgcaggactaatggggaaatatctgattgaagaatatgctcgcattccagtgcatgttgaatatgcttcagaatttcgttatagaaatccaattattaatagtaaaacagtcgtaattggtatatctcagtcaggtgaaactgcagatacattagcagcaataaaaaaagcaaaagaattcggcgctttaacagttggtatatgtaatgtagtaggatctacaattgcccgagaaacagattgtggtgtgtatactcatgctggacccgaaattggagttgcttctacaaaagcttttacttctcaagtagcagttctttttttattatctttatgttttagaaaggataatggacctactggaaagaacttttctaaagcattattaaatgttggtgtgcaagttaaagaaattttagataattctaattcaattactaaagttgctaatgcaacttttaattcagataattttctttacttaggacgaggtatgaatttccctgtagcacttgaaggtgctttaaagctcaaagagatttcatata

SEQ ID NO: 246977 - DNA, 919 bp, Unknown
  Bacterial polypeptide expressing nucleotide sequence isolated from the Sargasso Sea
agctttcatgcaggcagaatatttgaattttggtcgcacaagttcttaggaataaattgtcgagttgactatggcagtgagtaccaatatcaagaaccaataaaaaccgataaaactttattagtaacaatatctcagtcaggcgaaacggcggatacactttcatctttaaagtttgcaaaaaaatcaggtgagccagttactttaaccatttgtaatgttgctaatagctctttgtgcagagaatcagactatactttgttaactaaagccggaccggaaattggtgtagcttcaaccaaagcttttgttacccaattagcttgtttaaatctgttgcttttaactttgatgagagtgcacaacaaattaccagcagcaagaaagaaaattaccgcagcactgagggatttgcctaaattaattaacaagactttaaaaatgacaggtgaatacaagaaagtggcaaagctgctttttaaaagaaacagcgcattatttttaggtcgtggtttgtattttcctattgccagagaaggggctcttaagctcaaagaaatatcttacatacatgccgaagcctatccgggtggagaattaaagcatggaccactggcactgatagacaaaaatatgccagtaatagctttagctccagacaatgaacacctagacaaaattatgtcgaacattgaagaggttgctgctcgaaaaggcaaggttattactatagggccactaggcagaacaaaaatagataaaaatggcggccacattaagattcctaagacattggatctgcttaatccgattgtctccgtggtgccaatgcagttgattgcgtactacaccgcagtctttaaaggcactgatgtagataagcctcgcaaccttgcgaaaagtgttactgtagaatgaa

SEQ ID NO: 246978 - DNA, 1793 bp, Unknown
  Bacterial polypeptide expressing nucleotide sequence isolated from the Sargasso Sea
aatgtgcggcatatttggtgctgtatcctctaaaaatattcaaagtaatctaatagtaggtttgcaaaagcttgaatatcgtggctacgattcgtctggactgtcaatttttaatggtcgaaataaaattcaaagactcagacgcgcagggaagataaaagaattaaaaaaagacctttctagatcaaaattatctgggctatgtggcattgcgcacacaagatgggctactcatggcgaacctatcttgaaaaactcacatccacataactcgaattgcgtttctattgtccataacggcattatagaaaacagcgaagaacttaagaaaactctagtacgtaaaaaatataagtttacgtctgataccgactctgaagtaatagctcatttgttgtccaacgatataaagaacagtaaaaattacattaagtcactcttatcgtcatttaaaaaactcaaaggttcttttgctataggcgcattaattgaacaaataccaaatactattatagcggcttgtagtggctcaccactactaattggacttagtgaacatggaaattttattgcttctgatttgcatgcattgtcaaagacagcaacaaaatatataacgctcgatgatgacgaaattgcaattataaaaagagactccatacaagtctattcttcaaatggaaaaattattcaaaaagaattacatgccacatcgggtaaatcaaaatctattgctaaaaacggatacaaacacttcatgcaaaaagagatcttcgagcaacatgaaattatatctaaggcaatcaagtatcaattaggtgacaagggtttgttgccaaatatctttggtccaaattctgataagattttatcgaatatcaaacatattcattttgtggcatgtggcacaagccacaatgctgcgttggttgcaaaatactggatagaagaattaactgacgttatatgtactgcagagatagcgagcgagtatcgctacagagatattcaagttcctgataaaacactttttgttgctatcagtcagtctggtgaaaccgcggatactatctactctcttaaaaaagctaaaggtaaaaggtataaaaattatctttcaatatgtaatgtccctgagagcaccattacaagattatccgatttagtatatctcactcatgctggccctgaaattagtgtcgcatctacaaaggcttttacgtcacagctaatcgctctcctttttctaacgatgatcttgacaagattttctaaaaataaagcaatcgaaaaaactatcttgaaacagattaaaactcttccacaaattctcaagaagacgctacagcttgaaaaaaagcttaaagatattgcaaaaaactttaaaagtaaaagtcatgctttatttcttgggcgtggaatttcatacccaattgctttagaggctgcacttaaattaaaagaaataacctatattcatgcagaaggatatgctgcaggtgagcttaaacatggaccattagcattagtggataaaaatatgccagttgtaggacttatgccagataataatcttgttacacaagtgttatcgaatctggctgaagtcaaagcgaggcaaggctcagtctatattttcaccaataaaaaattaaaatttagcaagaaggataaaacgcaggttatatctatgcctgcctgtggtcaattcgttgcgcctcttgtatacgtgataccaatgcaattactctcctactacgttgccatccataagaaaactaatatgatcagcc

SEQ ID NO: 246979 - DNA, 1321 bp, Unknown
  Bacterial polypeptide expressing nucleotide sequence isolated from the Sargasso Sea
gatcctgaacatttgtactgtgtaaagaatgagtctcccttattgttaggtctgggtgaggattgcaattatgttggatctgatataaatgcttttctagaatatactagaaaagcaatcattctagatgaaggtgaatatgtaattttaggtcctaatgagtatcaggttcgcagtttgaaaaatggtaaaaaaatcaaaaaaaatattctgcatatcgattgggatttggagactagtaaaaaaggaggattttctcactatatgctcaaggaaatatttgatgaacctcagactgtaaggcaggcaatgcagataccaaaggagaaaatcgttgcaatggcgggaatgtttgccgattcttcgcgttcatacatgatgggtgtgggtacaacttattatgttgccagtatcagtcagtattatttctcttctcttgctgattgttattattctgcattgagttctgatgagttttcggttgtggatataaaaaagggggacatggttttggctatttctcaatcaggagaaacatatgatacaaaaactgcactggtttacgccaaagatagtggtgcaaaaacgtccgcaatagttaatgttatgggatcagcaataagtatgatggcagatcacgtaataatgcagggttctggacctgaaatatgtgttgtatccacaaaagcggcattggcacaaacattcattatgttacgtgtagcattggagttgggacttataagaagaaaaataaaacaaaaagattacaaaaaatttcaaaatgagatgcagggattttctgaaattattgaaatagtactcaatgaacagtctggatttgttcgcaatattgccagagatacaagtcatgttaaacattggttttttttgggatgcggagtgtattatccagtggcaatggagtctgccttgaaaatgaaagaagtaacttatcagcatgccgaagggatgcccgcaggatttcttaagcatggaactttatcaatggtagaaccttctttgcatacattattttttgtacctcttcctgaacaaaaagaacttcacaagcgtacactgattgctatggaacaagttaaatctagaggaggagtcgtgattgccattatttttcaaggagatgaactggctcagaaaattgctttccagtcaataaaactaccagttgtaagctctttgtttgctcctttgctgcaaatgataattgcgcaaatgtttgcttattatgccgctcttgaccttgggcgcaatatagataagccaagaaatttagcaaaatcagtaactgtcggctaat

SEQ ID NO: 246980 - DNA, 1216 bp, Unknown
  Bacterial polypeptide expressing nucleotide sequence isolated from the Sargasso Sea
atatgctttaaaatctatgacaaacaaaataacttatttatatgatggtgaattttgtgtcataaaaaaagatcatgttgaattttttaatgaagatggaattaaaattaacaaaaaagttttagagctttcatctgatgaagaaaagtatgataaaggagattataaacattttatggctaaagaaattgaggaacagcctattactttaaaaaatggaattaatgaatacgtagataaatctaacaatgatatcaatatttataactttccttggaaaataaatgagatttcctcaatcactttaattggttgtggcactgcttatcatagctgtttaatggctaaatattggtttgaagaattaacatctttagacgttaatgtagatattgcatctgagtttagatatagaaaaaatagatttaaaaatgaaactttatatatttttgtttctcaatccggagaaacagcagatacttacgcagcattagatatttgtaaaaaaaatttcatgaaaacttgtgcagttgttaatgtaattgaaagttctattgcgagagactccgagtttgttctaccaattcattgtggtactgaaattggtgttgcatctactaaagcttttttaggccaaatattaatattgtatattttatctctaaaaatgggtctattgagaaaagatctaaaaaaagatgtatttattgaaaaattaaacgatttaaaaatgttaccaaagttggttgaaaagacgctatcaactgataataagattcaaacagtagctaatacttttaatgaagcgaaaggttcaatgtttttgggaagaggtttttcatatccgatagcgttagaaggagctttaaagttgaaagagttatcttatgtacatgctgaaggatatcctgctggagaaatgaagcatggacctttagcattaattgaagaaggtatgcctgtagttgttttagcaccaagggataaccactataaaaaaacaatttctaatatgcaggaagtaatagcaagaggagcaaaagtcttattggtaacaaataaaagtaaagatgaaattgtgtcagaaaatatttgggaaactttagaagttgaaacaactaatgaagatcttctcccttttcttttaacaatacctttgcagaaacttgcttattattcagctttaaaaaagggttttgatatagacaagcccaga

SEQ ID NO: 246981 - DNA, 1080 bp, Unknown
  Bacterial polypeptide expressing nucleotide sequence isolated from the Sargasso Sea
aggacacgtaaggtgggcaacacatggagttccaaacaaagttaatgcccatcctcactcaagtgagatagtatcagtagtacataacggaataatagaaaattctgatcagttaaaaaaagaattcgaaaaatctggtactacttttaaatctcaaactgacactgaagtaataacagttcttctcacagaaaaattagaaaaattagatcccttaaaagcagtatttgaaactatagacatgctcaaagggagttttgctcttggaataatatttagaaatcataaggagttcgtgattggtgctagacgcggcagccccttagctgttggttattcaaataatgaaaattatttaggttctgactcatatgctttaaagtctatgacaaacaaaatttcatatttagatgacggagatgtatgtgttttatctaaagacgaagtcaaattttataatcacaacaaagataaaattaataaagaaatttttacactttctgaagacaaagcatcagttaccaaggggaattataaaaattttatgataaaagaaatctttgatcaacctgttactaccaaaacttgtttaaaggaatatattgataaaatcagagaggaaataaatttttacaaccttccattagatccgaaagaaatcaaaaagatagtattgattggatgtggtaccgcataccattcttgtttagtagcgaaatattggtttgaggaattttcatctataaatattgaagtagatatagcatcagaatttagatatagaaaagttagattcgacaaaaaagctctttatatttttgtatcgcaatctggtgaaaccgctgatacgtatgccgctttagatctgtgtaaaaagcaaaacgttaagacttgttcagttataaatgttgttgaaagctcaatagccagaaactcagattgtgttttgccaattcatgctggaccagaaataggagtggcatccacaaaagcttttcttggtcaaatgttagttttatatttactctctttaaaaatttctgaagttagaaatgatatacaaaatattgaatataaaaa

SEQ ID NO: 246982 - DNA, 1099 bp, Unknown
  Bacterial polypeptide expressing nucleotide sequence isolated from the Sargasso Sea
tctatgagaaaaggtggatataagcattttatgcataaggaaatttatgaacaaccgactgtaataggagaaactttaaagtctttcatagatccagaaaaaaaaactgtaaaaataaatagtgagattttaaaaacagatattaaaaaaattactttaatagcctgtggaacatcagcttttgcatctagaatagctaggttttggtttgaagagtttgccaatataagtgttaatgtagatattgcttcagaatatagatatcgaaaattacttaaaactgaaggtgaggtagtaatatttatttcacaatctggagaaactcgtgatacattagcaagtcttgaagaggctaagaaacaaggattgaaaactatttcgatcgttaatgttttagatagtagtatttcaaggttatccgatgaaaatatatttactttagcaggtccagaaataggagtagcttcaactaaagcatttacaacacagttgctcacgctattgataatttcaattttattagggaaaaataaaaattttattaataatgatcatgaaaacaaaataattacagaattactagatttacctagtttacttaattatgtactagaaaaagaaaatgaacttagagacattgcttctaaaatttataatgcaaaggatgttttgtatataggtaggggtatgggccatggtttagctttggagggagcattaaaattaaaagaaattagttatattcatgcagagggttatgctgcaggtgagttaaaacatggaccaatagcattaatagatgaaaaggttccagtaataggaatcataccaactaataatttatttgaaaaaacttattctaatctagctgaagtaaaagcaagaggtggaaaaataatttgtattactgataaagaaggcaaaaagaagctagaagatttgtctgatctcatttttagtgtaaaaaactgtaatgattatttacaacccatagtaagcgctttaccagtacaattattagcttatcacgtagcttgttttaaaggtactgacattgatcaaccaagaaacctagcaaagtctgttactgtggagtagg

SEQ ID NO: 246983 - DNA, 1492 bp, Unknown
  Bacterial polypeptide expressing nucleotide sequence isolated from the Sargasso Sea
tatgtgtggaataattggaataaatagtattaaacctgtatcagcaactataattaattctctaaaaaaattagaatacagagggtatgactcagctggcatggcaactctctataatggattgataaatgaagttaaatctgagggaagagtagaaaatttggaaaaaaattcattagttcaaagtatggagggaactattggtattggtcatgtgagatgggcaacacacgggcttcctaatagtattaatgctcatccacattcttcccagaatgtttctgttgttcataatggaattattgaaaactcaacaatattaaaaaaatttttaattggaaaaggtcacaaatttaaatctcaaactgatacagaggtaatagttcatctaattactgaaaatcttaaaacagaaaatattgttaattcaatccaaaaaactttgaagtcgttacatggaagctttgcacttggtataatttttaaagatcaaccagatttaattgttggtgcaagaagaggttcaccattagctgttggttatggtcctaatgaaaattatctaggttcagactcttatgcccttaaatcgatgacaaataagattacgtatttaaatgatggtgaattctgcattattaaaaaagatcatgtggaattttttagtgaggagggaactaaaataaataaaaaagttttagaattgtcctccaaagaggaaaaatatgacaaaggtgattacaaacattttatggctaaagaaattgaagaacaaccaattacaattagaaatggaattaatgagtatatagatatgtcaaataaagatattaatatttataattttccttggaaaagtaatgagattacatcaataactttaattggatgtggaacagcatatcattcatgtttaatggcaaaatattggtttgaagaaataacatcattagatgtaaatatagatatagcatcagaatttagatacagaaaaaatagatttaaaaaagacacgctttatgtatttgtctcacaatctggagaaacagcagatacttatgctgctttagatctttgcaaacaaagtggcgttaaaacgtgtgcagttgttaatgtagtagaaagctcaatcgcaagagactctgaatttgtattaccgatacattgtggaactgaaataggtgtagcttcaaccaaagcttttcttggacaaatattgattttatatattttagctttaaaacttgctttattgagaaaagatattgaaaagacgcattttgacaaaaaaattgatgatcttaaaaatttaccaaaacttgttgagcaaacattattgattgataacaaaatacaaacaatctctaatacttttaatgaagctaagggttctatgtttttgggacgtggtttttcttatccaattgctcttgaaggagctttaaaactgaaagaattgtcatacattcatgccgaaggttatccagcagga

SEQ ID NO: 246984 - DNA, 1084 bp, Unknown
  Bacterial polypeptide expressing nucleotide sequence isolated from the Sargasso Sea
cacaccccccatttggatcatactgggagcattgctctagtacataatggaatatttgaaaactatgaagcgatcaaacaacttcttataaataggaatatccaatttactagtgatacagatactgaggtcattgttcaattaatttctgaattatactataataataatgaaaaactatcttttgaagatgccgtaagagccgcgcttcaagaggttgttggtgcttatggcattgttacaatgtgtgctgatgagccaaataaaataatagcggcacgtatgggaagtccacttgttttaggtataggtgaaggagaatattttttggcaagtgatgcatcacccataattgaacataccaggaatgtgatatatttagatgatgatgaatttgtaataattgataaagcaggatattcaatttcaaatataaaatcaaagaaaattattagtaaatcactcacgaaaattgatctatcaattgaagaaattgagaagggtaagttccctcattttatgttgaaggaaattcatgatcaaaaacattctattagcgatacaatgcgagggaggttaaaccttaatgatggaacaacaaatctaggaggtatagtaaattatataccaaatattttatcagcatcaagaatctatattaccgcttgtggaacctcttggcatgctggattaattggcaaacatttaattgaagaatatgcacgagttcctgttcatgtggaatatgcatctgaatttcgatatcggaatgctattatcgatgccaacaccattgttatagcaattagccaatccggcgagacagctgatacacttgctgctttaaaaaaagcaaaagagcttggtgcaattactcttggtatttgtaatgtggttggaagtacaatttctcgagaaacggatggtgggatttttactcatgcaggtccagaaataggtgttgcttctacaaaagcatttacatcacaagtaacagttctcataatgtttgctctaaatattggtaggaaaaaaggagtatcaaaacatcgtggaaaagaattaattagtgcgctaaaaacaa

SEQ ID NO: 246985 - DNA, 716 bp, Unknown
  Bacterial polypeptide expressing nucleotide sequence isolated from the Sargasso Sea
tatgtgtggaattattggagctgcttcatctagaagcgttggaaagattctaattaaaggacttcaattaatggagtataggggttatgactctgcgggcgttgttcttaacaaagatgaagaaattctaagattaagatctcttggcaaagtatcaaaactagaggagataatgatttccaaaaaaccaaaggcttattcaggtatagctcataccagatgggcaacccatggagccccttcagaagaaaacgcacaccctcatggatcccatgatgatatctatattgtacataatggaataattgaaaatcatgaagagataagaggcttcctaagaaatgagggctatgaaataacttctgaaacagactctgaattaattgcacacctagttcatttttataaaaaagacactaaagatactttacaggctctaataaaggcaacaaatgaactcaatggcgcctattcaatagctgttgtctgcaagaatgagaaaggtaaagtttatgcagcaagacaaaaaagcccacttttggttggtttgggcatagaagaaaactttgttgcttcagatcccttagccatcgttaatattactgaaaagtttcacatgttagaggatggagattttgcagttgtcactaaaaaagaagttgttatttatgatcaagagggtagcccagttgagagagatgaattaaagattgatg

SEQ ID NO: 246986 - DNA, 1828 bp, Unknown
  Bacterial polypeptide expressing nucleotide sequence isolated from the Sargasso Sea
aatgtgcggcatatttggtgctgtgtcctctaaaaatattcaaagtaatctaatagcaggtttgcaaaagcttgagtatcgtggctacgattcgtctggactgtcaatttttaatggtcgaaataaaattcaaagactcagacgtgcagggaagataaaagaattaaaaaaagacctttcgaggtcaaaattaactggactatgcggcattgcgcacacaagatgggctactcacggcgaacctatcttgaaaaactcacatcctcataactcgagttgcgtttctattgtccataacggcatcatagaaaatagcgatgaacttaaaaaaattttagtacgtaaaaaatataagtttacgtctgataccgactctgaagtaatagctcatttgttgtctaatgatatgaaaaacagcaaaaattatattaaatcaatcttgtcatcatttaagaaactcaggggttcttttgcaattggggcattattcgaacaaatgcctaatactattatagccgcttgtaatggatcgccactacttattggacttagtgaatatggaaattttatatcttctgatttgcatgcattgtcaaagacagcaacaaaatatataacgctcgatgatgacgaaattgcaattataaaaagagactccatacaagtctattcttcaaatggaaaaattattcaaaaagaattacatgcaacatctggtaaatcgaaatctaccactaaaaatggatataaacacttcatgcaaaaagagatctatgagcaacatgaaattatatctgaggtaatcaagtatcaattaggagataagggtttgttgccaaatatctttggtccaaattctgacaagattttatcgaatatcaatcatattcatttcgtggcatgtggcacaagccacaatgctgcattggttgcaaaatactggatagaagaattaactgacgttatatgtactgcagagatagcgagcgaatatcgttacagagatattcaagttcctgataaaacactttttgttgctatcagtcagtctggtgaaaccgcagatactatttactctcttaaaaaagctaaaggtaaaaggtataaaaattatctttcaatatgtaatgtccctgagagcaccattacaagattatccgatttagtatatctcactcatgctggccctgaaattagtgtcgcatctacaaaggcttttacatcacagctaatcgctcttctttttctaacgatgatcttgacaagattttctaaaaataaagcaaccgaaaaaactatcttgaaacagattaaaactcttccacaaattcttaagaagacgctacagcttgaaaaaaagcttaaagatattgcaaaaaactttaaaactaaaagccatgctttatttcttgggcgcggtatttcatacccaattgccttagaggctgcgcttaaattaaaagagataacttacattcatgctgaaggctacgctgcaggtgagcttaaacatggacctttagcattggtggataaaaatatgccagttgttggacttatgccagataataatcttgttacgcaagtgttatcgaatcttgctgaagtcaaagcaaggcaaggctcagtctatattttcaccaataagaaattaaaatttagcaaaaaggataaaacacaggttatttctatgcctgcatgtggtcaatttgttgcacctctagtatacgtgataccaatgcaattactctcttactatgttgctatccataagaaaactaatattgatcagcctcgtaacttggcaaaatcagtaacagtggaatag

SEQ ID NO: 246987 - DNA, 847 bp, Unknown
  Bacterial polypeptide expressing nucleotide sequence isolated from the Sargasso Sea
catgtgtggaatcgtaggcgccatcgcggagcgcaatatcaccgctgttctggtagaaggcctcaagcgcctggaataccgcggctatgacagcgccggcgtggcgctgctgaccgagcagggtgcactggatcgccgccgccgcgttggcaaggtcagcgaactgcaggccgcgctgcaggccgagccgttggccgggcgtctgggcatcgcccacacccgttgggccacccacggtgcgccgagcgagcgcaacgctcatccgcatttttctggtaaagagcccgggcacgagctggccgtggtgcacaacggcatcatcgagaaccacgaagagctgcgtgaacgcctcaagggcctgggctatgtcttcagttccgataccgacaccgaaaccatcgtccacctgctcgatcacaagttgcagcagctcggcgacctcagcgccgcgctcaaggccgcgattccggaactgcatggcgcctatggcctggccgtgatcagtgccaagcagccggatcgcctgctcgccgcgcgcagcggtagcccgctggtgattggtctgggcctgggcgaaaacttcctcgcctccgaccagttggccctgcgccaggtcaccgaccgtttcatgtacctggaagaaggagatatcgccgaaatccgtcgcgacggcgtgcagatctgggatgccgccggccagccggtgcagcgtgaagccgtgcagtaccacgaaggtgccgaggcagcggacaagggcgaataccgccacttcatgctcaaggagatccacgagcagcccaaggtggtgcagcgcaccctggaaggtcgcctgggcagcgaccacgtg

SEQ ID NO: 246988 - DNA, 877 bp, Unknown
  Bacterial polypeptide expressing nucleotide sequence isolated from the Sargasso Sea
ttgccggtgacgttggagctcgcgtccgacgtcctcgatcgacagtgtccattcttccgcgacgattccatcatcttcatctctcaatccggtgagaccgcggacacgctgcgcgcgttggagtacgccaagtccaagggtgcgctctgcatcggtatcgtcaacgtcgtcggttccgcaatctctcgcgccaccgactgcggtttgcacatcaacgccggcgccgaaatcggcgtcgcctccaccaaggcgtacacgtgtcaaatcacctcgctgattctcctcgccctggcgctcagcgaagactctcgctctcgcgccgatcgtcgcatggacatcatgcgcggcgttgccaagcttccggagacgatgcgtcgcgcgctcgagctcgacgacaagatgaagaagctcgcgcaatcgctcgtcgacgaaaactccctcttgctcttcggaagaggatacaactacgccaccgccctcgagggcgcgctcaaggtgaaggaagtcgctctgttgcactccgagggtatcctcgctggggagatgaagcacggtccgctggcgctcgtcgacgaaaccttgcccctcgtcgtcatcgccacgcgcgactcttcgttcaccaagcaaaaatccgtcatcgagcagcttcgcgccagagacgccaggtgcatcctcatcgtcggcgaggacgacgacagtctcgataaatacgcggcgagcgatgagatgctcatcaaagttcccgagatgtgcgattgcttgcaaccgttgatcaacatcatcccgttgcagttgttgagttaccatctcaccgtcttgcgcgggcacaacgtcgaccaaccgagaaatctcgcaaagtccgtcacagtggagtagg

SEQ ID NO: 246989 - DNA, 1180 bp, Unknown
  Bacterial polypeptide expressing nucleotide sequence isolated from the Sargasso Sea
atgtgtggaattattggaataacaagtaacaaattggtttcatcaccaattataaattcgctaaaaaaattagaatatagaggttacgactctgcaggaattgctacgattgactctggctttattaaagaagttaaatgtgagggtagggttgaaagtttggaggaagctgtttcaaaatcaaagttaacaggaaatgttggaattggacatgtaagatgggcaactcatggtattccaaacacaattaacgctcatcctcattcatcagaaaatgtatctgtagttcataatggaataattgaaaactcaacattgttaaaaaagtttttagttaataaaggacataagtttaagtcccaaacagatactgaagttattgttcatcttattactgaatatttaaaaaaagataatcttaaagatgcaattattaaagttttaaaaaaacttcatggaagttttgctttaggtataatttttaaagataatccgaatttaataattggtgcaagaagaggttctcctttagctgttggctatggtcctggggaaaattatttaggatcagactcttatgctctaaaatctatgacaaataaaatttcatatcttaacgatggggagttttgtattattaaaaaagataatgttgagttttttaatcagagcggaaaaaagataaataaaaaaatattacatttatcatcaaacgaacaaaattatgaaaagggtgactacaagcatttcatggctaaagaaattgatgaacagccaaataccatcaaaaattgtgtcaatgaatacattgacaaaatcaataatgacataaatatttttaattttccatttaaagaaaaagaaattaattctatttcattaatcggatgtggcacagcttatcattcttgtcttattgcaaaatattggtttgagcaactaacatcatttgatgtcagtatcgatatcgcttcagagtttcgttacagaaaaaataaatttaagaaagattgtctttatatttttgtttctcagtcaggtgaaactgctgatacttacgcagctttagatctttgtaacaaaaataaaatgaaaacatgctcagttgtaaatgttattgaaagctcaatagcaagagactccaaattcgttttacctattcattgtggtccagaaatcg

SEQ ID NO: 246990 - DNA, 703 bp, Unknown
  Bacterial polypeptide expressing nucleotide sequence isolated from the Sargasso Sea
atgtgtggaatagttgctgtaacaggttataaaaaggctttaccattattgataaatggcttagaaaaacttgaatatagaggatatgattccgctggtattgcaataattaaccctgagacaaattctattacttgtaacaaagcagagggaaagcttcacaatttaatgaataatcttaacgatgagaatattccaggaactgtgggtataggtcatactagatgggcaacacatggaaaacccgagtttaaaaatgctcatcctcatattgatggttcaggaacgatagcggttgtacaaaatggcattattgaaaatttccaagacttaaaaaataaattagaggaagagggtatcatttttaattctgatacagataccgaagttattcctcatttgattaaaagagaattaaatacattaagtaaacttaaccttgagaataatggctcaacattattagtagcagtgagaaatgtaatttctgatctggaaggatcttatgccttagcagttttatgggctgatgctccaacttcattggtagttgcaagaagacaagcacctttgattattggtttgggtgaaggcgaatttatttgtgcaagtgatacaccagctattgcaaattttacaaatattattttgcctatggaagatgaagaaatagctttgttgactccttcttgggatagaaatc

SEQ ID NO: 246991 - DNA, 667 bp, Unknown
  Bacterial polypeptide expressing nucleotide sequence isolated from the Sargasso Sea
aatgtgtggaataataggaataataagtacaaaagaagtttcaagtagaataattaattcattaaaaaaactagaatatagaggatatgactctgctggaattgcaactttagttgatggaagtattaatgaggtaaagtgcgagggtagagttgatgtattagaaaaagatatatcaacatttaatcttaaaggagatattggcatcggccatgttagatgggcaacgcacggtaaaccaagtaaagttaatgcccacccacattcatctgaacaggtttcagttgtacataatggtattattgaaaattcaactattttaaaaaaatttttagagaaaaagggatatatatttaaatcacaaactgacaccgaagtaatagctcaccttgttacagattatttaaaaaaaaattctttgaaagatactattattaaagttttaaaaaaacttcatggtagttttgctttaggaataatttttaaaaatcgaaatgatttaatgattggtgctagaagaggctctcctttggctgtaggatatggaccaaatgaaaattatctaggatcggattcatacgcactgaaatctatgacaaataaaatctcttatttagaggatggtgaattttgtattattaaaaaaagatcaaatagagttttttga

SEQ ID NO: 246992 - DNA, 1276 bp, Unknown
  Bacterial polypeptide expressing nucleotide sequence isolated from the Sargasso Sea
atgtgtggaattattggaattaatagtggcaaacctgtttcagcaacaattataaattcacttaaaaaattggaatacagaggttatgactctgctggaatagcaacactctttaacggattaatcaacgaggtaaaatctgaaggaagggtggataatcttgaaaaaaattctttggtacaaaatatggaaggcacaataggtataggtcacgtaagatgggctacacatggattacctaatagtattaatgcacatcctcattcatctcaaaatgtatctgtggttcataatgggattatcgaaaattcaacattgttaaaaaaatttttagtaggaaaaggacataagtttaaatcacagacggacacagaagtaattgttcatttgattacagaaaatttaaaaactgaagacattgtgaattcaattaaaaaaacattaaaatctcttcatggaagttttgctcttgggattttatttaaagataaaccagatctaatagtgggagcgagaagaggttctcctttagcagttgggtatggtccaaatgaaaactatctaggttcagactcctatgctttaaaatcgatgacaaataaaattacttatcttaatgatggtgaattttgcatcatcaaaaaagaccaagtcgaattttttaatgaagatggcattaagataaataaaaaagttttagaattatcttcagaagaggaaatgtatgataaaggagattacaaacattttatggctaaagaaatagaagaacagcctacaaccctaaaaaatggaataaaagaatatttagataattctaataatgatataaatatttataactttccatggaaaacatctgaaatatcatctgtaatacttattggctgtggtacggcttatcatagttgtttaatgggtaaatattggtttgaagaattgacctcattagatgtaagtgtcgatattgcttcagaatttagatatagaaaaaatagatttaaaaaagatacactgtatgtttttgtttcacagtctggtgaaactgcagatacttatgctgcacttgatttgtgtaagaaaaacggaatgaaaacatgtgcaatcgtcaatgttattgaaagttctatagcaagagactcagaatttgttttgccaattcattgtggaacagaaattggagtagcatctactaaggccttttttgggtcaaatattaatattatatattttatctctaaagctaggttttttgagaaaggatttaaaacttgat

SEQ ID NO: 246993 - DNA, 490 bp, Unknown
  Bacterial polypeptide expressing nucleotide sequence isolated from the Sargasso Sea
ttgttaacaggtaataaagtacaaaatatctcaaatacttttaatgaagcaaaaggttccatgtttctaggaagaggattttcatatccaatcgcattagaaggagcattaaaactaaaggaattatcttatattcatgcagagggttatccggctggagaaatgaaacacggaccattggctttaatcgaagaaggtatgcctgtagtagttttagcacccagggatagttattataaaaaaacaatttcaaacatgcaggaagtaatagccaggggtgcaaaagttttactaattacaaataaaagcaaagacgaggttgtctcagaaaatatttgggaaacattagaggtagaaagcactaatgaagaccttttgccttttcttttaacaataccattacaaaaattagcttattattctgctctaaaaaaaggattagatatagataaacctagaaatttagcaaaatcagtcactgttgaataaa

SEQ ID NO: 246994 - DNA, 472 bp, Unknown
  Bacterial polypeptide expressing nucleotide sequence isolated from the Sargasso Sea
tatgtgtggaattattggaatatctagcaacaaacctgtttctgcaaatataattaattcattaaaaaaattagaatacagaggatatgactcagcgggtatagctacactttcagatggtgaaatcaatgaagtgaaatcagagggtagagtagataatttagaaaataattttgatttaaaaaacttaagaggaaatattggtataggtcatgtaagatgggcaactcacggaatcccaaacagtttaaatgcacatcctcattcctctcacaatgtatcagtagttcacaatggaattattgaaaactctacattattaaaaaaacatttaattaacaaaggtcacaaatttaaatcacagacagatacagaagtaatcgttcatttgataacagaacatttaaagacttcagaattagaggaagctatcacaaaaacgttaaaacaacttcatggtagctttgctctt

SEQ ID NO: 246995 - DNA, 1084 bp, Unknown
  Bacterial polypeptide expressing nucleotide sequence isolated from the Sargasso Sea
attaaatgtgaaggaagagtagatggtttagaaaaaaatgtaactaaaattaatttacttggcaatgttggaataggacatgttagatgggcaactcatggtattccaagtactataaatgcacatccacattcatccgaaactgtttcagttgttcataatggaataattgaaaattcaacaattctcaaaaaatttttagttgataaaggacataaatttaaatctcaaactgataccgaagtgattgttcatttagtaacagaatacttaaaaaaaaatagtttaaaagaatcgattctaaaaatgctaaaaaagctcgaaggtagttttgcattaggaataatctttaaagatcaaccagatttgattgttggtgcaagaagaggttcgccattagcagttggttacggtcctaatgaaaattatttgggatcagattcatatgcattaaaatcgatgacaaataaaatttcatatcttaatgatggtgaattttgcattttaaaaaaagaccaagttgaattttttgattcaaagggaaataaaataaataaaaaagtattaaaattatcttcaaatcaacaaaattatgaaaaaggtgattataaacattttatggccaaagagatagaagaacaacctacaactataaaaaattgtgtaaatgaatacatagataaaattaataaagaaataaatattttaaattttccttggaaaaaaaatgaaatttcttcagtcaagttaattggatgtggaacagcttatcattcatgtttaattgccaagtactggtttgaacaattaacacttttagatgtagaaatagatatagcctcagagtttagatatagaaaaaatagatttaaaactgactgcctttacatatttgtttcacaatctggagaaactgcagatacatatgcggctttagatttgtgtaataaacacaaaatgaaaacatgcagtattgtgaacgtagttgaaagttcaattgctagagattctaagtttgttcttcctatacattgtgggcctgaaataggtgttgcatctaccaaagcttttttagggcagatgt

SEQ ID NO: 246996 - DNA, 1390 bp, Unknown
  Bacterial polypeptide expressing nucleotide sequence isolated from the Sargasso Sea
aatgtgcgggattgttggcggaacttcgaacagaaatattctccctattcttgttgaaggactaagaaggctggagtacagaggatacgactccgcaggagtggcttataaagctaatggaaaaatttctctggtaaaaaatgcaggtagagttgaagaccttgctgaaaaactaaatctagaaaagagtaatgcaaaaataggaattgctcataccaggtgggcaactcatggcgttccttcagaaaaaaatgcacacccgcacagctctaaaaataatatttatgttgtgcacaatggaattattgaaaaccatttagcgcttaaagaaatgctcaaaaaagaaggctttaagttttcatcacaaacagacacagaagttattgctcacttaattcagctctatctggaaaaaggtaaagatctcgattcagcagtcataagcaccatagcaaaacttcaaggagcttatgctcttggcattctagacaaaaataatcctgatactctaattggcgtaaggcaacaaagcccgctcgttattggcgaaggctttgaagagcaatttattgcttctgatattatggctctgtctaacattactaataaattcaagttcatggatgatggacaaatagctattcttgataaagatcacataactgtgacctcttcttctggagtggcagcaaaattaaaaacccaagaggtagattcaaatgcttataccaatgatttaaaaggctacaaccattttatggagaaagaaatatttgaacagtcagatgttattaaagactctcttgaaggcaggcttacaaaaaatgaaagccaagagggaatttttggagttggttttgagaaagaaatgaaaaacatcacaaacatacaggttgttgcttgcggcacaagctttcatgcaggcagaatatttgaattttggtcgcacaagttcttaggaataaattgtcgagttgattatggcagtgagtaccaatatcaagaaccaataaaaaccgataaaactttattagtaacaatatctcagtcaggcgaaacggcggatacactttcatctttaaagtttgcaaaaaaatcaggcgatccagttactttaaccatttgtaatgttgctaatagctctttgtgtagagaatcagactatactttgttaactaaagccggaccggaaattggtgtagcttcaaccaaagcttttgttactcaattagcctgtttaaatttgttgcttttaactttgatgagagcgcacaacaaattaccaacagcaagaaagaaaattaccgcagcactgagggatttacctaaattaattgataagactttaaaaatgacaggcgaatacaagaaagtggcaaaactacttttt

SEQ ID NO: 246997 - DNA, 1828 bp, Unknown
  Bacterial polypeptide expressing nucleotide sequence isolated from the Sargasso Sea
atgtgtggaattattggggcaacttcatctaggagtgtaggtaaaatcttgattaaaggtcttcacgctatggagtatcgaggatatgactcagcaggcgttgctctaaaccaagacaatgagatttttagactcagatccttgggcaaagtttcatctcttgagaagttaatgatcgacaataagccaaaagcaaaatctggcatagctcatacaagatgggcaactcatggggctccatcagaggaaaatgctcaccctcatggctcacataatgaaatctatattgttcataacggaatcattgaaaatcatgatgaaattagagataaacttaaagggaaaggttatgaaattgcttctgagactgactctgagcttatagctcatttaatacatttaaataaaacagactcgtcttcaactcttgaggccttaataaaagcaacccaagaacttaaaggagctttttcaatagctgcaatatcagctaaagaaaaaggcaaaatatatgcagctaaacaaaagagcccattattgatcggaaaaggcattgaagaaaactttgttgcatcagatcctctagcaattgccaatataaccgaaaaattttatctgttggaagatggggactttgcagaaattacaaaaaaagacattaaaatttttaacagcaataaagaacaaattcaaagagaagagacaaaaatagatgccacaccaacatcatcaagcaaaggtaactacacgcacttcatggaaaaagagatttatgagcaaccagatgcactaggaaatactataaatggaaggcttggtgaaaacgacgtattggataatatttttggtttgggatcgagtgatgcattcaaaaatgtaaaaaggattcagtttgttgcatgtggcaccagccttcatgcagcaaaaacagccagaaagtggtttgaggacatatgtgagattccttgttatatagactttgcaagtgaatacagatacaggaatccaatcgttgaagacaacaccctttttgtgacaatctctcaatctggtgagacagctgacacattggctgctttagaatatgctcgatctgaaaagtatgttggtattgtgacaatctgcaatgtcccaacaagcactatggcgagagaggctgattggaaaatatttactaatgcaggaccagaaataggagttgcatcaacaaaagcttttacaacccaattagctgctttgctgatgctcgctctgtcaattgccaaaagccatgataaaaatgctgataaaagaaaacaagcaactcaagacttaagagaaactccaggactagttgataaggcttttatcttgaaagaaaacatctctcaaataacacaaaatatctctagcaaacacaacgcattatttctaggcaggggaatgtatttttctatcgcacaagagggcgcacttaaattaaaagaaatatcctatattcatgctgaagcatatccagcaggggagctaaagcatggtcctttagccttggttgatgatcaaataccagttattgctcttgcacctgaggatagtctagtcgagaaacttttatcaaacctcgaggaggtaaaagcaagaggcgggactctttatgtatttggaaacgcaaattcaactattgaagtaaacaggggtaaatttataaacatgcctgaatgcggagattataatgctccaattatttacaccataccgctacaaattcttgcttatgaagtagcatgcctaaggggaacagatctagaccaaccacgaaatttagctaagtcagttacggtggagtaag

SEQ ID NO: 246998 - DNA, 1822 bp, Unknown
  Bacterial polypeptide expressing nucleotide sequence isolated from the Sargasso Sea
atgtgtggaatagttggaattgcaagcaataagcaagttacaccgtcaataataaattctttaagaaaattggagtacaggggatatgattctgccggcatagcaactctaaatgatgggtttattaaagaagttaaatgtgaaggaagagtagaggctttagaaaaaaatctatctaaaaataaattagttggaaatattggaattggacatgttagatgggctacacatggtataccaagcacactaaatgcccatccacattcttctgaaaatgtttcagttgtacataatggaataatcgaaaactcaaccatcttgaaaaaatttttagttaataaaggacataagtttaaatctcaaactgatacagaagttatagttcatttgataactgaatatttgaaaaaaaatgatttaaaaaaatctattattaaaatgttaaaaaaactccatggtagttttgcattaggtataatttttaaagatcagccagatttaataatcggagcaagaagaggatctcctcttgcagttggatatggaccatcagaaaattatcttggatcagattcttatgctttaaaatcaatgacaagtaaaatttcttatttaaatgacggcgagttttgcattattaaaaaagataatgtggaatttttcgatgaaattggaaaaaaaattaataaaaaagttttaacactttcttctaatgagcagaattatgacaaaggtgattataaacattttatggccaaagaaatagaagaacagccgactacaataaaaaattgtattaatgaatatattgataagataaatagttctatcaatatttttaactttccttggaaatcaaatcagatttcatcaatagttttaatcgggtgtggtactgcatatcattcttgtttaatggcaaaatattggtttgaacaattaaccacattaaatgtgacagttgatattgcgtctgaatttagatatcgaaaaaatagatttagtaaggatactttatatgtatttgtatcacaatcaggtgaaacagctgatacttttgctgcattagatttatgtaataaaaataaaatgaaaacttgtagtgttgttaatattgtagaaagttcaatagctcgagagtctaaatttgttttgcctatacattgtggacccgaagttggtgttgcttctactaaagcttttttaggtcaaatgttagttctgtacattctatgtttaaaacttgcaaatatgagaggtgatatagtcaaaaatgtatatcttaaaaaaataaaatctttattttctttatcaaaattagccaatcaaactttagaaacagaaagtaaaatacagtcaatttgtggttcatttgtaaatataaaagggtcaatgtttttaggaagagggtattcttttcctatagctcttgaaggtgcattgaaattaaaagaattagcttatgttcatgccgaaggttatccggctggagaaatgaaacatggacctcttgctttaatagaagaaggaatgccagttgtagtattggctccaagagacgaatattacaaaaaaactatttctaatatgcaagaggtaattgcgagaggtgctaaagttttattaattacaaataaaagcaaagatgaaatttattctgaaaatatttgggaaaaaattgaagttgaaaatacttctgatgacttattaccatttttaattacaattccattgcaaaaattggcttactattctgctttgaaaaaagggtacgacatagataaaccaagaaatttagcaaaatctgtaactgttgaataat

SEQ ID NO: 246999 - DNA, 1032 bp, Unknown
  Bacterial polypeptide expressing nucleotide sequence isolated from the Sargasso Sea
tatgtgtggcattgtcggcatatctagcaataaaccagtatcatcaataatactaagttctttaaaaaaattagagtatagaggatacgattctgcaggtttagctactatagacaaaggttttataaatgaaattaaatgtgaaggtagagttaataatttagaaaaaagcgtactatcctctaaacttgatggtgtaacagggattggacatgtaagatgggctacgcatggtttaccaaatacaataaatgcgcatcctcattcatcaaaaaaagtatcagtagtacataatggtataatagaaaatgcgactttattaaaaaaacatttagtaaaaaatgggcataaatttaaatctcaaactgatacagaagtaatagtacatttaataacagaatatttaaaaactaataatattaaaaatactatcactaaggttttaaataaacttcatggtagttttgctttgggtataatctttaccgactatccagacttgttaattggagcgagaagagggtctcctctagctgttggatatggaccaagtgagaactaccttggttcagattcttacgctttaaaatctatgacaaataaaatcacttatttagatgatggtgagttttgtattataaaaaaagataaagttgaattttataatacagatggattagttataaacaaaaaagttttagaattatcaaaagaagatctagatattaataaaggagactttaaacacttcatggccaaagagattgctgaacaaccaaatacaataagcgcatgtattaaggagtatattaataaactaaataatgaattaaatatttttaattttccatggaaaaaggaaggcttcaataaaattattttaataggttgtggtactgcttaccatgcatgtgtaatagctaaatattggctagaaaaattaactaaccttgaagtagatgtggatattgcttctgagtttaggtatcggaataacagatttaaaaaacaaaatttatatatatttgtttc

SEQ ID NO: 247000 - DNA, 1331 bp, Unknown
  Bacterial polypeptide expressing nucleotide sequence isolated from the Sargasso Sea
tttgggtataatttttaaagaaatgcccgatttgattattggcgcaagaagaggatcaccattagctgttggatatggtccaaatgaaaattatctaggttctgattcatatgctttaaaatcaatgacaaataaaattacttatcttaatgatggcgagttttgtgtaataagaaaaaaagaaatcgatttctttgattccaaagggaaaaaagtaaataaaaaaatattacatttatcagcgagtgatcaaaattatgaaaaaggtgagtacaaacatttcatggcaaaagaaatagatgagcaaccaattacaattaaaaattgtattaatgaatatattgataaaattaataacgaaataaatcttcttaattttccatggaaaaaagatgaaattaaatcaatcaaacttattggatgtggcacagcatttcattcttgtttagtaggtaaatattggtttgaacaattaactaatttagatgtccaagtagatattgcatctgaatttagatatagaaaaaataagttcaataatgattgcttatatatttttatttcccaatctggtgaaacggcagatacttatgctgctttagatttatgtaataaaaatgacatgaaaacgtgtagtatcgtaaatgtagtagaaagctctatagcaagagactctaaatttgtcttgccaattcattgtggtccagaaattggcgttgcatccacaaaagcatttttaggacaaatgttggtaatttatttattatgtgtaaaaatttcatttttcaaaggtgatattaataaacacaaatatattgaaaaaattaaaaatcttaaattactttctgatttagttaataaaacaatctctgcagaaaataaaattcaattaatttgcaatacttttgctaacgcaaaaggatcaatgtttttaggtagaggttactcatatcctattgcacttgaaggagctttaaaattgaaagaattagcatatatacatgccgagggatatccagcaggtgaaatgaaacatggtccattagcattaattgaagatggaatgccagttgtagtgattgctccaaaagacgagcattacaaaaaaactatttcaaatatgcaagaagtaatagcaagaggtgcgaaagttttactgataactaacaaagaagatgaccaagtagtatctgaaaatatttggcaaaaaatcgaaattgaaaatatagaaaatgatttgtatccttttttagtaactatacctttgcaaaagttagcatattacacagctttaaaaaaaggctatgatatagataaacctagaaatctgg

SEQ ID NO: 247001 - DNA, 529 bp, Unknown
  Bacterial polypeptide expressing nucleotide sequence isolated from the Sargasso Sea
aaagatttgttatctttatctaaatcagcaaaaaatacactaaatattgaagataaaattcaaacacttggaaaagattttgctaattctaaaggatcaatgtttttggggagaggttattcatatccaattgcacttgaaggcgctttaaaactaaaagagcttgcctatgttcatgccgaaggttatccagcaggtgaaatgaaacatggacctcttgcactaatagaggaaggtatgcctgtagtggtaattgctccaagagatgagcattacaaaaaaactatttcaaatatgcaagaagttatatctagaggcgcaaaagttttactaataacaaataaaagtactgatgaaatttattcagaaaatatttgggagcaaatagaagttgagcatatatcagatgaactcattccttttttgaccactatacctttgcaaaagttagcttattactctgcattagataaaggatacgatatagataaaccaagaaacttagctaaatctgtcactgttgaataaa

SEQ ID NO: 247002 - DNA, 1819 bp, Unknown
  Bacterial polypeptide expressing nucleotide sequence isolated from the Sargasso Sea
catgtgcggcattgtcggcgcagttgcgcagcgtaatatcgttccggtgctgatcgaaggattgcggcgcctcgaataccgtggctacgactcgtgcggcgtcgccgtgctcgagcccggtgcaccgaagcgtgcgcgcagcgtcgcgcgcgtcgccgatctcgacgcgcaggtgcgcgaatcgcacctcgaaggcaccaccggcgtcgcgcacacgcgctgggcgacgcacggcgcgcccgtcacgcacaacgcgcacccgatcttctcgtcgaatgcgctcgcgctcgtccacaacggcatcatcgagaacttcgaatcgctgcgcgacgcgctgcgcgcgaagggctacgagttcgtgtcgcagaccgacaccgaagtgatcgcccacctcgtgcacagcctgtatcgcggcaacctgttcgacgcggtgcgcgaagcggtcggccagttgcacggcgcgtatgcgatcgccgtgatccacaaggaccagccgcataccgtcgtcggcgcacgccagggttcgccgctcgtggtcggccacggcgacggcgagaacttcctcgcgtccgatgcgctcgcgctggccggcagcaccgaccgcttcacgttcctcgaggaaggtgacgtgtgcgagctgtcgctcgacggcgtgaagatcgtcgaccgcaacggcgccaccgcgcagcgcgagatccgcgtggtcagcgcctacggcggcgcggtcgaactcgggccgtatcgtcacttcatgcagaaggaaatcttcgagcagccgcgcgcgatcagcgataccgtgccgcagacggacgcgttcgacgcgacgctgttcggcgccgccgcgcccgccgcgttcgcggacatcgacagcctgctgatcctcgcgtgcgggacgagctactactcgggcctgaccgcgaaatactggctcgaatcgatcgcgaagatcccgacccaggtcgaaatcgccagcgagtaccgctaccgcgaatcggtgccgaacccgcgccagctcgtgctggtgatctcgcaatcgggcgagacggccgacacgctcgcggcgctcaagcatgcgcagtcgctcggccacacgcacacgctcgcggtctgcaacgtcgcgacgagcgcgatggtgcgcctcaccgagatgcagttcctgacgcatgcgggcaccgagatcggcgtcgcgtcgacgaaggcgttcacgacccagctcgtcgcgctgttcgtgctggccgcgacgctcggcaagctgcgcgggcacgtcgacgccgcgctggaagcgcaattcctgaagcagctgcgccacctgccggccgcgctgaacagcgtgctcgcgctggagccgcagatcatcgcgtggtcggaggaattcgcgcgcaaggaaaacgcgctgttcctcggccgcgggctgcactacccgatcgcgctcgaaggcgcgctgaagctgaaggaaatctcgtacatccacgccgaggcctatccggccggcgaactgaagcacgggccgctcgcgctcgtcacggaagcgatgccggtcgtcacggtcgcgccgaacgacacgctgctcgagaagctgaagtcgaacatgcaggaagtgcgtgcgcgcggcggcgagctgtacgtgttcgccgatgccgacacgcagatcgtcaacgacgacggcctgcacgtgatccggatgccggagcactacgggcaactgtcgccgatcctgcacgtcgtgccgctgcagttgctcgcgtatcacaccgcgtgcgcacgcggcaccgacgtcgacaagccgcgcaacctcgcgaagtcggtgacggtggaataa

SEQ ID NO: 247003 - DNA, 988 bp, Unknown
  Bacterial polypeptide expressing nucleotide sequence isolated from the Sargasso Sea
ttggaattacaagctctaaagaggttactccctagaattataagttcattaaaaaaacttgagtatagaggttacgactctgcaggtttagcaactctttcaaatggaaatataaatgaggtaaaatgtgagggtagagtagacgccttagagaaaaacattataaaaactaaaatatctggctctattggtatcggacatgttaggtgggcaactcatggaaaacctagttcaataaatgcacaccctcattcatcagaagatgtatcagtagttcacaatggcataattgaaaattcaactatactaaaaaaattattagaaaataaaggctataagtttaaatcccaaacagatacagaagtaatagttcatttggttactgattatttaaaaaaaaataatcttaaaaatacaattataaaagttttaaaaaaattgcatggtagttttgcactaggaataattttcaaagaccaaccagacttgatagttggggcaagaagaggctctcctcttgcagttggttacggaccaaacgaacattatcttggttcagattcttatgcattaaagtcaatgacaaataaaatttcatatttaaatgatggagagttttgtattttaaaaaaggatcaagtggaattttttgatgctgacggaaccaaagttaataaaaagattttaaatctttctaaagatgatcaaaattatgaaaaaggagattacaaatattatatggctaaagaaatagacgagcagccaattactttaaaaaattgtattaatgagtacatcgacaaatacaataaagagataaatatttataattttccttggaaaataagtgaaatttcgtcggtggttttaattggatgcggaacagcatatcactcatgcctcgttgctaagtactggtttgaacaaaatacaagtttagatgtcagtgttgacatagcctctgagtttagatatcgaaaaattaaat

SEQ ID NO: 247004 - DNA, 1828 bp, Unknown
  Bacterial polypeptide expressing nucleotide sequence isolated from the Sargasso Sea
atgtgtggaatcatagctgctgcttctaacagaaatgtaggaaagcttcttgttcaagggcttcataaaatggagtatcgaggctatgactctgccgggatcgcactccatcagaataatcaaatagcccatttaagaaccttgggaaaagttaaattactagaagaaaagatgatctccgaaaagccaaaaagtaagctggggattgctcatactagatgggcaactcatggagaaccatcagaagaaaacgctcatcctcataagtcaaatgaaagagtctacattgtgcacaatggaattattgaaaactatcttgatttaaaagaatttttaaaaaaggagggctatagcttttcttctcaaacagactcagaattaatagcccatatgcttgagtattttttagccaagggcaattcaatgatagattcgatgtatttaactaaagaaaaacttgatggcgcttatgcaattgcagtaatagataaagaagatgaaaaaaatataattattgctaggaataaatcgccactattaattggaataggaacagatgagtttttagctgcatcagatcctcttgctatagctcagctgacaaatgaatttattttcttagaagatggggatgtggctgagctttcatctgaagaatttacaatctatgatcagtcaaaaaataaagtcgaaagagagatttctcaaattgacatttccagccaggcaacctctaaaggcgaatacaaacatttcatggaaaaagaaatatatgaacagcctgatgcaattctaaatacaatcgatggcagagttggtggtgatgatgtattggataatatctttggcataggttcatctgaaatatttgaaaaagtaaaaagaatccaaatcgttgcttgtgggacaagcctgcatgcaggaagggttgctgcaaactggttttctgctatcgcagagctgccaacccagattgattatgcttcagaatatagatatagaaatccacatgtcgacgaagattctctattggtaacaatatctcagtcaggagaaacagcagatacgctcgctgcattaagatacgcaaaagaaaaagattatttatcaacgctaacaatttgcaatgtgccgaccagctctttagcaagagaatctgactattctatttttactaatgctggccccgagataggtgttgcttcaaccaaagcatttaccactcaactagctgcattaatgctactttctcttgcgcttgcaaagagtaggggtaaaaatccgaaattaaggactcgtgttattacagcaatgagatcgttatctgatactgtaaatgagaccttgaaattaaaagacaaaattcttgagatagcgcctgaaatagcaagcaaagataatgctttatttttaggaagaggtatcttctatcccattgcaaaagaaggcgctcttaagcttaaagaaatctcttatattcatgctgaggcttatccggccggcgaattaaaacatggacctttggcattaattgatgaagaaatgccagttattgcattagctccagaaagcgatatagcggagaagcttgtttcaaatctcgaagaagttaaggctaggggtggaactctatatgtattcgctgacccttcgataacaatcgatttaaaatcaggacaggttattagtatgcctaaatgcgattttcttttaactccaattatttatactattccgcttcaaattctttcctacgaagttgctcttttaaggggtaccgatattgatcaaccaagaaatcttgctaagtcagtcacggttgaataat

SEQ ID NO: 247005 - DNA, 1822 bp, Unknown
  Bacterial polypeptide expressing nucleotide sequence isolated from the Sargasso Sea
atgtgtggaatagttggaataattagttctaaagaggttactggaagaatattaaactcattaaagaaacttgaatatcgtggctacgattctgccgggatagctacattagttgatggaaataaaaatgaagtcaaatgcgagggcagggttgaagtattagaaaaagatattactaaatttaatttaaaaggtgacattggtattggacatgtgaggtgggcaacgcatggcaaaccaagtaaaattaatgctcatccacattcatctgaacatgtatcggtagtacataatggaattattgaaaattcaacgatattaaaaaaatttttagaaaaaaaaggttatgaatttaaatcacaaacagacactgaagtaatagctcatttagttactgaatatctaaaaaagaattcaataaaagatacaataataaaggttctcaaaaaacttcatggtagttttgcgctaggaataatatttaaagctcaaagtaatcttatagtaggtgcgaaaagaggatctccattagctgtaggttatggtccaaatgaaaattatattggttcagactcatacgcgcttaaatctatgactaataaaatttcttatttagatgatggagaattttgtattgttaaaaaagatcaaattgaattttttgatacggagggcagtaaaataaataaaaaagtgatgaatttgtcaaaagatgaaattgactatgataaaggtgattacaaatattttatggagaaagaaattgacgaacaaccatcaacaattactgcttgtataaatgagtacattgataagcataacaagcaaatcaatatttataatttcccatggaaaataagctcaatagactcagtaatgttaataggttgtggaacagctttccactcgtgtttgatggcgaaatactggatggaacaaaataccaatttagatgtaagtgttgatatagcctctgaatttagatatcgaaaagttaaatttaaaaaaaactgcctttatattgttgtttcacagtctggagaaacagctgatactcacgcagctttagatttatgtaaaagaaacaaaatgaaaacttgtgcagttgtgaatgttatagaaagctcaatagcaagagatgctgatttagtgttaccaatctattgtggacaagaagttggcgttgcttcaactaaggcatttattggtcagatgttagttttgtatattttatcgactaaaatttcttttgatcaaaaatgtatttctcgaaaagaatatcaatcaaagatagataatttactaacattatctgatgctgcaaaaaaaacattaaaactagatcaaaaaattttaaatgttggcaaaacttttgctgatgcaaaaggttcaatgtttttaggaagaggttattcttttcctattgctttagagggagcattaaaacttaaagaattagcatatgttcatgctgaaggttacccagctggtgaaatgaagcatggcccactagctcttattgaagaaggaatgcctgttgtggttttagctccaagagatgaacattacaaaaaaacaatttcaaatatgcaagaggtaattgctagaggtgcaaaagttttattaataactaacaataataaagatgaagtaatctcagaaaatatttgggaaaagattgaagtggatcagcttgatgatgaattaataccttttttaatgactatccctcttcaaaaactagccttttattcagctttggaaaaaggatatgatatagataaacctagaaatttagcaaaatctgtcactgttgaataat

SEQ ID NO: 247006 - DNA, 1198 bp, Unknown
  Bacterial polypeptide expressing nucleotide sequence isolated from the Sargasso Sea
agatattgttgtattaaatagagaaaatgttgaaatctataattcattaggggatcgagccaatagagaatttgttgacataggcattatggatacagaagtcagcaagggatcatacaatcattttatggaaaaagagattcatgagcatcctaaggcggttggtgaaacatttagacaatttattgatcatgatcagggtataatttcagttgatgatataaaactaaatttcagtgatatttcaaaggtacatttaattgcttgtggcacagcatactactcttgcttggttgcaaaatattactttgaacaatatgcaagactaccagtagagtgcgatatggcatctgagtttagataccgcgatcctgttcttaataataaggcattatatatatttgtttctcaatcaggtgagacagctgacacaaaagcagcattagattattgcaaagatgccaaggttagaacactcagtattgtaaatgttatgaacagctcaatcgcgagagaaagtgattactgtttatatacgaaagcaggcgcagaaattggtgttgcttcaacaaaggcatttacggcacaattatcagttctgttgtcaatggcactgcattgtggcaccaagaataacaatgttacaattgagcagaatagagagatttgcaaagaaattatgcaggctccacaaattctagagaaggcaataaaaagatcttatgaattaaaagagactgcgaaagcgattatagattcaaaaggtgtaatgtatttaggaagagggacagcctttcctctagctctagaaggtgcactcaaatttaaagaaatttcatacattcatgcagaaggatatccagctggagagatgaaacatggcccacttgccttgattgagaaagatttaccagtagtatgtattgttccaccaggccctctattccataaaacagtatccaatattcaagaggtcattgctcgaggtggcagaatattaatgattacagatgatgaaagccttgagtccagttcagaaaatatatggaagatttttagattaccaaaaacaccaaaatctatcgaagctatagtgtattctgttccaatacacatgttggcgtattatacagctgttgaactaggcaatgatgtagatcaaccccgcaatcttgctaaatcagttacagttgaatag

SEQ ID NO: 247007 - DNA, 1828 bp, Unknown
  Bacterial polypeptide expressing nucleotide sequence isolated from the Sargasso Sea
atgtgtgggattatagcggctgcttccaatagaaatgtaggaaaacttcttgttaaagggcttcataaaatggagtatcgcgggtatgattctgccggaatagcgcttcatcaagatagccaaatagctcatttaagaactttaggaaaagttaagctcctagaagaaaagatgatttctgaaaagccaaaaagtaaacttggcattgcgcataccagatgggctacccatggcgaaccatcagaagaaaacgcacatccccataaatcaaatgaaagggtatatattgttcataatggaattattgaaaactacttagacttaaaagactttttaaaaaaagaaggctatagtttttcttctcaaacagattcagaattaattgctcatatgcttgaatatttcttaggcaaaggcaactcaatgctagattctatgtacctcacaaaagaaaaacttgatggcgcatatgctattgcagcaatagataaagaggactcaaaaaatataatcgttgcaagaaacaagtctcccttattaattggaattggggttgatgaatttctagctgcctctgatccactcgcaatatctctttggacaaatgagtttatttttttagaagatggtgatgttgctgaactttcatcagaagaatacaaaatttatgatgaatctaaaaaagaagttcaaagagagatctctcagattgatatttcaactcaggcaacctctaaaggcgattacaaacatttcatggagaaagaaatatatgaacaacccgatgctattttaaatactattgatggcagagtaggcggtgatgacgttctcgataatatttttggcatagggtcatctaaaatatttgaaaaagtaaaaagaattcaaatcgttgcatgcggaactagtcttcatgctggaagggttgcagcaaattggctttctgcaattgcggagctacctgctcaaatagactatgcttcggaatatagatatagaaatccacatgttgatgaagattctttattggtaacaatatctcagtcgggcgaaacagcagataccctagctgcattgaggtacgccaaagaaaaggattatttatctacactaacaatatgtaatgtaccaaccagctctttagcaagggagtctgattattctatctttacaaatgctggaccggaaataggcgttgcttctactaaagcatttacaactcaactcgcagctttaatgctgcttgctttagcgttagcaaaaagcaggaataagaatcccaaattaagaacgcgcgttattacaggaatgcgttctttatcagacaccgtaaatgaaactttaaaactaaaagacgagattcttaaaatagcccctgaaatagcaagtaaagataatgccttatttttaggaaggggtattttttatcctattgcaaaagagggcgctcttaaactaaaagaaatttcttatattcatgctgaagcatatcctgcaggtgagctgaaacatggacctttggcgttaattgatgaagaaatgccagtaattgcactagcaccagaaagcgaaatagctgagaagttggtttcaaatctcgaagaagttaaagcaagaggtggcactatatatgtttttgccgacccttcaataaccatggatttaaaatcaggaaagctgattaaaatgcctaaatgtgattttcttttaactccaattatttataccattcctcttcaaattctttcatatgaagttgcaattttaagaggcacagatattgaccagccaaggaatcttgcaaagtcagtcacggtggagtaga

SEQ ID NO: 247008 - DNA, 1798 bp, Unknown
  Bacterial polypeptide expressing nucleotide sequence isolated from the Sargasso Sea
aatgtgtggaattgtagggtattcaggccctaaagaacctttaccaatcttaatcaatggtctctctcgtttggaatatcgaggatatgattcagcaggaatagcaatttctgatggaagcaaaataacgattgaaaaaaaagagggtaaactcgatgtcttaaaagaacatttagaaaataagcaaattttaggaaatatagggattggtcatacaagatgggcaactcatggagtaccgaatgatgtgaatgcacacccacattcagacaacaatgatgaatttgcaatcattcacaatggcattattgagaattatgcagaaatcaagaaagatcttataaacgatggatttaaatttaattcagacactgacacggaagtcgtagctgtagagttaagcagaaaatggaatggaaatcttttaaaaacagtggtgaatgtagcaaaaacacttgagggaacatatgcccttgttgtaactacaactaaagaagagggcactattgttgcaggaagattaatgagtcctctagtccttggagttggtgataatgaggtttttctagcatctgattcagcagcaatcttggaacatacaaagaaaatgatatttcttgaaaatggtgattttgtagaaattaaaaatggtaaatataagttgttcgattctgaattaaatgaaatccagagagaaattcaagaaatcgattgggaggtatctgaagcagagaagtcagggtatgaccattttatgtataaagaaatccttgaacaatctgaggtaatcgaaagaactttatctggaaggcttgaagcatcctcagatgaaataccaattaagttagatgaggcttcaaaatttgaaaaaatttggattgttgcatgcggaacagcctatcatgccggtttgtttgggaaagacctatttgagaaagttcttggagttccggtaagtgttgagcttgcttcagagttcagatatagagaaccaatcgttggaaaaaacgatttaggtattgtaatttcccagtccggagaaactatggacactattgctgctacagaattattaaaggaaaatggttcacatgttcttgctttagtaaatgtggttggtagttcactagcaagaatggctgatagtgtattttatttacatgtaggtccagagataggcgtagcttctaccaaagcttatttaggtatgcttgtttctcagcttgttatagcaaaacactgggacgctgaaaataagttagatgtctcatttgatgaaattgcagaactcccaaagctaatagaccacaccatggcttgtgaagggcaaataaaagaaatatctgaaaaaatctataaaaagaatgatatctattttattggtcgaggattggattatgctttggcagctgaaggtgctttaaaattaaaagaaatttcctatctgcatgctgaggcattagcagcaggagagcttaaacacggtacgctagctttaatagaaaaaggaacccctgtaatagttactgccagtcaaaatcatctacttgataagacaaccagtaatgtacaagaggttattgctaggggagcatatgtaattgctattggagatagtgagtcagaaaaacttgaaaatatatcagatgattatgtcactctaccagatagtaatgaaatactaactactgtgatctcgattatacctctacaatttattgcttatcacgtagctaacaagaatggccaatcgattgatcaaccaagaaaccttgcaaagtcagttactgtagaataa

SEQ ID NO: 247009 - DNA, 527 bp, Unknown
  Bacterial polypeptide expressing nucleotide sequence isolated from the Sargasso Sea
tattacaggcttaagatctttgccagatacaattgaagaaaccctaaaattaaaagactccattttagaaatcgctccagaaatcgctaacaaagataatgcattattcctgggcagagggattttttatccgattgcaaaagaaggagccttaaaattaaaagaaatttcatatatccatgctgaagcatatccggcaggtgagttaaaacatggaccattagcattaattgatgaggaaatgccagtaattgctttagcgccagagagtgaaatagcagaaaagcttgtttctaacttggaggaagttaaagcaagaggtggaactatttatgtgtttgctgatccatcaataacaatggatttaaaatcaggtaaactaatcaatatgccaaaatgcgattttcttcttacaccaattatttatacaattcctcttcagatactttcctatgaagttgctttgttaagaggaactgatattgatcaaccgagaaacttagcgaaatcagtcacggtagagtagt

SEQ ID NO: 247010 - DNA, 706 bp, Unknown
  Bacterial polypeptide expressing nucleotide sequence isolated from the Sargasso Sea
tcttctatgtgtagaaactcagattcatcacttaaaatttttgctggacctgagataggtgttgcatcgaccaaggcatttacctgccaacttgttgttttagcatctttagctattcatattggaaggattaatggcaacctatcagatgatgatgaaaataattatgtaaaatcattacttgatattccaagattaatttctaatgttttggatcaggaagaagaccttattaaaattgtaaaagaactaaatccaattaaaaatgctttatatcttggaagagggcagatgtatcctgttgctcttgagggggcattaaaactaaaggaaatttcttatattcatgcggagggttatcctgctggtgaaatgaagcatggtccaatagctcttttggaaaagggtcttcctgtaataattggtgcaccatcatttaacttatttgataaaacagcatctaatctttatgaagttatcgcaagagatggaaatgttttacttataactgatcaagaaggcttaaatcaacttggagataccacaaaaaaaataaaatcatttattgttgatgaggctaatattattactgcaccatttatttatactattccttaccaactttttgcatatcatacagctcttcttaaaggaactgatgttgatcaaccaaggaatttagctaaatcagtaactgtggagtaat

SEQ ID NO: 247011 - DNA, 1018 bp, Unknown
  Bacterial polypeptide expressing nucleotide sequence isolated from the Sargasso Sea
ctgagaaggcttgaatatagaggatatgactcgtcaggtattgcaaccattaacaatgaccagataaattgcataaagtcacaaggtaatttagatcagcttcagaaaaaattaatcaatgaagatttattaggtaatgttgggataggtcataccagatgggctactcatggagttcctaatgaagctaatgctcatcctcatataactgatgaagttgcagttgttcataatggtattattgagaatttttctttacttaaaaatcaaatttctgaaacaggtataaactttaaaagtgaaactgatacagaagcaattgcacaccttattactctttatttaaaatcagggatgggaagttatgaggctataagagctacaaccgaagatattaaagggtcttatgcattagcaattatagtaagatcagaaccaaataaattatatgctgtcagaaaaggaagccctcttgctattggatcatcagatagtaaaaattatattggatcagatggttattctttaggtaattattgtaatgaagttacctatttaaaagatggagacatcgcaatcataaaaaatgacgcttttgagatatttgatcatcaaaatgaatttataaatagaaaatctcaaataatagataagaccgttaccttagcagaaaaaggtgcatttaaacactttatgtcaaaagaaattcatgaacagccgagtgttattcaggattctattagtcattatattaataacgaagatttaacagtgaatttaccaaaattcccatttaatattactaatttaaaaaatatcactttagttgcatgcggaagctcatattattctggattagttgcccgtgaatggtttgagaaacttgctcgcgtgaaggttgatgttgaaattgcttctgagtttaggtatcgagaagctccgatggattcaagcggactaactgtatttatttctcaatcaggtgaaacagctgatactttagcagccttgaaacatt

SEQ ID NO: 247012 - DNA, 1087 bp, Unknown
  Bacterial polypeptide expressing nucleotide sequence isolated from the Sargasso Sea
atgtgtggtatttttggtgttatagcaaataacgataatgtaaaagatcaaattttcgatggactaagaagacttgaatatagaggatatgactcttcaggtattgcaaccattaacaatgatcagatcaattgcataaagtcacaaggcaatttagatcagcttcaaaaaaaattaattaatgaagagttattaggtaatgttgggataggtcataccagatgggctactcatggagttcctaacgaagctaatgctcatcctcatataactgatgaagttgcagttgttcataatggtattattgaaaatttttctatacttaaaaatcagatttctgaaacaggtataaactttaagagtgaaactgatacagaagcaattgcacaccttattactctttatataaaatcagggatgggaagttatgaggctataagagctacaactgaagatattaaaggatcttatgcattagcaattatagtaagatcagaaccaaataaattatatgctgtcagaaaaggaagccctcttgctattggatcatcagatagtaaaaattatattgggtcagatggttattctttaggtaattattgtaatgaagttacctatttaaaagatggagacatcgcaataataaaaaatgacacttttgagatatttgataatcaaaatgaatttataaatagaaaatctcaaataatagataagaccgttaccttagcagaaaaaggtgtatttaagcactttatgtcaaaagaaattcatgaacagccgagtgttattcaagattctattagtcattatattaataacgaagatttaacagtgaatttaccaaaattcccatttaatattactaatttaaaaaatatcactttagttgcatgcggaagttcatattattctggattagttgcccgtgaatggtttgagaaacttgctcgcgtgaaggttgatgttgaaattgcttctgagtttaggtatcgagaagctccgatggattcaagcggactaaccgtatttatttctcagtcaggtgaaacagctgatactttggcagcgttgaagcattgtaaaa

SEQ ID NO: 247013 - DNA, 982 bp, Unknown
  Bacterial polypeptide expressing nucleotide sequence isolated from the Sargasso Sea
atgtgcggaatagtcgggtactcaggcccaaaagagcctcttccaatattaattggtggcttgtcacgattagaatatcgaggttatgattcagctggtatagctgtgtctgacggatcagatataactattgaaaaaaaagaaggtaaattagatgttcttaaagaacatttagctgataaaaaaattaaaggaaatataggaattggtcatacaaggtgggcaactcatggtgttcctaacgatgtgaatgctcatcctcattcagacaacagtgaagactttgcaatcatccacaatggaataattgaaaattatgcagagatgaaagacagtcttttaaaagaaaattattcatttaaatcagatactgacacagaggtagtagctgtcgaattaagtaaacaatggaatggtaatttattagagacagtagttaaagttacaaaagatttagaaggaacatatgcattagttgtaacaactactaagcaggaaaatacaattgttgcaggtaggatgatgagccccctagttttaggagtaggagagggagaagtattcttagcttcagactcagctgcaattcttgagcatacaaataagatgattttcttagagaatggtgattttgtagaaatacatgatggaaattataaattatttgatgctgatctaaatgacattgaaagagaagtccaaataattgattgggaagtttcagaagcagaaaaatctggacatgatcactttatgtataaagaaattttagaacaaggtgaagttattgaaagaacaatcacaggaagacttgaagaaggttcccctgagataccaataactaaagagaaagcacaaaaatatgagaaaatttggattgttgcatgtggaactgcttatcatgctggactatttggaaaagatttgttcgaaaaagttttaggagttccagtaagcgtagagcttgcttccgaatttagat

SEQ ID NO: 247014 - DNA, 1051 bp, Unknown
  Bacterial polypeptide expressing nucleotide sequence isolated from the Sargasso Sea
atgtgtggtattgttagttatttaggtaaatctgattcagtccctattttattaaaaggtcttgaacgtttagaatacagaggatatgactcagcagggttggctttaattgatggtgataaccttagttgtataaaacaatctggaaaagtatctgagctaaattcaaaaatagaaaaaatatcaattaaagggagttacggtatagcgcatactcgttgggcaacccatggccctcccaatgatactaatgctcatcctcatttagatcaaacagggaaaattgcattagtacacaatggtatcattgaaaattatagttcaataaaaatgacattggaaggtagaggtataaaatttactagtgatacagatacagaagttcttgtacagctaatatctgaattatattacaataatgataaaaaagttagttttgaaaatgctgtaaaagcagccctccaagaggttgtaggtgcatatggtattgtagcaatatgcgttgatgaaccaggcaaaatggtagctgctcgtatgggtagccctttagttttaggtgttggtgatggcgaataccttttagcaagtgatgcatctccaattattaattatacaaggaacgtaatctatttagaggatgatgagtttgtaaaaattgatcattcaggatatgagatttcaaatatcaattcggcggatgtaattactaaaaccctaacaaagatcgatcttacaattgaagaaattgaaaagggagagtttccgcacttcatgctaaaagaaattcatgatcaaaaacattcgattagcgatacaatgcgaggaagactaaatcttgataatggaacatctaatctaggaggtatagcagaatttcttcctaatattttatctgcatctagaatatatatcactgcatgcggaacatcatggcacgctggtctcattggtaaacatctgatagaagaatatgcaaaagtaccagtacatgtagagtatgcttctgaatttcgatatcgtaatgcaatcatagatgctaatactatcctta

SEQ ID NO: 247015 - DNA, 835 bp, Unknown
  Bacterial polypeptide expressing nucleotide sequence isolated from the Sargasso Sea
atggagtatcggggctatgactctgccgggatcgcgcttcatcagaataatcaaatagcccatttaagaaccctaggaaaagttaaattactagaagaaaagatgatctccgaaaagccaaaaagtaagctagggattgctcatactagatgggcaactcatggagagccatcagaagaaaacgctcatcctcataaatcaaatgaaagagtctatattgttcacaatggaattattgaaaactatcttgatttaaaagaatttttaaaaaaggagggctataacttttcttctcaaacagactcagaattaatagcccatatgcttgagtattttttagctaaaggtaattcaatgatagattcgatgtatttaactaaagaaaagcttgatggtgcctatgcaattgcagcaatagataaagaagattacaaaaatataattatcgctagaaacaaatcaccactattaattggaataggaactgatgagtttttagctgcatcagatcctcttgctatagcacagctgacaaatgaatttattttcttagaagatggggatgtggccgagctctcatctgaagaatttacaatctatgatcagtcaaaaaataaagtcgaaagagagatttctcaaattgacatttccagtcaggcaacatctaaaggcgaatacaaacatttcatggaaaaagaaatatatgaacagcctgatgcaattctaaatactatcgatggtagagtcggtggcgatgatgtactagataatatctttggtataggttcatctgaaatatttgaaaaagtaaaaagaatccaaattgttgcttgtg

SEQ ID NO: 247016 - DNA, 1346 bp, Unknown
  Bacterial polypeptide expressing nucleotide sequence isolated from the Sargasso Sea
aatgtgtggaattattggtattgcaagcaataaacccgtttcaattaatattatcaattctctaaaaaaattagaatatagagggtatgactctgcaggattggcgaccttagataataacttaatagatgaaaaaaaatgctctggaagggttgatgaacttgagaaaattttatttaagaatccctcaaacggaaatattggaataggtcatgtaagatgggctactcatggagttcctaatattattaatgcacatcctcactcatcagaagaagtttctgtagttcataatggaataattgaaaattcagatgaattaaagaaagatttagaagctcaaggttttaagtttaaatcacaaactgatactgaagttattactgttctagtaacccagtttttagaaaattcaaaacctgtagaatcagtgtttaaaacattaaaaaaattaaagggtagttttgcattaggtatcatatttaaaaacttttcaaatatcattattggagcaaggagaggaagccctctagctgttggttattctaaagaagaaaattacttaggttcagattcttacgctttgaaatctatgacaaataaaatttcttatttagatgatggtgaattatgtatccttgataaagataatgttgagttttacgatgtaaatcaaaaaaagataaataaaaaaattcacaccctatcagatgatgaaaatatttctgataaaggagactataaaaactttatgtctaaagaaatttttgaacaatctacaacaattaaaaaatgtttaaacgaatatactgatagtttgaaaaaagatataaatatttacaacttcccaattgaccctaaaaagataaataaaataattctaataggatgtggtacagcttaccattcatgtttagttgcaaaatattggtttgaagaactaacttctttagatgttgaaatcgatatagcttcagaatttagatatagaaatttaaaatttaattctagcaatctatatatttttgtttctcaatctggtgaaactgcagatacagcagccgcattagatatatgtaaaaaaaataatgtaaaaacttgctcaattgtgaatgttgtagaaagcactattgcaagaaattgtgattgggtattacctattcatgctggtccagaaataggagtagcttctacaaaagcttttcttggacaactaatagtcttatatattcttaatttaaaactagcttttacaagaggagatattgataaaaaaatttacgatagcaatctacagaatttacaaaggcttccagaagctattgatagtactttaaaacttgaga

SEQ ID NO: 247017 - DNA, 1834 bp, Unknown
  Bacterial polypeptide expressing nucleotide sequence isolated from the Sargasso Sea
atgtgtggaattgttggtgcaataagcaatagaaatgtagacggaatcctcatggaaggtctaagaaggcttgaatacagaggatatgactcagcggggctcgccgttattacaaagaataatattgaaagattgcgccgagctggaaaagtattgaagctgcaggaagctctcgataacagcaaaattgagggacaagtaggaatttctcatactcgatgggcgacgcatggggttccgtcagaaaaaaatgcacaccctcacatttcagatccagactttgcgattgtacataatggaattattgaaaattatctccaaattaaagataagcttcttgttcaaggttacacatttacatcagatacagatactgaagtggtcgttcataggattcacagtcatttcgatcaacaaaaaaatcttctcaagtctttcagaaaaactgtcaaagagttagaaggtgcctttgctcttgctgtaatcagcactcacgagcctgataaaattattgttgcaaggtctggctgccctgtcgtgattggtattggcaaaagtgaaaattttattgcatctgatatcgccgcgttgttacctgaaacaaatcagtttatgttcttagaagagggcgatatcgcagttgttgggaaaaatacaatacaaatttttgacaaagaagatgttgaagttacaaggaaaatctcacaaagccgattatcgtcagacgcagctgaaaaaggtagttttgatcacttcatgctcaaagaaatttatgaacaatcaagtgctgttggaaatactctggaccagagaatagccgaggggcgagttttacagaatgccttcggccctgatgcagaaactgtttttgacaaagctcgaagtgttcacatcgttgcatgtggaaccagttatcatgctggattaattgcaaagtattggatagaaagcatatgccaaataccatgcagagttgaaattgccagtgaataccgatatagaaatccagtggtgatggaggacacattattcattgctataagtcaatctggtgaaacagcagatacattggctgcactaagggcagcaaaagaagctaaatacatatctacgcttgtcatttgtaatgtcccagaaagtacaatggttagagaagccgagttggtaatgctgacaaaagctggtccggaaattggtgtggcatcaaccaaagcattcacaactcaattaactgcactatctctcttaactattgtaattgcgaggcgttctggcttagatcaaaagagtgaaaaagagatggttaatcaattgttagagctgccaactctgattgatcaaattcttgcattagatgaggacattaaggagctcgcaaagaatttttcaaataaacatcacgctcttttcttgggaagaggaatacaaaatccggtagcaatggaaggggccctgaaattaaaagaaatatcttatattcatgctgaggcctatgcggctggtgaacttaaacatggacctctcgcattagttgacgaggatatgcctgttgtagcggtagcaccagatgacagattactagaaaaactcaaaagtaacttgcaagaagttaaagcaaggggcggagagttatatgtttttactgatccaagggttacatttgttgatgatgaagtcactcataacagtgtcatgcccgttgcaataaaagaatttcaaggtcctattctatattccataccattacaacttcttgcttatcatgttgctgttattaagggcactgatattgatcaaccaagaaatttagctaaatcagtgacggtcgagtagt

SEQ ID NO: 247018 - DNA, 1219 bp, Unknown
  Bacterial polypeptide expressing nucleotide sequence isolated from the Sargasso Sea
ttcaatactaatttacaaggtgaaattggaataggacatgtaagatgggcaacccatggaaagcccagcactgtaaatgctcatcctcattcatctgaagcagtttcagtagttcataatggaattatagaaaattcaacaattttaaaaaaagtattagaaaaaaaaggatataagtttaaatctcaaacagatactgaagtaatagcacatttagttactgactatttaaaaaaaaataatttaaaaaatacaatcactaaagttttgaaaaaattacatggaagctttgctcttggaattatattcaaagattatcctgatttaattgtaggtgcacgtagagggtcaccgctagctgttgggtatggtccaaatgaaaattaccttggttcagattcacacgctttaaaatctatgacaaataaagtttcctatcttaatgatggagaattttgtttgattaaagaaaatcaggttgagttttttgatacaaaagggaagaaagtaaataaaaaaatattaaatctatctcaagacaatcaaagttatgaaaaaggtgattataagcattttatggcaaaagaaatagatgaacagccaacaacaataaaaaattgtgttaatgaatatgttgataaaatcaataaacaaataaatatttacaattttccttggaaaatagatcaaataaaatcgattattttaattggatgtggaacagcttaccattcttgtttggtagccaaatattggtttgaagaatacacatctttagatgtgaccatagatattgcttctgagtttagatatagaaaacttaaatttaaaactgattgtttatatgtttttgtatctcaatcaggtgaaactgcagatacttacgctgctttagatatatgcaaaaaaaataaaatgaaaacatgttcaatagtaaatgttgttgaaagttcaatagctagagattcagaccttgttttaccaatacattgcggtcccgaaataggtgttgcttctaccaaagcttttttaggacaaatgttagttttatatatgctatgtttaaaattatcttttgatcaaaaaataactatcaaaaaaaaatatcaagaaaaaataaaaaatttactttcattatctaatttatgtaaaaaaactttattaactgatagcaagatacaaaaaacaagcaaagctttcattgaagcgaaaggatcaa

SEQ ID NO: 247019 - DNA, 1636 bp, Unknown
  Bacterial polypeptide expressing nucleotide sequence isolated from the Sargasso Sea
gatgactggaaatctaggcattgcctataccagatgggcaacgcatggcggagtcacgacggaaaatgctcacccccatctctcccaaaatggtgagtttgccatcgttcataacggcatcatttcaaactatcagaaactgagagaacgacttatcggggaaggactccaattcagatcaactacagacaccgaagttttcgtcaacctggttgaggaagcctttgcccagaaaaatgatgttttaggggcattcctggaagcattgaaacaaattcagggaacctattccatcgtcttgctgtcttcgcatgatccagaacatctttactgtgttaaacaagactctccgctgatcatagggctgggagaaggttgtaattacatcggctctgacattaatgcttttcttgagcacacccgaaaagcagtggttttggatgatggggaatttgcggtcatcagcagggagcgatatgagatttcggatgtcgggaagcgagaagaaagggaaaaatcgattctccagattgattgggatacagagaccacaaaaaaaggtggtttttcccactacatgattaaggaaatttttgacgaaccccaaactgcacggcaggctttggacgttcctcaagagcagatcaaacagttggctgagatgtttcaaaatgcccctcgtgcctacctaatgggggttggaacgacttttttcatctgccaaatggcccaataccttttcagttcactttccaaaagatattttcctgccatcagttctgatgaattcaacggtgttgttccagtgagttcagaagaacttgttgtggcggtttctcaatccggggagacttttgataccaagttttcactcaacattgcacatgaaatgggcgccaagacagcagccattgtaaatgtgatgggttcaagcatcagtcgcatggtcgatcatgtgatcatgcagggatccggtcctgagatttgtgtggtttctaccaaggccgcccttgctcaggcgttgcttctactgcggacagcccttgaactgggctacagtgaaggctgtcttgattcgaagtccttccagagtcatcaaaaggagttggaaagttttccggagttgatttcaattcttctcaatgagaaatccggttttatgagaaacctggcacgcatcaccagcagtgtccaaaattggatttttttagggtgcggaatctattatcccgttgccatggaatctgctttgaaaatgaaggaagtgacctatctccatgctgagggcatgcctgccggatttttgaagcatggtacgctttccatgattgaagaatcggtccactcgctattctttgttccgcctcctgctgaagtagatctccacaatcgtaccataattgctatagaagaaatcaaaacccggtgtggtacgctggttgggctttattttgaaggagattcccaggcgaagtcccttctggatcatgctgtcgaacttcccccggtcccctctttgattgctcccttagttcaaatgattctggctcagatgtttgcctattacactgccctcgatctaaaacgcaacatcgacaagcccaggaatctcgccaaatccgtcacggtaggttga

SEQ ID NO: 247020 - DNA, 871 bp, Unknown
  Bacterial polypeptide expressing nucleotide sequence isolated from the Sargasso Sea
tgatgtctatatagatattgcatcagagtttaggtatagaaaaaatagatttaaagaagatactctatatatatttgtctctcaatctggagaaacagcagatacttacgcagcactagatctttgtaacaaaaataatatgaaaacttgtgctgtagtaaatgtaattgaaagttcgattgcaagagatgcaaattttatattaccaattcattgcggcccagaaattggtgttgcatctacaaaagcttttttaggtcaaatactaattttatatattttagctttaaaacttgggtctttgagaaatgaaattaataaagaaaattatagagaaaagattaaagacttgcagaagttgccaagtttaattgaaaaatctttaataatagataatgatattcaggctatatcctcaaccttcaatgaagcaaaaggatcgatgtttttaggaagaggtttatcataccctatagcacttgaaggtgctttaaaattaaaagaattatcttatgttcatgcagagggttatccagcaggagaaatgaaacatggtccattggccttgatagaggatggaatgcctgttgtagtgttggctccaagagataggtattataagaaaactatttcaaatatgcaggaagtaatagctcgaggagcaaaagttttattaattactaataagagtaaagatgaaattgtttctgaaaatatttgggaaactattgaagttgaaaatactaatgatgacttattgccattccttttaactattcctcttcaaaaactggcttattactcagctttaaaaaaaggttatgacattgataagcctagaaatttggcaaaatctgtcactgttgaataa

SEQ ID NO: 247021 - DNA, 1028 bp, Unknown
  Bacterial polypeptide expressing nucleotide sequence isolated from the Sargasso Sea
tattaatggcaggcttggtgaaaatgatgttttagataacgtatttggattagggtcttcagactctttcaaaaatgtaaagagaattcaatttgtagcctgtggaacaagccttcatgctgcgaagacagcaagaaagtggtttgaagatatatgcgaaatcccttgctatatagactttgcaagcgaatataggtataggaatccaatagttgaagacaacacactttttgtaacaatctcgcaatcaggagaaaccgcagatactctcgctgcacttaactacgctaaggaagaaaaatatttagggatagtttcaatatgcaatgtacctaccagctcaatggcaagagaatcagattggaaagttttcacaaatgcgggcccagaaataggagtagcttcaacaaaagcatttacaacccagctcgcagctttactaatattagctctctcaattgcaaaaagtcaggataaaaatccagaaaaacgcaaacaagcagctcaagacttacgagaaactcctgctctcatttcagaagcctttaaattaaaagaagaaataaactcaatcactaacaatatttcatcaaatgacaacgcattattcttaggaagaggtatgtatttttctattgctcaagagggcgccttgaaattaaaagaaatatcttacattcatgcagaggcctacccagcaggagagctaaagcatgggccgctagcattggttgatgaaactattccggttatagctctggcacctgaagatagtctagttgaaaagcttttatcaaacctggaggaggttaaagctagaggtggaactttgtatgtttttggaaatgcaagatcaacaattgaaataaaaaaaggaaagtttatcaatatgcctgagtgcggcgactacaatgcaccaattgtctatactattccactccaaatacttgcttatgaagtggcctgcctaaggggcacagacttagatcagcctaggaatttggcaaagtcagtcacagtggaataag

SEQ ID NO: 247022 - DNA, 1505 bp, Unknown
  Bacterial polypeptide expressing nucleotide sequence isolated from the Sargasso Sea
attgaaaagattagagtatagaggatatgattcagctggtattgcttgtattaattcaaatgacaaattcgtagttacaaaacgtaagggtaaagtaagtgaacttaaatcagcattatctaattcagaaatttataatttaggaatagcccatacaagatgggctactcatggtaagcctaatcagttaaatgctcatccgcatcttgatcaatctaaaaaaattgctctagttcataatggtatcattgagaactatgacccaattaaaaaatttcttttatcaaaaaaaataaaatttaaatctgaaactgatactgaggttttagttcaattaatcggatatttttacaacaatggaaagatgaattttgaacaatcagtccgagcagctttacaaagggttgatggtgcatatggaattgtaattctgaataccgattatccagatatgatgatagcggctagaaaaggaagtccactagttttaggaatcaaggagaatgaattttttatagcaagtgatatttcaccaattgtgaagcatactaaagatattatttacttaaaagattcagaaatggcagtaatcaataaaaaaaactttaaaataaaatctgtaaacaaggatatttcgttaccaaaaaatatagaaaaaattgatttcaaaattgatgattatgacaaaggtgaatttaagtattttatgcataaggaaattcatgagcaaataaatacaatacccaatactattaatggaagaataaaaaatgaatctgttttattgcaaggcttgtcagataattggaatgtcatagagtcggcagaaaaaatttatataactgcttgtggaacatcatggcatgctggacttattggaaaaaattttattgaacgatttgctaatatccctgttcacgttgaatatgcttcggagtttagatataatcatgctttgatagatgataaaactgtcgttattgcaatttctcaatctggagaaacagcagatacattagctgcaattagaaaagcaaataatcacggagcacttacaattggaatatgtaatgtagcaggtagttcagtttcaagagaaaccaaatgtggagtttatacgagatgtggtcatgaagtaggtgttgcatccacaaaagcattcacttctcagattgttgtactatatttattagcccttaagcttgctgaaagtagaaaaacgatttcaaaatcatctttaaaaagacacctagactacaaaaaatcggtaaataaaattaaatctatatttaaacaagaaaatgacattaaaaaaattgcaatgaaatataaaaaatcaaacgattttttatatttaggtagaggattaaattttcctgtggcattggaaggtgctttaaaattaaaggaaatttcatatatccacgcagagggttatccagccgctgaaatgaaacatgggccaattgctttgatcgataaggatatgccaagtgtatttatag

SEQ ID NO: 247023 - DNA, 1162 bp, Unknown
  Bacterial polypeptide expressing nucleotide sequence isolated from the Sargasso Sea
atgtgtggaatcattggcgcagcctcctctagaagcgttggaaaaatcttagtcaacgggctgaagaaaatggagtatcgcggctatgactcagcagggctcattttgaatcaggatgaagcagcatttcagctaagaactcttggcaaggtttcaaacctcgaagacgcaatgattgagcaaaggcctaaagctgattctggcatagcgcacacaagatgggcaacacatggaattccatcggagaaaaatgcacacccccatggatccaagggaaaaatctatattgttcacaatggaatcattgaaaaccacgatgagctgagagaaaggcttgtaaatgaaggttatgagattcagtcagaaaccgattcagaattgattgctcatttgatccatttcaataaagaaaaaggcaaaaatacactatcggcacttatcgaaacaacaaaagagcttgatggcgcatactcaattgctgtcattgacactgaacaaaaagggaaaatatttgcagccaaacaaaaaagcccgcttttggttggaaaaggggtagaggaaaattttatcgcctctgatccgctcgcaatagccggccttgctgaatctttttatctgcttgaagacggcgactttgcagaaatttccaaagaagaaattaaaattgttggcagcaatggcgagtcggtttcaagagaagagaccataatagacacaagcgtgaaagaagcctcgaaagacggctataagcatttcatggaaaaagaaatatatgagcagccgcaagcaatagcaaatgcaatcgaaggaaggactgcagatggagaggttttagacaatatatttggattgggttcgtcagatgcattcaaggatgtcaaaagaattcagtttgtagcctgtggcacaagcctgcatgcagctaaaaccgccagaaaatggtttgaagaactctgtgagacaccatgttatatagattttgctagcgaatacaggtatcgaaacccgcttgttgaggatgatactttatttgtatgtatatcacagtcaggagaaactgccgacaccatggcagcgcttaattacgcaaaagatgagaaatatttaggtattgtcacgatttataatgttccaacgagtaccatggcccagagaatctgat

SEQ ID NO: 247024 - DNA, 918 bp, Unknown
  Bacterial polypeptide expressing nucleotide sequence isolated from the Sargasso Sea
tatgtgtggaatagttgctgtaactggatataaaaaagctttaccattattaattgatggtttagaaaaactcgaatacagaggttatgattctgcaggtattgcaataataaattccgaaacaaattgtatttcttgtaataaagcagaaggaaaacttaagaatttaataagtaatcttaatgatcataatattcctggaactgtcggtataggacatactagatgggcaactcatggaaaacctgaagttaaaaatgcacatcctcacactgatagttcaggaaatatagcagttgttcaaaatggcattattgaaaattttcaagatttaaaaaataaattagaggaagagggcattatttttaattctgatacagataccgaggtaattccccatctaattcaaagagagttaaataatttaagtaaacttaatcttgagaataatggttcaacattattagtagctgtgagaaatgtattatcggatttagaaggatcttatgctttagcagttttatggtctggtgctccaacctctttggtagttgcaagaagacaagcacccttgattattggtttgggtgaaggagaatttatttgtgctagtgatactccagcaattgcaaactttacgaatattattttgcctatggaggatgaagaaatagctttgttgactccacttggaattgaaatatatgactcaggcaacgagaggcagtatagaaatccagtttctttaaaagtctcagagcaaaaaatagataagatgaatttcaaacactacatgttgaaagagatatatgatcagccacagactgcaaaaaactggttggaaaattatttaattaagaactcagataatgatcaatatcaaattaaatatccatttgatacaaagttttttgaatc

SEQ ID NO: 247025 - DNA, 1828 bp, Unknown
  Bacterial polypeptide expressing nucleotide sequence isolated from the Sargasso Sea
aatgtgcggcattgttggaggaacttcgaatagaaatattcttcctattcttgtcgaagggctaagaagactagagtacagaggatacgactccgcaggagtagcctataaagctaatggaaaaatttctctggtaaaaaatgcaggcagagtcgaagaacttgctgaaaaactaaatttaaaaaagaataatacaaaaataggaattgcacatactagatgggcaactcatggcattccttcaaaaaaaaatgcacaccctcacagctctaaaaataatatttatgttgtgcacaacggaattattgaaaatcatatagcgcttaaagaaacactaaaaaaagaaggctttaagttttcatcacaaacagacacagaagttatttctcatttgattcaattttatatggagaaaggaaaagacctcgattcagcagttataagcactatagcaaaactcaaaggagcttatgcacttggcatcctagacaaaaataatcctgatactttaattggcgtaagacaacaaagcccgctcgttattggtgaaggttttgaagaacaatttattgcttctgacattatggctctgtccaacattactaataaattcaaatttatggatgatggacaaatagctgttcttgataaaggacatgtaactgtgacttcttcttctggaatggcagcaaaattaaaaacccaagaagtggactcaaatgcttataccaatgatctaaaaggttacaaccattttatggagaaagaaatatttgaacagtcagatgttatcaaagactctcttgaaggcagactcacaaaaaatgagagccaagagggaatttttggggttggttttgagaaagaaatgaaaaacattacaaacatacaggttgttgcttgcggcacaagctttcatgcaggcagaatatttgaattttggtcgcataagttcttagggataaattgtcgagttgattatggcagtgagtatcaatatcaagaaccaataaaaactgataaaactttattagtaacaatatctcagtcaggcgaaacggcagatacactttcatctttaaagtttgcaaaaaaatcgggcgatccagttactttaaccatttgtaatgttgctaatagctctttatgcagagaatcagactatgctttattaactaaagccggtccggaaattggtgtagcctcaaccaaagcttttgttacccaattagcctgtttaaatctgttgcttttaactttgatgagagtgcacaacaaactaccaacagcaagaaagaaaattaccgcagcactgagggatttgcctaaattaattaataagactttaaaaatgacaggcgaatacaagaaagtggcaaagctactttttaaaagaaacagcgcattatttttgggtcgtggtttatattttcctattgccagagaaggggctcttaagctcaaagaaatatcttacatacatgccgaagcctatccgggcggagaattaaagcatggaccactggcactgatagacaaaaatatgccagtaatagctttagctccagataatgaacacttagataaaattacatcaaacattgaggaagtggcagcccgaaaaggcaaggttattactatagggccactaggcagaacaaaaatagataaaaatggcggccacattaagattcctaagacattggatctgcttaatccgattgtctcagtggtgccaatgcaattaattgcttattacaccgcagtctttaaaggcaccgatgtagataaacctcgtaatttagcaaaaagcgttacggtggagtag

SEQ ID NO: 247026 - DNA, 1819 bp, Unknown
  Bacterial polypeptide expressing nucleotide sequence isolated from the Sargasso Sea
atgtgtgggattgttggcgcggttgcgcaacgtaatatcgttcccgtcctgatcgaagggctgcgtcgcctcgagtatcgcggctacgactcctgcggcgtggccgttctcggcgagagcgggccgcgtcgtgcccgcagcgtcgcgcgcgtcgccgatctggacgcgcaggtgcacgaaagccaccttgaaggcatcacgggcatcgcgcatacgcgctgggcgacgcacggtgcgccggtaaccgacaacgcccatccgattttctcgagagatgcgctcgcgttggtacacaacggcatcatcgaaaattacgaatcactgcgggaaatgctgcggggcaagggttacgagtttgtctcgcagaccgatacagaggttattgcccacctgattcatagcctgtatcgcggcgacctgttcgcgtcggtgcgtgaagccgtcgggcaattgcacggtgcgtacgcgatcgccgtgctgcacaaggaccagccgcatacggtggtcggcgcgcggcaaggctcgccgttggtggtaggactcggcaacggtgagaacttcctcgcttcggatgcactggcgcttgccggcagcaccgaacgcttcatcttcctcgaggaaggcgacgtctgcgaactgtcgctcgagggcgtgcggatcgccgatcgcgacggctacgaggcgcagcgcgaagtgcgtcaggtcgcggcatatggcggcgcggtcgaactcggcccgtaccgtcacttcatgcagaaggaaatcttcgagcagccgcgtgcgattaccgacacgatcccgcaagccgattcgttcgatgcgtcgctcttcggcgaaggtgccgaccaggtgttcgccgagatcgacaacctgctgattctggcctgcggcacgagctactactcggggctgaccgcgaagtactggctcgagtcggtcgcgaagattccgacccaggtggaaattgccagcgagtatcgctaccgcgagtcggtgccgaatccgaagtcgctggtggtggtgatctcgcagtcgggcgaaacggccgacacgctggccgcgctcaagcatgcgcaggcgctgggacataaacatacgctgtcggtgtgcaatgtcggcacgagtgcgatggtgcgtcagacagcgttgtcgttcttgacccatgcgggtcgcgagatcggcgtggcgtccacgaaggcattcacgacgcaactggttgcgctgtttgtgctggccgcaacccttggcaagctgcgtggacaggtgagcgctgagcaggaaaccgagtatctgaaacagttgcgccacttgccggcagcgttgaatagcgtgctggcgctggagccgcagatcatcgcgtggtcggaagagttttcgcgcaaggagcacgcgttgttcctcgggcgcggcctgcattatccgatcgcgctcgagggcgcgctgaagctcaaggagatttcctatatccacgcggaagcgtatccggccggtgagctgaagcacggaccgctggcgctcgtgacggaagcgatgccggtagtgacggtggcgccgaatgacgcgctgctggagaagctgaagtcgaatattcaggaagtacgcgcacgcggtggtgagctttatgtgttcgcggacgcggatacgaagatcgtgaacgacgagggtctgcatgtgatccggatgccggagcactacggtttgctgtcgccgattctgcacgtggtgccgctgcagttgctggcttatcacacggcttgtgcgcgtgggacggatgtggataagccgcggaacctggcgaaatcggtgacggtggagtgag

SEQ ID NO: 247027 - DNA, 1840 bp, Unknown
  Bacterial polypeptide expressing nucleotide sequence isolated from the Sargasso Sea
tatgtgtggaattataggagtagcatcaaacaagccatcagttgataagcttgtaatcggtttattgcgccaagaatatagaggttacgattcagcaggcttagccatttttgatgaatctgaagaaataaaagtttataaaagcaccggcaaggtttctgagctccaaaactctatagaccaaaacccagttaatggcacaacaggcatagcccatacgaggtgggcaacacatggtctgcccacaacagaaaatgctcatccgcatcactcaaacaaagaaatatatgtcattcataatggcataattgaaaatcatcaagagataagaaccacccttagagctttaggttacgtttttgaatcagaaacagatacagaagttattgctcacttgatacacgcaaagatgtctgagggcaacatctcactggttgaatcacttaaggttgccgtgaaagacttaagaggcgcttatgcaattggtgcagtatcttcgaaagaaccaggtcttgtggccgccgcaagaaggggcagtcccttggttgtaggacagggcaacggagaaaactttattgcgtcagatcagcttgcattggctgatttcgcagataactttgtttttttagaagaaggcgacttagctgagataacaccaacgggaacgaaattttggaatgaggacaatgaacaggtagacagacctgtggtggtagcaaaaagtctaggagagacaatagacaaaggcgaatacaggcactttatgcttaaagaaattaaagagcagccagaaaaaataaagagacttttagagggtcagctcacagattcaggagtgcaggcagaaatatttgggccagaagcacctgcaatttttaaaaaagtcgagtccgttcaaatagtggcctgtggaacaagtttccacgccggaactgttgcgaagtattggattgaaggtttagcaggtttgccctgcagtgttgaagtagccagtgaatttagatacagaaataaagttgttgcacccaacaccctttttgtatctatttctcaatctggagaaacagccgacacattggcttgcttaagcgctgcacaaggcgccggatatctagcaaggttgggtatatgtaatgttgctacaagcacgcttaccagaaattcagatttagttttcttaacaaaggctggtccagaaataggtgtcgcctcgaccaaggcgtttaccacacaactagtaggtcttttgatgcttacgttggcacttggcaggcttcacggcctttctgctgcggctgagaacactattagcaatgcattaagagctctacctgagtctctggatttagtaatgcagttagaaaatgaaataatagaaatggcagaagacttcgatcaaaaagaacacgctttgtttttgggaagaggaatccattacccggttgcaatggaaggcgcccttaagcttaaagagatttcttacattcacgcggaggcctatccagcgggagagttaaagcacggacctcttgcgttggttgattcagagatgccggtcgttgctgtagcccctaatgatgatttattagagaaactccaatccaatttagaagaagttaaagcgagaggtggaaagctttatgtttttggtcattctgctgcccacaacaaagactcaacaattgccaggtttattgaattgccttggcagattcctgaattaatcgctccactaatttattctattcccctgcagctacttgcgtaccatgtagccattctcaagggtactgacattgaccagccaagaaacttagccaagtcagtgacggtagagtag

SEQ ID NO: 247028 - DNA, 1033 bp, Unknown
  Bacterial polypeptide expressing nucleotide sequence isolated from the Sargasso Sea
aatgtgcggcattgtaggttatataggcaataaagaccctgtccctattctattgaaagggttgaaacgattagaatatagagggtatgattcttctggaattgctcttcttgaagaagataatctaacccatatcaaaaaagcaggaaaagtttcagatttgcaacagttagttgatgattcttctataaaaggaaattgtggtattgcgcatacacgatgggcgacgcatggagctccaaacgatattaatgcacaccctcatttggaccatactgggagcattgctctagtacataatggaatatttgaaaattatgaaaccattaaacagctgctagtaaatcgagatgttcaatttaccagtgatacagatacggaagttattgttcagctaatttctgaattatactataacaatgatgaaaagcttacttttgaagatgccgtaagagctgcacttcaagagcttgttggtgcttatggaattgttacagtgtgtgctgatgagccaaataaaataatagcggcacgtatgggaagtccacttgttttaggtataggtgaaggagaatattttttggcaagtgatgcatcacccataattgagcataccaggaatgtgatatatttagatgatgatgaatttataataattgataaagcaggatattcaatttcaaacataaaatcaaaaaaaattgttagtaaatcacttacaaaaattgatcttactattgaaaaaattgagaagggtaagttccctcattttatgttaaaggaaattcatgatcaaaaacattctattagcgatacaatgcgagggaggttaaaccttaatgatggaacaacaaatctaggaggtatagtaaattatataccaaatattttatcagcatcaagaatctatattaccgcttgtggaacctcttggcatgctggattaattggcaaacatttaattgaagaatatgcacgagttcctgttcatgtggaatatgcatctgaatttcgatatcggaatgctattatc

SEQ ID NO: 247029 - DNA, 358 bp, Unknown
  Bacterial polypeptide expressing nucleotide sequence isolated from the Sargasso Sea
ttttcatgcagaaggttatccagctggtgaaatgaaacatggtcctttagcattaatagaggagggaatgccagttgtggttttagcgcctagagataattactataaaaaaacaatttcaaacatgcaggaagttattgcaaggggtgcaaaagttttattaataactaataaaagtgatgatgaagtagtatcagaaaatatttgggaaactattgaagttgaaagcactaataaagatcttctaccatttcttttgactataccattgcaaaaacttgcatattattcagcacttaaaaaaggctatgatattgataagccgagaaatttggctaaatctgtcactgttgaataa

SEQ ID NO: 247030 - DNA, 966 bp, Unknown
  Bacterial polypeptide expressing nucleotide sequence isolated from the Sargasso Sea
tatgtgtggtattatagggattaatagtaataaagaagttacatcgacaattttaaactcacttagaaaattagagtatagaggatatgattcagctggtattgcaacattaaatagtggatatattcaagaagttaagtgtgagggaagagtagataatctcgaaaaaaatattattaaaaataaattacttggaaatgtaggcataggccatgttagatgggctactcatggtatacccagcactttaaatgcacaccctcactcatcggacaacgtttcagtagttcataacggtattatagaaaactcaactttattaaaaaaatttttagtaaaaaagggacataaatttaaatctcagacagatacagaggtgattgtacatttaattacagaatatttaaaaaaaaataatttaatagacacattaacaaaagttttaaaaaaacttcatggtagttttgcattaggaataatttttaaagatgaaccagacttaattgttggcgcaagaagaggctcacctttagcagttggttatggtccgggtgaaaattacctaggctcagattcttatgcattaaaatctatgactaataaagtaacttacttagatgatggtgaattttgtattatcaaaaaaactgaagtaagcttctttaatgaacaaggaaaaaaaataaataaaaagatactttcattaacaactgatgaacaaaattatgataaaggtgattacaaacactttatggctaaagagattgacgaacagccactaacaataaaaaattgcataaatgaatatattgataaaaaaaataatgaaataagtatttttaattttccatggaaaataaaagatatatcatcaattacattagtaggttgtgggactgcttatcattcttgtttaattgcaaaatattggtttgaaaaacttacttcttttgatgttcatataga

SEQ ID NO: 247031 - DNA, 1579 bp, Unknown
  Bacterial polypeptide expressing nucleotide sequence isolated from the Sargasso Sea
agtacaaatgcacaccctcattcttctcaaaacgtatcagtcgtccacaacggtataattgaaaactcaacattattgaaaaaatttttattaggcaaaggccataagtttaaatctcaaacagatactgaggtaattgttcatttaataactgaaaatttaaagacagaaaatatcactaactcaattaaaaaaactttaaaagctttgcatggaagttttgctttaggaataatatttaaagacaagccagatttaattgttggtgcaagaagaggctctccattagctgttggttacgggcctaatgaaaattatttaggttctgactcgtatgcactcaaatcaatgaccaacaaaataacttatttaaatgacggggaattttgtgttattaaaaaagatcatgtagagttttttagcgaagatggaactaaaattaataaaaaagttttagagttatcaagtgaagaagaaaaatatgataaaggtgattacaaacactttatggctaaagaaattgaagaacaaccaacaacgttaaaaaatggcattaaagaatatatagacacagcaaacaatgatataaatatttataatattccttggaaaaaaaatgaaatttcttccattactttaattggttgtggaactgcttatcattcctgcttgatggcaaagtattggtttgaagaattaacctcattagatgtaaacatagatattgcatcggagtttagatatagaaaaaatagatttaaaaaagactgtttatatgtttttgtttcacaatcaggagaaaccgctgatacttatgcagcgttagatttgtgtaataaaaatggcatgaaaacttgtgcaattgttaacgttattgaaagctcaatagctagagattctaagtttgttttaccaatacattgtggcaccgaaataggggtcgcttcaacaaaagcatttttaggccaaattcttattttatatattctagcgttaaagttaggcttgcaaagatccgacttaaagaaaaaaatatttatagataaattaaaagatctaagagatttaccaaagttggttgaacaaactttattgttagataataaaatacaaaatatttctagtacttttaatgaggctaaaggctctatgtttttaggaagaggtttttcatttcctatagcattggaaggtgcattaaaattaaaggaattatcctatatacatgctgaaggttatccagctggagagatgaaacacggacctctagctttgattgaagagggtatgccagttgtagtattggcgcctagagataattactataaaaaaacaatttcaaatatgcaggaagtaattgcaagaggtgcaaaagtattattaatcaccaacaaaagctctgatgaaataatttctgaaaatatatgggaaacaattgaggttgaaaagactaatgatgatttattaccttttcttttaaccatcccacttcaaaaacttgcttattattcagcattaaaaaaaggttacgatatagataagcctagaaaccttgctaaatcagtaactgtagaataat

SEQ ID NO: 247032 - DNA, 917 bp, Unknown
  Bacterial polypeptide expressing nucleotide sequence isolated from the Sargasso Sea
tcattcatgccaagttgctaaatattggatagaagaattaacagatttaaacgtagaaactgaggttgcttcagaatttagatatagaaagataagatttaaccctaataccttatatatatttgtgtctcagtctggagaaacagcagatacagcagcagctttagaaatagctaaaaaaaataaaatgaaaacttgttctgttattaatgtggtagaaagctcaatagctaggaattctgattgggtcgtccctattcatgcgggcccagaaataggcgtagcatctacaaaagcttttataggccaaatgttagttttgtatatcatgagtttaaagatatctaaaataagagggaatattgatgataaaaattatattgaaaaaattaaaaatcttaaaaatttacctcaagaaattgagaactcattaaagaccgaggaactaattcaaatatttgctaaagactttttatcagccaaaggatcaatgtttttagggagaggatcatcattccctatagcattagagggagcattaaaattgaaagaattgtcttatcttcacgctgaaggttaccccgctggggaaatgaaacatggtccactagctttgatcgaagatggtttacctgtgattattttggctccaaaagataaatattttgaaaaaactatttctaatatgcaagaagttatagcaagaggtggaaaggttttattaatatcagataaacatgatgaggtaataaatgaaaatataagatttaaaattgaaatgccttttattgatgaacttttaaatccttttttattaaccataccacttcaattattagcttatcatgtggccttactaaaaaaatgtgatatagataaaccaagaaacttggctaaatctgtaactgttgagtaaa

SEQ ID NO: 247033 - DNA, 1831 bp, Unknown
  Bacterial polypeptide expressing nucleotide sequence isolated from the Sargasso Sea
tatgtgtggaattgtcggggcggttgcccagcgggacatcctgccgaacctggtcgacggcctgaagcggctcgaataccgcggctacgattcgtgcggcgtcgtggtctaccgcgaccgggcgctggcgcgcgcccgcagcgtcgaccgcgtggccaacctgcagcgcgagatcgccgaacaggcgctgtcgggctacaccggcatcgcgcacacgcgctgggccacgcacggcgcgcccgtcacgctcaacgcgcatccgcacttctcgccgagcgacgccaatgcgcgcatcgcgctgtcgcacaacgggatcatcgagaactgcgatcaactgcgcgcggaattgcaggcgcatggttacgtgttcgcgagccagaccgacagcgaggcgatcgcgcacctgatcgatcatctttacgacggcgacctgttcgacgcggtccggcgcgcggtcgcgcgactgcgcggcagctatgcgatcgcggtgatgtgccgcgacgagccgcaccggatcgtcggtgcacgcgatggcatgccgctcgtggttggcgtcggtgaaggcgagaattttctggcgtcggatgcgattgcgctgtcgggcattaccgatcgcatcgctcacctcgagaacggtgatgttgccgatatccagctgcatcgttactggatcgtcgatgcggccggccagcgtgtcgagcgcgccgtgcaacgggtcgccgcgcatagcggggcggccgatctcggatcgtatcgctactacatgcagaaggagatcttcgagcagccgcaggcggtggccgatacgttgctcgatgtgtcttcgatcatgccggagttgtttggtgacggtgcgtggcgggttttcaacgacgtcgattcggtgttgttgctcgcctgtggcggcagctatcacgcggcgctcaccgcgaagtactggatcgagagcatcgcgaagctgccggccagcgtggaaattgccagcgagtttcggtatcgcgatagtgtgccgaatccgcggacgttggttgtcgcggtgtcgcagagcggtgagacggcggatgtgctgggtgcggtgcatgtcgcgaagcaaagcgggatgatgcatacgctcgcgatctgcaatgtcgcgacgagcgcgttgatgcgggaatgtgcgctgcagttcgtcacgcgcgcggggatcgagatcggggtggcttcgacgaaagcttttacgacgcagctcgtggcgttgtttctgctgacgttgtcgctggcgcaggtgcgcgggcggctgagcgacgacgaagagaaggagcatctgcgtgcgctacggcatctgccggacgcgatgtcgaaagtgctcgcgctcgaaccgcagatcatggcgtggtcggaactgctcgcacgacgcgacaacatgctgtttctcgggcgcgggatgcattatccgatcgcgctggaaggcgcgctgaagatgaaggagatttcgtatattcacgcagaggcttatccggcgggagagctgaagcatgggccgctggcgctggtgagtaacgaaatgccggtgattgcggttgcgcccaatgacatgctgctcgaaaaactccggtcgaacatgcatgaggtcagtgcgcggaatggcaggctttttgtgttcgcggatgtggactgtgggttggtgccgagtgaggggatcgaggtcattcgactcaacgagtactacgggccgctttcgccgattctgcatacggtgccgatgcaactgctcgcgtatcacgctgcgctggcaagagggacggatatcgataagccaaggaatctggcgaagtcggtgacggtggagtga

SEQ ID NO: 247034 - DNA, 1897 bp, Unknown
  Bacterial polypeptide expressing nucleotide sequence isolated from the Sargasso Sea
atgtgtggaatagttgctgtaactggatataaaaaagctttgccattattaattaatggtttagaaaaacttgaatacagaggttatgattttgcaggtattgcaataataaattctgaaacaaattttatatcttgtagtaaagcagaaggaaaactcaagaatttaatcagtaatcttaacgatcataatattcctggaactgtgggtataggtcataccagatgggcaacacatggaaagcctgaggttaaaaatgcacatcctcataccgatagttcaggaaacatagcagttgttcaaaatggcattattgaaaatttccaagatttaaaaaataaattagaggaagagggcattatttttaattctgatacagataccgaggtaattccccatttaattaaaagagagttaaatacattaagtaaacttaatcttgaaaataatgggtcaacattattagtagctgtaagaaatgtattatcggatttagagggttcctatgctttagctgttttatggtctggtgctccaacctctttggtagttgcaagaagacaagcgcctttgattattggtttgggtgaaggagaatttatttgtgctagtgatactccagccattgcgaactttacgaatattattttgcctatggaggatgaagaaattgctttgttgaccccacttggaattgaaatatatgactcaagcaacgaaagacaatatagaaatccagtttctttaaaagtttcagagcaagtaatggataagatgaatttcaaacactacatgttgaaagagatatatgatcagccacagactgcaaaaaactggctggaaaattatttaattaagaactcagataatggtgaatatcaaattaactatccatttaatacggagttttttgaatcaatagaaaaaattgaaattattgcttgtggtacaagtaaacatgctgcaatggtgggcagctttttattagaacaattttcaggtatccctacaaatgtcttttatgcaagcgaattccgatattcaccacctccactattgccaaatacgttaactattggagtcactcaatcgggagaaactgctgatacaattgcggctatcgatatggaaattaaaagacgttcttcaattgaaaatgaaaaatttaaacccaatcttattgcaataacaaatagaaaagagagttccataggaaggcagatctcaaatgtaattgatatctgtgcaggaatagaagttggagttgcagcaacaaaaactttttttgctcaattactttctttttatggattagccataaaatttgctcaaattaaaggtaatcaaagtcctgatgaaataagtaaattaataaacgaactgataaaacttccgccattactggaagatctcttagagagtcatgacaaatcttcagaaaagttagcacatgacttttttaatattaaagatgttatttttttaggaagaggaataaattatcctattgcccttgaaggagcattaaaacttaaagaaattagttatattcatgcagctggatatcctgctggtgaaatgaaacatggtccaatagctttgttagataaaaaagtacctgtaatttctattgcttctcctggtgaggtttttgataaagttatcagtaatgctcaagaagcaaaagctagagattcatatttgattgggattgctcctgaatgtaatgggactgaaatctttgattatttaatgaaagttccttcttttaatgaatggatttcccctctaattaatatactgcctttacaattattgagttatcatattgcagctcatagaggacttgacgtggatcaaccaagaaatctagctaaaagtgtaacggttgaataaa

SEQ ID NO: 247035 - DNA, 1063 bp, Unknown
  Bacterial polypeptide expressing nucleotide sequence isolated from the Sargasso Sea
agaaattgaagaacagccaacaactattaaaaactgtataaatgaatatttaaacaagattaatgatgaaattaatattttaaacttcccatggagtgcgagtcaaataaactcaattaaattgattggatgtggaacagcttatcattcatgtctaattgctaaatattggtttgaacaacttacttctttggacgtaaatgtagatatagcctcagagtttagatatagaaaaaataggtttaaaaaagattgtttatacatattcgtttctcaatctggtgagacagctgatacttatgctgcactagatttatgcaataaaaataaaatgaagacttgtagtattgtaaatattgttgaaagttcaattgcaagagactcacagtttgttttgcccatacattgtggaccggagataggagtggcgtctacaaaagcatttactggtcaaatgttggtattatatattctatgtctaaagattgccaaaattagaaaagatttaaagatcaatgaatacaagcttaaaataaaaaaattatatttactatctgaatttgtaaaacaatcattgttaactggagataaaatacaatcgatatgcaatactttttcagaagcaaaaggatctatgtttttaggaagaggatactcttttccaatcgcacttgaaggagcgctcaaattaaaagaattagcttatattcatgccgaagggtatccagccggtgagatgaaacatgggcctttagcgctgatagaggatggcatgccagtagttgtcattgctccaaaagataatcactataaaaaaactatttcaaatatgcaggaggtcattgcaagaggagcaaaggttctcttaattacaaacaaaagtgaagatgaagtgttttctgaaaatatttggcaaaccgttgaagttgagaatataaataatgatttgtatccttttttaataaccatacctttacaaaagctagcttattattctgctttaaagaaaggctatgatattgataaacctagaaatctagctaaatctgttaccgttgaataa

SEQ ID NO: 247036 - DNA, 1819 bp, Unknown
  Bacterial polypeptide expressing nucleotide sequence isolated from the Sargasso Sea
tatgtgtggaattgtaggaatagttagcaacaaatctgtttcagctagtattataagtgcattaaaaaaacttgaatatcgtggctatgactcagctggcatatctacaataagcaatggacaaataaacgaacaaaaatgttcaggaagagttgataacttagaaaaaattctttttcaaaatccatcaagtggggatcttggcatcggtcatgttagatgggcaacacatggagtgccaaatcaagtaaatgcacatcctcattcatcagaggtagtttctgttgttcataatgggatcatagaaaactcagatgaattacgaaaggaatataaagaaaaaggttactcttttaaatctcaaacagatacagaagtgattacaattatgttaactgattaccttaaaaaagaaaatttaattaactgtatccataaaacgctagaaaaattagaaggcagttttgctttgggagttatttttaaagattttgataatttggtagttggagcaagacgaggtagccctttagctgttggttatggacataatgaaaattttattggctcagactcttatgcgcttaaatcaatgacaaataaaatttcttatctcgatgatggagatttttgtattttatttaaagaaaaagtagaattttataattctgataaaaaaaaaattaataaacaaatatttgagttatctaatgaggataatacagcagataaaggtgattatagagattttatgtcaaaagaaattaatgaacaatctatcacaacaaaaaaatgtattaatgaatatttagataaatcacgtaatgatataaatatttataatttaccaatcgacccaaaaaaaattaataaaattcgtttaataggctgtggcacagcatatcattcatgtttgatggcaaagtattggattgaggaattcacatcattagacgttgaggctgatatagcttcagagtttagatatagaaaaataaaattcaactcaaatgatctttatatctttgtttcacaatctggagaaactgcagatacttatgctgcattagaaaagtgtaaaaaaaatcaagttaaaacatgtggaattgtaaatgtagtcgaaagctctatagctagaattgcagattttgttttaccaatacatgctggacctgaaataggagttgcttctacaaaagcttttattggacagcttatagttctttatttattgactttaaaaatatcaaaagaaagaaatgatataattgacgacgaatatttaaaattgattttagatttaaagaaattacccgaactaatcgaagaaacattaaataaacaaaaagatattcagttaattgcaagagattttattgaggcaaaagggacgatgtacttgggtagaggctactcttatccaattgcaatggaaggagctttaaaactcaaagaactttcttatattcatgcagaaggatatgccgctggagaaatgaagcatggtccacttgctcttatcgaagatggtatgccagttatcgttttagcgcccaaagatagattttttgaaaaaactatttctaatatgcaagaagtaatagctagaggtggtaaagttttaatgattacagacgatacatcgaaaacaatgaatgaaaatattagatttaaatttcaaattcctaaaacaaattcaacaataaattcttttcttttaactattccaattcaatttttggcataccacgttgcattattaaagaattgtgacatagataagccacgaaatcttgctaaatccgtcactgttgaataa

SEQ ID NO: 247037 - DNA, 697 bp, Unknown
  Bacterial polypeptide expressing nucleotide sequence isolated from the Sargasso Sea
tatgtgtggaattatcggagctgcttcatcaagaagcgttggaaaaatccttattaaaggacttcaattaatggagtataggggttatgactccgcaggcgttgttcttaacaaagatgaagaaattctgagattacgatctcttggcaaagtatcaaagctagaggagaaaatgatttctcaaaagccaaaagctttttctggtatagcccacaccagatgggcaacccacggggcaccctcagaagaaaacgcacatccgcatggatcccatgatgatatctatatcgttcacaatggaataattgagaaccatgaagagataagaggcttcttaagaaaggaaggctatgaaataacttccgaaacagattctgaattaattgcacacctagtccatttttataaaaaagacacccaagatacattacaagctctaatgagagctacgcatgaactaaatggcgcctattcaatagcagttgtttgtaagaaagagaaaggtaaagtttatgcagcaagacaaaaaagcccacttttggttggcttaggcatagaagagaactttgttgcttcagaccccctagctatagttaatataactgaaaaattccatatgctggaagatggagattttgcagttgttaccaaggaagatgttgttatttatgaccaagagggcgctccagttgagaga

SEQ ID NO: 247038 - DNA, 1492 bp, Unknown
  Bacterial polypeptide expressing nucleotide sequence isolated from the Sargasso Sea
gctgggctatgtgttcagctccgacaccgacaccgaggtgatcgcccacctggtgcaccacgaactcaaatctgcccccagcttgctggcggccatgcaggtcgcggtgaagcaactgcgcggcgcctacggcaccgtggtgatggacagccgtgacgacagccgcgtggtggtggcccgctccggctccccgctggtgatcggtcgcggtatcggcgagaacttcatcgcttccgaccagatggcactgctgccggtgacccgccgcttcatcttcctggaagagggtgacgtggccgaagtgacccgccgcgacgtgcacattttcgatacccacggcgaggccgtggtgcgtgaagagctggagtccgagctctcccacgatgccggtgacaagggtgaataccgtcactacatgctcaaagagatctacgagcagcccaaggccatcaccaataccctggaaggtcgcctgggttcggatcacgtggtagtcgagtcgttcggcaacggcgcccgcaccatcttcgaccaggtcgagcacgtccagatcgtcgcctgcggcacctcctacaactccggcatggtggcgcgctactggtttgaagagatcgccggtgtctcctgcgacgtggagatcgcctccgagttccgctaccgcaagtcggtggtgcgccccaacagcctgctggttaccctctcccagagcggcgagaccgccgacaccctggccgccctgcggttggccaaggagtccggctacatgagctcgctggccatctgcaacgtgccgggctcctccctggtgcgtgaatcggacctggcctttatgacccgcgcgggggcagaaattggggtggcttccaccaaggcgttcaccacccagctggctggtctgctgatgctggtggcctcggtcggtcactgccgtggcaacctgagtgccgccgccgaggccgagctggtcaaggcgctgcaagccctgccgctgcgcatcaaggagagcctggcgctggccaaggatatcgaagccctggccgaagagtttgccgacaagcaccacagcctgttcctcggccgtggcagccagtaccccatcgccatggaaggggcactcaagctcaaagagatctcctacatccacgccgaggcctatgccgccggtgagctcaagcacggcccgctggcgctgatcgatgccgagatgcccatcatagtggtggcgccgaacaacgatctgctggagaagctcaagtccaacgtggaagaggtgcgtgcccgtggcggtatcctctacgtgttcgccgatgccgacgccggcttcaagagcgacgagaccatgcgggtgatgagcctgaaccacgtggaagagatgatcgcgccgatcgtctataccgtgccgctgcagctgctctcctaccacgttgccctcatcaagggcaccgacgtggatcagccgcgcaacctggcaaaatccgtgaccgtggaataa

SEQ ID NO: 247039 - DNA, 1345 bp, Unknown
  Bacterial polypeptide expressing nucleotide sequence isolated from the Sargasso Sea
atgtgtggaatcattggtgcagcctcctctagaagcgttggaaaaatcttagtcaacgggctgaagaaaatggaatatcgcggttatgactcagccggtctcgttttaaatcaagatgaggtcgtatttcaactaaggactcttggcaaggtttcaaaccttgaagacgcaatgattgagcaaagacctaaagctgattctggtattgcacatactagatgggcaacacatggaattccatcggagaaaaatgcacacccccatgggtccaatggaaacatctatattgttcacaatggaatcattgaaaaccacgatgagctgagagaaaggctcataaatgaaggttatgagattcagtcacaaaccgattcagaattgattgctcacctaattcatttcaataaagaaaaaggcaaaaccacattgggcgcactaattgagacaacaaaagagcttgatggcgcatactcaattgctgtaatcgacacagaggaaaaaggtaaaatatttgcagccaaacaaaaaagcccgcttttggttggaaaagggatagaggaaaattttatagcctcagatccgctcgcaatagccggccttgccgaatctttctatctacttgaagacggcgactttgcagaaatcacgaaagatgaaattaaaattgttggcagcaatagtgaggcgctctcaagagaagagaccataatagacacaagcgtgaaggaggcatcaaaagatggttacaaacacttcatggaaaaagaaatatatgagcagcctcaagcaataacaaatgctattgagggaaggacttcagatggagaggttttagataatatatttgggctgggatcatcagaggcgtttaagggcgtcaaaagaattcaatttgtagcttgtggcacaagcctgcatgcagctaaaaccgccagaaaatggtttgaagaactttgtgagacaccatgctatatagattttgcaagcgaatacaggtaccgaaacccacttgttgaagacgatactttgtttgtatgcatatctcagtcaggagaaacagccgacaccatggcagcgcttaattatgcaaaagatgagaaatatttaggcattgtcacgatttgtaatgttcctacgagtaccatggcgagagaatctgattggaagatattcacaaacgcaggcccagagataggcgttgcttcaactaaggccttcacaacacagcttgcagctctgcttttgttggcttgttcgatatcaaaaagcaaaaacttaaacaaagataaaagagcagacgcaatcaatgaccttcttaacacgccttcgcttgtgaaagaatcat

SEQ ID NO: 247040 - DNA, 1114 bp, Unknown
  Bacterial polypeptide expressing nucleotide sequence isolated from the Sargasso Sea
aatgtgtggaattataggaattgcaagcaataaatctgttacttcaaatataatcaattctttaaaaagacttgaatatagaggttacgactcttctggagtagcaaccatacacaacaatattataaatgaaaaaaaatgcccaggaagagttgaggaattagaaaaaatattatttaactctccttcaaacggaaatgttggaattggacatgttaggtgggcaactcatggtcttccaaatcaaataaatgcgcatcctcattcttctgatttagtagcagtcgttcataatggaatcatagaaaactctgaaaatttaaaacaaaatcttgaaagagatggttataaatttaaatctcaaactgatacagaagtaataactttattactcaccaaatttttaaaaaaatttagtcttttagacgcggtctataaaactttagaaaaattgactggtagctttgcattaggaatattattcaaagaacaccaaaatattataatcggtgctaggagaggaagcccattagctgtgggttattcaaacaatgaaaattatttaggatcagactcatatgctcttaaatcaatgacgaataaaatatcatatcttgatgacggtgatgtttgtgttttaactaaagaccagattgagttttacgactctaaaaaaaataaaaaaaataaaaaagttttaattctttctgaagacaaaaatgaaaataaattaggggatttcaaaaactttatgtcaaaagagatttttgaacagccatttacctcttcaaattgtataaatgaatacatagataaaattagaaataatattaatattattgattttccattaaacccaaaaaaattaaataaaatagtccttataggatgtggaacagcctatcattcttgccttgtagcgaaatattggttggaagaattaactgatttaaatgtagaagctgatatcgcttcagaatttagatatcgaaatgtaaaattcaataaaagcaatctatatatatttatttctcaatctggtgaaacagcagatacagcggctgcgcttgaactttgtaaaaaaaataatgttaaaacatgttctataattaat

SEQ ID NO: 247041 - DNA, 1281 bp, Unknown
  Bacterial polypeptide expressing nucleotide sequence isolated from the Sargasso Sea
tatgtgtgggatagttggtattacaagtaataaatctgtaacctcaatgataattaattctttaagaaaacttgaatacagaggatacgactcttcaggaatcgctactttatataatggtaatattaatgagataaaatgtgaaggtagagttgatactttagaaaaaaatttaagtaaatctaaattattagggaatgttggcatcgggcatgtcaggtgggcaacacatggaataccaagtactttgaatgcacacccgcattcttcagaaaatgtttcagtggtacataatggaattattgaaaattcaacaatgctaaaaaaaattttagttaaaaaaggtcatgtttttaaatcacaaactgatacagaggtaatcactcatttaataacagaatacttaaaaaaaaatgatcttaaaaactcaatcattaaaatacttgaagatttaaaaggaagttttgctttaggaattatttttaaagatcaaccagatataattgttggagctagaagaggttctccattagcagttggctatggcccaaaagaaaattatcttggttcagattcatatgcattaaaatcaatgactaataaagtttcatatttaaatgatggagaattttgtatcattaaaaaagattatattgatttttttgatcaaaaaggaaacaaagttaataaaaaaatattagaactttcttcaaatgaaaataattatgataaaggtgaatacaaacattttatggcaaaagagattgacgaacagccagtcacaataaaaaattgtattaatgagtacattgacaaaataaataacgatataaatatttttaattttccttggaaatcaaaggatatttcttcaataattttaattggatgtggtacagcctatcattcatgtttaatggccaaatattggtttgaacaattaacatcattagatgtatctgtagatattgcttctgagtttagatatagaaaaaatagatttaaaaaagatgcactttatgtgtttgtgtctcaatcaggcgaaacggcagacacttatggagctttagatttatgcaataaaaacaatgtgaaaacttgctcaatagtaaatgtggtagaaagctctatagcgagagattctaaatttgttttgcctattcattgtggtccagaaattggtgtagcgtcaacaaaagcatttataggtcaaatgctggtattgtatttattgtgtattaaaattgcaaaagatagaaaagatataacaaaagatatctt

SEQ ID NO: 247042 - DNA, 994 bp, Unknown
  Bacterial polypeptide expressing nucleotide sequence isolated from the Sargasso Sea
tatgtgtggaattattggaatttcaagtaacaaacctgtgtcagctagcattgttaattcattaaaaaagctagagtataggggatatgactctgcgggaatagctactctttttaacggtaaagtaaatgaagtaaaatcagaaggtagggtggacatgttagaacaaaattttgatttaaaaaatttaaaaggagatataggtattggacatgtgaggtgggcgacacacggtgtaccaaacagtattaatgcacatccgcattcttctgataatgtttccgtagttcacaacggaataatagaaaattcaacaatattaaaaaaagatttagttaacaaaggccatatatttaaatcgcagacggataccgaagtaattgttcatttgattacagaaaatttaaaaatatatgaattagaggaagctataacaaaaacattaaaacaacttcatggaagttttgcacttggaattgtatttagagactttcctgacttaattgtgggagctagaagaggatctccattagcagttggttacggaccaaatgaaaattatttagggtcagattcgtacgctttaaaatcgatgacaaataaaatttcttatttagatgatggtgaattttgtatagttaaaaaagatcaagtacttttctttagtgagaaaggaaaaaaaattaataaaaaaattctagaactttcttcagatgaagcaagttatgacaaaggtgattttaaacattttatggcaaaagaaattgaagaacagccaactactttaaagacaggaataaaggaatatatagataattttaacagcgatattaatatttttaattttccttggaaaattgaagaaataaaatcaataacattgattggatgtggtacagcataccattcatgcttgatggcaaaatattggtttgaagagttaacttttttagatgtaaatatagatattgcatctgaatttaggtatcgaaaa

SEQ ID NO: 247043 - DNA, 423 bp, Unknown
  Bacterial polypeptide expressing nucleotide sequence isolated from the Sargasso Sea
taggtagaggattttcatatccaatagccctggagggagctttaaaactaaaagaattatcctatgtacatgctgaaggttatccagctggcgaaatgaaacacggacctttagctttaattgaagagggtatgccagtagttgttttagctcctcgagacagttattataaaaaaactatttccaatatgcaggaagtaatagcgagaggtgcaaaagttttattaattacaaacaagagtaaagacgaaattgtatctgaaaatatttgggagacaattgaagttgagagcactaatgaggatcttttaccatttttattgacaataccactacaaaagcttgcttattattcagcactgaaaaaaggatttgatatagataaacctagaaatttagctaaatcggttacagttgagtaaa

SEQ ID NO: 247044 - DNA, 1285 bp, Unknown
  Bacterial polypeptide expressing nucleotide sequence isolated from the Sargasso Sea
atgtgtggtattgttggaattacgagcaaagaagatagtgtttctgatatcttatcaggtttacaggctttggaatatagaggatatgattcttcaggcatagcctgtagcaatgataataatttagattttcagaaaagtgttggtaaaatatccaacttaatccatggattaaataataaaaagttaaaaggaaaaacttctattgcacatactcgttgggcaactcatggaaagccaagtatagtaaattctcatccttttgtaaaagagaactgcgccttggtacataatggtattgtagaaaattatgaagatcttatcagttcatttttactagatacaaataagttagagtctgaaacggatactgagatagttgctgaaatatattcaaaattattaactgaatttgacccaatagaagcattgatgaatttaacaaaaaatatccaaggaacatatgcctttgcttttttagttaaaggatcaaattctatttatgctgttagaaaaggtagtccgcttgttgtcggattatctaataaattaaaatctataagttctgatatattagggttgcccaattccgttacacaaacaatttttcttgaagaaaatgatattgttgaaatcaacaactcttacttttcgatatttaataataatggcaaaccagtagaacgtgaaattcactcgcataaaagtactaatgattttaacacaaaaggaaactttaaacactttatgcaaaaagaaatatatcatcagccaagtagtttagaagatactgttctaaattattgtgacaaaaaaactaataaggttttacttccaagatgtggtgtagactttaatcaagtttcacatatacaccttgtagcttgtggtactgcatatcacgcctgtaagattgcaaaatattggcttgaagaatttgctaaccttccgacctcaattgatattggatctgaatatagatatagaaaagactctataaataaagagtctgtaggtcttgtggtgtctcaatctggtgaaacgatggacacctttgaatgcctgaaaaaatttaaacaaaaagaattatttacaatttcaattatcaatgtgcttaagagcagtattgcaagagagtcagattatattcttccaacgatagcaggacctgagattggcgttgcatcaacaaaagcttttacatcccaattaattgttttggctttactatccttacatattcgacagaaaaaaaatatttataatgcaaaagataaattaattt

SEQ ID NO: 247045 - DNA, 1450 bp, Unknown
  Bacterial polypeptide expressing nucleotide sequence isolated from the Sargasso Sea
attgatagcacatcttcttgaatatttcctaaataaaggaaacaacatgttggattcgatgtatctaaccaaagaaaagcttgatggcgcatatgcaatagcagccatagataaagaagatgatcaaaatattattattgctagaagtaaatctccacttttaatcggaattggtatggatgaatttttggccgcctcagatcctctagcaataggtcaattgacgaatgagtttatttttttagaagatggagacgtagcagaactatcatctgagagttataccatttttgatgagtctaagaaaaaagttgaaagagaaatttctcaaatagatatttcaagtcaggccacatctaaaggcgaatatcgacatttcatggaaaaagaaatttacgaacaaccagaagcaattcttaagaccattgatggtagagtgggtggagatgatgttttagataatatatttggtcttggctcatctgaaatgttcgaaaaagttaaaagagtccaaatagtggcctgtggaacaagcttgcatgctggaagagttgcagctaattggttttcagcaatttcagaacttcctactcaaatagactatgcttctgaatacagatacagaaatcctcatgtggatgacgattctctcctggtaacaatttctcaatctggagaaacagctgataccctagctgcattaagatatgcaaaagaaaaagattatttgtcgactttgtgtgtgtgcaatgttccaacaagctctcttgcaagagaatcaaattattcaatatttactaacgcaggtcctgaaattggagttgcttctacgaaagctttcacaactcaacttgcagctttaatgttgctagctttatctcttgcaaaaagcagaggaaaaaatccaaagttaagaacaagagtaataacagcactaagatcattgccagaaactgtagaagaaactttaaagcttaaagacacaattttagaaatagcacctgaaatagcaaataaagataatgctctatttttaggcaggggtattttttatccaatcgctaaagagggagcactaaagcttaaagaaatttcttacattcatgctgaagcctatcctgctggcgagttaaaacatggacctctagctttaattgatgaggaaatgcctgttattgctttagcgccggagagcgagatagctgagaagctggtctctaatctcgaagaagttaaagctaggggcggaactctatatgtattttctgatccttcaatttcaatggatttaaaatctggaagacttatcaatatgccaaagtgcgacttccttttaacgccgatcatttatacgatacctcttcaaatactttcttatgaagtagcattgttaagagggacggacattgatcaaccaagaaatttagccaagtcagtcaccgttgagtag

SEQ ID NO: 247046 - DNA, 310 bp, Unknown
  Bacterial polypeptide expressing nucleotide sequence isolated from the Sargasso Sea
gctcgcgttggttgataacgacatgccggtcgttgccgtcgcccccgatgatcgattgatggaaaaactgcgatcaaatcttgaagaagttcgcgcccgcggcgggcagctgtttgtttttgccagcgaaaatgcgggctatgagtcgggtccgggttgtgaagtcttggccctgccggcctgcagcgcgttagcagggcctgtcatgtttacgatcgccctccagctcctcgcgtatcatgtcgcggtcgccagaggcactgatgtcgataaaccgcggaatcttgctaaaagtgtgacagtggagtga

SEQ ID NO: 247047 - DNA, 1325 bp, Unknown
  Bacterial polypeptide expressing nucleotide sequence isolated from the Sargasso Sea
aatgtgtggaatagttggaattacaagctctaaagaagttactccaagaattataagttcattaaaaaaacttgagtatagaggctacgactctgcaggcttagcaactctttcaaatggaaatataaatgaggtaaaatgtgagggtagagtagacgctttagagaaaaacattatacaaactaaaatatctggctctattggtattggacacgttagatgggcaacacacggaaaacctagttcaataaatgcacatcctcattcatcagatgatgtatctgtagttcataatggcataattgaaaattcaactattcttaaaaaactattagaaaataaaggctataagtttaaatcccaaacagatacagaagtaattgttcatttggtaactgattatttaaaaaaaaataaccttaaaaatacaattataaaagttttaaaaaaattacatggtagttttgcattaggaataatattcaaagatcaaccagacttaatagttggagcaagaagaggctctccgcttgcagttggttatggtcctaacgaacattatcttggttcagattcttatgcattaaaatctatgactaataaaatttcatatttaaatgatggagagttttgcatattaaaaaaagatcaagttgaattttttgatgctgatggaactaaagtaaacaaaaaaattttaaatctttctaaagatgatcaaaattatgaaaaaggagattacaaatattatatggccaaagaaatagacgagcagccaatcactttaaaaaattgtattaatgagtacatagacaaacataataaggatataaatatctacaattttccatggaaaataagtgaaatttcatcggtagttttaattggatgcggaacagcatatcactcatgtcttgttgcaaagtattggtttgaacaaaatacaagtttagatgtgagtgttgacatagcatctgagtttagataccgaaaaattaaatttaaaaaagattgtctttatgtgtttgtttctcaatcaggagaaactgcagatacatttgcagcattagatttgtgcaaaaagaacaatgttaaaacttgcgcagttgtaaatgttgttgaaagttcaattgcaagagacgctgatctagttttacctattcattgtggtccagaagttggcgttgcatcaacaaaggcttttctaggacaaatgttagttctttatttattatgtactaagctttcttatgaacaaaaatcaattaacaaaaaggactatcaaaagaaaataaaagatttactgtcattatctaaatctgcaa

SEQ ID NO: 247048 - DNA, 1897 bp, Unknown
  Bacterial polypeptide expressing nucleotide sequence isolated from the Sargasso Sea
atgtgtggaatagttgctgtaactggatttaaaaaagctttgccattattaattaatggtttagaaaaacttgaatacagaggttatgattctgcaggtattgcgataataaattccgaaacaaattgtatttcttgtaataaagcagaaggaaaactcaagaatttaaaaagtaatcttaatgatcaaaacattcctggaactgtgggtataggtcataccagatgggcaactcatggaaagcctgaagttaaaaatgcacatcctcataccgatacttcaggcaatgtagcagttgttcaaaatggcattattgaaaatttccaagatttaaaaaataacttagaggaagagggcattgtttttaattctgatactgatactgaggtaattccccatctaattcaaagagagttaaatatattaagcaaactgaatcttgagaataatgggtcaactttattagtagcggtgagaaatgttttatcggatttagagggatcttatgctttagcagttttatggtctggtgctccaacctctttggtagttgcaagaagacaagcgcctttgattattggtttgggtgaaggagaatttatttgtgctagcgatactccagccatagcaaactttaccaatactattttgcctatggaggatgaagaaatagctttgttgactccgcttggaattgaaatatatgactcaagcaacgagagacaatatagaaatccagtttctttgcaagtttctgagcaaataatggataagatgaatttcaaacactacatgttgaaagagatatatgatcagccacagactgcaaaaaactggttggaaaattatttaattaagaactcagataatggtcaatatcaaatcaagtatccatttgatacagagttttttggatcaatagaaagaattgaaattattgcatgtggtacgagtaaacatgctgcaatggtgggcagctatttattagagcaattttcaggtatccctaccaatgtcttttatgccagcgaatttcgatattcaccacctccactattgccaaatacattaactattggagtcactcaatccggagaaactgctgatacaattgcggccatcgatatggaaattaaaagacgttctgcaattgaaaataaaaaatttaaacccaaccttattgcaataacaaatagaaaagagagttccatagggaggcaggtctcaaatataattgatatttgtgcaggaatagaagttggcgttgcagcgacaaaaactttttttgctcaattactttctttttatggattagctataaaatttgctcaaattaaaggcaatcaaagttctgatgaaataggtaaattaataaatgaacttataaaacttcctctattgctggaagatctcttagagaaacataataaatcttcagaaaagctggcacatgactttttcaatattaaagatgtaatttttcttggaagaggaataaattatcctattgctcttgaaggcgctttaaaacttaaagaaattagttacatacatgcagctggatatcctgcgggtgaaatgaaacatggtccaatagcattattagataaaaaagtacctgtaatttctattgcttcccctggtgaggtttttgataaagttatcagtaatgctcaagaagcaaaagctagagattcatatttgattgggattgctcctgaatgtaatggaactgaaatctttgattatttaatgaaagttccttcctctaatgaatggatttcacctttaattaatatattgcctctacaactattgagttaccatattgcagctcatagggggcttgacgtggatcaaccaagaaatctagccaaaagtgtaactgttgaataat

SEQ ID NO: 247049 - DNA, 1183 bp, Unknown
  Bacterial polypeptide expressing nucleotide sequence isolated from the Sargasso Sea
aaaaaagataacattgacttttttgacgaaaaaggaattaaagttaataagaaaatattagagctgtcttcaaatgaaaataattatgaaaaaggtgaatataagcattttatggctaaagaaattgatgaacaaccaactacaattaaaaactgtattaatgaatatatagacaaaaaaaacaatgatataaatattttcaattttccttggaaatcaaaagaaatttcctcaatagtcttaattggttgtggtacagcataccactcatgtttgatggctaaatactggtttgagcaaattactacctttgatgtttcggtagatatagcttctgaatttagatacagaaaaaataggtttaaagaaaaagcactttatatatttgtttcacaatctggagaaacagctgatacttatgcagctttagatctttgcaataaacataatatgaaaacttgctcaatagtaaatgttgtagagagctctatagcaagggactcaaaatttgttttacccattcattgcggtcctgaaataggtgttgcatcaactaaagcttttattggtcaaatgttagttttatatttgttgtgtataaaattagccaaaattagaaaagatatatcaaatgatattttttataataaaatgaaatcattagaatctctctctaatttagttaaaaaaactataaatactgagagcgatatacaaatggtttgtaattcttttgttgaagccaaaggttctatgtttttaggtagaggctattcatttcctattgcactcgagggagctctcaaattaaaagaattagcatatgttcatgctgaaggttatccagcaggggaaatgaaacatggaccacttgctctaattgaagagggaatgcctgttgtggtaatagcccctagagatgaatattataaaaaaacaatttctaatatgcaggaagttatagcaagaggtgcaaaagttttattaattactaataaaaataaagatgagattttctcagaaaatatttggcaatcaattgaagttgaaaatactacagaagatctatttccttttctgattacaattcctttacaaaaacttgcatattactcagcattaaaaaaaggatatgacatagataaaccgagaaacttagccaaatctgtcactgttgaataat

SEQ ID NO: 247050 - DNA, 1165 bp, Unknown
  Bacterial polypeptide expressing nucleotide sequence isolated from the Sargasso Sea
aatccagtttctttaaaagtttcagagcaaataatggataaaatgcattttaaacactacatgttaaaagagatatatgatcagccacagactgcaaaaaactggttggaaacttatttaattaagaactcagataatggtcaatatcaaatcaattatccatttgatacagaattttttgaatcaatagaaagaattgaaatcattgcttgcggtacaagtaaacatgctgcaatggtgggtagctttttatttgaacaattttcagggatccctacaaatgtcttttatgcaagcgaatttcgatattcaccacctccactattgccaaatacgttaactattggagtcactcaatccggagaaactgctgatacaattgcggctatcgatatggaaattaaaagacgttcttcaattgaaaataaaaaatttaaacccaaccttattgcaataacaaatagaaaagagagttccataggaaggcagatctcaaatataattgatatctgtgcaggaatagaagttggagttgcagcaacaaaaactttttttgctcaattactttctttttatggattagctattaaatttgctcaaattaaaggtaatcaaagtcctgatgaaataggtaaattaatagacgaacttataaaacttccgccattacttgaagatctcttagagaaacataataaatcttcagaaaagctagcacatgacttttttaatattaaagatgttatttttttaggaagaggaataaattatcctattgctcttgaaggcgcgttgaaacttaaagaaattagttacattcatgcagctggatatcctgctggggaaatgaaacatggtccaatagctttattagataaaaaagtacctgtaatttctattgcctctcctggtgaggtttttgataaagttattagtaatgcgcaagaagcaaaagctagagattcatatttgattgggattgctcctgaatgtaatggaactgaaatctttgattatttaatgaaagttccttcctctaatgaattgatttcccctctacttaatatattgcctttacaattattgagttaccatattgcagctcacaggggacttgatgtggatcaaccaagaaatttagctaaaagtgtaactgtggaatgat

SEQ ID NO: 247051 - DNA, 560 bp, Unknown
  Bacterial polypeptide expressing nucleotide sequence isolated from the Sargasso Sea
aatgtgtggaataattggaataataagcacaaaagaagtttctaatagaataattaattcattaaaaaaactagaatatagaggatatgactctgcaggaattgcaactctggttgatggaaatattaatgaggtaaagtgtgaaggtagagttgatgtattagaaaaagatatattaaaatttaatcttaaaggagatgtcggtatcggccatgttagatgggcaactcacggcaaaccaagtaaaattaatgctcatccacattcatctgaacaggtttcagttgtacataatggcataatagaaaattcaacaattttaaaaaaaattttagagaaaaagggatatatatttaaatcacaaactgatacagaagtaatagctcatcttgttacagactatttaaaaaaaaattctttgaaagatactattattaaagttttgaaaaaacttcatggaagttttgctttagggataatttttaaagatagaaatgatttaatgataggtgctagaagagggtcacctttagctgttggatatggaccaaaacgaaaac

SEQ ID NO: 247052 - DNA, 247 bp, Unknown
  Bacterial polypeptide expressing nucleotide sequence isolated from the Sargasso Sea
aacaatttcaaatatgcaagaggttattgctagaggagcaaaagtacttttaattactaataaaagcaaagatgaggttgttcatgaaaatatttggcaatcaatagaagtagaaaatactattgatgatttgttaccttttttaattactattcctttacaaaaactggcgtactattctgctttaaacaaaggttatgatatagataaacctagaaatttagcaaaatctgtcactgttgaataa

SEQ ID NO: 247053 - DNA, 429 bp, Unknown
  Bacterial polypeptide expressing nucleotide sequence isolated from the Sargasso Sea
tgtttttaggcagaggtttatcataccctatcgctttagaaggagcgcttaaattaaaagaattagcttatgtacatgccgaaggttatccggccggagaaatgaagcatggacctttagcattaatagaagagggtatgcctgtagtagttttggcacctagggatgaatactttaaaaaaacaatttctaatatgcaagaagttattgcgcgtggtgcaaaagtacttttaataacaaataaaagtaaagatgaaatagttcatgaaaatatttggcaatcaatcaaagtagaaaatatcaatgatgacttgttaccttttttaattactatcccgttacagaaacttgcttaccattctgctttaaacaaaggatacgatatagataaacctagaaatttagcaaaatctgttactgttgaataat

SEQ ID NO: 247054 - DNA, 1306 bp, Unknown
  Bacterial polypeptide expressing nucleotide sequence isolated from the Sargasso Sea
aaaaataaaatttaaatctgaaactgacactgaggtgttagtccaattgattggatatttttacaataacggtaagatgaattttgaacaatcagttcgcgcagctttacagagagttgatggtgcatatggaattgtaattcttaatacagattatccggatatgatgatagctgctagaaaaggaagtccattggttttgggaatcaaggaaaatgaattctttattgcaagtgatatttcaccaattgtgaagcatactaaagatattatttatttaaaagattcagaaatggcagttgttaacaaaaaaagctttaagattaaatcagtagataaagatatttcgttaccaaaaaatatagaaaaaattgatttcaaaattgatgattatgacaaaggtaaatataaatattttatgcacaaggaaattcatgagcaaattaatacaatacccaatactattaatggaagaataaaaaatgaatcggttttattacaaggtttatcagataattggaatgttatagagtcggcagaaaaaatttatataactgcatgtggaacatcatggcatgctggacttattgggaaaaattttattgaacgatttgctaatattcctgttcatgtagaatatgcttcggagtttagatataatcatgctttacttgatgataaaactgttgttattgcaatttctcaatctggagaaacagcagatacattagctgcaattaaaaaagcaaataatcatggagcgcttacaattggaatatgtaacatagctggaagttcagtttcaagagaaactgaatgtggagtttttacgaggtgtggtcatgaagttggtgttgcatccacaaaagcctttacatctcagatcgttgtactatatttattagccctcaagcttgctgaaagtagaaaaacgatttcaaaagcatctttaaaaagacacttagactataaaaaatcggtaaataaaattaagtctatatttaaacaagaaaatgacattaaaaaaattgcaatgaaatataaaaaagccaacgattttttatatttaggaagaggattaaatttccctgtggcattagaaggtgccttaaagttaaaagaaatttcatatatacatgcagagggttatccagctgctgaaatgaaacatggaccaatagctttaattgataaggatatgcccagtgtatttatagcaccaagagataagacttatgaaaaaattatttcaaacattcaagaaattaaatcaagaaaaggaaagattattgtaataacagattct

SEQ ID NO: 247055 - DNA, 1183 bp, Unknown
  Bacterial polypeptide expressing nucleotide sequence isolated from the Sargasso Sea
acagaaaatgacattaaaatttttaacagtaatggtgagcctgttcagagagaagagacaaaaatagacgcaacaccaacatcgacaagcaaaggcaactactcacactttatggaaaaagagatttatgagcagccagatgcacttggaaacaccataaatggtaggcttggtgaaaatgatgtgttagataacatttttggtttaggttctagtgatgcatttaaaactatagaaaggattcagtttgtagcatgtggtaccagtcttcatgcagcaaaaactgccagaaagtggtttgaggaaatatgtgaaattccttgttatatagattttgcgagtgagtacagatataggaacccaatcgttgaagacaacactctctttgtaacaatttctcaatctggtgaaacagctgacacactagctgctttagaatatgctcgagctgaaaagtatgttggtattgtgacaatatgcaatgttccaacaagcactatggcgcgagaagctgattggaagatatttactaacgcagggccagaaataggagttgcatcaactaaagcttttaccactcaattggctgctttattgatgctcgctctttcaattgcaaaaagccaagataaaaatgctgataaaagaaaacaagcaacacaggaattaagagaaaccccggcactagttgaccaatcttttaaattaaaggaaaacatttctcaaataacacaaaatatctcaactaagcacaacgcattgtttttaggaagaggaatgtatttctcaatcgcacaagagggcgcacttaaattaaaagaaatatcatatattcatgctgaagcatatccagcaggagagctaaagcatggacccttggccttggttgatgagcaaattccagttattgctcttgcacccgaggatagcctggttgagaaacttttatcaaatcttgaggaggtaaaagctagaggggggaccttatatgtttttgggaatgcaaactcaactattgaaataagcaaaggaagatttataaatatgcctaattgcggagattacaatgcaccaattatttacaccataccgcttcaaatactagcctatgaggtagcttgtctaagaggcacagacgtagaccagccaagaaatttagctaagtcagtcactgtggagtaag

SEQ ID NO: 247056 - DNA, 1426 bp, Unknown
  Bacterial polypeptide expressing nucleotide sequence isolated from the Sargasso Sea
atgtgcggtatagttggtatcttaaattcatcttctttaaagaataactctatagatattttaaaaaagctggaatatagagggtatgactctgctggcatttccttgttttcaaaagaacgaataaaaactattaaaagtgtcggcaaaatatcagaactaaaaaataaagctcaaaatgtatcagataaaaatttttatggtgtgataggtcatacaagatgggcaacacatggagttgttagcaaaaataatgctcatccatttgcaaatgatgatcttactttagtttgtaacggtattattgaaaactatagaaaaattcaaaatcgatttgtagaaattcctaaaaatattcaatcagatactgaaatcagtttttactttctcacctatttagtcaataaatataaaaattcagatgaagctattagagtgtttaaaagtgtaattaaaggaaactacgcttttgttatatttataaaaaaaaataattgtttttacttattaaaaaatggcagtccaatcgccttatcacataataaaaactcctcttacatatgctcagattcatctattttatctgattatagtgataagatttatcatcttaaagatggtgatattattaaaattcagcagtctaaaatatctagtttaaataaagctaaaatactcttcgaaaaaaatgaaattaaacaaaacccatatgataaaggaaaatatcaacattatatgttgaaagagattcatgagcagcctgaagttataaaaactactcaaaaaaattatgtaaaagaattttttaatgattttgaaagcaaatttaaaaatttaattgtaaacaaaaaaataatatttgttggatgtggtactgcataccatgcctgtttagttggtgagtattactttaataaatatacaaatatagatacttcatcagaattagcttccgagcttagatataaaaaaataaataaagacgaaaaaattttatttatttttatttcacaatctggtgaaaccatggataccttgatggctctaaaatatatcaaaaaaaacaaacattcctctgtagtcatcactaattctttgcagagtagtatggtaagagaggctgatgtaaccatacctacttatgctgataaagaagttggtgtagcctcaactaaagcttttacttgtcaaatattgagcttagccaatctttctattgaaattggtaaaatgacaaattccatatcgaaaaaagattataataagaatttagcaattctaaagttattaccaataaagctgaaaaaattaataaatgattttacaccagaggcgaaaaaaattgcaaaaaaattaagccaatctgatacttgttattttattggaaggaatattgtatacccaatagcattagagggatcctgaa

SEQ ID NO: 247057 - DNA, 1253 bp, Unknown
  Bacterial polypeptide expressing nucleotide sequence isolated from the Sargasso Sea
ttttgatttaaaaaacttaagaggaaatattggtataggtcatgtaagatgggcaactcatggaattccaaatagtttaaatgctcatcctcattcttctcacaacgtatctgtagttcataatggaattattgaaaactctacaatattaaaaaaacatttaattaacaaaggtcataacttcaaatcacagacagatacagaagtaattgttcatttaataacagaacatttaaagacttcagaattagaagaagccatcacaaaaactttaaaacaacttcatggtagttttgctcttggaattgtttttaaagatatgccagacttaatagttggtgctagaagaggatcacccttagctgttggttatggtccaaatgaaaactatttaggatcagattcctatgctttaaaatctatgacaaataaaattacttatcttgatgatggtgaattttgcattgttaaaaaagatcaagttcttttttttaacgatgaaggaaaaaaagttaataaaaaaatattagaactatcattagatcaagcaaattacgataaaggtgactttaaacatttcatggcaaaagaaattgaagagcaaccactaacaattaaaactggaattaaagaatatgtagataatgtaaatcaagacataaatatttttaattttccttggaaaattgaagaaattaattcaatcaccttaataggatgtggaacggcttatcactcttgcttaatggcaaaatattggtttgaagagcttacaaatttagatgtcaatatagatatagcgtcagaatttagatatagaaaaaatagatttaaaaaagatagtttatatatctttgtttcacaatctggggaaacagcagatacatatgcagctttagatatatgtaacaaaaatagcatgaaaacatgcgctgttgttaatgtaatcgaaagttcaatagcaagagattctaattttgttttaccaatccattgtggtcctgaaattggagttgcatcaacaaaagcatttctaggtcaaatacttgttttatatattttagctttaaaacttggatcaatgagaaatgaaattgaaaaaaaagaatatcaagaaaagattaaagatttaaaagatttgcctggcttaatagagaaaacattgcttcatgataatgatatccaggcaatatcctcaacatttaatgaagctaagggttcaatgtttttaggaagaggatattcatatccaa

SEQ ID NO: 247058 - DNA, 355 bp, Unknown
  Bacterial polypeptide expressing nucleotide sequence isolated from the Sargasso Sea
agaattgacatacattcatgcagaaggaataccaggtggagaattaaaacacgggcctcttgcgttaatggatacagacgtttttgtaattgtcattaatccaaatgattcaacatatactgacacattaacgagtgcacgagaaattaaagctcgtggagcaaagattattggagtttcagatattgaaagtgacgtttatgattattggataaaaattccaaaaattaatgaaattctatatccaatttcagagatcattccaatacaattactaacatactactcagctttggaaaaagatgcagacccggactatcctagaaatttagcaaaatcagtaactgtcaagtag

SEQ ID NO: 247059 - DNA, 1138 bp, Unknown
  Bacterial polypeptide expressing nucleotide sequence isolated from the Sargasso Sea
tgcagggaggatgatgagccctcttgttttaggcgttggagaaggagaagtttttttagcttcggattcagctgcaattcttgagcatacaaataaaatgatttttttagagaatggtgattttgtagagatacatgatggaagttttagattatttgatgttaatttaaaagaagttgaaagacaaattcaagtaattgattgggaagtttcggaagcagagaaatctggatatgaacactttatgtataaagaaattttagaacaggcagaggttatagaaagaactataactggaagactggaagaaggttctgttgagataccaatatcgagagaagaagcacagaaatatgacaaaatatggattgttgcttgtggaactgcatatcatgccgggctatttggcaaagatttgttcgaaaaagttttaggagttccagtaagtgttgagcttgcatcagaatttagatatagagaaccaatagttgggaagaatgatttaggcattgttatttctcaatctggggaaacaatggatactattgcagctacggaacttttaaaagaaaatggatctcacgttttagcattagttaatgttgttggaagttctcttgcaagaatggctgatagcgtattttatttacatgttggtccagaaattggtgttgcttctactaaagcataccttggaatgctagttggacagctccttttagctaaacattgggattcaaacaacaaattagatgtttcctttgaagaaattaaaggcttgcctttacttatagaagagactctaaagtgcgagcctgaagtcaaagagattgcagaatcaatacataaacaaaatgatgtatattttatcggaagagggttggactacgcccttgctgccgaaggagcccttaagttaaaagagatttcttatttgcatgcagaagcacttgcagcaggtgagcttaaacatggaacattggctcttattgaagagggtacaccaattattgttactgctagtcagtaccacttgcttgacaagacaacaagtaatgttcaggaagtgaaggccagaggagctcatgttattgcaataggcaacagttcatcagaaaaattagaaaatattcagata

SEQ ID NO: 247060 - DNA, 1114 bp, Unknown
  Bacterial polypeptide expressing nucleotide sequence isolated from the Sargasso Sea
aaagacgagcttaattatgataaggggtgattacaaatatttcatggaaaaagaaatcgatgaacaaccagcaactattaaagcatgtattaacgagtacatagacaaattcaataatcaaataaatatttataatttcccatgggaaataaattctattaattcagttatgcttatcggttgtggaacagctttccactcatgtttaataacaaaatattggatggaacaaaatacaaatttagacgttagcgttgatatagcctctgaatttagatatcgaaaagttagatttaagaaagattgtctatatatttttgtttctcaatcaggtgagacagcagatacttatgcagctttagatttgtgtaaaaaaaataaagtaaaaacttgtgctgtagtaaatgtaatagagagctcaattgcaagagatgctgatttagtattacctatttattgtggtcaagaaattggtgtagcgtctaccaaagcatttattggtcaaatgttagtactatatatcttaacaacaaagatttcatttgatcaaaaatttattaatttggatgaatacaaagcaaagataaaaaatttactaaacttgtctacctatgctaaaaaaactctaaaaattgatcaaaaaattttagatataggtaaaattttttctgaagcaaaaggatcgatgtttttgggaagaggtttttcttttcctattgctttagagggtgcacttaagcttaaggaattagcttatgttcatgctgaaggatatcctgcgggtgaaatgaaacacgggcctttagcactaattgaagaaggtatgccagtagttgttttagctccaagagatgaacattacaaaaaaactatttctaatatgcaggaagttatagctagaggggctaaagttttattaataacaaacaaaaataaagatgaagtaatctctgaaaacatttgggaaataatagaagttgatcaattagaagatgagttaataccttttttaatgacaatacctttgcaaaaacttgccttttattcagcattagaaaaaggatatgacattgataaaccaagaaatttagcaaaatctgtcactgttgaataa

SEQ ID NO: 247061 - DNA, 924 bp, Unknown
  Bacterial polypeptide expressing nucleotide sequence isolated from the Sargasso Sea
catatcactcatgccttgttgctaagtattggtttgaacaaaatacaaatttagatgtcagtgttgatatagcctctgagtttcgatatcgaagaattaaatttaaaaaagattgtctttatgtgtttgtttctcaatcaggagaaactgcagatacatttgcggcattagatttgtgcaaaaagaataatgttaaaacttgcgcagttgtaaatgttgttgaaagttcaattgcaagagatgctgatttagtattaccaatccactgtggtccagaagttggagttgcttccacaaaggctttcttaggacaaatgttagttctttatctattatgtactaaactttcttatgaacaaaaatcaattaataaaaagagttatcaaaagaagataaaagatttgctatctttatctaaatccgcaaaaaatacattaaacattgaagataaaattcaaacacttggaaaagattttgctaattctaaaggatcaatgtttttgggtagaggttattcatatccaattgcgcttgaaggtgctttaaaactaaaagagcttgcttatgttcatgccgaaggttatccagctggagaaatgaaacatggacctcttgcacttatagaagaaggtatgccagtcgtggtaattgcaccacgagacgagcattacaaaaaaactatttcaaatatgcaagaagttatttctagaggtgcaaaagttttactaataacaaataaaagtactgatgaaatttattctgaaaatatttgggagcagatagaagttgatgccatatctgatgaacttattccttttttgaccactatacctttgcaaaagttagcatattactctgcattagataaaggatacgatatagataaaccaagaaacttagctaaatctgtcactgttgaataaa

SEQ ID NO: 247062 - DNA, 1636 bp, Unknown
  Bacterial polypeptide expressing nucleotide sequence isolated from the Sargasso Sea
atgtgtggaatagttggaatagttagcaataaatctgtatctgcaagtattattggtgcattaaaaaaactcgaataccgtgggtatgactccgctggaatatctactatttcaaacggtcaaataaatgaacaaaaatgttctggaagagtagataatttagaaaaaatcctttttcaaaatccttctactggtgaccttggtattggtcatgttagatgggccacacacggaataccaaatcaagtcaatgcacatcctcattcatctgaggtggtttcggttgttcataatggaattatagaaaactcagatagcttaagaaaagaatataaacaaaaaggttactcatttaaatctcaaacagataccgaagtaataactgttatgttgactgactttttaaaaaaagaagaattaattgattgtattcataaaacattagaaaaattagaaggtagttttgctttaggagttattttcaaagattttaataatttagtagttggagcaaggagaggcagtcctttagcagtaggttatggtcatggtgaaaattttattggatctgactcatacgctcttaagtcaatgacaaacaaaatttcttatcttgatgatggagatttttgcattctttataaagaaaaagttgaattttataattctaataaaaaaaaaataaacaaagaaatttttgaattatctaatgaagataatgtagctgacaaaggtgattataaggactttatgtcaaaagagatcaatgaacagtccgctacaacaaaaaaatgcattaatgaatatttagataaatcccgaaatgaaataaatatttataatttaccaatagacccaaaaaaaattaataaaataagacttattgcttgtggtactgcgtatcactcgtgtttaatggcaaaatattggatagaggaatttacatctttagatgtagaggctgatatagcttctgaatttagatatagaaaagttaaattaaatcaaaacgatctttatatatttgtctcacaatctggtgaaactgctgatacttatgccgccctagaaaaatgtaaaagtaataaagtcaaaacatgtggaatagttaatgttgtagaaagctcaatagctagaagtgctgattttgttttaccaattcacgctgggcctgaaataggtgtagcctctacaaaagcatttattggccaaatgattgttctttatttgttaacgttaaaaatagctaaagagagaagagacatcaagcaggatgaatattcaaaattaattttggatttaataaaattacctgaatttattgaacaaacattaaacaaacaaaaagatatacaaattatagcaagagactttataaatgctaaaggcacaatgtatttaggcagaggatactcttatccaattgcaatggaaggtgcccttaaattaaaagaactttcttacattcacgccgaaggttacgctgctggagaaatgaaacacgggccacttgctcttattgaaaatggaatgcctgtagtagttttagctcctaaagatagatattttgaaaaaaccgtttctaatatgcacgaagttattgcaagaggtggaaaagttttgatgattactgatg

SEQ ID NO: 247063 - DNA, 1714 bp, Unknown
  Bacterial polypeptide expressing nucleotide sequence isolated from the Sargasso Sea
acttgtaaatggaaatataaatgaagttaaatgtgaaggtagagtagatgtgctagaaaaagacatatctaaacttaatcttaaaggagatattggtattggacatgttagatgggcaacacatggtaaacctagcaaaattaatgctcatcctcattcatcagatcaagtttcagttgtacataatggaattattgagaattcaacaattctaaaaaaatttttagaaaaaaagggctatgtttttaaatctcaaacagatactgaagtaattgctcatttagtaacagactatttaaaaaaaaactcaataaaaaacacaataattaaagtcctaaaaaaacttcatggaagttttgctttaggtattatttttaaagatcaaaatgatttaatggttggtgcaaaaagaggctctccacttgcagttggttatggtccaaatgaaaattatattggttcagactcttatgctttaaaatcaatgacaaataaaatttcttatttagaggatggagaattttgtattgtaaaaaaagatcagatagaattttttgatactgatggatctcatataaataaaaaagtgatgaatttatctaaaaatgaaattgattataataaaggtgattataaatattttatggaaaaagaaattgatgaacaaccatcaactattagtgattgtataaacgagtatattgataagtataataaccaagttaatatttttaactttccttggaaaactagttctataaaatctgtaatgctcattggttgtgggacagcatttcactcatgtttaattgcgaagtattggatggaacaaagtacaaacttagatgtaagtgttgatatagcttctgaatttagataccgaaaagttagatttaaaaaagattgtctttatgtttttgtttcacagtcaggtgaaacagctgatacctacgcagctttggatttatgcaaacaaaataaaatgaaaacttgtgctgttgtgaatgtcgtagagagttcaatagcgagagatacagatttagttttgccaattcattgtggtcaagaaataggggttgcatctacaaaagcatttataggtcaaatgttagtcttgtatattctatctttaaaaatttcttatgaccaaaattctattacaaaagaagaatataaatataagcttaaaaatttactaaaattatctaattctgctaaaaaaactcttaaattagaccaaaagattttaaatatcgctaaggtttttgcagatgccaaaggatcaatgtttttaggtagaggttattcgtttcccatcgcattagagggggcattaaaacttaaagagttggcttatgttcatgccgaaggatatccagctggagaaatgaaacatggccctttagcattaattgaggagggcatgcccgttgttgtcttagccccaagagataaacattataaaaaaacaatctccaatatgcaggaggttatagcaagaggtgccaaggttttgttgattacaaataaaaataaagatgaaataacatcagagaatatttgggaaaaaattgaagttgatagtcttgatgaagacttaatgccttttttaatgacaatacctttacaaaaactagctttttactcagctttaaaaaaaggatatgacattgataaaccaagaaatttggcaaaatctgttactgtagaatag

SEQ ID NO: 247064 - DNA, 1819 bp, Unknown
  Bacterial polypeptide expressing nucleotide sequence isolated from the Sargasso Sea
aatgtgcgggataataggtatagccagtaataaaaaagtttctactaacatagtaaatgccctgaaaaaattagaataccgtggttacgactccgcaggtcttgctacaattgcaaatggtgaaatcaatgaaaaaaaatgttctggaagagtggaaaaactcgaaaaaattttatttcaaagtccaaatgaaggaaacttagggataggacacgtaaggtgggcaacacatggagttccgaacgaaatcaatgcccatcctcactcaagtgagatagtatcagtagtacataacggaataatagaaaattctgatcaactaaaaaaagaatttgaaaaatctggtacgatttttaaatctcaaacagatactgaagtaataacagttcttcttacagaaaaattaaaaaaattggatcccttaaaagcagtatttgaaactatagatatactcaaaggtagttttgctttgggtataatatttaaaaatcacaaaaactttgtcattggtgccagaagaggtagtcccttagctgttggttattcaaataatgaaaattatttaggttcagattcatatgctttaaagtcaatgacaaacaaaatttcatatttagatgatggagatgtatgtgttttatctaaagatgaagttaaattttataatcataataaagataaaattaataaagaaatttttacactttctgaggacaaagcatcagttagcaaggggaattataaaaattttatgataaaggaaatctttgaacaacctgttactgtcaaaacttgtttaaaagaatatattgataaaatcagagaggaaataaatttttacaaccttccactagctccaaaagaaataaataagatagtattgattggatgtggaactgcctaccattcttgtttggtagccaaatattggtttgaggaatttacatctttaaatattgaagtcgacatagcctcagaatttagatacagaaaagttagatttgataaaaaagccctttatatttttgtatcacaatctggcgaaactgctgatacatatgctgctttagatctgtgcaaaaggcaaaatgttaaaacttgttcagttataaatgttgttgaaagttcaataaccagaaactcagactgcgttttaccaattcatgctggaccggaaataggagtggcttctacaaaagcttttcttggtcaaatgttagttttatatttactctctttaaaaatttctgaggccagaaatgaaatgcaaaatgttgaatataaaaagaaaatttctgaattaaaaaaattaccctcactaatcagtgaatcattaaaagaagaagaaaaaattcaattgattgcaaaagatatttatgagtctaaaggctcaatgtttttaggaagaggttcctcatttccaattgcattagaaggtgcactaaaattaaaagaactctcatatttacatgccgaaggttatcctgctggagaaatgaaacatggcccgttagcattaatagaagatggtttaccagtggtagtcattgcaccaaaagataaatattttgaaaagactttatcgaatatgcaagaggttatagccagaggtggcaaagtgttgttattaactaattctgacggaaaggttataagtgaaaatataaggtttcaaattaatttaccagactctgatttaactcttacaccttttatgtttactatacctctccaacttctttcatatcacgtagctttattcaaaaaatgcgatatagataagccaagaaacttagccaaatctgttacagttgaataa

SEQ ID NO: 247065 - DNA, 506 bp, Unknown
  Bacterial polypeptide expressing nucleotide sequence isolated from the Sargasso Sea
aatgtgtgggattataggtattgcgagcaataaatctgtttcagtaaatattataaatgctcttaaaaaattagagtacagaggatatgactcagctggattggcaacaatttataagggaagaatagatgaaaaaaaatgtccaggaagagttgaaaaattagaaaaaattttgttccaaaaccctagtgagggaaatcttggtataggccatgttagatgggctacacatggtgtacccaacgaagcaaatgctcacccacactcaactgaaatagtttcggtagtacacaacggcattattgaaaactcaagtgaattaaaaaagactttggagaaagacggaaaaacttttaaatcgcagacagataccgaggtaataacagtgttgcttacagaaaaattaaaaaacgcagaacctttggaagcagtttttgaaaccctaggcattttaaaaggcagcttcgcattaggaataatatttaaaaattataaagattttgtta

SEQ ID NO: 247066 - DNA, 1828 bp, Unknown
  Bacterial polypeptide expressing nucleotide sequence isolated from the Sargasso Sea
tatgtgtggaatcatagctgctgcctcaaatcgtaatgttggaaaattacttgttcaagggcttcataaaatggaataccgtggttacgattctgctggaattgctcttcatcaaacagaccaaattgctcatcttagaaccctaggaaaagtaaagctacttgaagaaaaaatgattgctgaaaagccaaaaagtaagcttggcattgctcacacaagatgggccactcatggagaaccatcagaagaaaatgcacatccacatatgtcaaatgaaagagtttatatcgttcacaatggaataattgagaattatctagatcttaaagattttttaaaaaaggaaggttattctttttcatctcaaacagactctgaattaatagctcaccttcttgaatattttcttaataaaggaaacaacatgttggattcgatgtatttaaccaaagaaaagcttgatggtgcatatgcaatagcagccatagacaaagaagatgatcaaaatattattattgctagaagcaaatctccacttttaataggaattggaatggatgaatttttggcagcttcagatcctctagcaattggccagctgacaaacgagtttatttttttagaggacggagacgtagcagaattatcatctgagagttataccatttttgatgactcaaagaagaaagttgaaagagagatttctcaaatagatatttcaagtcaagctacatctaaaggcgaatatcgccacttcatggaaaaagaaatttatgaacaaccagaagcgattcttaagaccattgatggaagagtaggcggagatgacgttttagataatatatttggacttggctcatctgaaatgttcgaaaaagttaaaagagtccaaatagtagcctgtggaacaagcttgcacgccggaagagttgcagctaactggttttcagcaatttcagaacttcctacacaaatagactatgcttctgaatatagatatagaaatccccatgtagacgatgattctcttctggtcacaatttctcaatctggagaaacagctgacacccttgctgcattgagatatgcacaagaaaaggattatctatcgaccctatgtatttgtaatgttcctacaagttctcttgcaagggaatcagagtattcaatatttactaatgctggacctgaaattggagttgcttctacaaaagccttcacaactcaacttgcagctttaatgctgctagctttgtctcttgcaaaaagcagaggaaaaaatccaaagttaagaacaagagtaataacagcattaagatcattaccagaaacagttgaagaaactttaaaacttaaagacacaattttagaaatagcacctgaaatagctaataaagataatgctttgtttttaggaagaggtattttttatccaatcgctaaagagggagcactaaagctaaaagaaatttcttacattcatgctgaagcttatcctgctggcgagttaaaacatggacctcttgctttaatagatgaagaaattccagttattgctttagcgccagagagcgagatagctgaaaaattagtttctaatcttgaagaagttaaagctaggggcggaactctatatgtattttctgatccttcaatttcaatggatttaaagtctggaagactcatcaatatgccaaagtgcgacttccttttgactccgatcatttatacgatacctcttcaaatactttcttatgaagtagctttgttaagaggaaccgatatcgatcaaccaagaaatctagcaaagtcagtcacggtggagtag

SEQ ID NO: 247067 - DNA, 1822 bp, Unknown
  Bacterial polypeptide expressing nucleotide sequence isolated from the Sargasso Sea
aatgtgtggaattgtaggaattataagtactaaagaagtaacaagtagaataattaattcattaaaaaaattagagtacagaggctacgactctgcaggtattgctactcttacaaatggtgatattagcgaagtgaaatgtgaaggcagggtagatgctttagaaaaagacataataaaatataatcttaaaggtgagatcggaataggtcatgttagatgggcaacacatggaaaaccaagtaaaataaatgcacaccctcattcatcagagaaagtttcagtagtacataatggaattattgagaattctactattcttaaaaaatttcttgaaaaaaaaggatatgtatttaagtcacaaactgacactgaggtaattgcccatttagttacagattatttaaaaaaaaattcattaaaagaaacaattgtcaaagttttaaaaaaactgcacggtagttttgccttaggaattatatttaaagataagaatgatataatggttggtgcgcgaagaggatctcctttagcagttggttatggtcctaatgaaaattatttaggatctgactcttatgcgttgaaatcaatgacaaacaaaatttcttatctagatgatggagaattttgtattattaaaaaagatcaaatagatttctttaataacgatggttcaaaaataaataaaaaaatcatgaacctttcaaataatgagattaattacgacaaaggggattataaatattttatggagaaagaaattgcagaacaaccttcaactattgatgattgtataaatgaatatgtagataagcacaataaacaaattaatatttataattttccatggaacacaaattcttttaaatctgtgttacttataggatgtggaacagcctttcactcgtgtcttgtagcgaaatattggttagaacaaaatacaaatttagatgtaagcgttgatattgcttcagaatttagatatcgaaaagtaagatttaaaaatgattgcctgtatatatttgtttcacaatctggagaaaccgctgatacttatgctgctttagacttatgcaaaaaaaataaaatgaaaacttgtgctgtagttaatgtagttgaaagttcaatagcaagagatgctaatttggttttgccaatctactgtggtcaagaggttggtgtagcctcaactaaagcttttattggacaaatgttagttttatatattttatgtactaagatttcttttgatcaaaaatgtatatcaaaaaaagaatatcagtctaagataaaaaatttacttacattatcaaactctgcaaaaaaaactcttaaaatagatcaaaaaattttaaatattggaaaagtatttgcaaacgcaaaaggctcaatgttcttaggaagagggtattcatttcctatagcattagaaggagcattaaaacttaaagagttagcatatgttcatgccgaagggtatcctgctggtgaaatgaaacatggaccattagcattaatagaggagggaatgcctgtggttatattagctccaagagatgatcattataaaaaaactatttcaaatatgcaggaagttattgctagaggagcaaaagttttattattaacaaataaaagtaaagatgagataatttctgaaaatatttgggaaaagattgaagttgataaacttgatgaagaattaattccttttttaatgactatacctttacaaaaactcgctttttactcagcattagaaaaaggatatgatatcgataagccaagaaatttagcaaaatctgtcactgttgaataa

SEQ ID NO: 247068 - DNA, 1018 bp, Unknown
  Bacterial polypeptide expressing nucleotide sequence isolated from the Sargasso Sea
atgtgtggaataatcgcggcagcttctaatagaaatgtgagtgagcttcttgtagagggtcttcataaaatggaatataggggatatgactcagctggccttgctttgcatcaagagagtaacattgctcacataaaaactttgggtaaagtgagtttactagaggaaaagttaaaacttgaagagcttgatagtactcttggaatagcgcatacaagatgggcaactcacggagagccctcagaaaaaaatgcacatccccataaatcaaatgaaagaatttatattgttcataacggcattattgaaaaccaccttgagcttaaaaattttttgacagaaaaaagctatcaatttagctctgaaaccgattctgaagtaatcggacatcttttagattactttttaaaccaaggaaacaatatacttgactcaatatatttgacaaaagaaaagctagaaggagcatatgcaatagctattttagatatagaagatgaaaataatatttatgtggcaagatgcaaatctccgctacttgttggccaaggtgaaaatgagaattttgccgcatcagaccccttagcaattggaaaactggcaaatgaatttatttttctagaagatgaggatgttgcagttatttcaaaaaatagaattcaaatatacgatgaacaaaaacaacctatacacagagaaataacggaaatagactctgaatatcaaaccatttcaaagggtgaatacactcactttatggaaaaagaaatatatgaacaaccccaagcagttctaaatactcttgatggcagagtggggggtgacgatgttagagatgatatattcggtattagatcttcagaattattcaaaaaggtaaaacgcatacaaattgttgcctgcggaacaagtttacatgcaggaagagtagctgctaactggttatcagcaattgcagacatcccaactcaggtagattatgcatcagagtatagatatagaaatccacatgtagacg

SEQ ID NO: 247069 - DNA, 400 bp, Unknown
  Bacterial polypeptide expressing nucleotide sequence isolated from the Sargasso Sea
catagcacttgaaggtgctttaaaattaaaagaattatcttacgtacatgcagagggttatccagcaggagaaatgaaacatggtccattggccttaatagaagatggaatgcctgttgtggtattggctccaagagatagttattataaaaaaactatttcaaatatgcaggaagtaatagctcgaggagcaaaagttttattaataactaacaagagtaaagatgaaattgtttctgaaaatatttgggaaactattgaagttgaaaatactaatgatgacttattgccattccttttaactattcctcttcaaaaactggcttattactcagccttaaaaaaaggttatgacattgataagcctagaaatttggctaaatctgtcactgttgaataa

SEQ ID NO: 247070 - DNA, 881 bp, Unknown
  Bacterial polypeptide expressing nucleotide sequence isolated from the Sargasso Sea
tatgtgtggaattattggagcaacctcgtcgaggagcgtaggcaagattttaataaaaggccttcatgctatggaatataggggttatgactcggcaggcgttgctctcaaccaagacaatgaagtcctcagacttagatcattaggaaaggtttcatcccttgaagaattaatgatcaacaataagcccaaagcaaattctggaatagctcatacaagatgggcaactcatggggtcccatcagaggaaaatgcccaccctcatggctcacatgacgaaatctacattgttcataatggaataatagaaaaccatgatgaaattagagataaacttaaaagcaaaggttatgacattgcttctgaaactgattccgagcttatagctcatttaatctacttaaataaaacagactcactatcaactcttgaggccttaataaatgcaaccaaagaacttaaaggagctttttcaatagctgccatatcatcaaaagaaaagggcaaaatatatgcagctaaacaaaagagcccactattgattggaaaaggcattgaagaaaactttattgcatcagacccattagcgattgccaatataactgaaaagttttacctgctggaagatggagactttgcagaaattacagaaaatgacattaatatttttaacaatgatggtgagcgtgttcagagagaagagacaaaaatagatgcaacaccaacatcaacaagcaaaggcaactactcacacttcatggaaaaagagatttatgagcaaccagatgcactaagaaacaccataaacggtaggcttggagaaaatgatgtcttggataacattttttgtttgggttccagcgatgcattcaaaagcctaa

SEQ ID NO: 247071 - DNA, 1822 bp, Unknown
  Bacterial polypeptide expressing nucleotide sequence isolated from the Sargasso Sea
atgtgcggaattagcggcatcattgaccaaaagccggtgactcgcaatttgcttacgtcaatcgccaatctggaatatcgaggttatgattcctgcggaatggcgatgctcaatggtaaaggaattgaggttcgtaaaaatactggcggcgttgaggaagttaggagtcgtgaaaaactcgatacgatgaccggaaatctaggcattgcccataccagatgggcaacccatggtggagtcacgacggaaaatgctcacccacatctctcccaaaatggtgagtttgccatcgttcataacggaatcatttcaaattatcagaaactgagagaacgtcttatcggagaaggactccaattcagatcaactacagacaccgaagttttcgtcaacctggttgaggaagcctttgcccagaaaaatgatgttttaggggcattcctggaagcattgaaacaaattcagggaacctattccatcgtcttgctgtcgtcacatgatccagaacatctttactgtgttaaacaagactctccgctgatcatagggctgggagaaggttgcaattacatcggctctgacattaatgcttttcttgagcatacacgaaaagcagtggttttggatgacggcgaatttgccgtcatcagcagggaacgatatgagatttcggatgtcgggaagcgagaagaaagggaaaaatcaattctccaaattgattgggatacggagaccacaaaaaaaggtggtttttcccactacatgatcaaggaaatttttgacgaaccccaaactgcacggcaggctttggacgttcctcaagagcagatcaaacagttggctgagatgtttcaaaatgcccctcgtgcctacctgatgggggttggaacgacttttttcatctgccaaatggcccaataccttttcagttcactctccaaaagatattttcctgctatcagttctgatgaattcaacggtgttgttccagtgagttcaggagaacttgtagtggcggtttctcaatccggggagacttttgataccaagttttcactcaacgttgcacatgaaatgggcgccaagacggcagccattgtaaatgtgatgggttcaagcatcagtcgtatggtcgatcatgtgatcatgcaggggtccggtcctgaaatttgcgtggtttctaccaaggccgcccttgctcaggcgttgctcctgatgcggacagccctggaactgggctacagggaaggctgtctggattcgaagtccttccagtgtcatcaaaaggatttggaaagtgttccggagttgatatcaattcttctcaatgagaaatccggttttatgagaaacctggcccgcatcaccagcagtgtccaaaattggatttttttagggtgcggaatctattatcccgttgccatggaatctgctttgaaaatgaaggaagtgacctatctccatgctgagggcatgcctgctggatttttgaagcatggaacgctttccatgattgaagaatcggtccattcgcttttctttgttcctcctccggctgaagtagatctccacaatcgtaccataattgctatagaagaaattaaaactcggggtggtacgctggttgggctttattttgaaggggattcccaggcgaagtcccttctggattatgctgtcgaacttccccaagtcccctctttgattgctccctttgttcaaatgattctggctcagatgtttgcctattacactgccctcgatttaaaacgcaacatcgacaagcccaggaacctcgccaaatccgtcacggtaggttgat

SEQ ID NO: 247072 - DNA, 1573 bp, Unknown
  Bacterial polypeptide expressing nucleotide sequence isolated from the Sargasso Sea
aaatgctcatcctcattcatctcaaaatgtatctgtcgttcataatggaataattgaaaattcaactttattaaaaaaatttttaattggtaaaggccataaatttaaatcgcaaactgatacagaagtaattgttcatttgataacagaatatttaaagacagagaatatcgtaaactcagttcaaaaaactttaaaatctctttatggtagttttgctctaggaataatatttaaagatcagccagatttaattattggtgcaagaagaggatctccattagctgttggatatggtccaaatgaaaattatttaggttcagactcatatgcacttaaggcaatgacgaataagattacttatctaaatgatggtgaattctgtttaataaaaaaggattatgttgaattttttaacgaagatggagataaaataaataaaaaagtcttagaattatctcttcaaaatgaaaaatatgacaaaggtgattacaaacattttatggccaaagaaatagaggaacaacccacaacattaaaaaatggaattaatgaatatgtagatacattaaataatgatattaacatatataacttcccttggaaaatgaatgaaatttcttcagtaacccttgttggttgtggaacagcttatcattcttgtctgcttgcaaagtactggatcgaagaattaacctcattagatgtaaatgtagatattgcttcagagtttagatatagaaaaaatagatttaaaaaagaaactttatatatatttgtatctcaatctggtgaaacggctgatacttatgcagcattagatttatgtaatcaaaatgatatgaaaacatgtgcggttgtgaatgtaattgagagttcgattgctagagactctaaatttgttttaccaatacattgtgggactgagataggagttgcatctactaaagcctttttgggtcaaatcctaatattatatattttagctttgaaactgggattattgagaaaagatttaaaaaaagagctgtttaatgaaaaacttaaggaccttaaatctcttccaaaattagcagaaaagactttgttgaccgataataaaatacagacaatatctaatacctttaatgtagctaaaggttcaatgtttctaggtagaggtttttcttttccaatagcattagagggtgctttaaaattaaaagagttatcttatattcatgcagaaggctatccagccggtgaaatgaaacatggacctcttgcccttattgaagaaggaatgccagttgttgtgttggcacctagggacaattattataaaaaaactatttctaacatgcaggaggttattgcaaggggtgcaaaagttttattagtaacgaataaaagtagtgatgaagttgtttctgaaaatatttgggaaaaaatagaagttgaaagtgctaatgaggaccttttaccctttcttttaactataccattacaaaaattagcttattattcagctcttaaaaaaggatttgatatagataagcccagaaatttagctaagtcagtaaccgttgaataa

SEQ ID NO: 247073 - DNA, 205 bp, Unknown
  Bacterial polypeptide expressing nucleotide sequence isolated from the Sargasso Sea
gttatcttcctgtctgatgtggtgggcgtatctcggttgggcggcgcaacggaagcgacggtgaccctgccaaccgtggatcccttcgtcgcgcctctgctttacgccattccagtgcagttgttggcctactacatcgcggtgatcaaaggcaccgacgtggatcaaccccgcaacttagcaaaaagtgtcaccgtagaatagt

SEQ ID NO: 247074 - DNA, 1897 bp, Unknown
  Bacterial polypeptide expressing nucleotide sequence isolated from the Sargasso Sea
atgtgtggaatagttgctgtaactggatataaaaaagctttaccattattaattaatggtttagaaaaacttgaatatagaggttatgattctgctggtattgcaataataaattccgaaaataattgtatctcttgtaaaaaagcagaaggaaaactaaataatttaaaaagtaatcttaatgatcataatattcctggaactgtgggtataggacataccaggtgggcaactcatggaaaacctgaggttaaaaatgcacatcctcatacagatagttcaggaaatatagctgttgttcaaaatggcattattgaaaatttccaagatttaaaaaataaattagaggaagagggtattatttttaattctgatacagataccgaggtaattccccacttaattcaaagagagttaagtaatttaagtaaacttaatcttgagaataatgggtcaacattattagtagctgtaagaaatgtattatcggatttagaaggatcttatgctttagcagttttatggtctggcgctccaacctctttggtagttgcaagaagacaagctcccttgattattggtttgggtgaaggagaatttatttgtgctagtgatactccagctattgccaactttacgaatattattttgcctatggaggaggatgaaatagctttgttgactccgcttggaattgaaatatatgactcaagcaatgagagacaatatagaaatcccgtttctttaacagtctcagagcaaataatggataagatgaattttaaacactacatgttgaaagagatatatgatcagccacagactgcaaaaaactggttggaaaattatttaattaagagctcagataatggtcaatatcaaattaactatccatttgatacagagttttttgaatcaatagaaagaattgaaattattgcttgtggtacaagtaaacatgctgcaatggtgggcagctttttattagaacaattttcaggtattcctacaaatgtcttttttgcaagtgaatttcgatattcaccacctccactattgccaaatacattgactattggagtcactcaatccggagagactgctgatacaattgcggctatcgatatggaaattaaaagacgttctattattgaaaatgaaaaatttaaacccaatcttattgcaataacaaacagaaaagagagttccataggaaggcaggtctcaaatataattgatatctgtgcaggaatagaagttggagttgcagcaacaaaaactttttttgctcaattactcgctttttatggattagccataaaatttgctcaaattaaaggtaatcaaagtcctgaagaaataggtaaattaataaacgaacttaaaaatcttccgccattactggaagatctcatagagaaacataataaatcttcagaaaagctagcacatgatttttttaatattaaagatgttatttttttaggaagaggaataaattatcctattgctcttgaaggtgcgttaaaacttaaagaaattagttatattcatgcagctggatatcctgctggagaaatgaaacacggtccaatagctttgttagataaaaaagtacctgtaatttctatcgcctcccctggtgaggtttttgataaagttattagtaatgctcaagaagcaaaagctagagattcatatttgattgggattgctcctgaatgtaacggaactgaaatctttgattatttaatgaaagttccttcctctaatgaatggatttcacctctccttaatatactgcctttacaattattgagttaccatattgcatctcataggggacttgatgtggatcaaccaagaaatctagctaagagtgtaactgttgaataat

SEQ ID NO: 247075 - DNA, 165 bp, Unknown
  Bacterial polypeptide expressing nucleotide sequence isolated from the Sargasso Sea
tatgtgtggcatcgtcggggccgtcgcccaacgtgatgtggctgaaatcctggtagagggcctgcgccgtctggaataccgtggctacgattcggccggtgtcgccgtgttcagcgccagccagccgctgcagcgggtgcgtcggctgggcaaggtggccgagct

SEQ ID NO: 247076 - DNA, 1204 bp, Unknown
  Bacterial polypeptide expressing nucleotide sequence isolated from the Sargasso Sea
agatgacggagatttttgtttactttatagagaaaaagttgatttttttaattctaaaaaaaataaaattaataaggaaatttttgaattatctaatgaagataatattgctgacaaaggtgattataaagatttcatgtcaaaagaaatcgacgaacaatcagttacaacaaaaaaatgtattaaagaatatttggataaatctcgaaatgaaattaatatttataatctgccaattgatccaaagaaaattaataaaattagattaattgcatgtggcacagcttaccattcttgtttaatggccaaatattggattgaagaattcacaactattgatgttgatgcagatatagcatctgaatttagatatagaaatgttaaattaaatccaaaagatttatatatttttgtttctcaatctggagaaacagcagatacttatgcagctcttgaaaaatgtaaaaaaagcaatgttaaaacttgcggaatagtaaatgttgttgagagttcaattgcaagattgtctgattttgttttacctattcacgcaggaccagaaataggtgttgcttcaactaaagcttttttaggacagatgttggttctttatttattaactttaaaaatatctaaagaaagaaacgaaattgatgttgaaaattataaaaatttggttttggatttaatgaaattacctgattttattaaagaaactttattaaaacaaaaagatatacaggttattgcaagagattttatttcagctaaaggaaccatgtatttaggtagaggttattcttatcctattgctatggaaggtgctttaaaattaaaagaactttcttacatacatgcagaaggttatgcagcaggagagatgaaacatggtcctctagcactgatagaagatggtatgccagttattgttttatctccaaaagatagattttttgaaaaaactatttctaatatacaagaagttatagcaaggggtggtaaagttataatgattactgatgatacatctacaacaatgaacgaaaatattagatttaaatttcaaataccaaaaacaaattctacgcttaattcttttttactaactattccaattcaatttttagcttaccatgttgcactattaaaaaactgcgatattgataaacccagaaacttagcaaaatcagtaacagtagagtaa

SEQ ID NO: 247077 - DNA, 412 bp, Unknown
  Bacterial polypeptide expressing nucleotide sequence isolated from the Sargasso Sea
atgtgtgggatagttggtggtaattctgaaagaaatattttacctattttggttgagggtcttaaaaggcttgagtacagaggttatgattctgctggcgtcgcatttaaaaaaaatggctcaatttgtgtcacaaaaaaccttggcagagttaatcaattaacaaaaaaactaaacctaaaaacaaaccacagcaatttaggtatagcccatacaaggtgggcaacccacggcatcccatctgaaaaaaatgctcacccccatcacagtaaaaatatttttgtggtccacaatgggattatagaaaatcataacgatttaaaagcagaccttaaggcagagggcataagattttctacccaaactgatagtgaagttattgcacatctcataagaacgtacacagaaaaag

SEQ ID NO: 247078 - DNA, 1420 bp, Unknown
  Bacterial polypeptide expressing nucleotide sequence isolated from the Sargasso Sea
atgtgcggtattgttggaataattggcaagtcggatgtatccgaaaaattactagcatcattgaggcgactagagtacaggggctatgattctgccggattagctgtaataaaagacggcataattaagcgcaggcgggctgaaggaaagctgacccgtttagcagagaagctcgagaaaaagcctttacctggatcaattggtattggtcatacgcgctgggcaacgcatggcgttcccaatgaggcaaatgcacatcctcacgccaccgataaggttgcgcttgtgcataacggtataattgagaattaccaggaactaagaactgagatagaaaagtcaggtagatctttagcgtcagatacagatacggaagtagttgttcacctgattacacagtatttggagaatgggctctctccggaggcggctacgcgcaaggcactgggacatttggagggtgcttttgctttggctatattgttttctgaggaagagaatttgatcattgcaaccaggcggggtagccccttagctattggtatgggtgacgcggagatgttcttgggttccgatgccaatgcgctggcgggcttgacggaagagataatctatcttgaggagggagattttgcattactctcgggttctggtgtaagtatcagtgatgagaataataaaattgtagagagaaaaacccacaaaattgatattgcctctaaagatgtaggtaaggcaggttttgatcattttatgttgaaggagatatttgaacaaccacaagtgattggagatactcttcacagttttattaatcaagcagatagcaaaattgttcttcccaaaatgcccattgatttaacatccgtaaatagaataacaatttccgcttgtgggactgcatactacgctgctctgatagccaaatattggattgagagcttagcgagaatacccgtagatattgatattgcctctgagtttagataccgcgaagctcttatgttaaaaggagagtgtgccatctttgtttcgcaatcaggggaaacggcagatacactggcggcgttaagatactgcaaaaacgagggtcagaagatactatcaatagtcaacgtgctggagagcactatagcaagagaatcagacgtcgtgctccaaacttttgcgggtcccgagataggtgtagcttccactaaggcctttacaactcagcttacagttctggcggttctcgcaatagatttggctcgaaaaaggggcaagctaactcttgagcaagaggctcacctcgtatcggcacttttggaagtcccggctaaggtttcagaagttctaaaccatgatgagaatcttaaaaaagctatcccacgaactcgctttagccagggacgtattatatcttggtcggggcattagc

SEQ ID NO: 247079 - DNA, 817 bp, Unknown
  Bacterial polypeptide expressing nucleotide sequence isolated from the Sargasso Sea
aatgtgtggaatatatacttcaatatctaaaaaagaaacattatgttctgaattcttagcgtccttaaaagagcttgaatatagaggttatgattctgcaggaattactattcttgataggaataaatataaaacttacaaaacacttcaaaaaattagtgatcttaaatcgaaaatcccaaagctaaactcttcaaagttaataatggggcatactcgatgggcaacccatggggagccaaacttaagaaattgccatcctcatgtattaggaaatttatcaattgttcataatggtgtagtagagaattacgaggaaattaaaaatagtaaatatttaaaaaaaattaaattaaaaacagaaactgatactgaagtaattttacaactaataaaattttttaattattctaattcatttcttaactcaatattaaaaacattcagtattgttaaaggctcaaacgcttttatatgctctaaaatatctgataattctaatgaagttattgcatgtaaatacaatacacccttatattatgggcagaaaataaatggtgataacattttctcatcggacataaatgctatgaaaaagtcactcaaaggctatagatatatcgaaaatgatgaatttatttatatagaaaacaataagcctaaaatattttgtataaataaaaaaagaaaaaaattaatattaaaaagaatagaaaataccgatcaaaatataaataagaaaatcaaaaaaaatattacatataatgaaataaaagaacaaaaaaaattaataagtaaccatatttttagggtatga

SEQ ID NO: 247080 - DNA, 574 bp, Unknown
  Bacterial polypeptide expressing nucleotide sequence isolated from the Sargasso Sea
tctttgagaaatgaaattaataaagaaaattataaagaaaaaattaaagacttgcagaagttaccaagtttaattgaaaaatctttattaacagataatgatattcaggctatctcctcaacctttaatgaggcaaaaggctcgatgtttttgggaagaggtttttcataccccatagcacttgaaggtgctttaaaattaaaagaattatcttatgttcatgcagagggttatccagcaggagaaatgaagcatggtccattggccttaatagaggatggaatgcctgttgtggtattggctccaagagacagttattataaaaaaactatttcaaatatgcaggaagtaatagctcgaggagcaaaagttttattaataactaacaagagtaaagatgaaattgtttctgaaaatatttgggaaactattgaagttgaaaatactaatgatgacttattgccattccttttaactattcctcttcaaaaactggcttattactctgccttaaaaaaaggttatgacattgataagcccagaaatttggctaaatctgtcactgttgaataaa

SEQ ID NO: 247081 - DNA, 598 bp, Unknown
  Bacterial polypeptide expressing nucleotide sequence isolated from the Sargasso Sea
atgtgtggtatagtagcatataagggacataaaaactgttatccaatacttttagacggattgcataaacttgagtatagaggatatgattctgctggtgtagcttgtctaactgaaaatggtaaaattgtagttacaaaaagaagtggaaaagtaaaacagcttgaagaaggattaaaaaaaagtaatttaattgaaaattgtaatggttcaggtattgctcacaccagatgggcaactcatggaaagccgaatcaagtaaatgctcatcctcataaagaccaatctggaaatattgtattagttcataatggaattattgaaaattatgacccaattaaaaaatttttaagatccaaaaaagttaaatttaaatctgaaactgatactgaagttttagttcaattaattggatatttttttaatcaaggaaaattaaattttgagcaatcagtcagagctgctttgcagagggtcgatggagcatatggaattgtagtcttaaataaaaaagaacctgatataatgattgcagccaggaaaggaagtcccctagtccttggtattaaagataaggagttttttatcggagagtgat

SEQ ID NO: 247082 - DNA, 1828 bp, Unknown
  Bacterial polypeptide expressing nucleotide sequence isolated from the Sargasso Sea
aatgtgtggaatcattggtgcagcctcctctagaagtgttggaaaaatcttggtcagtgggctgaagaaaatggagtatcgcggctatgactcggccgggctcgttttaaaccaagacgaggccgcatttcaattaaggacgctaggcaaagtttcaaaccttgaagacgaaatgattgaacaaagacccaaagcccattctggcattgcgcacacaagatgggcaacgcatggaattccatcagagacaaatgcacacccccatgggtcaaatggaaatatatacattgttcacaatggaatcattgaaaatcacgatgagctgagagaaaggctgtcaaatgaaggttatgagattcagtcagaaaccgattcagaattgattgctcacctgatccatttcaataaagaaaaaggcaaaaccacattgggcgcactaattgagacaacaaaagagcttgatggcgcatactcagttgctgtaattgacacagaggagaaaggaaaaatatttgcagccaaacaaaaaagtcctcttttggttggaaaagggatagaggaaaattttatcgcctcagatccgctcgcaatagccggtcttgccgaatctttctatctacttgaagatggcgactttgcagaaatcaccaaagatgaaattaaaatttttggcagcaatggtgaggcgctctcaagagaagagaccataatagacacaagcgtgaaggaggcatcaaaagatggttacaaacacttcatggaaaaagaaatatatgagcaacctcaagcaataacaaatgctattgagggaaggacttcagatggagaggttttagataatatatttgggctgggttcatcagaggcgtttaagggcgtcaaaagaattcagtttgtagcctgtggcacaagcctgcatgcagctaaaacagccagaaaatggtttgaagaactctgtgagacaccatgctatatagattttgcaagcgaatataggtaccgaaacccacttgttgaagacgatactttgtttgtatgcatatctcagtcaggagaaacagccgacaccatggcagcgcttaattatgcaaaagatgagaaatatttaggcatcgtcacaatctgtaatgttcctacgagcaccatggccagagaatctgattggaagatattcacaaacgcaggcccagagataggcgtagcttcaaccaaggcgttcacaacacaacttgcagcactgcttttgttggcttgttcgatatcaaaaagcaaaaacttaaacaaagataaaagagcagacgcaatcaatgaccttcttaacacaccttcgcttgtgaaagaatcatttgggctaaaaagacacatcgatgagatagttgagaaaattgctgacaaaaagaatgctttgtatttgggcaggggtgtttacttctcaattgcacaagagggcgcgctaaaattcaaagagattacttacattcatgctgaagcatatccagcgggagagctaaagcacggcccgcttgcacttgttgatgagatgacacctgttgtggcccttgcgccggaagacgaactcgtggaaaaacttttgtctaacctcgaagaagttaagtcaagaggaggaactctttatgtctttggaaatgcaacctcaaagatcaaaattgaaaaaggcaaattcatgaatatgcccgattgtggttactacaatgcaccaattgtttatacgatccccttgcaaattttggcatatgaagttgcatgctcaataggaacagacctagaccaacctagaaatttagcaaaatcagtgacggtggaatag

SEQ ID NO: 247083 - DNA, 1654 bp, Unknown
  Bacterial polypeptide expressing nucleotide sequence isolated from the Sargasso Sea
atgtgcggaatagttggatatataggaaaagaaaatgcctcaaaaatattaattgatcttacaagatctttagaatatagaggttatgatagtgcaggtattgcaatatatgacaataaaaaggataaatttttaattaaaaaaactaccggcaccatagataaaataaaagaggaaattcttgattctatagacgggactacaggtatatcacatactagatgggctacacatgggaaaattaataataaaaatgcacaccctcaaataagttcaaataataaaatactaatcgtgcataacgggatagttgaaaattatcaagaaataaaaaatgatttagttaataatggctacgattttatctcagaaactgattcagaagtaatagcaaatttagttgattttaatctaaagaaattaaatctcaaagatgctttagaaaaaactattgatgctataactgggtcttcttcaatagtaggaatagacatagataacccaaatgatatttttttaatgaagaaaggaaattcaggaggattggtaataagtgaaaataagtctggagaaaaaataatatgtagtgaccctacaataattaccgaattcagctcttcttatagatatctagtagatgatgaggtagcaataatttcaaaagacaaaaatgattttattagagaaaagaaagagccaaacaaaagaattgttgaaataaaaacaaataccattttagagaacgacaaagcttaccaatataagatggaagaggaaatcttttatcaaaaaaaatcaataaaaagaataattgataataaaaatgatttgataataaaaaatttaaatgaatcaaatatagaatttaaaaatataaaacgagttcttgttataggaatgggaagctcgtttaatgccggattactagggtcatattattttgaatctatttcttctttaaaaagtgaaactattaatgcatctgaatttatagattctaaaagaataattgataataatgatttagttctaggagtgacacagtctggtgaaactgctgagacaataaaagccttggaatatgcaaaatctatgggggctaaaactatctctgtaacagaaaagaatatatctcaagcatcaataatttctgatgttaatgtaaacattggctgtggtccggaatacgctgtggcatcaactaagacctttacagcaactgtactaacactatatataaccgctatatatctatctaaaaatatctcaaataaaaaaggattagaaaataatatattaggccttgattcaagaatagaatcattgttattagacactaaaaaaactaaacaaatagcaaagatcctttcatctaaagatcatattttatatctaggtaggggcattatgtatccaatagcattagagggagccttaaaaatgaaagaggtttgctatattcattcagaaggttatgcagccggagaaatgaaacacggagttaacgctttaataggggtcaatatgccgtcggttgttatttcacctctaaacgaaacatattctaaaatggtaagcactataaatgaaattcaagcaagaaatggagaggtaataggtcttgttgacgcaaaagataatgatattaacagtt

SEQ ID NO: 247084 - DNA, 873 bp, Unknown
  Bacterial polypeptide expressing nucleotide sequence isolated from the Sargasso Sea
atgtgtcgtgcaacgtagaaattgcatcggagtttcgttaccgcaagtcagtagtgcacccgaacagcctgcttattactatctctcaatcaggtgagacagccgatacgttagctgcccttcgcttagcaaaagagctgggctatatgtctagtttgactatctgtaacgttcagggttcgtcattagtacgcgagtcagaccttgcatttatgacccgtgctggcgcggaaattggcgtagcgtctaccaaagccttcactactcagctcactgcgttcttaatgcttaccctagcgctgggcaaagaaaacggcatgacagacgctgacagcaaagctattgtctctgcgcttcatagtctacctgcaaagcttgaagagaccttagcgataactggtggtattgaagatttagctgaagaatttgcagataagaaccacagcttgttcctaggtcgtggcgaccaataccctattgccatggaaggggcgctaaagcttaaagagatttcttatattcatgcggaagcgtatgcgtctggggaattgaaacacggcccacttgcgcttattgatgacgaaatgcccgttattgtggttgcacctaacaacgaactcctcgagaagctaaagtcgaacgttgaagaagtacgtgcccgtggcggcatcatgtatgtgtttgcggataaagatgcggcgtttgaaggtgatgaaaccatgcgcgttatcgacgtaccgcactgcgacgaaccaatcgcacctatcatttataccttgccactacagcttttgagctactacgtagcgctaattaagggcaccgacgttgaccagccgcgtaacttggcgaagtcggttacggtggaataaa

SEQ ID NO: 247085 - DNA, 1779 bp, Unknown
  Bacterial polypeptide expressing nucleotide sequence isolated from the Sargasso Sea
aatgtgtggaatcatagctgccgcttctaatagaaatgtaggaaaacttcttgttcaaggtctgcataaaatggagtatcgaggctatgactctgccggaatagcgctccatcaaaacgatcaaatagcccacttaagaactctaggaaaagttaaattactagaagaaaagatgatctctgaaaagcctaaaagcaagctggggattgctcacactagatgggcaactcatggagagccatcagaggaaaatgctcatcctcacaagtcaaatgaaagagtctacatcgttcacaatggaattattgaaaactatctagatttaaaagaatttttaaaaaaagaaggctacaaattttcttctcaaacagactcagaattgatagcccatatgcttgagcattttttagctaagggcaactctacgctggactcaatgtatttaactaaagaaaagcttgatggcgcttatgcaattgcagtaatagataaagaagatgacaaaaatataattattgctagaaataaatcaccactactgattggaataggaaccaatgagtttttagctgcatcagatcctcttgctatagcccaactaacaaatgaatttattttcttagaagatggagatgtggctgagctctcatctgaagaatttacaatttatgatcagtcaaaaaataaagttgaaagagagatctctaaaattgacatttctagtcaggcaacctccaaaggtgactacaaacatttcatggaaaaagaaatatatgaacagcctgatgcaattctaaatactatcgatggcagagttggtggcgatgatgtattggataatatctttggcatagggtcatcagatatatttgagaaagtaaaaagaatccaaattgttgcttgcggaacaagtttgcatgcagggagggttgctgcaaactggttttcttctatcgcagaattaccaacccagatcgattatgcttcagaatatagatatagaaatccacatgtcgacgaagattctctattggtaacaatatcccagtcaggagaaactgcagatacacttgctgcattaagatatgcaaaagaaaaagattatttatcatcactaacaatttgcaatgtaccaactagctctcttgcaagggagtctgactattccatttttaccaatgccggtcctgagataggtgttgcctcaaccaaagcatttactactcaacttgcagcattaatgttgcttgctcttgcgcttgcaaagagcagggataaaaatcctaaattaagaactcgtgttattacagcgatgaggtcgttatctgataccgtaaacgagaccttaaaattaaaagatgagattcttaagatagcacccgaaatagcaagcaaagataatgctttattcttaggaaggggcatcttttatcctattgcaaaagagggcgccctcaagcttaaagaaatctcttatattcatgctgaggcttatccagcaggtgaattaaaacatggacctttggcactaattgatgaagaaatgccagttattgcattagctccagagagcgaaatagctgaaaagcttgtttcaaacctagaagaagttaaggctaggggcggcaccctatatgttttcgctgatccttcgataacaatggatctaaaatcaggactagttattaatatgcctaaatgtgattttcttttaactcctattatttatactattccgcttcaaattctttcttatgaggttgcccttttaaggggtac

SEQ ID NO: 247086 - DNA, 1303 bp, Unknown
  Bacterial polypeptide expressing nucleotide sequence isolated from the Sargasso Sea
aatgtgtggcatttttggaatatcttcaactaaaccgatttcaaaccaactgattaagggattatcaaaacttgagtacagaggttatgattcagcaggcatttcaggccatggaactaagaatcaattagttacaattaaagcgactggcccaattaagaacctgaaaagcaaattatataagttacaaggaataacgacaggcatctcacatactagatgggcaacacatggacagccaacgctaaaaaatactcatcctcacttgtctggtgatatttgtactgttcacaatggaattatagaaaactatatggatcttaaatcatatcttaaaaagaagagctttgtatttaagagtgacactgactcagaggtaatttgtcatttaataaattattactttagtaaatcagctgatatgcaatctgcaattatctcaactgcaaattcacttgagggaagttatgcattagctgctatcaacgctcagactcctcacactatttattcggcatgcaagggtagtccaattatcctaggtaaagacgtttcatctaattatatatcttcagacatgactccgatagttgaccacactaaaaattatatgcccatggatgacaatgaattttcagaaataagttcttcagatattaaaatcttcaacaaaaataaaagagtactttcaaagccaactaaagtatcaaaaattaataagaaccaagcatcgctaatgggacataagcattttatgcacaaagagatttatgaacaaaaagccatcatagaagatatgataaatcgttatgttggtaagaataaaatattacctaatatctttggtcatagcacagataaacttctagaagatatcaagcacatacattttgtagcatgcggaactagttatcatgcatcattggtcgccaaagactggatagaacaatttacaactgtgacatgcactgcagaggtcgcaagtgagtataaatacaaaaaaatcaatgtattgcccgacacactatttgtgagtatttctcagtctggggaaacagctgatactatctcatctttgaaaaaagcgctgaaactaaaatatacaaatactctagcaatttgtaatgttgcagaaagcacactcacaaggctgtccgggatgaactttctaatgaacgcagggccagaaatcagcgttgcatctacaaaagcttttacctcacaacttttcactctcctgctgttaacggcaatcatatcaagaagtatggcaatactgaaaagagaatggtccaagatataa

SEQ ID NO: 247087 - DNA, 487 bp, Unknown
  Bacterial polypeptide expressing nucleotide sequence isolated from the Sargasso Sea
actgtatgaaatggaaccagagattaaaaaaatttctaccaaatttaaaaataaagagcatacgctttttttaggtaaaggagcatcatatccaatagcacttgaagctgctttgaagctaaaagaaatatcatacatccatgcatcagcatatcattctggtgaactcaaacatggacctttggcacttgttgatagaaggatgccggtagtctgttttcttccagataatcacctggcaagattggtcttatctaatctcgctgaagtagaagcaaggcaaggtcagacatttatttttaccaataaaaaaattgccaagaataagaaacaagttcaggtaattaaaatgccagattgcccagatcttatcgtaccaatcctatatatcattcctgcccaacttttaagttatcatgttgcaattaagaaaaagacagatgttgataaacctagaaatctagcaaaatcagttacagtagagtaa

SEQ ID NO: 247088 - DNA, 1556 bp, Unknown
  Bacterial polypeptide expressing nucleotide sequence isolated from the Sargasso Sea
tgatgtgaatgctcatccgcattcagataacagtgaagactttgcaatcatccacaatggaataattgaaaattatgcagagatgaaagacagtcttttaaaagaaaattattcatttaaatcagatactgacacagaggtagtagctatcgaattaagtaaacaatggaatggtaatttattagagacagtagttaaagttacaaaagatttagaaggaacatatgcattagttgtaacaactactaagcaggaaaatacaattgttgcaggtaggatgatgagccctctagttttaggagtaggagagggagaagtattcttagcttcagactcagctgcaattcttgagcatacaaataagatgattttcttagagaatggtgattttgtagaaatacatgatggaaaatataaattatttgatgctgatctaaatgacattgaaagagaagtacaaataattgattgggaagtttcagaagcagaaaaatctggacatgatcactttatgtataaagaaattttagaacaagctgaagttattgaaagaacaatcacaggaagacttgaagaaggttcccctgagataccaataactaaagaggaagcgcaaaaatatgagaaaatctggattgttgcatgtggaaccgcttatcatgctggactatttggaaaagatttgttcgaaaaagttttaggagttccagtaagcgtagagcttgcttccgaatttagatatagagagccgataataggggaaaatgatttaggtattgttatttctcaatctggcgaaacaatggacaccattgcagctacagagcttttgaaggagaacggttcccatgtcttagcactagttaatgttgtaggaagttctcttgcaagaatggctgatagtgtcttttatctacatgttggaccagaaataggagttgcttctactaaagcatatctcggtatgttagttggacaacttgttttagctaaacattgggatactcaaaacaaattagatgtttcatttgaagagattaaaggattaccttctctcatagaagagaccttaaaatgtgagaaagaaatcaaagagattgctgaatcaatttataaacaaaatgatgtttattttattggaagaggattagattatgctcttgctgcagaaggagctcttaagttaaaagaaatttcctaccttcatgcagaggcacttgcagcaggtgaactaaagcatggaaccctagcactcattgaagaaggaacaccagttatcgttactgcaagtcaatatcacttattagataaaacaactagcaatgtacaagaagttaaggcaagaggagctcatgttattgcaatagggaatagttcatcagaaaaattagaaaatatttcagataagtatattactttgccagatagtaatgaaatattatcaacagtcatctcaattattccacttcagtttattgcatatcatgttgccaataatagaggtgagtcaatagaccaaccaagaaatttggcaaaatctgtgacggtggagtaat

SEQ ID NO: 247089 - DNA, 1819 bp, Unknown
  Bacterial polypeptide expressing nucleotide sequence isolated from the Sargasso Sea
tatgtgtggaatagttggaatagtaagtaataaatcagtatcagcaagtataattggtgcattgaaaaaactagaatatcgtggctatgactcagctgggatctcaacactaagtaataatcaaattaatgaacaaaaatgttctggaagagtagataacttagaaaaaatactttttcaaaatccttcggatggtgatcttggcattgggcacgtaagatgggcaacacacggaatcccaaatcaaattaacgctcatccacattcctctgaagtggtttcagttgtgcacaatggtataattgaaaattctgataaattaagagatgagtatattaaaaaagggtattcttttaaatctcaaacagatacagaagttataacagtaatgttaactgattatttaaaatcagaagatttaataaattgtattcataaaactttagaaaaattagaaggtagttttgctcttggagtaatatttaaagattttaaaaatttagttgttggagcaagaagaggaagtccactagcagttggatatgggcataatgaaaattttataggttcagattcttatgctcttaaatcaatgacaaataagatttcttatctagatgatggagatttttgcttgctttatagagaaaaagttgaattttataattcagaaaaaaaaaaaattaataaagaaattttagaattatctaatgaggacaatatcgccgaaaaaggagattataaagactttatgtctaaggaaattgatgagcagtcatttactacaaaaaaatgtatcaatgaatatttagataaatctcgtaatgaaattaatatttataatctaccaattgatccaaaaaaaattaataaaataagattaatagcctgtgggacagcatatcattcatgtttaatggcaaaatattggatcgaagaaaatacttctattgatgttgaagcagacatagcatctgaatttagatatagaaatgtaaaactaaataaagatgacctttatatctttgtttcgcagtcaggagaaacagctgatacatatgctgcgcttgaaaaatgtaaaaaaaataatgtcaagacctgtgggatagttaatgttgtagagagctcaatagcaagacttgcagattttgttttaccaattcatgctggacctgaaattggagttgcatctactaaagcttttttaggtcaaatgcttgttctttatttgctaatattaaaaatatcaaaagaaagaagtgaaattaatcaagaaaattataaaaaactaattttagatttaataaaattaccagattttattaaacaaactttatcaaaacaaaaagatatacaagttgtagcaagagattttgttaacgctaaaggaaccatgtacttgggaagaggatattcatatccaattgcaatggaaggtgctcttaaattaaaagaactttcttatattcacgctgaaggatacgccgctggtgaaatgaaacatgggccacttgcattaattgaagatggtatgccggtaattgtattagcgccaaaagatagatattttgaaaaaactatttcgaatatgcaggaggtaatagccagaggcggtaaagttataatgataactgatgatacatctataacaatgagtgaaaatataagatttaaatttcaaattccaaaaacaaactctactcttaacccttttttattaagtatcccacttcaattcttggcttaccatgtggcattattaaaaaactgtgatatagataaaccaagaaacttagcaaaatcagtaacagtagagtaa

SEQ ID NO: 247090 - DNA, 343 bp, Unknown
  Bacterial polypeptide expressing nucleotide sequence isolated from the Sargasso Sea
tatgtgtggaattattgcagcagcctcaaatcgtaacgttggaaagttgcttgttcaagggcttcataaaatggaataccgtggttacgattctgctggaattgctcttcatcaaacagaccaaatcgctcatcttagaacccttggaaaagtaaagctacttgaagaaaaaatgattgctgaaaagccaaaaagtaagcttggcattgcccacactagatgggccactcacggagaaccatcagaagaaaatgcacatccacatatgtcaaatgaaagagtttatatcgttcacaatggaataattgagaattatctagatctcaaagattttttaaaaaag

SEQ ID NO: 247091 - DNA, 474 bp, Unknown
  Bacterial polypeptide expressing nucleotide sequence isolated from the Sargasso Sea
aagaggagatcattaagatagctcctgaaatcgcaagtaaagaaaatgcacttttccttgggcgcggaattttttatccaatatctaaagagggtgctctaaaacttaaagaaatatcatatatccatgcagaagcatatccagcaggtgagcttaaacatgggcccctagctcttattgacgaaaatatgccagttatcgcccttgcgcctgaaagtgaaatagtagaaaaactggtatcaaatctcgaagaagtaaaagcaagaggcggaatgctttatgttttttcagattcctctgtaacaatggacacaagctcagggagctttataaatatgcctgagtgtgactttttgcttaagccgattctatacaccattcctcttcaaatcttggcttatgaagtatctattctgagaggaactgaaatagatcagccaaggaatctagccaagtcagtcacggtggagtaag

SEQ ID NO: 247092 - DNA, 724 bp, Unknown
  Bacterial polypeptide expressing nucleotide sequence isolated from the Sargasso Sea
cttgcgctgtggtaatgtaattgaaagttcgattgcaagagatgcaaattttgtattaccaattcattgcggcccagaaattggtgttgcatctacaaaagcttttttgggtcaaatactaattttatatattttagccttaaaacttgggtctttgagaaatgaaattaataaagaaaattataaagaaaagataaaagacttacagaagttaccaagtttaattgaaaaatctttattaatagataatgatattcaggctatctcctcaacctttaatgaggcaaaaggctcgatgtttttgggaagaggtttttcataccccatagcacttgaaggtgctttaaaattaaaagaattatcttatgttcatgcagagggttatccagcaggagaaatgaagcatggtccattggctttaatagaggatggaatgcctgttgtggtattggctccaagagatagttattataaaaaaaccatttcaaatatgcaggaagtaatagctcgaggagcaaaagttttattaataactaacaagagtaaagatgaaattgtttctgaaaatatttgggaaactattgaagttgaaaatgctaatgatgacttattgccattccttttaactattcctcttcaaaaactggcttattactcagccttaaaaaaaggttatgacattgataagcctagaaatttggctaaatcagtcacggttgaataa

SEQ ID NO: 247093 - DNA, 835 bp, Unknown
  Bacterial polypeptide expressing nucleotide sequence isolated from the Sargasso Sea
tcgtgatccagtaattgatccaaatgcattatgtatatttgtctctcaatctggtgaaaccgccgacactaaagctgcattagattattgtagaaagcagaaaattcagacattgagtattgtaaatgttaaaaatagttcaatagcaagagatagtgatcactgtatttatactaaggcaggagcagaaataggggttgcttcaacaaaggcgtttaccgctcaattatcagcacttttatctctatcaattcatttagcatcagaaaaaaagttcatgtctgttgaggaaaatacaaaattatgcaaggagattatgcaagcacctttattgcttgaacaagcaattgacagatcttattcactaaaagacacggcaaaagcaattataaatgccaagggtgtaatgtatcttggccgtggtactgcgtttccattggcattggaaggagcattaaagtttaaagaaatatcatatatccatgcagagggatatcctgcaggtgaaatgaaacatggtccgcttgcattaatagaaaaagatttgccagttgtgtgcattgttccaccgggtccgctatttcataaaacaatttcaaacatacaagaagttattgctcgtggaggtagaatattaatgataacagacgatgaaacattggagtcaaattctgaaaatatttgggaagtttttcgtttaccaaaatgtcctaaatcaattgaggcaatcgtttattcagttcccattcatatgcttgcctattatacagcggttgagcttggtaatgatgtcgatcagccaagaaatcttgctaagtctgttactgtagaataa

SEQ ID NO: 247094 - DNA, 1157 bp, Unknown
  Bacterial polypeptide expressing nucleotide sequence isolated from the Sargasso Sea
cttgataattggtctgggggaaggagaatttatttgtgcaagtgatactccagctattgcgaattttacgaatattattttgcctatggaggatgaagaaatagctttgttgactcctcttggaatagaaatatatgactccaacaatgagagacaatatcgaaatccagtttctctaaaagtttcagaacaaataatggataagatgaattttaaacactatatgttaaaagagatatacgatcagccacagactgcaaaaaactggttggacaattatttaattcaaaacttagaagagggcaaatatcaaattaattatccttttgatacaaagttttttgaatcaatagaaagaattgaaattatcgcttgtggtacaagtaaacatgctgcaatggtgggcagctttttgctagaacaattttcaggtgtccctacaaatgtcttttacgcaagtgaatttcgatattctccacctccattgttgccaaacacattaactattggtgttactcaatctggagaaactgcagatacaattgctgctatagatatggaaattaaaagacgttcttcaattaaagataaaaattttaaacccaatcttattgcaataaccaatagaaaagagagctcggtaggaaggcaggtttcaaatattattgatatttgcgctggaatagaagttggagttgcagcaacaaaaactttttttgctcaattactttctttttatggactagctataaaatttgcggaaattaagggtagtcaaagcgtagatgaaataagtaatttaatcactgaacttacaaaattgcccccattaatagaagatctcttggagcaacataataaatcttcagaaaagttagcacatgatttttttaatattaaagatgttatctttttaggccgaggtataaattttcctattgctcttgaaggagcattaaaactcaaagaaattagttatattcatgcggctggatatccagctggtgagatgaaacatggtccaatagcgttgttagataaaaaagtacctgtaatttctattgctacccctggtgaagtttttgataaagttatcagtaaatgctcagaagcaaaagctagagattcatatttgattgggattgctcctgaatgta

SEQ ID NO: 247095 - DNA, 1187 bp, Unknown
  Bacterial polypeptide expressing nucleotide sequence isolated from the Sargasso Sea
tattgaaggagacagctataaaataacttcaatcaacaaggatgtaagcctaccaaagaaggttgaaaaaattgattttaaaattgatgattatgataagggaaagtttaaatactttatgcataaagaaattcatgaacaagttgatacaattcaaaatacaattactggaagaactaagagagacagtattatgcttcatggtttaattgattattggcatgaaattaaacaagcagataaaatttttattactgcttgcggtacatcttggcatgccggactcatcggtaaaaatttgattgaaagattttccgaagttcctgttcacgtagaatatgcttctgaattcagatataacaaaaccttagttgataataagagtgttgttattgctatttcacaatcaggtgaaacagctgatacccttgctgcaataaagaaagctaatagtcttggagcaataacagttggaatttgtaatgttcctggaagttcagtttcaagggaaactaattgtggtatttttacaagatgtggtcatgaggttggagttgcttcaacaaaatcttttacagcacagtgtactatactttatttactagctttaaaattagcagattcaaatgatactatgtccaaaaaatctattaaacaacacttaagcttcgtttcagagttcaacaaaattaaaggtgttcttaaaaaagaaaatgaaattaaaaaaatcgctttaaaatataaaaatgcaaccgattttttgtatttaggcagaggtctgaatttccctgttgctctagaaggagcactaaaattaaaagagatatcatacattcatgctgaaggatatcctgcagctgagatgaagcatggtcctatagcattagttgataaagatatgccaaatgtttttattgttcctaaagatatgacttatgataaaatcatttcaaatattgaagaaataaaatcaagaaaaggtaaaattattattgttacagattcgaaagataaaattttaaaagatcttgctaatgatttgatatatgttccaaaaacaaataattatatgttttgcgttttagcaacaattgccctccaattattcgcttattatatagcagtaggtaaaaaattaaacgtcgataggcctcgtaatttggctaaatcagttactgtggaataag

SEQ ID NO: 247096 - DNA, 391 bp, Unknown
  Bacterial polypeptide expressing nucleotide sequence isolated from the Sargasso Sea
atgtgtggcattgtagcttcggtatccaataaagacgtagttaataatctcattagtggcctccataaattagaatacaggggctacgattcttcaggtatagcaacattaaataataataagatttcgttaattaaaacatcaggaaaagtagaaacccttgagaaaagtgttaacggaaattgtgaagggcaaattggaattgcacatacaaggtgggcaacccatggtgaaccatcagaaaaaaatgctcatccacatcaagttgataatattgtaattgttcataacggtattattgaaaactatgaaaatttaaagaaaaacttttcagacttaaaatctgatacggattcagaaatcatcgctcacttaatacaaaacaaactta

SEQ ID NO: 247097 - DNA, 1315 bp, Unknown
  Bacterial polypeptide expressing nucleotide sequence isolated from the Sargasso Sea
aatgtgtggaattataggaataactagcaataaaccagtctcatcttcaatacttcattcacttaaaaagctagaatatagaggttatgattctgccggtatcgcgacaatagacaaaggaaatattaatgaagttaagtctcttggcagagtagaggttttagaaaaaaatatttctcaaataaatctagaaggatatgttggtattggacatgtaaggtgggcaacacatggcatgccaagtacaataaacgctcacccacattcaacagaaaatatttctgtagtgcacaatggaattatagaaaattctgtaaacttaaaaaatttgttaattaaaaaaggccataaatttaaatctgaaactgatacagaggttattgttcatcttttgtcggagtatatgaaatcaaacgaactaaataaaaccatcataaaaactttaaatgatttggagggaagttttgccttgggtataattttcaaagatagaccgaatgtaatcgttggcgcaagaagaggatctccattagcagtaggatatggtccaaatgaaaattatcttggctctgactcctatgccttaaaatcaatgacaaataagatcacttacttaaatgatggtgatttttgtataataaaaaaagatgaaatagacttttttgatcatttaggaaaaaaagtaaataaaaaggttctgcagctttcttctaacgagcttaattatgaaaaaggagaatataaacattatatggctaaagaaattgatgaacaaccatcaacaattaaaaattgtgtaaatgagtatgtagataaaataaataacgaaataaatttacttaattttccttggaataaagaacaaataaaatcagttaaattaataggttgtggtactgcttttcattcatgcttaataggaaaatactggtttgaagagttaactaatctagatgttgatgttgatatagcttctgaatttagatacagaaagaacaaatttaaagaagattgtttgtacatttttgtttcacaatctggggaaactgcagatacttatgctgcactaaatctttgtaaaaagaataaagttaaaacttgcagtattatcaatgtagttgagagctctatagctagagactctgattttgttttacctattcactgtggacctgaaataggtgttgcatctacaaaggcttttttaggtcagatgctagtaatttatttattatgtttaaaaatatcaattttaatgaaagatattaagagagaagattatgataaaaaaattagaaacctctgtttactttct

SEQ ID NO: 247098 - DNA, 480 bp, Unknown
  Bacterial polypeptide expressing nucleotide sequence isolated from the Sargasso Sea
acaataagatacaaactatatctagcacttttaatgaagcaaaagggtctatgtttttaggcagaggattttcatatccaattgcacttgagggtgctttaaaacttaaagaattatcatatattcatgctgagggttatcctgctggagaaatgaaacatggaccacttgctttaattgagaaaggtatgccagttgttgttttagcacctagagataactattataaaaaaactatttcaaatatgcaggaagtaattgccagaggtgcaaaggttttgttgattactaataaaagtaaagatgagatagtttccgaaaatatttgggaaacagttgaagtggaaactagcaatgaagacctcttacctttccttttgactatacctcttcaaaaattagcttattactctgcgctaaaaaaaggttatgacatagataaaccgcgtaatttagccaaatcagttaccgttgaataat

SEQ ID NO: 247099 - DNA, 1189 bp, Unknown
  Bacterial polypeptide expressing nucleotide sequence isolated from the Sargasso Sea
tttgattaaagaagatcaagttgagttttttgataataaaggaaataaagctaataaaaaaattttaaatttatctcaggataaccaaagttatgataagggtgattataagcattttatggcaaaagaaatagatgagcagccaactacaataaaaaattgtgttaatgaatatatagataaaataagcaaacaaataaatatttataatattccttggaaaactaatcagatatcctcaattgttttaattggatgtggaacagcatatcattcatgcttgatagctaaatactggtttgaagaacatactaatttagatgtgactgtagatattgcttctgaatttagatatcgaaaaattaaatttaaaaacgattgcttatatgtatttgtatcacaatctggtgaaacagctgacacttatgccgctttagatatatgtaaaaaaaataaaatgaagacttgctcaatagtaaatgttgtagaaagttcaattgcaagagattccgaacttgttttaccaatacattgtggtcctgaaatcggtgttgcatctactaaagcatttttgggtcaaatgttagtcttgtatatgttatgtttaaaactatcttttgatcagaaaataattaataaaaaaaattatcaagaaaaaattaaaaatttactttctttatcaaatttatgtaaaaaaacattattgacagatagtaaaatccaaaaaactagtagaacatttattgaagcaaaaggttcaatgtttttaggaagaggttattcatttcccatagcattagaaggagcgcttaaattaaaagagcttgcctatgttcatgcagaagggtatccagcaggagaaatgaaacatggtccattagcattgattgaagaaggcatgccagtagttgttcttgctcctagagatgctcattataaaaaaacaatttcgaatatgcaggaagtaattgctaggggagcaaaagttttgttaataacaaataaaagtaaagatgaaattcattctgaaaatatttgggaaacaatagaagttgaaaatttatctgaagatttgtttccttttttaacaactatacctcttcaaaaactagcttattattcagctatgcataaaggctacgatatagataaaccaagaaatttggcaaaatctgtcactgttgaataa

SEQ ID NO: 247100 - DNA, 736 bp, Unknown
  Bacterial polypeptide expressing nucleotide sequence isolated from the Sargasso Sea
agaaaaagattacttatctactctttgtatatgtaatgttccaacaagctccctagctagggagtcagaatattcaatatttacaaacgctggaccagaaattggagttgcttctaccaaagcttttactactcagcttgcggcattaatgttattagctctatctttggcaaaaagcagaaatagaaatcctaaattaagaaaaagaataattactgcgttaagatcattgccagatacagttcaggaaacattaaaacttaaagatgcaatattagaaatagcacctgaaattgcatcgaaagataatgctttgttccttggaagaggtattttttatccaattgcaaaagaaggagccttaaaattaaaagaaatttcttatattcatgctgaggcttatccagcaggcgaacttaaacatggaccacttgcactaattgatgaggagatgcctgttattgcactagcaccagagagtgagattgcagaaaaattagtctctaatcttgaagaagtaaaagctagaggcgggactctatatgtgttttctgatccctcaatctcaatggatttaaaatctggcagattaataaatatgcctaaatgtgattttctcttaactcctattatttacacaattcctcttcaaatactttcttatgaagttgcattacttagaggaactgatattgaccaacctagaaacttagcaaagtctgtgactgttgaataa

SEQ ID NO: 247101 - DNA, 1798 bp, Unknown
  Bacterial polypeptide expressing nucleotide sequence isolated from the Sargasso Sea
gatgtgtggaatagttgggtattcaggcccaaaagaacccttaccaatcttaataaatggattgtctagattagagtatcgaggatacgactcagcaggaattgcaatttcagatgggaacaaaataaccattgaaaaaaaagaaggtaaactcgacgtcttaaaagatcatctaaaaaataatcaaatgtctggaaacgtaggcattggtcatacaagatgggctacccatggcataccaaatgatgtaaatgctcatcctcactcggataacaatgaagaatttgcaattattcataatgggataattgaaaactatgcagaaattaaaaaagaccttttaaaggaaggatttgaatttaagtctgatactgacactgaggtagtagctgtagagctaagcagaaaatggagtggggaattgcttaaaactgtagtggatgttgcaaactctcttgaaggaacttacgctctcctcgtaactactacgaaagaagaaggaactatcgtcgctggaagattaatgagcccattagttttaggagttggcgatgatgaagtgtttcttgcgtctgattcggcagcaatactagagcatacaaaaaagatgatatttcttgaaaatggtgattttgtagaaattaaaaatggtaaatataagttgtttgactcagacttaaatgaaattgaaagagagatccaagaaatagactgggaggtctctgaagcagagaaatcaggatatgaccattttatgtataaagagatacttgaacagtctgaagtaattgaaagaactatttcgggaaggctggacacaaattctgatgatattccgattatgtcagatcatgcatctaaatttgaaaaaatttggatagttgcatgcggaactgcttatcatgcaggtttatttggcaaagatctgtttgagaaagttcttggtgtaccagtaagtgttgagttagcttcagagtttagatacagggagccgattgttgggaaaaatgatttaggtattgtaatttcacagtctggagaaacaatggatacaattgctgcaacagaacttcttaaagaaaatggctcacacgtactagccctagttaatgttgtgggaagttcattggcaagaatggcagatagtgtattttacttacatgttggtccagagatcggtgtagcttctactaaagcttatttagggatgcttgtatctcaattagtacttgctaaacattgggacactaaaaatagattggacgtatcttttgatgagattgcagaacttccaaaccttatcgacaaaacaatggcttgcgaagatcaaataaaagagatatctgaaaaaatttacaaaaagaatgacatttattttattggaagaggtttggattatgcattggcagctgaaggcgccttaaaattaaaagagatttcatatctgcatgctgaagcattggcagcaggagagcttaagcatggtacgctagctttgatagaagaaggaacccctgtagtagttactgctagtcaaaatcatctgcttgataagacaaccagtaatgtacaagaggtcattgcaaggggtgcatatgttattgctattggagacagcgagtcagaaaaactagaaaatatatcaaatgattatgtgatactcccagatagtaatgaaatactcactactgtgatatcgattatacctttacaatttattgcttatcatgtagcaaataaaaatggccagtcgattgatcaaccaagaaaccttgcaaaatcagttactgtagaataa

SEQ ID NO: 247102 - DNA, 879 bp, Unknown
  Bacterial polypeptide expressing nucleotide sequence isolated from the Sargasso Sea
aatgtgcggcattgtaggttatataggcaataaagatcctgtccctattctagtgaaagggttgaaacgattagaatatagagggtatgattcttctggaatcgctcttcttgaggaagacaatctaacccatatcaaaaaagcaggaaaagtttcagatttgcaacagttagttgatgattcttctataaaaggaaattgtggtattgcgcacacacgatgggcgacgcatggagctccaaacgatattaacgcacacccccatttggatcatactgggagcattgctctagtacataatggaatatttgaaaactatgaagcgatcaaacaacttcttataaataggaatatccaatttactagtgatacagatactgaggttattgttcaattaatttctgaattatactataataataatgaaaaattatcttttgaagatgccgtgagagctgcacttcaagaggttattggtgcttatgggattgtcacaatgtgtgctgatgagccaaataaaataatagcggcacgtatgggaagtccacttgttttaggtataggtgagggagaatattttttggcaagtgatgcatcacccataattgaacatactaggaatgtaatatatttagatgatgatgaatttgtaataattgataaagcaggatattcaatttcaaacataaaatcaaaaaagattgttagtaaatcacttacaaaaattgatcttactattgaagaaattgagaagggtaagttccctcattttatgttgaaggaaattcatgatcaaaaacattctattagtgatacaatgcgaggaaggttaaaccttaatgatggaacaactaatctaggaggtatagtaaattatat

SEQ ID NO: 247103 - DNA, 322 bp, Unknown
  Bacterial polypeptide expressing nucleotide sequence isolated from the Sargasso Sea
atgtgtggaatagttggaattacaagcagtaaagaagtaacgacaagaataataaattctttaaaaaaattggaatatagaggatacgactctgcgggaattgcaactattaatgatggcattataaatgaggtaaagtgcgaaggaagagtagaggcacttgaaaaaaatatttcaaatacaaatatacaaggtgaaatcggtataggtcatgtgagatgggctacacatggtaaaccaagtacactaaatgcacatcctcattcatctgaaacagtttccgttgtacacaatggaattattgagaattctactatttaaa

SEQ ID NO: 247104 - DNA, 325 bp, Unknown
  Bacterial polypeptide expressing nucleotide sequence isolated from the Sargasso Sea
atgtgtggaatagttggaattacaagctataaagaagttactcctagaattataagttcattaaaaaaacttgagtatagaggttatgactccgcaggcttagcaactctttcaaatggaaatataaatgaggtaaaatgtgagggtagagtagacgctttagagaaaaacattatacaaactaaaatatctggttctattggtatcggacacgtaagatgggccacgcatggaaaacctagctcaattaatgcacatcctcattcatcagaagatgtatccgtagttcacaatggtataattgaaaattcaactattctaaaaa

SEQ ID NO: 247105 - DNA, 920 bp, Unknown
  Bacterial polypeptide expressing nucleotide sequence isolated from the Sargasso Sea
agttgcatgcggtactgcttaccatgctggattatttggaaaagacctatttgaaaaagtcttaggagttccggtcagtgttgaacttgcttcagagttcagatatagagaaccaattgttggaaaaaatgatttaggtattgtaatttctcaatctggtgaaactatggacacaattgctgcgacagagctattgaaggaaaatggtgctcacgtccttgctttagtgaatgttgttggcagctcattagcaagaatggctgacagcgttttttacttacacgttggcccagaaataggcgtagcttcaactaaagcttatcttggaatgttagttggacaattactgttagccaaacattgggattctcaaaataaattagatgtttcttttgatgagattgccgaactaccaaaattgattgaagagacaatggattgtgagaaacaaataaaagatatatctgaaaaaatttataaaaagaatgatatttattttattgggagagggctagattatgcacttgcagcagaaggtgctttaaaattaaaagaaatttcttacttacatgcagaagcgttggcagctggagaactaaaacacggaactctagctttaattgaagacggaactccaataattgtaactgctagtcaaaatcacttgttagacaaaacaactagtaacgtacaagaggttattgctagaggagcttatgtcatagcaattggtgataatcaatcagaaaaattagaaaatatatctgacgaatatgtcactcttccagatagtaatgaaattctaactacagttatatctataattccactccagttcattgcttatcatgttgctaacctaaatggtgagtcaattgatcagccaagaaatttagctaaatctgtgacagtggaataaa

SEQ ID NO: 247106 - DNA, 1831 bp, Unknown
  Bacterial polypeptide expressing nucleotide sequence isolated from the Sargasso Sea
tatgtgcggaatcgttggcgccgtggcgcaaagggatgtggccgaaattctggtcgaaggtttacgtcgtttagaatatcgtggatatgactccgctggtgttgccgttatccacaatggcgaactcaatcgcactcgccgcgtgggtaaagtgcaggagctttctgccgcactcgaaaccgacccgttagcgggcggcactggtattgcacatactcgttgggcgacccatggtgagccaagcgagcgcaatgctcacccacatttatctgaaggcgatattgccgtggtgcacaatggtattatcgaaaaccatcataaactgcgcgaaatgctaaaagagctgggctatcactttagctcggataccgacaccgaagtgatctgtcatttagttcaccatgaattgaaatctaacgacactttactggcagcggtgcaagccacggtgaaacaactcgaaggcgcttatggcactgtggtgattgaccgccgcgatagcgagcgtatggtcgttgcgcgttcaggtagtccactggtgattggttttggtttaggtgaaaactttgttgcgtctgatcaattggcgctgctgcctgtgacccgctctttcgcctttttagaagaaggtgacgtggccgaagtgactcgtcgcaccgtgagcattttcgatgtgcatggtaataaagttgagcgcgaagttaaagaatcagaaatcacccacgatgccggtgacaaaggtgaatatcgccactatatgctcaaagagatttatgagcagccattggcgctgacacgcactatcgaaggtcgtattgctaacaagcaagtgctcgacacggcttttggcgataatgctgctgagttcttaaaagatatcaaacacgtgcaaatcattgcctgtggtactagttaccatgcgggtatggcggcgcgttattggttagaggattgggccggcgtttcttgtaatgtcgaaatcgcctccgaattccgctaccgcaagtcacatttgtttcctaacagcctgttggtgaccatttctcaatcgggcgagaccgccgatacgctggcggcgatgcgcctagccaaagaaatgggctataaggcgacactgaccatctgtaacgcgcccggctcttctttggtgcgtgagtcagatatggcgtacatgatgaaagcaggcgctgaaattggcgttgcttcaactaaagcctttaccgtgcaattagcgggtttattaatgctgacggcggtgatcggccgccataatggcatgtcagagcaaatgcaggcggagatcacccaaagcctacagtctatgcccgctaaagtggagcaagccttaagcttagatgatgcgattgctgaattggcggaagattttgccgacaaacaccatgccttattccttggccgtggcgatcagtacccgattgcgatggaaggtgcgctcaaactaaaagagatctcctacatccatgcagaggcatatgcctctggcgagctgaaacatggcccactggcgttgattgatgccgacatgcccgtcatcgtggttgcaccaaacaacgaactgttagaaaagctgaaatctaacgttgaagaagtgcgtgcccgtggcggcttaatgtatgtcttcgccgatgtggatgcagagtttgaatctgacgagaccatgaaggttatcccggttccacactgcgatatctttatggcgccgctgatttacaccatcccattacagttgctgtcgtatcacgttgctttaattaagggcaccgatgtggatcaaccacgaaacctcgctaaatcggtgacggtggaataa

SEQ ID NO: 247107 - DNA, 568 bp, Unknown
  Bacterial polypeptide expressing nucleotide sequence isolated from the Sargasso Sea
ttgccaggcaaaaaacataaatcccaaacttagaacaagaattgttaccgccctaagagcattgcctgagattatcgcagaatctttaaaacttaaaaaagaaattcaagagatttcgcctaaaattgcagaaaaagacaatgctctttttcttgggcggggcatgttttatccaattgctaaagaaggggcattaaaattaaaagaaatctcttatattcatgccgaggcttatccagcaggtgagttaaaacacggaccattagcattgattgatgaaaacatgcccgtcgtggcgcttgccccagaaagtgaattggccgaaaaacttatttcaaatttggaagaagtaaaagcaaggggcgggactttgtatgtttttggagatgcatctagcaatatgcaaatcgattcaggcaagctactgaccatgccaaaatgtgattttttactgacgcctattctttacactattccattgcaaattttgtcttacgaggtggctttgattagaggcacagatatcgatcaaccaagaaacttagctaagtccgtcacagtggagtag

SEQ ID NO: 247108 - DNA, 979 bp, Unknown
  Bacterial polypeptide expressing nucleotide sequence isolated from the Sargasso Sea
tatgtgtggaatagttggcgctgtagctgagcgtaacgtggttgaaatcctattagagggtttaaaaaggctggagtatcgcggctatgattcagctggagtggcgctattgcaaggcgacggcacgcttacgcgtattcgccgtacaggcaaagtacaagagcttgctgatgcggtggcagaaggtgaagctttgggcacaactggaattgctcatacccgttgggcaacgcacggtggtgtgactgaagcgaatgcgcacccacacttttcaactgaacgtgtagctgttgttcacaacggtattattgaaaactatgttaacttaaaagcacagttaaaagagcagggctatacctttaccagcgacaccgacacagaaaccattgcccacaccgtacacgaagagcttaagtcaggtaagactttactagacgctgtgcaaagtgccgttaaaaccttccacggtgcgtatggcaccgtcatcatggataaagaagatcctagtcgcgtagtggttgcacgttcgggcagcccgcttgtaattggtttggggcttggcgaaaacttcattgcgtcagatcaaatggcattattgccagtgacacgccgctttatctttttagaagaaggcgatgtggcagagattactcgtcgcgacgttaaaatcttcgataaagacggcaatgccgttgaacgcgaagtgattgagtcgaatatcgagcacgacgcgggtgacaaagcgggttaccgccactacatgcttaaggaaattcacgagcagccaaccgttgttcgtaatgcgcttaaagatcgtattgacgaaaacggacttactgctgacatatttggtaaaggtgctgacgagatattcaaaaaagtacagcatgtacaaattattgcctgtggtaccagctaccatgcgggtatgacggcgcgctattggctagaacaatatgcaaatgtgtcgtgcaacgta

SEQ ID NO: 247109 - DNA, 604 bp, Unknown
  Bacterial polypeptide expressing nucleotide sequence isolated from the Sargasso Sea
ttagtaggtttgtcgatgctgacgttggccattggtaaatacaatggtttaacctcacagcagcaacaggacatggtgcaggcattaaaatcgctgccagccaaactggaagaaactttaacactagcgccaaaaatcgaagctttggcgacagagttcgctgacaagcacaactcgttgtttttaggccgtggcgaccagtaccctatcgctatggaaggcgcgctgaagctgaaagaaatttcctacattcacgctgaagcttatgccgcaggcgagctgaaacatggcccattggcactgattgacgctgatatgccaattattgtggtagcgccaaacaacgaactgctggaaaaactgcagtcaaacgtggaagaagtgcgtgcccgtggcggcatcatgtacatattcgctgacatcgatgctcactttaaatcagacgcaacacagcgtgtgatcagcgtgccacacgtacacccgctgattgcaccaatcatctacactattccgctgcaattattaagctactacgtcgccattatcaaaggcacagacgtagaccagccacgtaacctggcgaagtcagtgactgtggaatagg

SEQ ID NO: 247110 - DNA, 940 bp, Unknown
  Bacterial polypeptide expressing nucleotide sequence isolated from the Sargasso Sea
aatgtgtggaatcattggcgcaacctcctctagaagtgtcggaaaaatcttagtcaatgggctgaggaaaatggaatatcgcggctatgactcagccggactcgttttgaatcaggatgaagcagcatttcagctaagaactcttggcaaggtttcaaaccttgaagagcttatgaaaaaagaaaggcccaaagctaattccggcattgcacacactagatgggcaacacatggcgtcccatcagagacaaatgcacacccccatgggtccaatggaaacatctatattgttcacaatggaatcattgaaaaccacgatgagctgagagaaaggcttgtaaatgaaggttatgagattcagtcacaaacagattcagaattgattgctcacctgatccatttcaataaagaaaaaggcaaaaccacattggacgcactaattgagacaacaaaagagcttgatggcgcatactctattgctgtaatcgacacagaggaaaaaggaaaaatatttgcagccaaacaaaaaagcccgcttttagttggaaaagggatagaggaaaattttatcgcctcagacccgctcgctatagctggccttgccgaatctttctatctacttgaagatggcgactttgcagaaataaccaaagatgaaattaaaattgttggcagcaacggtgaggcgctctcaagagaagagaccataatagacacaagcgtgaaggaggcatcaaaagatggttacaaacacttcatggaaaaagaaatatatgagcagccaaaagcaataacaaatgctattgagggaaggactgctgatggagaggttttagataatatatttggattgggttcgtcagatgcattcaagaatgtcaaaagaatccagtttgtggcctgtggcacaagcctgcatgcagctaaaaccgccagaaaa

SEQ ID NO: 247111 - DNA, 1426 bp, Unknown
  Bacterial polypeptide expressing nucleotide sequence isolated from the Sargasso Sea
atgtgtggaatatttggtgtaataactaataataacaataatgtgaaagatcaaattttcgatggcctcagaagacttgagtatcgtggatatgactcttctggaatagctactattaacaataatcaaattaactgtgtaaaatctcaaggtaaccttgatcaacttcaaaaaaaattaataaatgaagaattaataggtaatgttggcatagggcatactcggtgggctacgcatggcgttccaaatgaatcaaatgctcatcctcattttactgatgaagttgctgttgttcataatggtattattgaaaattattctttgcttaaaaatcaaattgtagaggccggaattagtttcaaaagcgaaactgatactgaagctattgcgcatcttataactctttatttaaagtcaggaatgggaagttatgaggctataagggcaacaactgaagatattaaaggttcttatgcattagctattataatgcgttctgaaccaaataaattgtttgccgttagaaagggtagtcctcttgcagttggttcttcagaaaaagaaaattatattggatcagatggttattcattaggtaattattgtgatgaggttacttacctcaaagatggtgatatcgctataatcgacaattcttcttttgaaatttttgataaccaaaacgaatttataaaaagaaaatcacaaattatagataagactgttacattggcagaaaaaggtgtctttaaacactttatgtcaaaagaaattcatgaacaaccaagtgttattcaagatgctattagtcattatattaacaatgacgacttaactgtaaatttacctaaattcccatttagtatctctaatttaaaaaatattactttagttgcgtgcggaagctcttattactctggactagttgctagagaatggtttgaaaaatttgctcgtattaaagttgatgtcgaaatcgcttcggaatttcgttatcgcgagacacctatggactcaagtggtctcacaatttttatttctcaatcgggtgaaacagctgatacattggccgcattaaaacattgtaaaaaattaaaccaaaaaactatttcagtcgttaatgtccctaattcttccatgtgtagaaattcagatacatctcttaaaatatttgctggtcctgaaattggagttgcttcaactaaagcattcacatgtcagcttgttgttttagctgctctagcaattcatattggaagaattaatggtaatgtatctgatcatgatgaaaataaatatgtaaaatcattgcttgatcttcctagattaatttcaaatgttttagatcaagaggaagatctcgtgaaaattgttaaagatcttaatccaattaagaatgccttgtacttaggaagagggcaaatgt

SEQ ID NO: 247112 - DNA, 1807 bp, Unknown
  Bacterial polypeptide expressing nucleotide sequence isolated from the Sargasso Sea
atgtgtggaattgtcggtattgctagcaaaaataattgtatagataatattttgtctggattatattctcttgaatacagaggttatgattcatcaggattagcaacaataaaaaataatcattttgaatatattaaaaatattggtaaaatttgtaatttacaaaaatctgttaaaaataataaattaaatggaaatgttgtaattgctcatactaggtgggcaactcatggcaaaccttctataaaaaattgtcatccatttataaaagataactgtgttttagttcataatggtatcatacaaaattatacagatttaataaattattattcaataaaacaaaaaaatattaaatcagatacggatactgaaattattgctgaaatatacaataagttattaaatgaatttaataatcctattgaagctatcaaaaacctaaataaaaaaatagtaggatcattttcttttgcatttttagtccatggatcaaaatcaatatatgtaacaagaagagggagtcctttagttttaggtagtggagaaggatttaatgctgttagttctgatgtcttaggtttgccagataatacaaaagaaattatttttttagaggaaaatgatattgccgaagtaaatgatacttcaattctaatttataataataacaaaatcatcaagagagaaaaacataaatttattccaaaaaaagaatttaaagttaaaggaaattacaaacattttatggaaaaagaaatttttcatcaaccaataagtattgaagatacaattttgaattttgctgataaaaaaagaaaaattgtttatttgcctaaaactaatattaaatttaatgaattttcaaacataattatagttgcttgtggaacagcttaccattcttgtatggtggcaaaatattggattgaagagatgactgacttcaatgtttcaattgatatagcctctgaatatagatatcgcaaaaataaagttaataaaaactccctaggaattgttgtatcacagtcaggtgaaactatggacacgttaaaatgtttaagtaaatttaaaaaaaataatattttcacaatatctatagtaaatgttttaaatagctcaattgctagattaagtgattttattttacctactttagctggtcctgaaattggcgttgcttccacaaaagcttttacttctcaattatctgttttagctctatttgtacttaatcttcaacaaggaagtaaaaatattaataagattttttttaattctatttttagtatccacaaatctgttaaagaaattttaaaaaaagaaaatgaatttaagaaaatagctaaaaaattagttgatactaaaagcattttttatattggtagaggtgccatgtatcctattgcattagaaggcgccttaaagttaaaagaaattacttataagcattgtgaaggctatgccgctggagaactaaaacatggtccgttagccttaattgaaaataatatacccgttattgttttagctccttttgatgaaaattattctaaattactctcaaatatacaagaggttaaagctagaggtggaagaattattatgattacagatagggatggtgcaaaaaaaataaaaaaatattgtgatcaaattgtaataataccaaaaacaaattttttaacatccccaatattatattcgataccagttcagttaattgcttattatttagcagtttttcttggaacagatgtcgatcaaccaagaaatttagcgaaatctgttactgtagaataat

SEQ ID NO: 247113 - DNA, 847 bp, Unknown
  Bacterial polypeptide expressing nucleotide sequence isolated from the Sargasso Sea
ggcagtgagtatcaatatcaagaaccaataaaaactgataaaactttattagtaacaatatctcagtcaggcgaaacggcagatacactttcatctttaaagtttgcaaaaaaatcgggcgatccagttactttaaccatttgtaatgttgctaatagctctttatgcagagaatcagactatgctttattaactaaagccggtccggaaattggtgtagcctcaaccaaagcttttgttacccaattagcctgtttaaatctgttgcttttaactttgatgagagtgcacaacaaactaccaacagcaagaaagaaaattaccgcagcactgagggatttgcctaaattaattaataagactttaaaaatgacaggcgaatacaagaaagtggcaaagctactttttaaaagaaacagcgcattatttttgggtcgtggtttatattttcctattgccagagaaggggctcttaagctcaaagaaatatcttacatacatgccgaagcctatccgggcggagaattaaagcatggaccactggcactgatagacaaaaatatgccagtaatagctttagctccagataatgaacacttagataaaattacatcaaacattgaggaagtggcagcccgaaaaggcaaggttattactatagggccactaggcagaacaaaaatagataaaaatggcggccacattaagattcctaagacattggatctacttaatccgattgtctcagtggtgccaatgcaattaattgcttattacaccgcagtctttaaaggcaccgatgtagataaacctcgtaatttagcaaaaagcgttacggtggaataag

SEQ ID NO: 247114 - DNA, 985 bp, Unknown
  Bacterial polypeptide expressing nucleotide sequence isolated from the Sargasso Sea
atgtgcggtattgttggaattttaggtgatcacgaagttggaccattattggttaatgctctgaaaagacttgaatatagaggatacgatagcgctggtatcgcgacccttaatgatgggaaactgggacgacgaagatcgcttggcaaattagcagagttaagtgatcttttagtgcgcgaccccatacaaggaaaatctggcattggacacactcgttgggccacacacggcaaaccaagtgtaaacaacgctcacccacatatgacggaacaggtagcagtagttcacaacggtatcatagaaaattttcaagaacttcgaaaatatttagaaaaaaagggtattaaacatactacagataccgatactgagacgatcgcccttctcacgcaagcaatgatcgaagaggggaatgagcctatcgaagctgcccaaaaaactattgaaaagcttacaggtgcttttgcactatgtttcttgttccaaggtcaaaacgatttgatgattgcggcgcgtaaaggctcacctttagctataggatatgggaaaggagagatgttcgtaggatcagatgccattgcattatctcccatgactaataaaatttcatatttagacgaaggggactttgctgttcttactcgaaaaactgtcgatatctgggatcaatctaaaaattcagtcaaacgagaaataaaagaaattaacactgaaaatgctcaagttcaaaaagatggctatcaacatttcatggagaaagaaattcacgagcaaccccgcgttataagtttagccctagaatattattttgatcaaaaaacaggaaaagtaactcttcccgataacttaaatttaaactttaatgattttgaacaaatttctttagttgcatgcggtacggctttttacgcttgtcatgtcgcaaagtactggtttgaggaaattgcgcgcatcccagtcgaaattgatatcgcatcagagt

SEQ ID NO: 247115 - DNA, 1363 bp, Unknown
  Bacterial polypeptide expressing nucleotide sequence isolated from the Sargasso Sea
gcatactctattgctgtaatcgacacagaggaaaaaagaaaaatatttgcagccaaacaaaaaagcccgcttttagttggaaaagggatagaggaaaattttatcgcctcagacccgctcgctatagctggccttgccgaatctttctatctacttgaagatggcgactttgcagaaatcaccaaagatgaaattaaaattgttggcagcaacggtgaagcgctctcaagagaagagaccataatagacacaagcgtgaaggaggcatcaaaagatggttacaaacacttcatggaaaaagaaatatatgagcagccaaaagcaataacaaatgctattgagggaaggactgctgatggagaggttttagataatatatttggattgggttcgtcagatgcattcaagaatgtcaaaagaatccagtttgtggcctgtggcacaagcctgcatgcagctaaaaccgccagaaaatggtttgaagaactctgtgagacaccatgctatatagattttgcaagcgaatacaggtaccgaaacccacttgttgaagacgatactttatttgtatgcatatctcagtcaggagaaacagccgacaccatggcggcgcttaattatgcaaaagatgagaaatatttaggcatcgtcacaatctgtaatgttcctacgagcaccatggccagagaatctgattggaagatattcacaaacgcaggcccagagataggcgtagcttcaaccaaggcgttcacaacacagcttgcagcactgcttttgttggcttgctccatatcaaaaagtaaaaacataaacaaagacaaaagagcagacgcaatcaatgatcttctcaacacaccttcgcttgtgaaagaatcatttgagttaaaaagccaaattgatgagatagttgagaaaatcgctgacaaaaagaatgctttgtatttgggtagaggcgtttatttctcaattgcacaagagggcgcactaaaattcaaagagattacatacattcatgctgaggcatacccagcaggagagctaaaacatggaccacttgccctggttgatgaaatgacacctgttgtcgcattggccccagaggacgagctcgtggaaaagcttttatctaacctcgaggaagttaagtcaagagggggcactctttacgtctttggaaatgcgacctcgaagatcaaaattgaaaaaggcaagttcatgaatatgcctgattgtggttactacaatgcaccgattgtctatacaatacccttgcaaattttggcatacgaagttgcatgctcaataggaacagatctggatcaacctagaaatctcgcgaaatcagttaccgttgagtaga

SEQ ID NO: 247116 - DNA, 199 bp, Unknown
  Bacterial polypeptide expressing nucleotide sequence isolated from the Sargasso Sea
ttcctgtttgcggatccgggttcaggcttcgtcgagagcgatgatgtccggatcctgcaggtggcgccggtagacagcgccattgcgccgattatctacaccgtgccgcttcaactcctgtcataccacgtcgcgctcatcaagggcacggatgtggacaagccgcgcaacctggcgaagtcagtcaccgtagagtaaa

SEQ ID NO: 247117 - DNA, 439 bp, Unknown
  Bacterial polypeptide expressing nucleotide sequence isolated from the Sargasso Sea
tatgtgtggaattatcggagcaacctcatcgaggagtgtagacaagatcttaataaaaggtcttcatgccatggaatataggggttatgactcagcaggcgttgctctcaaccaagacaatgaagtctttagacttagatcattgggaaaggtttcatcccttgaagagctaatggtaaacaataaaccaaaagcaaattctggaatagctcatacaagatgggcaactcacggggccccatcagaagaaaatgctcaccctcatggctcacatgatgaaatctacattgttcataatggaataatagaaaaccatgacgaaattagagataaacttaaaagcaaaggttatgaaattgcatctgaaaccgattccgagcttatagctcatttaatccacttaaataaaacagactcactatcaactgttgaggcttaa

SEQ ID NO: 247118 - DNA, 1424 bp, Unknown
  Bacterial polypeptide expressing nucleotide sequence isolated from the Sargasso Sea
taaagaaaaaggcaaaagcacactagaggccctaattgattcatcaaaagaactcaatggagcatattcaatcgctgtaattgacacagatcaaaaaggaaaaatatttgcagccaaacaaaaaagccctcttttagttggaaaaggcatagaagaaaattttgtagcttcagatccactagcaattgccgggcttgccgaatcattctacctgctcgaagacggcgattttgcagagatcacacaagatgaaatcaaaattgttggcattgataatgagcctgtagtaagagaggagaccttaattgacacaacagttaaagaggcatccaaagagggctataaacacttcatggaaaaagagatctatgagcaaccaaaggctatagcaaatgccattgatggaagaacaacagatggcgatgttctagacaatatatttggcctgggttcatctgagtcattcaaaggggtaaaacgaatacagtttgtggcatgcggtaccagcctccatgcagcgaagactgcaagaaagtggtttgaagagctctctgaaacgccatgctacatagattttgcgagcgaatatagataccgaaaccctttggttgaggacgatactctattcgtctgcatttcgcagtcgggagaaacagcggacaccatggcggcattgaattatgcgaaagaagaaaaatatttaggcattgtaacgatttgcaatgttcccacaagcaccatggcaagagagtccgattggaaaatatttacaaacgcaggccctgaaatcggcgttgcctcaaccaaagcatttacaacacagcttgcagcactaatgcttttggcttgttcaatatcaaaaagcaaagacataaatggggacaaaagggctgaagccattaaggatcttgttaatacaccggcgcttgtcaaagaagcgtttgggctaaaaaaacacatagacgatattgttgagaaaattgcagacaaaaagaatgcattgtatttaggcaggggcgtttacttctcaatcgcacaagagggagcattgaaattcaaggagattacatacattcatgctgaggcatatccagcaggcgagttaaaacacgggccacttgcactcgttgacgaaatgacaccggttgtagcgctcgcaccagaagatgagctcgtagaaaaactcgtctcaaatctcgaagaagtcaaatcaagaggaggaacgctttacgtctttggaaacgcaacgtcaaagataaaaattgaaaaaggaaaatttatgaacatgccagattgcggttactacaatgcaccaattgtttacacaataccgttacaaatattagcctatgaggttgcatgctcaataggaacggacctagatcaaccaaggaacctagcaaaatcagtcacggtggagtagt

SEQ ID NO: 247119 - DNA, 337 bp, Unknown
  Bacterial polypeptide expressing nucleotide sequence isolated from the Sargasso Sea
tggatatcctgctggtgaaatgaaacatggtccaatagctttgttagataaaaaagtacccgtaatttctattgcctctcctggtaaggtttttgataaagttataagtaatgctcaagaagcaaaagctagagattcatatttgatagggattgctcctgaatgtaatggaactgaaatatttgattatttgatgaaagttccttcctctaatgaatggatttcacctctaattaatattctgcctatacagttattgagttatcatattgcagctcataggggacttgacgtggatcaaccaagaaatttagctaaaagtgtaactgttgaataa

SEQ ID NO: 247120 - DNA, 1828 bp, Unknown
  Bacterial polypeptide expressing nucleotide sequence isolated from the Sargasso Sea
aatgtgtggaatcataggcgcagcctcctcaagaagcgttggaaagatcttagtcaatggactaaagaaaatggagtatcgtgggtacgattcagcgggccttgttttaaataatgaaagcgaagctatccaactaaaaacgcttggcaaagtcgccaaactagaagatctaatgatcgaaaaaaaacccagagcccaatcaggcatagctcacacaagatgggctacacacggagagccctctcaaaaaaatgctcacccgcacgcatcaaatggaaccatttatattgttcacaacgggataattgaaaaccacgatgaacttagagaaagactatcaaatgatggctataagattgaatcagaaaccgattcagaactcattgcccacttgatctactccaataaggaaaatggtaaaagcacactagaggccttaattgaggcaacaaaagaacttcatggggcatactcaatcgctgtgattgacacagaacaaaaagggaaaatatttgcagcaaaacaaaaaagcccccttttgattggcagaggcatagaagaaaatttcgtagcctctgacccgctagcaatagcagggcttgctgaatcattctaccttttagaggacggggactttgcagtaattactcaagatgaaatcaaaattgttggttctgacagtgagccagttcaaagagaagaaaccattatagacacaagcgttaaagaggcatccaaagacggttacaaacacttcatggaaaaagagatatacgaacaaccaaaagctatagcaaatgccattgagggaagaacaacagacggggatgttctagacaatatatttggcttaggatcatctaaatcattcaaaggggtaaaaaggattcagtttgttgcctgcgggacaagcctgcatgctgcaaaaacagctagaaaatggtttgaagaactttgtgaaactccatgctacatagattttgcaagtgaatacagataccggaaccctttggttgaagatgatactttatttgtgtgtatttcgcagtcaggagagactgcagacaccatggcggcattgagctatgcaaaagaagaaaaatatttaggcattgttacgatttgtaatgttcccacaagcaccatggcaagagagtccgattggaaaatatttacaaacgcaggccctgaaatcggcgttgcctcaaccaaagcgtttacaacacagcttgcagcactaatgctgttggcttgttcaatatctaaaagcaaagacataaatggggacaaaagggccgaagccattaaagatcttgttaatacaccggcgcttgtcaaagaagcgtttgggctaaaaaaacacatagacgatattgttgaaaaaattgcagacaaaaagaatgcattgtatttaggcaggggtgtttacttctcaatcgcacaagagggagcactaaaatttaaagagatcacatacattcatgcagaggcatacccagcaggcgagttaaaacatggaccactcgcacttgttgacgagacgacacccgttgtagcccttgcaccagaagatgagctcgtagaaaagctcgtctcaaatctcgaagaggtcaaatcaagaggaggcacgctttacgtctttggaaacgcaaactcaaagataaaaattgaaaaaggaaaattcatgaacatgccagattgcggttactacaatgcaccaattgtttacacaataccgttacaaatattagcctatgaggttgcatgctcaataggaacggacctagatcaaccaaggaacctagcaaaatcagtcacagttgaataa

SEQ ID NO: 247121 - DNA, 1132 bp, Unknown
  Bacterial polypeptide expressing nucleotide sequence isolated from the Sargasso Sea
aacggataccgaagcgctggttaatctaatatctgatatatattatgccgatggtttgaattttgaacaagctgttcaagcagctctaaagcaggtcgtgggaacatatggcattgtagcattttgtagcgatgagcctgataagctcgtagctgcaagacatggaagccctcttgttttgggagttggtaatgatgaatattttattgctagcgacgcttcgcctattgttgagcataccagaaatgtaatttttctagatgaaggagaaatcgcaacggttcagcaaagtggttatacaataagatctatggaagatgacgcaatagtcaatcgagaaacaactgaaatagaatttagtattgaagaaatagagaaaggtgaattccctcattttatgttgaaggaaattcacgatcagattttctcaattcaagataccatgcggggaagaattgatccagttgatggtacagcgcatctagggggaattagtgatcagttaagcaggattcaaggcgctcatagaatttacattacagcttgcggaacatcctggcatgcgggattaatcggcaagtatttaattgaagaatatgcagggattcctgttcatgttgaatatgcttctgaatttcgctatagaaaaccaataattaactccaagacagttgtgataggaatatcccaatccggggaaacagccgacacgcttgctgcaatcagaaaagctaagagctttggtgctttaaccgttggtatttgtaatgttgttggatcttctgttgccagagaaactgattgcggaatttatacccatgctggaccggaaattggtgtcgcttcaacaaaagcctttacttcgcaggtagcagtgctttttttactctctttatgctttggtagaaaaaataagctatcagctttgacagggcaaaaatttgctcaagctttaatgaatattggtaatcaggttaaaattattctagataattcagaatcaatcttggaggttgcaaaatctactgttcataatgagaattttctttatttaggacgtggattgaatttccccgtggcgctagaaggagcgctaaagctaaaagaaatttcttacattcatgctgaaggg

SEQ ID NO: 247122 - DNA, 643 bp, Unknown
  Bacterial polypeptide expressing nucleotide sequence isolated from the Sargasso Sea
cctgaaatcggcgttgcctcaaccaaagcatttacaacacaacttgcagcactaatgctgttggcctgttcaatatcaaaaagcaaagacataaatggggacaaaagggccgaagccattaaagaccttgttgatacaccggcgcttgtgaaagaagcgtttgggctaaaaaaacacatagacgatattgttgaaaaaattgcagacaaaaagaatgcattgtatttaggtaggggtgtttacttctcaatcgcacaagagggagcactaaaatttaaagagatcacatacattcatgctgaggcatacccagcaggcgaattaaaacatggaccactcgcacttgttgatgagacgacacccgttgtagcccttgcaccagaagatgagctcgtagaaaagcttgtctcaaatctcgaagaggttaaatcaagaggaggcacgctttacgtctttggaaacgcaaactcaaagataaaaattgaaaaaggaaaatttatgaacatgccagattgcggttactacaatgcaccaattgtttacacaataccgttacaaatattagcctatgaggttgcatgctcaataggaacagacctagatcaaccaaggaacctagcaaaatcagtcacggtggagtagt

SEQ ID NO: 247123 - DNA, 616 bp, Unknown
  Bacterial polypeptide expressing nucleotide sequence isolated from the Sargasso Sea
gatgtgtggtatttatgggtgtatatcccacgatgcatcagcccgcgttctggaaggtctcagaaagttggagtacagggggtacgactccgctggtttggcggcaatcttctccgataatgaggaccctatagaaaccgagagaactaccggatatgtctcagacctggtcctaaaggccaatgggagattcgatggcgctaggatttccattggacacaccaggtgggcgactcacggcggggtgactgactacaatgcgcaccctcatagcagcgaagatggcaagctaacaatagtacataacgggattatagagaattcagtagaactggcaagtaaagtttccaaactaggatactccctaacttctgagactgatactgaggttattgttcatctccttgatcatgaattgaagacccaaggagagggaaaggggcacttggatgccttctgctcagtaatttctcaactctctggctcatgggcaatagctgccatggcctcagggttggaggggattcttatttcaagaaagggagccccactggttatcggaagaagccgcgacagcatttctgtctcgtccgatgttcagcctttctacggtgca

SEQ ID NO: 247124 - DNA, 306 bp, Unknown
  Bacterial polypeptide expressing nucleotide sequence isolated from the Sargasso Sea
tatgtgtggaataattggaatatctagcaataaatctgtatctgcgagtataattaattcattaaaaaaattagagtatagaggttatgactcggcgggtattgctacactttcagagggtaaaattaatgaagttaaatctgagggaagagtagatagtttagaaaaaaactttgatttaaaaaatttaaaaggaaatatcggcataggtcatgttagatgggcaactcatggagtgcctaatagtgtgaacgcacatccacattcatcttacaatgtatctgttgttcataatggaattattga

SEQ ID NO: 247125 - DNA, 1177 bp, Unknown
  Bacterial polypeptide expressing nucleotide sequence isolated from the Sargasso Sea
aaaagaaaaagtagaattttataacaatgataaaaagaaaattaataaagaagtttttgagttatcaaacgaagacaatattgttgataaaggggattttaaagattttatgtcaaaggagattgacgagcaaaatcttacaactaaaaaatgtttaaacgaatatttagataagtctagaaatgaaattaacatttataatattccaatagatcctaataaaataaacaaaattagacttattggttgtggtacagcctaccactcttgtctgatggctaaatattggatagaagaatttacatcaatagacgtagaagctgatattgcctcagaatttagatacagaaatgttaagttaaataaagatgacttatatatattcgtttcacagtccggtgagacggcagatacatacgcagctcttgaaaaatgtaaaaaaaataatgtaaaaacttgtggaattgttaatgttgtagaaagctcaatagcgaggctttctgatttcgtcttaccaattcatgcaggtcctgaaataggtgtagcatctaccaaggcattcataggccaaatgttagttttacttttattgacattaaaaatttcaaaagacagaaaagacatagatcctgatgtttttaaaaagttgatagatgatattataaacttacctgatttaattaaagagaccttatcaaaacaaaaagaaatacaagagattgcaagagattttattaatgcaaaaggtacgatgtatcttggtagaggatattcctatccaatagctatggagggagcattaaagctaaaggaactttcttatatacatgctgaaggttatgcagcaggtgaaatgaaacatggacctcttgctcttatagaagatggcatgccgatagtagtgctagccccaaaagacagatactttgaaaaaacaatttccaatatgcaagaagttatagcaaggggtggtaaagtcctgatgataacaaacgataaatcaaaaactttaagtgaaaacataagatttaaatttgaacttccagattttcaatcacatatcagcgctttcctactaactatacctattcaatttttagcctaccatgttgctttattaaagaattgtgacattgataaacctagaaatctcgccaaatctgtaacagttgaataa

SEQ ID NO: 247126 - DNA, 1828 bp, Unknown
  Bacterial polypeptide expressing nucleotide sequence isolated from the Sargasso Sea
atgtgtggaattatcggagctgcttcatctagaagcgttggaaaaatccttattaaaggacttcaattaatggagtatagaggttatgactccgcaggtgttgttctcaacaaagatgaagaaattctgagattacgatctcttggcaaagtatcaaagctagaggagaaaatgatttctaaaaagccaaaagctttttctggtatagcccacaccagatgggcaacccacggagctccctcagaagaaaatgcacatccacatggatctcatgatgatatctatatcgttcacaatggaataattgagaaccatgaagagataagaggcttcttaagaaacgaaggctatgaaataacttccgaaacagattctgaattaattgcacacctagttcatttttataaaaaggatactcaagatacattacaagctcttatgaaagcaacgcatgaactaaatggcgcctactcaatagcagttgtttgcaagcaagagaaaggtaaagtttatgcagcaagacaaaaaagtccacttttagttggcttaggtatagaagagaactttgtggcttcagaccccttagccatagttaatataactgaaagattccacatgctggaagatggagattttgcagttgttactagggaagatgttgttatttatgaccaagagggcgttccagttgagagagatgaattgaagattgacgcaactgcaacatcaacgacaaaaggagaatataaacactttatggagaaagaaatttatgagcaaccagactgcattggtaacactattaatggcagacttggtgaaaacgatgttttagataatgtgtttggattagggtcttcagactcttttaaagatgtaaagagaattcaatttgtagcttgcggaacaagccttcatgctgcaaagacagcaagaaagtggtttgaagatatatgcgaaatcccctgttatatagactttgcaagcgaatataggtacaggaatccaatagttgaagataacacactttttgtaacaatctcgcaatcaggagaaactgcagatactctcgccgcacttaactacgctaaggaagaaaaatatttagggatagtttcaatatgcaatgtacctaccagcacaatggcaagagaatcagattggaaagttttcacaaacgcaggtccagaaataggagtagcttcaacaaaagcatttacaacccagctcgcagctttactaatattagctctctcaattgcaaaaagtcaggataaaaatctagaaaaacgtaaacaagcagctcaagaattaagagaaacccctggtctcatttcagaagcctttaaattaaaagaagaaataaactcaatcaccaacaatatttcatcaaatgaaaatgcactattcttaggaagaggtatgtatttttctattgctcaagaaggtgccttgaaattaaaagaaatatcttacattcatgcagaggcatatccagcaggagagctaaagcatgggccgctagcattggtcgacgaaactattccagttatagctctggcacctgaagatagcctagttgaaaagcttttatcaaatttagaggaagtaaaagccagaggtggaactttatatgtttttggaaatgcaagatcaacaattgaaataaaaaaaggtaagtttatcaatatgcctgagtgcggtgattacaatgcaccaattgtttatactattccactccagatacttgcttatgaggtggcctgcctcaggggcacagacttggaccagcccaggaatttggcaaagtcagtcaccgttgagtaga

SEQ ID NO: 247127 - DNA, 283 bp, Unknown
  Bacterial polypeptide expressing nucleotide sequence isolated from the Sargasso Sea
gttatagttattgcgccaaaagataaatactttgaaaaaacaatttctaatatgcaagaagtaatagcgagaggaggaaaaatactttttattacagattataaaaaagagtctcttaatgaaaatataagatttggattaagagttccacacattgataatttattgtctccaatattattaactttaccactgcagatgctagcgtatcacgttgccttgttaaaaaattgtgatgtagataaacctagaaacttagcaaaatcagtaacagttgaataag

SEQ ID NO: 247128 - DNA, 1576 bp, Unknown
  Bacterial polypeptide expressing nucleotide sequence isolated from the Sargasso Sea
atgtgtggaattataggcatagccagcaacaaatcagtatcaataaatataattaatgctttaaaaaaattggaatacagaggttatgattctgcaggcttagcaacgattagcaatggagaaattaaagagaagaaatgcccaggtagagttgaaaaattagaaaaaattttatttcaaaatccaagcgaaggaaatttgggtataggacacgtaaggtgggcgacccacggtgtaccaaacgaagtaaatgcccatcctcattctagcgaaatagtttctgtagttcataatggaataatagaaaattctaatgaattaaaaaaagatttagaaaaatctggaaaagtttttaaatctcaaaccgatactgaagtgataacagttttacttacagaaaaacttaaaaaattagaccctttaaatgcagtgtttgagactcttgatattctaaaaggcagttttgctttgggaattatatttaaaaattataaagattttgtaattggcgcaagaagaggcagtccacttgcagttggatattcaaataacgaaaactatctaggctcagattcttatgctttaaaagctatgactaacaaaatttcatatttagatgacggagatgtatgtgttttatccaaagataatataaaattttataattctaataaaaataaaatcaataaagaaatttttacactatcggaagataaatcttctgtaagcaagggtaattacaaaaattttatgataaaagaaatttttgaacaacccattacaacaaaaacttgtctaaaagaatatattgataaaattcgtgaagaaattaatttttataatttgcctattgacccaaaaaaaataaataaagtagttcttatcggatgcggtactgcttatcactcatgcttagtagctaaacattggttagaagaacttactacgttaaatgttgaagctgatatagcctctgaatttagatacagaaaagttaaatttgatgtaaataatttgtacatatttgtttcccagtcaggagaaacagctgatacttatgcggccttagatctttgtaaaaaagagaatgtaaaaacatgctcagtagtaaatgttgtggagagttcaatagccagacattcagattgtgtacttccaatccatgctggaccagaaattggcgtggcttctacaaaagcttttcttggtcaaatgctcgttttgtatttacttgctcttaaaatttctgagattagaaatgatatggatcataaagaatacaaaaaaaaaataggtgaattaaaaaaaataccaaaactaataacagagtctttaaaagaagaagaaaaaatacaattgattgctaaagacatttacaaatctaaaggttcaatgtttcttggtagaggatcttccttcccaattgctctggaaggtgcgttaaaattaaaagaactttcatatttacatgctgagggttatccagctggagaaatgaagcatggaccattagcactaattgaagatggtttaccagtcgttgttattgcacctaaagacaaatatttgaaaaaac

SEQ ID NO: 247129 - DNA, 326 bp, Unknown
  Bacterial polypeptide expressing nucleotide sequence isolated from the Sargasso Sea
agagatgaaacatgccccaattgcattgatcgataaaaaatcattaacaatttgcttatcgccaaacaacgaactatatgagaaatctatttcaaatgctgaggaaattgctgctagaaatggtaaggttataattttatcgagtgttaaaattcaaagaaaatcattaaatacacataatgtaagcctacccaaagaaaactttattgacacacctttcatttatactattcctcttcaactcatttcatattattttgctcttaatgaaggtactgatattgatcaaccaaggaatctcgctaaatcagttaccgttgaataaa

SEQ ID NO: 247130 - DNA, 1798 bp, Unknown
  Bacterial polypeptide expressing nucleotide sequence isolated from the Sargasso Sea
atgtgtggaattataggcgcagcttcctcaagaagtgttgaaacaatcctagtcaatggactaaagaaaatggagtatcgcgggtatgactcagcagggcttgttttaaatagggagaaaagtgcattccaactaagaacccttgggaaggtttcaaaccttgaagaattaatgatcaaagaaaggcctaaggccaattctgggattgcacacacaagatgggcaacacatggtgttccatcagagactaatgcacatccccatgggtccaatggaaacatttatattgttcacaatggaatcattgaaaaccacgatgagctgagagaaagattagcaaatgaaggctatgagattcagtcagaaaccgattcagaattgatcgctcatttgatccatttcaataaaggaaaaggcaaaaccacattggcagcactaattgagacaacaaaagagcttgatggagcatactcaatcgctgtcattaacacagaggaaaaagggaaaatatttgcagccaaacaaaaaagcccacttttggttgggaaagggatagaagaaaattttattgcctccgatccgctcgcaatagccggtcttgctgaatctttttatctgcttgaagacggcgactttgcagaaattacagaagatgagataaaaattgttggaatcaacggtgagccagtctcaagagaagagaccataatagatacaagcgtgaaagaagcctcgaaagacggccataagcatttcatggaaaaagaaatatatgagcagcctcaagcaataacaaacgcaattgaaggaaggactgctaatggagaggttttagataatatatttggattgggttcatcaaatgtattcaaggatgtcaaaagaatccagtttgtagcctgcggcactagcctgcatgcagctaaaaccgccagaaaatggtttgaagaactttgtgagacaccatgctatatagattttgcaagcgaatacaggtatagaaacccacttgttgaggacgatactttgtttgtatgcatatcacagtcgggagaaacagccgacaccatggcagcacttaattatgcaaaagatgagaaatatttaggcattgtcacgatttgcaatgttccaaccagtaccatggcaagagaatctgattggaagatattcacaaacgcaggccctgagataggcgttgcttcaaccaaggctttcactacacagcttgcagcactacttttgctggcttgttcgatatcaaaaagcaaagaaataaataaggacaagagagtagacgcaatcaacgaccttctgaacacaccatctcttgttaaagaagcgtttgggctaaaaaaccacatcgtggagatagttgagaaaatcgctgacaaaaaaaatgctttgtatttaggcagaggagtatatttttcaattgcacaagaaggcgcactgaaattcaaagagattacatacattcatgcagaggcatatccagcaggagagctaaaacatgggccgcttgccctagttgacgaaatgacacctgttgtggcgctggccccagaggatgagcttgtagaaaagcttttgtctaacctcgaggaagttaagtcaagagggggcaccctttacgtctttggaaatgcgacctcgaagatcaaaattgaaaaaggcaagttcatgaatatgcctgagtgtggttattacaatgccccgaattgtctacacaatacccctgcaaattttggcatacgaagttgcatgctcaataggaacagatctggatcagcctaga

SEQ ID NO: 247131 - DNA, 875 bp, Unknown
  Bacterial polypeptide expressing nucleotide sequence isolated from the Sargasso Sea
gatgtgtggaattatagctgctgcctcaaatcgtaacgttggtaagttactagttcaagggctccataaaatggaataccgtggatatgattctgcgggtatagcgcttcatcaaaaagatcaaattgctcatttaagaaccttaggtaaagtcaaattgcttgaagaaaagatgattgctgaaaagccaaagagtaaactcggtattgcacataccagatgggcaacccatggtgagccatcggaagaaaatgcacatcctcataaatccaacgaaagggtttatatagttcacaatggaatcattgaaaattatcttgatctaaaagaatttcttaaagacgaaggttactctttttcatctcaaaccgactcagagctaattgctcacttgcttgaatattttctaagcaagggcaattcaatggtcgactcaatgtatttaacaaaagaaaaacttgatggagcatatgcaatagcggctattgatagagagaatgaccaaaatatagtgattgccagaagcaaatcaccccttttaatagggattggcacagatgaatttttagccgcctcagacccgcttgcaataggccaacttaccaatgaatttatatttcttgaagacggtgatgttgctgagcttacttcagaaagctacacaatttttgatgatactaaacaaaaggttagtagagaaattacacatattgatatttcaaatcaagcgacctcaaaaggtgaatataaacacttcatggaaaaagaaatctatgaacaacctgatgcaatattgaatactatcgatggaagagtgggtggagatgatgttttggaaaatatttttggcctaggctcatcagatatttcaaaaa

SEQ ID NO: 247132 - DNA, 1642 bp, Unknown
  Bacterial polypeptide expressing nucleotide sequence isolated from the Sargasso Sea
cccagtgcccaaatcaggcatagctcacacaaggtgggctacacacggagagccatctcaaaaaaatgctcacccgcacgcatcaaatggaaccatttttattgttcacaacgggataattgaaaaccacgatgaacttagagaaagactatcaaatgatggctataagattgaatcagaaaccgattcagaactcattgcccacttgatctactcgaataaggaaaatggtaaaagcacactagaggccttaattgagacaacaaaagaacttcatggggcatactcaatcgctgtgattgacacagaacaaaaagggaaaatatttgcagcaaaacaaaaaagcccccttttgattggcagaggcatagaagaaaatttcgtagcctctgacccactagcaatagcaggtcttgctgaatcattctaccttttagaggacggggactttgcagtaattactcaagatgaaatcaaaattgttggttctgacagtgagtcagttcaaagagaagaaactattatagacacaagcgttaaagaggcatccaaagacggctacaaacactttatggaaaaagagatatacgaacaaccaaaagctatagcaaatgccattgagggaagaacaacagacggggatgttctagacaatatatttggcttagggtcatctgagtcattcaaaggggtaaaaagaattcagtttgttgcctgcgggacaagcctgcatgctgcaaaaacagctagaaaatggtttgaagaactttgtgaaactccatgctacatagattttgcaagcgaatacagataccggaaccctttggttgaagaggatactttatttgtgtgtatttcgcagtcaggagagaccgcagacaccatggcggcattgaactatgcaaaagaagaaaaatatttaggtattgttacaatttgtaatgttccaacaagcaccatggcaagagagtccgattggaaaatatttacaaacgcaggccctgaaatcggcgttgcctcaaccaaagcatttacaacacagcttgcggcactaatgctgttggcttgttcaatatcaaaaagcaaaggcataaatggggataaaaggtcagaagccattaaggacctcgctaatacaccagagcttgtgaaagaagcgtttgggctaaaaaagcacatagacgatattgttgagaaaattgcagacaaaaagaatgcattgtatttaggcaggggcgtttacttctcaattgcacaagagggagcattgaaattcaaggagattacatatattcatgctgaggcatatccagcaggcgagttaaaacacgggccacttgcacttgttgatgagatgacacccgttgtagcccttgcaccagaagatgagctcgtagaaaagctcgtctcaaatctcgaagaggtcaaatcaagaggaggcacgctttacgtctttggaaacgcaacatcaaagataaaaattgaaaaaggaaaatttatgaacatgccagattgcggttactacaatgcaccaattgtttacacaataccattacaaatattagcctatgaggttgcatgctcaataggaacggacctagatcaaccaaggaacctagcaaaatcagtcaccgtggagtaa

SEQ ID NO: 247133 - DNA, 390 bp, Unknown
  Bacterial polypeptide expressing nucleotide sequence isolated from the Sargasso Sea
aaggtgccttaaagttaaaagaaattacctataagcattgtgaaggttatgcagctggagaattaaaacatggtccattagctttaattgaaaataatataccagtaattgttttagcaccttttgatgaaaattattctaaattactttcaaatatacaagaggttaaagctcgaggtggaagaattattatgattacagataaggatggtgcaaaaaaagcaaaaaaatattgcgatcaaatagcaataatacctcaaacaaattttataacatcaccaatattatattcattacctattcaattaattgcttattatttagcagtttttctcggaactgatgtagatcaaccaagaaacttagcaaaatctgttacagttgagtaat

SEQ ID NO: 247134 - DNA, 1192 bp, Unknown
  Bacterial polypeptide expressing nucleotide sequence isolated from the Sargasso Sea
ggttcagcttagtggatatacaataagatctatgaaagatgacgcaatagtcaatcgagaaacaactgaaatagaatttagtattgaagaaatagagaaaggtgaattccctcattttatgttgaaggaaattcacgatcagattttctcaattcaagatactatgcggggaagaattgatccagttgacggtacagcgcatctaggaggaattagtgatcagttaagcaggattcaagacgcgcatagaatttatattactgcttgcggaacatcctggcatgcgggattaatgggcaagtatttaattgaagaatatgcagggattcctgttcatgttgaatatgcttctgaatttcgctatagaaaaccaataattaactccaagacagttgtaataggaatatcgcaatctggggaaacagccgacacgcttgctgcaatcagaaaagctaagagctttggtgctttaaccgttggcatttgtaatgttgtcggatcttctgttgccagagaaactgattgcggaatttatactcatgctggacctgaaattggtgttgcttcgacaaaagccttcacttctcaggtagcggtactttttttactttctctatgctttggtagaaaaaacaagctctcagctttgacgggtcaaaattttgctcaagctttaatgaatattggcaatcaggttaaaattattctagatgattcagaatcaatacttgaagttgcaaaatctaccgtgcataatgaaaattttctttatttaggtcgcggattgaatttccccgtggcgctcgaaggagcattaaaactaaaagaaatttcatacattcatgctgaagggtacccagctgctgaaatgaagcatggccccatagcgctgatagatgaaaaaatgcccgttgtttgtctagcgcctcatgatgatacctttgataaggttttatcaaatattcaagaagttaaagccagaaaaggagttataattactgtaaccgataaaagaactaaagagcttgaaaaagtttctgactatataatagatgtgccttcaacgcacccaaagatatttcccatgctagcatctatctccctacagcttttagcatatcacctagcagtacttagggggtgcgatatagatcaaccaaggaatctagcaaaaagtgttacggtcgaatga

SEQ ID NO: 247135 - DNA, 1573 bp, Unknown
  Bacterial polypeptide expressing nucleotide sequence isolated from the Sargasso Sea
tatgtgtggaattattggtgctgcctcatcaagaaatgttggtaaattattaatacaaggacttcataaaatggagtaccgtggctatgattcagctggcatagctcttcaccaaaaacatcatgtaactcgcttaagagcgcttggaaaagttcaggcgcttgaagacttaatgatcgaacataaacctaagagcaaactaggtatcgcacacaccagatgggcaactcatgggaagccctcagaagctaacgcacatccccatgcatctagtgagcaaatttacattgtgcacaatggcatcatcgagaactataaggagctaaccaaaaagcttaaagattcaggctatcaatttgcctcacaaacagattcagaattaatagcgcatttgattcaccatcattacaaaaataatgatcttttgtgtgcgatgcagttggccacaaaagaattagagggcgcatatgcaatcgcggcagttgatcttaatcataaagatcaattggtaatagctaggcataagagtccgttattaattggtgtggggatagaggaaaattttgcagcctctgaccctcttgcattagcacaattgacctcagattttgtctttctagaagatggcgataccgctgtagtaaaaaaagatagctatgaaatatttgatgcgaatagcaaatcagttaacagagaggtaactcatttagatatcgaaactagttctgttactaaaggtgaattttcacatttcatggaaaaggaaatttttgaacaacctcagtctgcaagcaatacgcttgagtcaagacttggcagcaatgatgtcttagacaatatctttggattgggttcgtcagaaatttttgctaaaactaaacgtatccaatttgttgcatgcggcaccagtttacatgcgggaaaggttggcagattttggtttgaagaaattgctggtattccatgctatgttgattttgcgagcgaatatcgctatcgaaatccactggtggaagatgggacattatttgtgactatttcccaatcaggtgagactgcagacactttagctgccttacgctatgctaaagataaagattatctaagtacactttcaatttgtaatgtacctaccagctctttagcaagagaatcagatcatgttctgtttaccaacgcagggcctgagattggtgttgcatccactaaagcatttactacccaattggtgtctttgttgttgttagcaatgtcaattgcaaaaagtcaagataagaatccaatcatgcgagaggcgattaccaaagagcttaaagatttaccagcagcgattgacgcatcactaaacacaaaaactgccattcaaaaaatcacgcctgctatagcggaaaaaaataatgctctatttcttggccgtggaatatttttcccaatcgttcaagagggtgctctgaagttgaaggaaatatcttatatccatgcagaggcttacccagccggtgaactaaaacatggacccctagctttggtagatgacagtattccaattgttgctctgtcacctgagaacgac

SEQ ID NO: 247136 - DNA, 1708 bp, Unknown
  Bacterial polypeptide expressing nucleotide sequence isolated from the Sargasso Sea
agacaatgatgaaataagtgaaaaaaaatgttcaggtagagtagaggagttagaaaaaattttatttaaatctccatctaatggacatcttggcattggtcacgtgagatgggctacacatggcgtgccaaacattttaaatgctcatcctcattcgtcagaaattgtatcagtagttcataatggaataattgaaaattcagatgaattaaaaaaaaaattagagtcaaaaggcttaaagtttaaatctcagacagatacagaagttataacactattaattacagaagccctaaaagacaacaaacctttagaatcagtttttaatacacttaaacaattaaaaggaagttttgctttaggtattatctttaagaactataagaatattattataggagcgcgaagaggaagtccgctagctgtaggttattcaaatatagaaaattatcttggctcagactcttatgcacttaaatctatgaccaataaaatttcttatttagatgatggagacttgtgtgtcctatctaaagacaaggttgaattttatgatgtaaagaaaaaaaaaattaataaaaaagtacacattttatctgatgataaaaatactagtgataagggcgattataaaaattttatgtcaaaagagatatttgaacaatcaattacagcaaaaaattgtataaatgaatatactgatagtttaaaaaaagatatcaatatttataattttccaattaaaccagaaaaaattaataagattattttaatagggtgcgggacagcttaccattcatgccttgttgcaaaatactggtttgaagaacttacaaccattgatgttgagacagatatagcttcagagtttagatacagaaaattaaaatttaactctaacaacttatatgtttttgtttctcaatctggtgaaactgctgatacagcagccgcattagatatatgtaaaaaaaataaggtaaaaacttgctctgttgtgaactctgtagaaagcacaatagcaagaagttctgattgggttcttcctattcatgcgggcccagagattggagtggcgtcaacaaaagcttttttaggtcaaatgttagttctttatattttatgtttaaaattagctcaaatcagaaaagatataagcaactcattttatcaaacaaatataaaaaacttaaaaaatcttccagaagcaatcaagaaaagtttgaaagtagaaaatagcattcaagcgatggctaaagaatttcttgacgcaaaaggttctatgtttttaggaagagggctatctttcccaattgctcttgaaggagctttgaagctgaaagaattgtcttatttacacgctgagggttatccagcaggagaaatgaaacatgggcctttagctttaatcgaagaaggtttaccagtaattgtgttagccccaaaagataaatattttgagaaaactctttcgaatatgcaagaagtcatcgcaaggggaggaaagattttatttattacagaccataaaaaagaattaattaatgaaaatataagatttggtattagagttccttctctagacaatttactttctcccatactgctcaccatacccattcagttattggcttatcatgtagctttattaaaaggttgcgatatagataaaccaagaaatttagctaaatctgtcactgtagagtaa

SEQ ID NO: 247137 - DNA, 1303 bp, Unknown
  Bacterial polypeptide expressing nucleotide sequence isolated from the Sargasso Sea
caagtcacctcttttaataggtataggaaaatatggatcccttgcagcttcagacccactagccatatcagggcttacaaataaatttatttttttagaagacggtgatgttgctgagatttcatctaaagaatacaaaatttatgatgattctaagaatgaagtacaaagagatatatctcaaatagatatatcaaatgaagctacttcaaaaggaagctacaggcattttatggaaaaagaaatatacgaacagcctgatgcaatattaaatactattgatggcagggttggaggagatgatgttttagataatatttttgggctaggatcctcagaagtttttgcaaaagtaaaaaggattcaaatagtggcatgcggaacaagccttcatgctggaagagtggcagctaattggctttctgcaatatcagaattgccagcacaaatagattatgcatcagagtacagatataggaatccccatgtagatgaggattctcttttggtaacaatttctcaatccggagaaacagcagacactctagctgcattaaggtatggaaaagaaaaaaattatttatccacattaactatatgcaatgttccaacaagcgcactggcaagggagtctgattattctatttttacaaatgctgggccagaaataggagtggcctctacgaaagcgtttacaactcaattagctgcgctgatgcttttggcgctatctctagcaaaaagcagaaataaaaatcctaaattaagaacccgggttatcaccgcaatgaggtctttgtcagatactattaacgaaaccttaaaactcaaagatgaaattttagaaatcgctcctgaaatcgccaataaagataatgctttgtttttgggaagggggattttttacccaattgcaaaagaaggcgcattaaagttaaaagaaatctcttatatacatgctgaagcatatcctgctggcgagttaaaacatggaccattggcccttattgatgaaaatatgccagtaattgccttagcgcctgagagtgaaatagctgaaaaacttgtctctaaccttgaggaagtaaaagcaagaggcgggaccttgtatgtattctctgatccatctgtcacaatggaactaaaatcaggaaagataataaaaatgccaaaatgtgattttttacttaccccaattatttatactattccgttgcaaatcctttcatatgaagttgccttattaagaggcacagatattgatcaaccaagaaatttagccaagtcagtgacggtggagtag

SEQ ID NO: 247138 - DNA, 1600 bp, Unknown
  Bacterial polypeptide expressing nucleotide sequence isolated from the Sargasso Sea
atgtgcgggattatagggatagctagcaacaagtcggtatcaactaacataattgatgctttaaaaaaattggaatatcgaggttatgactctgctggtttggctactattacaaatggacaaattaatgaaaaaaaatgtcaaggaagagtagaaaaattagaaaaaattttatttcaaaatccaagcgaaggaaatctgggcataggtcacgtgagatgggccacacacggtgtaccaaacgaagttaatgcccatcctcactcaagtgaaattgtttcagtagtacataatggaattattgaaaattcttatgaattaaaaaaagaactagagaaatctggaaaagtttttaagtctcaaactgatacagaggtaattacagttttactcacagaaagattaaaaaaatcagagcctttaaaagcagtatttgaaactttagaagtattaaaaggaagttttgctttaggaattatatttaaaaatttcaaagattttgttattggtgcaagaagaggcagcccccttgccgttggttattctaataatgaaaattatttaggctcagattcttatgctttaaaatcaatgactaacaaaatttcctacttagatgatggagatgtatgtattttatccaaagatgaagtaaaattttacaatcataatagagacaagatcaacaaagaaatttttacaatgtcagaagataagtcttcagtcaacaaagggaattacaaaaattttatgataaaagaaatttttgaacaacctgttacaacaaaaacctgcttaaaggaatacattgataaaattaggggagaaattaatttttataaccttccggttgatcccaaaaaaataagtaaaatagtattaataggatgtggtactgcttatcactcatgtttggtggcaaaatattggtttgaagaacttacatctttgaccattgaaaccgatatagcatcagaatttagatatagaaaagtaaggtttgataaaaatgctttatatatatttgtatctcaatctggagaaacagctgacacctatgcagctttagacctttgtaaaaaagaaaatgtaaaaacatgttcagttgtaaacgttgtcgaaagttcaatagctagaaattctgattgcgttttgccaattcatgcaggtccagaaattggcgttgcatcaaccaaagcctttttagggcaaatgcttgtattatatttgctaactctaaaaatttcagagataagaaatgatattgataaaaaggaatataaaaataaaattactgaattaaaaaaaataccaaatcttatatctgagtctttgaaagaagaagaaaaaatacaattaattgcaaaagatatttacatgtccaaaggatcaatgtttttaggaagaggctcttcttttccaattgcgttagagggagcattaaaattaaaagaactttcatatcttcatgcagaaggttatccagctggagagatgaaacatggtcctttggctttaattgaagatggacttccagttgttgttattgcgccaaaagataaatatttcgaaaaaactttatcaaacatgcaagaggtta

SEQ ID NO: 247139 - DNA, 616 bp, Unknown
  Bacterial polypeptide expressing nucleotide sequence isolated from the Sargasso Sea
gcttttgttacccaattagcctgtttaaatctgttgcttttaactttgatgagagtgcacaacaaactaccaacagcaagaaagaaaattaccgcagcactgagggatttgcctaaattaattaataagactttaaaaatgacaggcgaatacaagaaagtggcaaagctactttttaaaagaaacagcgcattatttttgggtcgtggtttatattttcctattgccagagaaggggctcttaagctcaaagaaatatcttacatacatgccgaagcctatccgggcggagaattaaagcatggaccactggcactgatagacaaaaatatgccagtaatagctttagctccagataatgaacacttagataaaattacatcaaacattgaggaagtggcagcccgaaaaggcaaggttattactatagggccactaggcagaacaaaaatagataaaaatggcggccacattaagattcctaagacattggatctgcttaatccgattgtctcagtggtgccaatgcaattaattgcttattacaccgcagtctttaaaggcaccgatgtagataaacctcgtaatttagcaaaaagcgttacggtggagtagt

SEQ ID NO: 247140 - DNA, 1825 bp, Unknown
  Bacterial polypeptide expressing nucleotide sequence isolated from the Sargasso Sea
catgtgcggaatcgtcggagcaagcggcctgaacaatcaggtgccgcaactggtcaatgcgctgagcaggctcgaatatcgcggctacgattcgtgcggcattgccgtacaggacgacggccgcctgcgcagcgaacgcacgttgcgtcgcgtgaccgacctgcaggcccgcgtgctgacgctgggcctcgaagcgcagacctgcatcgcgcatacgcgctgggcaacccatggcgcaccgtccgaaatgaacgcgcatccgatcatgtccggcgacacgatcgcggtcgtgcacaacggcatcatcgagaaccacgacgcgctgcgcgtggagttgcgggagcgcggctatacgtttcgcggccagaccgacaccgaggtgatcgcgcacctgatccacagcctctatcgcgacgacctgttcgacgcggtcgtgcgcgccgtcaagcggctgcacggcgcgtacgcgatcgcggtgctgagcgcgaaagagccgcagcgcctcgtcgccgcgcgcgccggctcgccgctcgtgatcggcatcggcgccgaacagaactacctcgcgtcggattgcgcggcgctcggtgacctgaccgaccgcttcgtctacctggaagacggcgacgtcgcactgatcacgccggaccggatcgccgtggtcgactcgggcgggcacgaggcccagcgcccgctgtgccaggtgaaggcgcgcgagggcgacgccgcgctcggcccgtaccagcacttcatgcaaaaggagatcttcgagcagccgaaggcgatcgccagcacgctcgacggcatcgacacgatttcgccggcgttgttcgacgccgccgacggcacgcgcgcgctgctgtcgcgcgtgaggaacgtgctgctgctcggctgcggcaccagctactacgcggggctcactgcgaagtactggctggaggccatcgcgggcgtgccggcgcaggtcgagatcgccagcgaatttcgctaccgcgagacggtggccgatccgcgcacgctcgtcgtcggcatttcgcaatcgggcgagacggcagacacgatcggcgcgatcgagcaggcgcgcgacatgggccagacactgtcgatggcgatctgcaacgtggcgacgagcacgatcgcgcgcaccgcgccactgcggttcctgacgcgggccggcatcgagctcggcgtcgcgtcgaccaaggcgttcacgacgcagctcgtcgcgctgttcgtgctgacgctgacgctcgcgcagctgcgcggccggctcgacgcgaagcaggtcgcgctgcacctgaagcagctgcatgcgctgcccgagcgcatcggccacgcactcgcgctcgaaacgcagatcatgggctgggccacgaagttcgcacacaccgagaacgcgctgttcctcgggcgcggcattcatttcccgatcgcgatggaaggtgcgctgaagctcaaggaggtgtcgtacatccacgcggaaggctatgcggccggcgaactgaagcacggcccgctcgcgctcgtcacgagcgcgatgccggtcgtcacgatcgcgccggacgaccgcctgttccagaagctgaaatccaacatggccgaggtgcgcgcgcgcggcggacggctctacgtgctggccggcgaccagctcggaatcgacgccgaccgcgacacgcacctgatccgcgtgcgcgaatcgggtgacctgctgtcgccgatcgtcaacgtgattccgctgcagctgctcgcctatcacgtcggctgcgcgcgcggcgccgacgtcgacaagccgcgtaacctcgcgaaatcggtgaccgtggaatga

SEQ ID NO: 247141 - DNA, 641 bp, Unknown
  Bacterial polypeptide expressing nucleotide sequence isolated from the Sargasso Sea
tatgtgtggaattataggggcggcatcatctcgcaacgttggaaagttattggttcaaggtttgcataagatggagtaccgtggctacgactcagccggtattgctcttcatcaaaaagataatatttttaatcttagaactttaggcaaagtgagcttgctcgaagatgagatgattgagcagcgcccgaaaagcaaacttgggattgctcatacacgttgggcaacgcatggtaaaccatcagaaaaaaacgcacatccgcatgcatcaagtggagaagttaacattgttcataatggaatcatagaaaattatctcgagcttaaagataaattgatcgaggctggctatgcttttgaatcagagactgattcagaggttattgcgcacctactgcatcaacatcttcagtcgaacggcgatctgcttgctgccatgcatgaggctattaaagaacttgatggcgcttttgcaatagcagctattcacatcaaagataaaaatagattagtggttgcaagaaataaaagcccattattgattggaatcggcctagaagaaaattttgctgcatctgacccattggctttatcgcagcttaccagtgagtttgtctttctagaggatggtgacatgcaga

SEQ ID NO: 247142 - DNA, 748 bp, Unknown
  Bacterial polypeptide expressing nucleotide sequence isolated from the Sargasso Sea
tgcaagaaaaatgaggttaaaacctgtgcgattgtaaatgtagtagagagctcaattgcaagagatgcagatttagtattgccaattcattgtggaccagaaattggtgttgcatctacaaaagcctttttaggtcaaatgcttgttttatacttattgtgtacaaaaatttcatttgaacaaaaatcaatttcaaaaaaattgtatcaaagtaaaattaaagatctgttgctactttctaaatgtgcaaaaggtacattaaatatagataacaaaatccataacttaggaaaagattttgcaaattcaaagggatcaatgtttttaggaagaggttattcctatccaattgctcttgaaggggctctaaaactaaaagaacttgcgtacgtacacgcagaagggtatccagctggtgaaatgaagcatggccctttggcccttatagaggaaggcatgccggttgtagtagttgcaccaagagatgtacattacaaaaaaacaatttctaatatgcaagaagttatttcaagaggtgctaaagtattgcttataactaataaaagtagtgatgaaattatttctgaaaatatttgggagcaaattgaagttgaaaacatatctgatgaacttcttccatttttaactacaatccctttgcaaaaattggcgtattactcagctttagataaaggctttgatattgataaacctagaaatcttgctaaatcagttactgttgaataat

SEQ ID NO: 247143 - DNA, 988 bp, Unknown
  Bacterial polypeptide expressing nucleotide sequence isolated from the Sargasso Sea
atgtgtggaatagtcgggtattcaggcccaaaagaaccattaccaattctaattaatggtttatcacgtttagagtatcgaggatacgattcagctggaattgcaatttctgatggtaacaaaattactgttgaaaaaaaagaaggtaaactcgacgttttaaaaaatcatttaaaagatagcaatattaaaggcaatataggcattggtcatacaagatgggcaactcatggtgttccaaatgacgtcaatgctcatccacattctgacaatagtgaagaatttgcaatcattcataatggaataattgagaactatgcagaaattaagaaagatcttttagaagaaggttatgaatttaaatctgacactgacacagaggttgttgcagttgaattaagtagaaaatggaatggtcaattgttaaaaactgtaaatgatgtagcaaaaaccctagaaggaacatatgctcttgttgtaactactacaaaagaagaaggaacaattgttgctggtcgtttaatgagtcctcttgtcttaggagttggagaaaaagaagtatttctcgcatctgattcagcagctattttagaacatacaaataaaatgatttttctagaaaatggagattttgtagaaattaaaaacggtcaatataagttgtttgattctgatttgaacgagattgaaagagaaattcaagaaatagactgggaggtctctgaagctgaaaagttagggcatgatcactttatgtataaagaaatacttgaacaggcggaagtaatagaacgaactatttctggaagacttgaattaacttctgaagaaattccaatcaagttagatgaagcatcaaagtatgaaaaaatttggatagtcgcatgtggtactgcttaccacgctggtttatttggaaaagatctatttgaaaaagttttaggggtaccagttagtgttgaacttgcttcagagtttagatatagag

SEQ ID NO: 247144 - DNA, 993 bp, Unknown
  Bacterial polypeptide expressing nucleotide sequence isolated from the Sargasso Sea
taatatattttgggctgggttcatcaaaggcgtttaagggcgtcaaaagaattcagtttgtagcctgtggcacaagcctgcatgcagctaaaacctccagaaaatggtttgaagaactgtgtgagacaccatgctatatagattttgcaagcgaatacaggtaccgaaacccacttgttgaagacgatactttgtttgtatgcatatctcagtcaggagaaacagccgataccatggcagcgcttaattatgcaaaagatgagaaatatttaggcatcgtcacaatctgtaatgttcctacgagcaccatggccagagaatctgattggaagatattcacaaacgcaggcccagagataggcgtagcttcaaccaaggccttcacaacacaacttgcagcactgcttttgttggcttgttccatatcaaaaagtaaaaacataaataaagacaaaagaacagacgcaatcaatgaccttctcaacacaccttcgctcgtgaaagaatcatttgagctaaaaagtcatatcgatgagatagttgagaaaatcgctgacaaaaagaatgctttgtatttgggtagaggcgtttatttctcaattgcacaagagggcgcactaaagttcaaagagattacatacattcatgctgaggcatacccagcaggagagctaaaacatggaccacttgccctggtcgatgaaatgacacctgttgtcgcattggccccagaggatgagctcgtggaaaagctgttgtctaacctcgaggaagttaagtcaagagggggcactctttacgtctttggaaatgcgacctcgaagatcaaaattgaaaaaggcaagttcatgaatatgcctgattgtggttactacaatgcaccgattgtctatacaatacccctgcaaattttggcatacgaagttgcatgctcaataggaacagatctggatcagcctagaaatctcgcaaaatcagtcacggtggagtaag

SEQ ID NO: 247145 - DNA, 184 bp, Unknown
  Bacterial polypeptide expressing nucleotide sequence isolated from the Sargasso Sea
atgtgtggaatagtaggtgctgtagcacaacgcgacgtagtcgagattctggtcgaaggcttacgtcgcctggaataccgtggttatgattctgccggtgtggccatcatcagcccaacaggcgaattacaacgtatccgccgtttaggtaaagtaaaagaactgtctgacgcagtaaattaac

SEQ ID NO: 247146 - DNA, 509 bp, Unknown
  Bacterial polypeptide expressing nucleotide sequence isolated from the Sargasso Sea
cccaggtaaattaaaaacagttttaaaagaaaatgatttaattgaaaaaatttctaaaatatattataaatcttctaatgctctttatttaggtcgaggaataaattttccattagccttagaaggagctttaaagttaaaagaaatttcatatatacatgctgaaggctatcccgcagctgagatgaagcatggcccaatcgctttaatagatgaagaaatgcctgtttttgttattgctactaaagattctagctatgaaaagattttatctaatatacaggaagttaaagcaagaaaaggtaaaataattgcaattgttagccaaggtgatattgaagtaaagaaaattgcagaccatttcattgagatacctaaatgtgatgaactattagttcctctaatagcaacagtcccattgcaattacttagctatcatattgcattaatgagaggatgtaatgtagatcagccaagaaatttagcaaaatctgttacggttgaataac

SEQ ID NO: 247147 - DNA, 1015 bp, Unknown
  Bacterial polypeptide expressing nucleotide sequence isolated from the Sargasso Sea
atctcggcctattgttgtagctaaatctaatgacggtcttgttgataaaggagaatacagacacttcatgcaaaaagagattcaagagcaaccaacaaaaataagcgagctaatgatgggtcatctaactaaagagggcgttagcgcaaatatatttggccccactgctccagagatattctcaaaaataaaccatgttcaaatagtggcctgtggaacaagctatcacgctggactagttgccaagcattggatggaagctatagcaggtatttcttgtagtgtagatgttgcaagtgaatttaggtatagaaatgttgttgtcaaagaaggaactctttttgtgactctatctcagtcaggcgaaaccgcagacacactcgcttgcttgagggacataattgattccggatatatttctagtttggctatatgcaatgtacccactagttcattagtaagagaatcagatttagtttttttaactcgggcagggcctgaaataggagttgcttcaactaaggcttttacaacacaacttttaagtctgttgatgttaactctagttttaggaagagagcacgggctatctcaggcagcagagaattctatcaacaactctttgagagacctgccaaaattacttgaggaagtgatggctctagagcccaaaataattaagatggcggaagattttgatgacaaagaacatgcattatttttaggtagaggaatccactatccgatagccatggaaggagcattaaagttaaaggagatatcttacattcatgctgaagcatatccggcaggtgaattaaagcatgggcccttggccttagtagatgacagcatgcctgtagttgcagttgctccaaatgatgacttattagaaaagcttcactcaaatctagaggaagtaaaagcaagaggaggtaaactatatgtatttgggcacacagatgcttatcatcaaggttttgcagaaaagtttattgagctcccagaaattcca

SEQ ID NO: 247148 - DNA, 799 bp, Unknown
  Bacterial polypeptide expressing nucleotide sequence isolated from the Sargasso Sea
gatgtgtggaatagtaggttacttaggcaagggcaccgcccaggagtcgctcgtggatggcttgcgccgtcttgaatacaggggctatgattccgcgggggttgcctttcacgaagggggggagttctccctttcccgggaaacgggccgggtggagaacctagccaatgccctcagggaatccagttcctcttcgtcgcttggcatcgcccatacccgttgggcgacccatggtgcggttaccgtttccaatacccatcctcatctgagccaggacggtaagttcgtcttggtccacaacggggtcatcgagaacttcggcaccctcaagcgctttctttcctccaagggaatctccttctcctccgagaccgattccgaggtcctctgcaacttgatcgcctatcattactccgagcttccggaggatgaggatcgcttcatcgatgccgtccgactggctcttcccaagtgcaggggagcctacggcattgccgttctctgcctcgattatcctgaggtcatgatcggcgcccgtcgtgggtcgcctctcgtagtcgggctgggcgatgaggcgaatttcatcgccagcgacgcttccgccttcgtgggacgtgccaaggaggccgtcttcctcaacgacggggagattgccgttctggacaagggaggattcaggattaccaccctcgagggccaggacgctcaagccgtgacccatccgttggaccagattctcgaggaggtcgaactgggggatttcgattcctacaggaaaaggagatttcgagcaaccaac

SEQ ID NO: 247149 - DNA, 350 bp, Unknown
  Bacterial polypeptide expressing nucleotide sequence isolated from the Sargasso Sea
tgctgaaggatatccagcgggcgagatgaagcatgtgccattagcattaattgaagaaggcttacctgtaatagtaatagcgccaaatgacagatattatgaaaaaactttatcaaatacccaagaagtaatagctaggggaggtaaaattttttttataactgataataaaaaaagacttcttagtacaaatattagatttagattgagagtccctcgtgttgacaagctgttatcacctttattacttacaattcctttacaattattagcttatcacgtagcgttattaaaaaattgcgatattgataaacctagaaatttagctaaatcagttacagtagagtaga

SEQ ID NO: 247150 - DNA, 1099 bp, Unknown
  Bacterial polypeptide expressing nucleotide sequence isolated from the Sargasso Sea
atgtgcgggataattggtatcgcaagcaataaatctgttacttcaaatataataaactctttaaaaagattggagtataggggttatgactcagctggaattgcgacgatttctaaaaaaaatcttaatgaaaaaaaatgttcaggaagagtagaggaacttgaaaaaatattatttaattcaccagctcaaggtaatataggaattggtcacgtgagatgggctactcatggaatacctaacgaaattaatgctcaccctcattcatctgaaatagtttcagtagttcataatggtataattgaaaattctaatcttctaaaaaacaaattagaaaaagagggatacaaatttaaatctcaaactgatactgaggtcattaccttgttaatcacgaaatttctaaaagattcaaatcctatcgatgctgttttaaagtccttggaatatcttgagggaagtttcgcattaggaatattgtttaaagatcaagcggatataatcataggggctagaaggggcagcccattagctgttggatattcaaaaaatgaaaattatttaggctccgactcatatgcgcttaaagccatgacaaataaaatttcatatttagatgatggcgaaatatgtattttatcaaaagataatgttgaattttttgatagttctaaaaacaaaattaacaaaaaaatattagttttatctgaagacaaaaatgaaacaaagttaggtgattataaaaattttatgtcaaaagaaatatttgagcaaccaactactgtcaaaaattgtttaaatgagtatttagataaaataagaaacgatataaatctttatgattttccaataaatccaaaaaaaattgataaaatatttcttgttggttgtggaacagcttatcattcatgccaagtagcgaaatattggattgaagaattaactgatttaaatgtagaaactgaagtggcatcagaatttagatatagaaagataaagtttagccctaatactctatatatatttgtatctcagtcaggagaaacagcagatacagctgcagctttagaaatagctaaaaaaaataaaatgaaaactt

SEQ ID NO: 247151 - DNA, 1489 bp, Unknown
  Bacterial polypeptide expressing nucleotide sequence isolated from the Sargasso Sea
tatgtgtggaattataggggcaacctcatcaaggagtgtaggcaagattttaattaaaggtcttcacgccatggaatacagaggatatgattcagcaggcgttgctctaaatcaagacagtgaagttttcaggcttagatcattaggaaaggtttcatctcttgaagagctaatgatcaaccataaaccaaaagccaagtctggcatagctcacacaagatgggcgactcatggggcgccctcagaagaaaacgctcatccccatggttcacacaatgaaatctatattgttcataatggaataattgaaaaccatgatgaaattagagagaaacttaaagagaaaggctacaaaattgcttctgaaacggactccgagcttatagctcatttaatccatttaaacaaaacagactcgtcttcaactcttgaagctttaataaaggcaaccaaagaacttaaaggagctttttcaatagctgcaatatcatctgaagaaaaagacaaaatatatgcagccaaacaaaagagcccgctattgattggaaaaggtattgaagaaaactttgttgcatcagacccattagcgattgccaacataactgaaaaattttatctattggaagatggtgactttgcagaaatcacaaaagatgacattaaaatttttaatagtaatagtaaacccgttcagagagaagagaccaagatagatgctacaccaacctcaacaagcaaaggcaactacacgcatttcatggaaaaagagatttatgagcaaccagatgcattaggaaacaccataaatggcaggcttggtgagaacgatgttctagataatatttttggtttaggatcaagtgatgcattcaaaaaagtaaaaaggattcagtttgttgcatgtggtactagccttcatgcagcaaaaactgccagaaaatggtttgaggaaatatgtgagatgccttgctacatagattttgcaagtgagtacagatataggaatccaattgttgaggaccacacactgtttgtaacaatctctcaatctggtgaaacagctgatacattggctgctttagaatatgctcgagctgaaaagtatgctggcattgtgacaatctgtaatgttccaacaagcaccatggcgagagaggctgattggaaaatattcaccaacgcagggcccgaaataggagttgcatcaacaaaagcttttaccactcaattagctgccttactgatgctcgccttatcaatcgccaaaagccaagataaaaacactgataaaagaaaacaagcaactcaggaattaagagaaactccggcattggttgatcaggcttttagtttgaaagaaaacatttctcaaataacacaaaatatctctaccaagcacaacgcattatttttaggtagaggaatgtacttctctatcgcacaagagggagcattaaaattaaaagaaatatcgtacatacatgctgag

SEQ ID NO: 247152 - DNA, 1285 bp, Unknown
  Bacterial polypeptide expressing nucleotide sequence isolated from the Sargasso Sea
tatgtgtggaatagttggaatagtaagtaacaaatctgtctcggcaagtataattggtgcattgaaaaaactagaatatcgtggttatgactcagctggaatttcaacgcttagcaataatcgaattaatgagcaaaaatgttctggaagagtagataatttagaaaaaatactttttcaaaatccctccgatggagaccttggtattggtcatgtaagatgggcaacacatggaatccctaaccaaataaacgcccacccacattcttcagaagcagtttcagttgtccataatggaataattgaaaattctgataaattaagagatgaatatattaaaaaaggatattcatttaagtctcaaacagatacagaagttataacagtaatgttaactgattttttaaaatcagaagatttaataaattgtattcataaaactttagaaaaattagaaggcagctttgctcttggagtgatttttaaagattttaaaaatttagttgttggagctagaagaggaagtccactagcagttggatatgggcataatgaaaattttataggttcagattcttacgcccttaaatcaatgacaaataagatttcttatctagatgatggagatttttgcttgctttatagagaaaaagttgaattttataattcaggaaaaaagaaaattaataaagaaattttagaattatccaatgaagaaaatatcgctgaaaagggagattataaagactttatgtcaaaagaaattgacgaacagtcatttactacaaaaaaatgtattaatgaatatttagataaatctcgtaatgaaattaatatttacaatctaccaattgatcctaaaaaaattaataaaattagactaattgcttgtggaaccgcgtatcattcatgtttaatggcaaaatattggattgaagaaaatacctctattgatgtcgaagcagatatagcgtcagaatttagatatagaaatgtaaaactaaatactgatgatctttatattttcgtttctcaatcaggagaaacagctgatacttatgctgcactcgaaaaatgtaaaaaaaataatgttaagacgtgtggaatagttaatgtggtagaaagttcaatagcaagactagcagattttgttctaccaattcatgctgggccagaaattggagttgcatctactaaagcttttttaggacaaatgcttgttctttatttgctaatattaaaaatatcaaaagaaagagttgaaattgataaagaaattataaaa

SEQ ID NO: 247153 - DNA, 469 bp, Unknown
  Bacterial polypeptide expressing nucleotide sequence isolated from the Sargasso Sea
aatgtgtggaattattggaattgctagcaacaaacctgtttcgattaatattatcaactctttaaaaaagctagaatatagaggttatgactcagcaggcttagctaccttaaaagataacttaatagatgaaaaaaaatgttctggaagagtagaggaacttgaaaaaattttgttcaaaaatccctctaatggcaacctaggtataggccatgtaagatgggctactcatggagtccctaatattattaatgcacatcctcattcttccgaaaaagtttcagtggttcataatggtataatagaaaactcagatgaattaaaaaaagatcttgaagaaaaaggtttcaagtttaaatcacagactgatactgaggttattactctcttagttacgcagttcttagaaaatttaaaacctttagagtcagtattcaaaactttgaaaaaattaaaaggcagttttgcc

SEQ ID NO: 247154 - DNA, 1058 bp, Unknown
  Bacterial polypeptide expressing nucleotide sequence isolated from the Sargasso Sea
ctatgagcaaccaaaggcaatagcaaatgccattgaaggaagaacagcaggtggggatgttctagataacatattcggtatggactcatctgaatcattcaaaggggtaaaacgaatacagtttgttgcatgtggtaccagccttcacgcagcgaagaccgcaagaaaatggtttgaagaactctctgaaacaccatgctacatagattttgcaagtgaatataggtatcgaaacccacttgttgaggacgatactttgtttgtatgcatatcacagtcgggagaaacagctgacaccatggcagcccttaattatgcaaaagatgaaaaatatttagggattgtaacgatttgcaatgttcccacaagcactatggcaagagaatctgactggaagatatttacaaacgccggcccggagatcggtgttgcctcaacaaaagcattcacaacacaacttgcagcattgcttctgttggcatgttcaatatcaaaaagcaaaggcataaataaggacaaaagaaccgacgccatcaaagatctcattaatacaccagcacttgtgaaagaagcgtttgggctgaaaaaacacatagatgacattgttgagaaaattgctgacaaaaagaatgcgttgtatttaggtaggggcgtttacttctcaatcgcccaagagggggcattgaaatttaaagagattacatatatccatgcagaggcatatccagcgggagagcttaaacatggaccactcgcacttgttgacgaaatgacacctgttgtagcgctcgcaccagaagatgagctcgtagaaaaactcgtctcaaatctcgaagaggtcaaatcaagagggggcacgctttatgtctttggaaacgcaacctcaaagataaaaatagaaaaaggaaaatttatgaatatgcctgactgtggttactacaatgcaccaattgtttatacgatccctttacaaattttggcatatgaagttgcatgctcaataggaacagacctagatcagccaaggaacctagcaaaatcagtgacggtggagtagt

SEQ ID NO: 247155 - DNA, 793 bp, Unknown
  Bacterial polypeptide expressing nucleotide sequence isolated from the Sargasso Sea
atgtgtggaattgtaggaattactagtacaaaaaacgtttcaagttcaatacttaactctctaagaaaattggaatacaggggatacgactcagcaggtattgcaactttagagagaggtttaataaaagaagttaaatgcgaaggcagagttgatgctttagagtcaaatctctcaaaaaaaaaattagaaggacatgtcggcataggccatgtaaggtgggcaacacatggtgtacccagcacaattaatgctcaccctcattcatcagataaagtttcagtagtacataatggtataatagagaattcaacaatacttaaaaaattattaattaaaaaaggctatttatttaaatcacaaacagatacagaggttattgttcatttaataactgattatttaaaaaaaaatgatttaaaaaattctataattaaaatgcttaaaagacttcacggaagctttgcattgggaataatttttcaagatcaaccagatttaattgttggagcaagaagaggatcaccactagccgttgggtatggaccaaatgaaaattatttgggatcagattcttatgctttaaaatctatgacaaataagattacttatttgaatgacagtgaattttgtataatcaaaaaagataatgttgaattttttgacgaaaaaggaaacaaaataaataaaaaagtattagagctctcaaaagatgatcaagaatatgaaaaaggtgattataaacattttatggctaaagaaatcgatgaacagcctacgactataaaaaatt

SEQ ID NO: 247156 - DNA, 1891 bp, Unknown
  Bacterial polypeptide expressing nucleotide sequence isolated from the Sargasso Sea
tatgtgcggaatcgttgccctggtggggtcccagcctgcagcgccacagttgcttgagggtctgcggcaactggagtaccgcggatacgactcggctggcgtggcgacggtcacccgtgagggacgactcacctgcctgcgggccaaaggcaagctcgtcaatctccgtcagcgtgtgaaggccatcggggcccccgggcagtgcggtatcggccacacccgttgggccacccacggcaagccagaggagcacaacgctcacccccaccgcagtgccgatggaggggtggctgtggtgcagaacggcatcatcgaaaaccaccggcagctccgggatggcctggaagctggcggagtggcgttccagtcggaaacggacaccgaggtgattcctcatctggtgtctgctgaacttcaccgacgcctccagaacggcgaaccgcccagcggttccaccttgcttcaggcggtgcaggccgttctgccccagctgcagggggcctatgccctggcggtgatctgggagcaggctcctggcgctctggtggtggcccgccgggctgcacctctattgatcggcctgggcgagggcgaattcctgtgtgccagcgacactccggctctggccggattcacccgcacgatcctgccgatggaggacgacgaagtggccctgttgtctccgctgggggtggagctctacgacggcgacggggcgcgtcagcagcggatgccgaccctgctgacaggaatggatcacgtggcggacaagcgggagttccgccatttcatgctcaaggagatccatgagcagccagagacggcggcactgtgggtgtctcgccatctgcctgcggggctgccggcatcgatgcccgtggccttgccgtttgacgaggccttctacgccggcatcgaacgaatcgagatcctggcctgcggcaccagtcgccatgcggctctggtgggtgcccatctgctggagcaattcgcggggctgcccacgtctgttcactacgccagtgaatttcgatacgccccgccgccgctggcccccaacaccctcacgatcggggtcacccaatccggcgaaacagccgacaccctggcggccctggcgatggaggcccagcgccgcagcgcccatcccgacccggcctatgccccgcgccagctgggggtgaccaaccgtccggagagttcactttcccgtcaggtcccccacatcctggacatcggtgccggcattgaagtgggtgtggcggccaccaaaaccttcatggggcagctgttggccttctatggcctggcgttggccttcgcggcacgacgaggcagtcgttcagcagcagacatccaggcgctggttgctgaattgcgcatgcttccccagcagctgcaggagttggtgtcgctccatgatcagcgctcggaagccttggcccatcgctttgccgaaactcaggacgtgatcttcctgggtcggggcatcaactaccccatcgcgctggagggtgctctcaagctcaaagagatcagctacatccatgccgagggctatccggctggtgagatgaagcacggtcctattgccctgttggatgcccacgttccggtcgtgtccatcgcggtgccgggaacagtgttcgagaaagtgctcagcaacgcccaggaggccaaggcgcgggatgcacgcttgatcggcgtggctccagagggacctgacacggcgctgttcgatgaccttttgcctgtgccggaggtgagcgagtggatcagcccgttgctgacgttggtgcccatgcagttgttgagctatcacatcgcagctcatcggggcctggatgtggaccaaccccgcaatctggctaagagtgtgaccgtggagtga

SEQ ID NO: 247157 - DNA, 1683 bp, Unknown
  Bacterial polypeptide expressing nucleotide sequence isolated from the Sargasso Sea
gtgagggtagagtagacgctttagagaaaaacattatacaaactaaaatatctggctctattggtatcggacatgttaggtgggcaactcatggaaaacctagctcaataaatgcacatcctcattcatcagaagatgtatctgtagttcataatggtataattgaaaattcaactattctaaaaaagttattagaaaataaaggttataagtttaaatctcaaacagacacagaagtaatagttcatttggtaactgattatttaaaaaaaaataaccttaaaaatacaattataaaagttttaaaaaaattacacggcagttttgcgctaggaataatatttaaagaccaaccagacttaatagttggggcaagaagaggatctcctcttgcagttggttatggtccaaatgaacactatcttggttcagattcttatgcattaaagtcaatgactaataagatttcatatttaaatgatggagaattttgcatattaaaaaaagatcaagtcgaattttttgattcagatggaactaaagttaacaaaaaaattttaaatctttctaaagatgatcaaaattatgaaaaaggagattacaaatattatatggctaaagaaatagatgagcagccgattaccttaaaaaattgtgtaaatgagtacatcgacaaacataacaaagaaataaatatttataattttccttggaaaatcaatgaaatttcatcagtaattttaattggatgtggaacagcatatcactcatgtcttgttgcaaagtattggtttgagcaaaatacaagtttagatgtgagtgttgatatagcttctgaatttagatatcgaaaaattaaatttaaaaaagattgtctttatatttttgtttctcaatctggagagactgcggatacatttgctgcattagatttgtgtaaaaagaataatgttaaaacttgtgcagtagtaaatgttgttgaaagttcaattgcaagagatgcagatctagttttacctattcattgtggcccagaagtaggtgttgcatcgacaaaggcttttttaggacaaatgttagtactttatttattatgtactaagctttcttatgaacaaaaatcaattaataaaaaggactatcaaaagaagataaaagatttactgtctttgtctaaatctgcaaaaaatacattgaatattgaagataaaatccaaacacttggaaaagattttgctaactctaaaggatcaatgtttttgggtagaggttattcatatccaattgcgcttgaaggtgctttaaaactaaaagagcttgcttatgttcatgccgaaggttatccagctggagaaatgaaacatggacctcttgcactcatagaagaaggtatgccggtagtagtaattgctccaagagatgagcattacaaaaaaactatttcaaatatgcaagaagttatatctagaggtgcaaaagttttattaataacaaataaaagtactgatgaaatttactcagaaaatatttgggagcaaatagaagttgatgccatttcagatgaacttattccttttttgactactatacctttacaaaagttagcttattattctgcactagacaaaggttacgatattgataaaccaagaaacttggctaaatctgtcactgttgaataaa

SEQ ID NO: 247158 - DNA, 379 bp, Unknown
  Bacterial polypeptide expressing nucleotide sequence isolated from the Sargasso Sea
actaaaattaaaagaaatatcctatatccatgcagacagctatccacctgctgaaatgaagcattgtccaattgctttagttgataagaatatgccgaatttctttattgtaccaaaagacaaaacttatgataaaatcatttcaaatattgaagaaataaaatctagaaaagaaaaaattattatcattacagattcaaaagataagattttaagagatcttgcaaatgatttaatactcgttccaaaaacaaatcatttcatgttttgtcatttagcaacaatagttcttcaattgtttgcatattatatagcagttggtaaaaatctaaatgtagatcaaccaagaaatttagcaaaatctgtaactgtcgagtag

SEQ ID NO: 247159 - DNA, 1822 bp, Unknown
  Bacterial polypeptide expressing nucleotide sequence isolated from the Sargasso Sea
tatgtgtggaattataggtatatctagtaacaaatctgtatctgcaaatattatcaattctttaaaaaaacttgaatatagaggttatgattctgttggggttgcaactttatttgatggtgaaattaatgaggtaaaatctgaaggaagagttgataatttagaacaaaactttgatctaaaatctttaaaagggaatataggaataggtcatgtgagatgggcaacacacggagttccaaatagtattaatgctcacccacattcttcagacaatgtatctgtggtccataatggaataatagagaattcaacaattctaaaaaaatatttaattaataagggccacactttcaaatctcagactgataccgaggtaattgttcatttaattactgaaaatttaaaaattatggaactcgaggaagcaataactaaaactttaaaacaactacatggaagttttgcattaggtataatttttaaagacattccagatttaattgtaggcgcaagaagaggttcaccattagctgttggctatggtcctaatgaaaattacttaggttcagactcttatgctttaaaatctatgacaaataaaattacttatcttaatgatggagaattttgtttagttaaaaaagatcaagttaatttttataatgaagagggtaagaaaattaacaaaaagattttagaattatcatcaaatgagtcaaactatgacaaaggtgacttcaaacactttatggctaaagaaatagaagagcagcctgcaacaataaaaactggaattaaagaatatttagatagtgtgaataatgagataaatatttttaattttccttggaaaatcaacgaaattaaatcaattacattaattggctgtggtactgcttaccattcttgtttaatggctaaatattggtttgaagaattaactactttagatgttaatatcgatatagcttcagagtttagatatagaaaaaatagatttaaaaaagatagtttatatatttttgtttctcagtctggtgagactgcagatacttatgcagccttggatctttgtaacaaaaataatatgaaaacatgtgctgtagttaatgtaattgaaagctctatagcaagagattcaaattttgtattaccaattcattgtggacctgaaattggtgttgcatctacaaaagcattcttaggacaaatacttgttttatatattttagctttaaaaattggatctatatctggtcaaattgataaaaaaaattatcaagaaaaaattaaagatcttaaaaacctaccaagcttgatagaaaaaactttattagtagataatgatattcaagcaatttcctcaacattcaatgaagctaaaggatctatgtttcttggaagaggtttctcttttccaatagctttggaaggtgcattgaaattaaaagaattatcttatgttcatgcagagggttatccggcaggtgaaatgaaacatggaccacttgcattgatagaagaagggatgccagttgttgttctagcaccaagagacagctactataaaaaaacaatttctaatatgcaggaagttgtagcaagaggtgccaaagttcttttaattactaataaaagcaaagatgaaattgtttcagagaatatttgggaaactattgaagtagaaaatactaacgatgatttgttaccattcctattaactgtaccacttcaaaaacttgcttattattctgctcttaaaaagggttatgatatagataagccaagaaatttagccaaatcagtcacagttgaataa

SEQ ID NO: 247160 - DNA, 1018 bp, Unknown
  Bacterial polypeptide expressing nucleotide sequence isolated from the Sargasso Sea
tatgttgataatgttaacaaagaaataaatatctttaatttcccatggaaaattgatgagataaaaacaataaccttaataggatgtgggacagcatatcattcttgcttaatgtcgaaatattggcttgaggagctaactaatttagacgtaaatatagatatagcatcagagtttagatatagaaaaaatagatttaaaaaagatagtttatatgtttttgtttcacaatcaggagaaacagctgatacttatgcagccttagatctttgtaacaaaaataaaatgaagacatgcgctgtggttaatgtgattgaaagttcaatagcaagagattcaaattttgtattaccaatccattgcggccctgaaattggagttgcatctactaaagcatttttagggcaaatactggttttatatctcttagctttaaaactaggatctttaagaaatgaaatagaaaaaagtaaatatcaacaaaaaattaatgacttaaaagatttaccaggtttaattgaaaaaacattattacatgataatgatattcaaaaaatttcctcaacatttaatgatgcaaaaggctcaatgtttttaggaagaggattttcttatcctatagctttggaaggtgcactcaaacttaaagaactttcatatgttcacgcagaaggttatccggcaggtgaaatgaagcatggtcctttagctcttatagaagagggtatgcctgtagttgttttggctccaagggataattattataaaaaaacaatttcaaatatgcaggaggttatagcaagaggtgcaaaggttctattagttacaaataaaagtaaagatgaaattgtttctgaaaatatttgggaaactatagaagtcgaaagtagcaatgaagatcttctgccatttcttttaactataccattacaaaaacttgcatattattcagctttaaaaaaaggttatgacatagataagcccagaaaccttgctaaatctgtaaccgttgaataat

SEQ ID NO: 247161 - DNA, 532 bp, Unknown
  Bacterial polypeptide expressing nucleotide sequence isolated from the Sargasso Sea
atgtgtggaattataggcgcagcttcctcaagaagtgttgaaacaatcctagtcaatggactaaagaaaatggagtatcgcgggtatgactcagcagggcttgttttaaatagggagaaaaatgcattccaactaagaacccttggcaaggtttcaaaccttgaagaattaatgatcaaagaaaggcctaaggccaattctgggattgcacacacaagatgggcaacacacggtgttccatcagagactaatgcacatccccacgggtccaatgaatctatttacattgttcataatgggattattgaaaaccatgatcagctaagagataggctggcatccgacggctataaaattaactctgagaccgactcagaactcattgctcatttgatccattcaaataaagaaaaaggcaaaaatactttagaggcactaattgagacaaccaaagaacttgacggcgcatactcaattgctgtaatcgacacagaggaaaaaggtaaaatatttgcagccaaacaaaaaagcc

SEQ ID NO: 247162 - DNA, 382 bp, Unknown
  Bacterial polypeptide expressing nucleotide sequence isolated from the Sargasso Sea
atgtgtggaattattggaatcgcaagtaataaacctgtatccgttaatataattaattctttaaaaaaattagagtacagaggatatgactcagctggaattgctactttaaaaaataagataattgatgaaaaaaaatgctcaggaagagttgatgagttagaaaaaatcttatttaaaaatccatcagatggaaacattggaataggacatgtaagatgggctacacatggtataccaaatgttgtaaatgctcaccctcattcatctgaaaatgtttctgtcgtccataatggtataatagaaaattctgatgaacttaaaaaagaattagaaataaaaggattaaaatttaaatctcaaactgatacagaaaagtgat

SEQ ID NO: 247163 - DNA, 1094 bp, Unknown
  Bacterial polypeptide expressing nucleotide sequence isolated from the Sargasso Sea
tgacaaaggagaatataaacactttatgtataaagagattgtagaacaacctgaaactgttaaaaattgtattgacgaatatgtcgatagcttaaaaaaaaatattaatattctaaattttccaattgatccacaaaatataaataagattgtcttgataggttgtggcacagcatataattcatgtttaacagctaaatattggtttgaagaactaacttcaattgaagttgaaatagatattgcgtctgaatttagatatagaaaattaaaatttaattctaataatctttatatctttgtttcacaatcaggagagacagctgacactgcggcagctttaaacatatgtaaaaaaaataacgttaaaacttgttctatagtaaatgtaattgagagcacaattgcaagagactctgattgggttttacctattcatgctggtatagaaataggcgttgcatccactaaagcatttttgggtcagctaactgtactttatgttttgtgtttaaaattagcttttgtaagaaaagatatagatgaagatatatatgtaaagaatatcagtaatttaaaaaaaattcctgaagcaattaaaaaatgtattaaaaatgagagcgatattcaacttatggcaaaagaatttatctcagcgaagggatcaatgtttctaggaagaggctcttcttttccgattgctttagagggtgcattaaaattaaaagaattatcttatttacatgcagagggttacccagcaggtgaaatgaaacacggacctttagctttaattgaagaaggattaccagtgatagttattgcaccaaaggataaatattttgaaaaaacaatttctaatatgcaagaggtaatcgcaagaggtggtaaaatactttttattacagataacaaaaaagattctttgaatgaaaatataagatttggtttaagagttccgtatattgataacttgttatcaccaatactattaaccttaccattacaaatgctagcttatcacgttgctctattaaaaaattgtgatgtggataaaccaagaaatttagcaaaatcagttacagttgagtaag

SEQ ID NO: 247164 - DNA, 1828 bp, Unknown
  Bacterial polypeptide expressing nucleotide sequence isolated from the Sargasso Sea
atgtgtggaataatagcagccgcttcaaatagaaacgttggaaaattacttgttcaaggtcttcacaaaatggaataccgcggatatgactctgctggcattgctctgcatcaaaatgatcagatagctcatcttaggaccttaggaaaagtaaagctgcttgaagaaaaaatgattgcagagaaacctaaaagtaaacttgggattgcgcatacaagatgggcaactcatggagagccctcagaacaaaatgctcatccacataaatcaaatgatagagtttatattgtacataatggaatcattgaaaattatttagaactaagagaatatttaaaagaccaaggctacgtcttttcatctcaaaccgattctgagttaattgcacatttgcttgattttttcttaaatcaaggaaattcaatgatcgattctatgtataaaacaaaagacaaacttgatggagcatatgcaatagctgcaatcgatagagaagatgattcaaatatagttattgcaagaagtaaatcacctcttttaattggattaggtactgatgagtatttggcagcctcagatccgttagctattgcccaacttacaaaccaattcatatttttagaagacggtgacgttgctgaaatttcttcagaaaaatatgcaatatttgatgaaaacaaaaaagcagttgatagagaaattactgagatagatatttcaagccaagctacctctaagggtgacttcaagcacttcatggaaaaagaaatttacgagcagccccaagctatcttaaatactattgatggaagagttggaggtgatgacgttttagataatatctttggattaggctcttcggatatttttgaaaaagttaaaagaattcaagttgtagcatgcgggacgagtctccatgctggcagagtagcagctaattggttttcagcgatttcagagctgccaacgcaaatagattatgcgtctgaatatagatacagaaacccgcatgttgatgaagactctttactagttacaatttcacagtcaggcgagacggcagacacacttgctgcattaaggtacgcaaaagaaaaagactacttatcaacactaacaatttgtaatgttccaactagctcccttgctagagagtccgactattctatttttacaaatgcaggaccagagataggtgtggcatccaccaaagcattcacgacccagctcgccgctttaatgttattagctttgtctttagctaaaagcagaggtaaaaatccaaaattaagaaccagagtaattacagccatgcgctcattagcagacacagttgaagaaactttaaaacttaaagatgccattcttgagattgctccagaaatagcaaacaaagacaatgctctatttcttggtagaggtattttttatccaattgctaaagaaggcgcattgaagttaaaagaaatttcatatattcatgccgaggcttatccagccggcgagttaaaacacggcccactggctctaatagatgaagatatgccagtaatcgcgttggctccagaaagcgagattgctgagaaacttgtttcaaaccttgaagaagttaaagctagaggcggaaccctttatgtattttcagatccttccatttctatggacctaacctcaggaagattaataaatatgcctaagtgcgattttttattaacaccaattatttatacaatccctcttcaaattctttcctatgaagttgccttattaagaggtactgatattgatcaaccaagaaatttagctaagtccgttacggttgaatagt

SEQ ID NO: 247165 - DNA, 1068 bp, Unknown
  Bacterial polypeptide expressing nucleotide sequence isolated from the Sargasso Sea
aatgtgcggaattattggggcagcctcctctagaagcgttggaaaaattttagtcaatgggctgaagagaatggaatatcgcggctatgactcagcaggactcgttttaaatcaagatgagctcgcatttaaactaaggactcttggcaaggtttcaaaccttgaagacgcaatgattgaacaaagacccaaggctgattctggcatagcacacacaagatgggcaacgcatggaatcccatcggagacaaatgcacacccccatgagtccaacggaatcatctatattgttcacaatgggatcattgaaaaccacgatgagctgagagagagattagcaaacgaaggttatgagattcagtcagaaaccgattcagaattgattgctcatttgatccattccaacaaaggaaaaggcaaaaatacactatcagcgcttatcgaaacaacaaaagagcttgatggcgcatactcaatcgctgtcattgacactgaggagaaagggaaaatatttgcagccaaacaaaaaagcccgcttttggctggaaaagggatagaagaaaattttattacctccgatccactagcaattgctggccttgctgaatctttttatctgcttgaagacggtgactttgcagaaatcaccaaagatgaaattaaaattgttggaacaaatggtgagccggtctcaagagaagagaccataatagacacaaacatgaaagaagcctcgaaagacggctataagcatttcatggaaaaagaaatatatgaacagcctcaagcaatagcaaacgcaatcgaaggaagaactgcagatggagaagttttagataatatatttgggctgggatcatcagaagcttttaagggcgtcaaaagaattcagtttgtagcctgcggcacaagcctgcatgcagctaaaacagccagaaaatggtttgaagaactctgtgagacaccatgttatatagattttgcgagcgaatacaggtatcgaaacccacttgttgaggatgatactttgtttgtatgcatttcacagtcaggcgaaacagcagacac

SEQ ID NO: 247166 - DNA, 1831 bp, Unknown
  Bacterial polypeptide expressing nucleotide sequence isolated from the Sargasso Sea
atgtgtggaattgttggcgcagtcgcgcagcgtgatattgctgaaatccttctcgaaggtttacgtcgtctggaataccgtggatatgactctgccggtctggcagtggttgataacgcagggcatatgtcccgcgttcgtcgtctcggtaaagtccagatgctggctcaggcggtagaagagcacccgttgcacggtggtacggggattgcccatacccgctgggcaacgcacggtgagccgtctgaaggtaacgcgcatccgcatgtttctgaacacattgtggtggtccataacggtatcatcgaaaaccacgaaccgctgcgcgaagagctgaaagcgcgtggttacaccttcgtctctgaaactgacaccgaagtgattgctcacctgatgcactgggagctggagcagggcggcacgctgcgtgaagcggtactgcgagccattcctcagcttcgcggcgcctacggtacggtgatcatggattcccgtgacccgtcaacgctgctggcagcgcgttccggtagcccgatggttatcggtctgggtatgggggaaaactttattgcctccgatcagctggctctgctgccggttacccgtcgctttatcttcctcgaagaaggcgatatcgcggaagtgactcgccgcagcgtgaccgtattcgataccaaaggcgtgcaggtgaaacgtcaggagatcgaatctaatctgcagtacgacgcaggcgacaaaggcacctaccgtcactacatgcaaaaagagatttacgaacagccgaatgcgatcaaaaacaccctcaccgggcgcatcagccatggcgaagtggatctcagcgagctgggcacgcatgcgaatgaaatgttgtctcaggttgaacatatccagatcgtagcctgcggcacctcgtataactccggcatggtttctcgctactggtttgaagcgctggcgggcgtgccgtgcgatgtggaaatcgcctctgaattccgctatcgcaaatcggcggtgcgtcgcaacagtctgatgattacgctttcccagtccggtgaaaccgcggatacgctggccgcgctgcgtctgtcaaaagagctgggctacctcggatcgctggctatttgtaacgtggcgagttcttctctggtccgcgagtccgatttgtcgctgatgaccaaagcgggcactgagatcggcgtggcctcgaccaaagcctttaccactcagctgaccgtattgctgctgctggtggcaaaactggcgcgccttaaaggtctggatgccgccgttgagcatgatatcgttcatgggctgcaggcgttgccgaaccgtattgagcagatgctgtcgcaggataagcgtattgaagcgctggccgagaacttctccgataagcaccatgcgctgttccttggccgtggcgatcagtatccgatcgcgctggaaggggcgctgaagctgaaagagatctcttatatccacgcggaagcctatgcggccggtgagctgaagcacggtcctctggccctgattgacgctgaaatgccggtgatcgtcgttgcgccgaataacgaattgctggagaagctgaaatccaacattgaagaagttcgcgcgcgtggcggccagctgtatgtcttcgccgatggcgaggcgggtttcaacagcagcgataatatgcacattattgaaatgccgcatgttgaagaggtgattgcgccgatcttctacaccgtgccgctgcagctgctggcctatcacgttgcgctgattaaaggcactgacgtcgaccaaccgcgtaacctggcgaaatcggtcaccgtagaataag

SEQ ID NO: 247167 - DNA, 406 bp, Unknown
  Bacterial polypeptide expressing nucleotide sequence isolated from the Sargasso Sea
atgtgtgggataattggaatttcaagtaataagcccgtctctgcaagtattattagctcactaaaaaagcttgaatacagaggctacgactctgctgggatagtaactctttttgaaggtgaaataaaagaagttaagtctgagggtagagtagacagcctagaacaaaactttgatttaaaaaatttgaaaggcaatataggaattggtcatgttagatgggctacacatggtgtaccaaatagtgttaatgctcacccacactcatcccacaatgtttctgttgtacataacggtatcattgaaaattcaacaatattaaaaaaatatttaacaaccaaaggtcatgtttttaaatctcaaactgacactgaggtaatagtccatctaattacagaaaactaaa

SEQ ID NO: 247168 - DNA, 847 bp, Unknown
  Bacterial polypeptide expressing nucleotide sequence isolated from the Sargasso Sea
ggaatttagataccgaaaaaatagatttaaaaaagatgctctttatatatttgtttctcaatcaggtgaaacagcagacacttttgcggctttagatttatgcaataaaaataacatgaaaacttgcagtgttgttaatgtagttgaaagttcaatagcaagagagtcgaaatttgtacttccaattcattgtggacctgaaatcggagtagcttcaacaaaagcatttttgggtcaaatgttagttctatacatattatgtttaaaatttgctcaaatgagaaaagaaattaaaaaaaatatatatatggaaaaaataaaatctctttttttactctcaaaactgacaaaacaatctttagaaacagatagtaaaatacaatcagtttgtagttcctttagtgatattaaaggatcaatgtttttaggaagaggatattctttcccaatagcacttgagggagcactaaaactaaaagaattatcttatgttcatgctgaaggatacccagcaggagaaatgaaacatggtccacttgcattaatagaagatggattgcctgttgtagtattagctccaagagatgaatattacaaaaaaacaatttcaaatatgcaagaagtaatagctagaggtgctaaagttttattgataacgaataaaagtaaagacgaaattcattcagaaaatatttgggaaaaaatagaggttgagaatacatctgaagacttattaccttttttaataacaatacctttacaaaaacttgcttatcattctgcatttaaaaaaggttacgatatagataaacctcgaaacttagctaaatcagtaacagttgaataa

SEQ ID NO: 247169 - DNA, 401 bp, Unknown
  Bacterial polypeptide expressing nucleotide sequence isolated from the Sargasso Sea
aattgcacttgaaggtgctttaaaattaaaagaattatcttatgtccatgcagaaggttatcctgcaggtgagatgaagcatggtccattggcattgattgaagatggaatgccagttgtggttttggctccaagagatagttattataaaaaaactatttcgaatatgcaggaagtaatagcaagaggggctaaggttttattgataactaacaaaagcaaagatgagattgtttctgaaaatatttgggaaactatagaagttgaaaatacaaatgatgacttacttccttttcttttaacgatcccacttcaaaaattggcatattattctgcacttaaaaaagggcatgatatcgataagccaagaaatttggctaaatctgtcactgttgaataaa

SEQ ID NO: 247170 - DNA, 1087 bp, Unknown
  Bacterial polypeptide expressing nucleotide sequence isolated from the Sargasso Sea
cattcaactgaaagtatttcagttgtacacaatggaataattgaaaattcggctgatctaaaaaaacaattaattaataaaggacataaatttaaatcacaaactgataccgaagttattgttcatcttttagttgaatatttaaaaaataacaaactcaatgaagctattattaaaactttaaatgatttagatggaagttttgctttgggtataatttttaaagatatgcctgaacttattattggcgcgaggagaggttcaccattagctgtaggatatggtccaaatgaaaattatctaggctcagactcatatgctttaaaatcaatgacaaataagattacttatttaaatgatggtgagttctgtataatcaaaaaaaaagatattgattttttcgactctaaaggaaaaaaagtaaataaaaaaatattacatttgtcatcgggtgatcaaaattacgaaaaaggtgaatataaacacttcatggcaaaagaaatagatgaacaaccaattacaattaaaaactgcgtaaatgaatatattgataaaattaataatgaaataaatcttcacaattttccatggaaaaaagatgaaattaaatcgatcaaactaattggatgtggaactgcatttcattcttgtttagtaggtaaatattggtttgaacaattaaccaatttagatgtacaagtggatattgcttctgaatttaggtacagaaaaaacaagttcagtgaagattgcttatatatttttatctctcaatccggagaaactgcagatacttatgctgctttagatttatgtaataaaaataacatgaaaacatgcagtattgtaaatgtagtagaaagctcgatcgcaagagattctaaatttgtattaccaattcattgtggtcctgaaattggtgttgcatcaaccaaagcatttttagggcaaatgttagttatttatttgttatgtgtaaaaatttcatttttcaaaggtgatatcaataaacacaaatatattgaaaaaattaaaaaccttaaattactttctgatttagttaataaaactatttctgcagaaaata

SEQ ID NO: 247171 - DNA, 1270 bp, Unknown
  Bacterial polypeptide expressing nucleotide sequence isolated from the Sargasso Sea
tttttggcaagtgatgcatcacccataattgaacataccaggaatgtgatatatttagatgatgatgaatttgtaataattgataaagcaggatattcaatttcaaacacaaaatcaaaaaaaattgttagtaaatcacttacaaaaattgatctatcaattgaagaaattgagaagggtaagttccctcattttatgttgaaggaaattcatgatcaaaaacattctattagcgatacaatgcgagggaggttaaaccttaatgatggaacaacaaatctaggaggtatagtaaattatataccaaatattttatcagcatcaagaatttatattacagcatgtggaacttcttggcatgctggattaattggcaaacatttaattgaagaatatgcacgagttcctgttcatgtggaatatgcatctgaatttagatatcggaatgctattatcgatgccaacaccattgttatagcaattagccaatccggtgagacagctgatacacttgctgctttaaaaaaagcaaaagagcttggtgcaattactcttggtatttgtaatgtggttggaagtgcaatttctcgagaaacggatggtgggatttttactcatgcagggccagaaataggtgttgcttctacaaaagcatttacatcacaagtaacagttctcataatgtttgctctaaatattggtaggaaaaaaggagtatcaaaaaatcgtggaaaagaattaattagtgcgctaaaaacaattgatcaagatgtagcatcagtgcttagacaaataagaaatataaaggaggttgctaaacatacagcggcagctgataattatttatatttaggtagaggaattaattttcctgtagctttagaaggagccctgaaattaaaggaaatatcatatattcatgcggaagggtatcctgccgcagaaatgaagcatggtccaattgctctaattgatgaaaatatgccagtagtatttattgcaccttatgatgatacatttaataaggttttatcaaatatagaagaagtcaaggcccgtggaggaatagttatttcaatcactgataaaattaataattcattaaaaaaattatcagattttgtattaatagcacctcagacacataaatatgtatttccaataacgtgttctataattttacaaatgttagcatatgaacttgcagtttgtagaaagtgtgaaatagatcagccaagaaatctggcaaagtcggtcacagtagaataag

SEQ ID NO: 247172 - DNA, 1150 bp, Unknown
  Bacterial polypeptide expressing nucleotide sequence isolated from the Sargasso Sea
ggcaatgccgcaaaactaaaacacagggaaatagactcaaattcttatacaaatgatttgggtggctataaccatttcatggaaaaagaaatttttgagcagcctgatgctatttcgaaatctattgaaggcaggctaggtaaaaatgagactcaagagggtatctttggttcaggttttgaagaagctgtaaaagacgttacaaacattcagattattgcttgtggcactagctttcattcaggtagaatttttgaatattggtctcataaatttttgggcattaattgtcgtgttgattatggatctgaatatcaatatcaagagccaatcaaaaccaagaaaactttattagttaccatttcgcagtctggtgaaactgcagatactctatcatcattaaaatttgctaaaaaaactggttcgcctcttacattaacaatttgtaatgtagctaatagttcattatgcagggaatctgactatacattgcttacaaatgctggtcctgaaattggcgtggcctcaaccaaagcttttgttacacaactagcgtgtttgaatttgcttctgctgaccttaatgagagtgcacaaccagacgcctaatgctagaaagaaaattacagaagccttaaaagatctacctaagcacatcgataaaactttgaaaatgacagatgtctataaatctacagcaaaacttttatttaaaagaagcagcgctctttttcttggcagaggtttatattttccaatagctagagagggcgctttaaaattaaaagagatttcatacattcatgccgaagcttatcctgcaggcgaactaaaacatggaccacttgcattgatagatcgagacatgccagttattgctttagtcccagataatgaacatttagataaaattcaatcgaatattcaagaggttgctgcgagaaaaggaaaagttgtgactataggtccactaggaaaaactaaaattaccaaagatggtggacatattaagattccaaagaccttagatcttctcaatccaataatctcagttgtgccaatgcaacttatttcatattacacagcacttcttaagggtactgatgtagacaaaccccgcaaccttgcaaagagtgttactgtagagtaga

SEQ ID NO: 247173 - DNA, 604 bp, Unknown
  Bacterial polypeptide expressing nucleotide sequence isolated from the Sargasso Sea
atgtgtggaatcatcgcggcatcaactgaaagaagtgtcggcaagctcttgattcaaggtctttataagatggaatatcgaggctatgactctgctggcatagctatgcatactgaagatagagttgcgcatttgagagcccttggaaaagtaaagcttctcgaagatttgatgattaatgagaagcctaaaggaaaagttggtattgcacacactcgctgggcaacccacggggaaccctctgaagtcaatgctcacccgcatcagtcaaatgaaagaatttttattgtccacaacggtattattgaaaattatttggagctcaaagatgaattagctgacaaaggttatgcttttacctctaaaacagattcagaattaatagcgcaccttcttgatagttacctagaagccggctcatccttgctcgaagccaccaaacaacttaaagacaagcttcaaggtgcttatgctatagcagcactggatcatagcgatccaaacacactggtgcttgctcgacatcgatcacccctattgataggcctgggtgaagatgaaaattttgctgcttcagatcctatagcgcttgctgatcttacga

SEQ ID NO: 247174 - DNA, 1813 bp, Unknown
  Bacterial polypeptide expressing nucleotide sequence isolated from the Sargasso Sea
tgaaatagttggaatagtaagcaacaaatctgtatcagcaagtataattggtgcattgaaaaaactagaatatcgtggttatgactcagctggaatttcaacacttaacaatgatcgcattaatgaacaaaaatgttctggaagagtagacaatttagaaaaaatactttttcaaaatccttcagacggcgaccttggaattggccatgtaagatgggcaacacacggtataccaaaccaaataaatgctcacccacattcttctgatgtagtttcagttgtacacaacggtataattgaaaattccgacaagttaagagatgaatattctaaaaaaggatactcttttaaatcacaaacagatacagaagttataacaataatgttaactgattttttaaaatcagaagatttaataaattgtattcataaaactttagaaaaactagaaggtagctttgcgcttggagtaatttttaaagattttaaaaatttagttgttggggctagaagaggaagtccacttgcagtaggctatggacataatgaaaattttataggttcagattcctatgctcttaaatcaatgacaaataagatctcttatcttgatgatggtgatttttgtttgctttatagagaaaaagtagaattttataattcagaaaaaaaaaaaattaataaagaaattttagaattatccaatgaagacaatattgccgaaaaaggagattataaagactttatgtcaaaggaaattgatgagcagtcatttactacaaaaaaatgtattaacgaatatttagataaatctcgtaatgaaattaatatttataatctaccaattgatccaaaaaagattaataaaataagattaattgcttgtggaacagcatatcactcatgtttaatggcaaaatattggatcgaagaaaacacttctattgatgttgaagcagacatagcatctgaatttagatatagaaatgtaaaattaaataaggatgacctttatatttttgtttcgcagtcaggggaaacagccgatacttatgctgcacttgaaaaatgtaaaaaaaataacgtcaagacttgtggaatagttaatgttgtagaaagctcaatagcaagacttgcagattttgttcttccaattcatgctggacctgaaattggagttgcgtctactaaagcctttttaggtcaaatgcttgtgctttatttgttaatattaaaaatatcaaaagaaagagatgaaattgataatgaaaattataaaaaactaatttcagatttaataaagttaccagattttgttaaacaaactttatctaaacaaaaagatatacaaattatagcaagagattttgttaccgctaaaggaacaatgtatttaggcagaggttattcatacccaatagcaatggaaggcgctcttaaactaaaagaactctcttatattcatgctgaaggttatgccgctggtgaaatgaaacatggaccactagcactaatagaagatggtatgccagtaattgtattagctccaaaagatagatattttgaaaaaactatttcgaatatgcaggaggtagtagccagaggtggtaaagttataatgataactgatgatacttccacaacaatgaatgaaaatataagatttaaatttcaaatacctaaatcaaactcaactcttaatccttttttattatgtattccaattcaattcttagcttaccatgtggcattattaaaaaattgtgatatagataaaccaagaaacttagcaaaatcagtaacagtagagtaa

SEQ ID NO: 247175 - DNA, 1567 bp, Unknown
  Bacterial polypeptide expressing nucleotide sequence isolated from the Sargasso Sea
acacggcgttgttagcaaaaataatgcccatccatttgcaaatgacgatcttactttagtttgtaatggtataattgaaaattacagaaaaattcaaaatagatttgttgaaattccaaaaaatcttaaatcagatactgaaatcagtttttattttcttacatatttggtaaataaatacaaaaatccagatgaggcaataagagtttttagatctgtgattaaaggaaactttgcttttgttatttttatcaaaaaaaataattgtttttacttattaaaaaatggaagcccaattgctctttctcataataaaggctcatcttttatctgttcagactcctcaatcttgacagaatatagtaacaaaatttaccatcttaaagatggagacattattaaaatacaacagtctaaaatatcaagcttaaataaagctaaaattatttttgaaaaaaatgaaattaaacaaaatccttatgataaaggaaaataccaacattacatgcttaaggagatacacgagcagccagatgttttaaaaacaacacaaaaaaattattcagaggaattctttcatgactttgaaagtaaatataaaagtttatttttaaataaaaaagtcatttttgtaggttgtggtacagcatatcatgcatgcctagttggagagtattatttcaataaatttactaatttagatacttcatcagaattagcctctgaacttcgatataaaaaaattaataaagaagataaaatattatttatttttatatctcaatctggagaaactatggatactttgatggctttgaaatatgtaaaaaaaaataaacactcttctatagtaattactaattccttacaaagtagcatggtaagagaggccgatgtaactattcctacatatgccttgaaagaagttggtgtagcttctacaaaggcatttacttgtcaaattttaagcttagctaacttatctattgaaattggaaaaatgactaatgctattactattagagattacaataaaaatataaaaattttaaaattactaccctctaaacttaagaaattagtaaaagattttacatctaaggcaaaaaaaatttcaaaaaaattgagtcaatctgatacatgttactttataggtaggaatattgtatatcctattgcattagaaggatctctaaaattgaaagaaatatcttatatgcacagcgagggctttcctggaggggagatgaaacatggtccaatcgcgttaattgataaaaaatcattaacgatttgtttatcaccagacaatgaactatatgaaaaatctatttctaatgctgaggaaatagttgcaagaaatggaaaagttataattttatcgagtgtagataattctgataaatcaacaaatactcatcatatgattcttccaaaagaaaactttattgacacacctttcatttatactattcctcttcaactcatttcatactattttgctctaagtgaaggtactgatattgatcaacctaggaatttggctaaatcagttactgttgagtaa

SEQ ID NO: 247176 - DNA, 1555 bp, Unknown
  Bacterial polypeptide expressing nucleotide sequence isolated from the Sargasso Sea
tcaagtgaaattgtttctgttgtgcacaatgggataattgaaaattctgaccaattaaaaaaagaattggagaaatctggaaaggtttttaaatctcaaacagacacagaggtaataacagttttgcttactgaaaaattaaaggaacttgatccattgaacgcagtatttaaaactttagatatgttaaagggtagttttgcacttggaatcatatttaaaaattttaatgattttgttattggagcgagaagaggtagcccgcttgctgttggatattctaataatgaaaactacattggttcagactcatatgctcttaaatctatgacaaataaaatttcatatttagatgacggcgacgtatgcgttctatctaaagatgatgttaaattttataacaataataaagataaaattaataaagaaatttttacattatcagaagacaaatcctctataagcaaaggtaattacaaaaattttatgataaaagaaatttttgaacaaccattcacaactaaagcttgcttaaaagaatatatagataaaattagagaagaaattaatttttacaatcttccaatagatcccaataaaataaataaaatagtattaataggatgtggtactgcttatcactcatgcttggttgcaaaatattggttagaggaattcacatctttgagtattgaaacagatatagcctcagaattcaggtatagaaaagtgaggtttgataaaaatgctttttatatattcatatcacagtcaggtgaaacagctgatacatatgcagctttagatctttgcagaaaaaaaaatgtaaaaacatgctcggtagttaatgttgtagaaagttctatagctagacattcagattgtgttttaccgatacatgctggtccagaaattggtgttgcctcaaccaaggctttcttaggtcaaatgctagtattgtatttactttctctcaaaattgctgagacaagaaaagatattggtcaagaagaatataaaaagaaaataactgaattaaaacaaataccaaaattgattaaagaaactttagaaggtgaagaaaaaatacaattaattgctaaagatatctttaactcaaaaggctcaatgtttttaggaagaggtttatcgtttcctatagctttagaaggagcattaaaattaaaagagctttcatatctacatgccgaaggatacccagctggagaaatgaagcatggtcctttggctcttattgaagacggacttcctgtaattgttgtcgcgccaaaagataaatattttgaaaagacattatcaaatatgcaggaggttattgcacgtggaggaaaggttttattaattacaaattctggaggaaaagtaataagtgaaaatataagatttcaaatagatcttcctgtatcaagctcaacactgactccctttctatttacgataccacttcagcttctttcatatcacgtagcattgtttaaaaagtgtgatatagataagcctagaaacctagctaaatctgttacggttgaataaa

SEQ ID NO: 247177 - DNA, 1542 bp, Unknown
  Bacterial polypeptide expressing nucleotide sequence isolated from the Sargasso Sea
atccgcattcagacaacagtgaagactttgcaatcatccacaatggaataattgaaaattatgcagagatgaaagacagtcttttaaaagaaaattattcatttaaatcagatactgacacagaggtagtagctatcgaattaagtaaacaatggaatggtaatttattagagacagtagttaaagttacaaaagatttagaaggaacatatgcattagttgtaacaactactaagcaggaaaatacaattgttgcaggtaggatgatgagccccctagttttaggagtaggagagggagaagtattcttagcttcagactcagctgcaattcttgagcatacaaataagatgattttcttagagaatggtgattttgtagaaatacatgatggaaattataaattatttgatgctgatctaaatgacattgaaagagaagtccaaataattgattgggaagtttcagaagcagaaaaatctggacatgatcactttatgtataaagaaattttagaacaaggtgaagttattgaaagaacaatcacaggaagacttgaagaaggttcccctgagataccaataactaaagagaaagcacaaaaatatgagaaaatctggattgttgcatgtggaactgcttatcatgctggactatttggaaaagatttgttcgaaaaagttttaggagttccagtaagcgtagagcttgcttccgaatttagatatagggagccgataataggagaaaatgatttaggtattgttatttctcaatctggagaaacaatggacaccattgcagctacagagcttttaaaagaaaatagatctcatgttttagcattagttaatgttgttggaagttctcttgcaagaatggctgatagcgtattttatttacatgttggtccagaaattggtgttgcttctactaaagcatacctaggaatgctagttggacagctccttttagctaaacattgggattcaaacaacaaattagatgtttcctttgaagaaattaaaggcttgcctttacttatagaagagactctaaagtgcgagcctgaagtcaaagagattgcagaatcaatacataaacaaaatgatgtatattttattggaagagggttggactacgcccttgctgccgaaggagcccttaagttaaaagagatttcttatttgcatgcagaagcacttgcagcaggtgagcttaaacatggaacattggctcttattgaagagggtacaccaattattgttactgctagtcagtaccacttgcttgacaagacaacaagcaatgttcaggaagtgaaggccagaggagctcatgttattgcaataggcaacagttcatcagaaaaattagaaaatatttcagacaagtatgttactttgccagatagtaatgaaatattatcaactattatctctattattccacttcaatttattgcatatcacgttgctaataagagaggcgagtctatagatcaacctaggaatttggctaaatctgttactgttgagtaat

SEQ ID NO: 247178 - DNA, 1126 bp, Unknown
  Bacterial polypeptide expressing nucleotide sequence isolated from the Sargasso Sea
aatttataccgtatcagacgatgaaaatatttctgataaaggggactataaaaactttatgtccaaagaaatttttgaacagtctactacaataaaaaaatgtttaaatgaatatactgatagtttgaaaaaagatattaatatttataactttcctattgatcctaaaaagattaataaaatagttttaataggatgtggtacagcttaccattcatgtttagttgcaaaatattggtttgaggaattaacttctttagatgttgaaatcgatatagcttcagaatttagatatagaaatttaaaatttaattctagcaatctatatatttttgtttctcaatctggtgaaactgcagatacagcagctgcattagatatatgtaaaaaaaataaagtaaaaacttgctcaattgtgaatgttgtagaaagcactattgcaagaaattgtgattgggtattacctattcatgctggtccagaaataggagtagcctctacaaaagcttttcttggacaactaatagtcttatacattcttactttaaaactagcttttacaagaggagatattgataaaaaaatttatgatagcaatctacagaatttgcaaaagcttccagaagctattgatagtactttaaaacttgagagcgaaatacaattaatggcaaaagaatttttagacgctaaaggatcaatgtttttaggaagagggaattcttttccagttgctcttgaaggtgcacttaaattaaaagaactttcttatttacatgctgagggatacccagcaggtgaaatgaaacatgggcctttagcattaattgaagaaggtttacctgtaatagtaatagcaccaaacgatagatattatgaaaaaactttatcaaacactcaagaagttatagcaaggggaggaaagattttttttattactgataataaaaaaagactattaagtacaaatattagatttaggctgagagtgcctcgtgtagataatctgttatcacctttattacttactatcccgttacaactattagcttatcacgtagcactgctgaaaaattgtgatattgataaaccaagaaatttagctaaatcagttacagtagagtaa

SEQ ID NO: 247179 - DNA, 1429 bp, Unknown
  Bacterial polypeptide expressing nucleotide sequence isolated from the Sargasso Sea
tatgacccataatattccagtcaatcaaaatctggttgatatggaatatgctgttcgtggtccaattccacttagagcaatggatttacaaaaagaagggcgtactatatatgcttgtaatattggaaatccgcaggctcttaaacaaaaacctatttctttttatcgtcaggttattgctttattggaatcttccaatatccaaagagaaagaaatcttactaagttagcaaaaaataactctgatttatttaaagatagtggaattagtattatctctaaagaaattattgattacagtgaagaatttttacataattcccgtacaggtatgggtgcgtatactgaaagtaaaggcccagcttttattagagaagagattgctgcttttattgattcaagagataaaaatgaaattgcctcagatccggattctattttccttactgatggtgcaagtgacgctgtaagaagaatattagaattactgatcactggatcaaatgatggaataatgatcccaatacctcaatatccattatactcagcaactatcaaaagatgtggaggtgttcaagtaggatattaccctgatgaggaaaaagattgggcattaacacctgatattttagaagaatcttatcaaaaggcaatctcagaaggaattaatgtaaagagtatagttattattaaccctgggaatcccacaggttcaatcctagataagaatagtatagatggtatagttaattttgtagaaaaatatgatttatcaattattgcagatgaagtatatcaagaaaatttatatggaggattatttatatcaatgtcgagagcaattggatcacgtgatattccattatttagtcttcacagtatttcaaaaggattctcaggagagtgtggtcataggggtggatatatggaattaagaaatatgccaattatgaataattcaaatgtcagtctatctgaattaatattgaaacaagcttcagtaagtctatgttcaaatacagttggccaagctattgtatatatgatggttaaaccgccagaaataggctccgaagctcatgatatatacattgaagaaaaaaacactatattaagtgaattagaagcaaaagcagcattaattaaagaaagttttaaacagatggaaggtatgcaatgttttggtcgtacaggagcaatgtatctttttccaaggatgaattttttgcctaatgacataactgattttgattattgtatgcgactgcttgaggaaactggtatctgtactgtgaatggtggagggtttggtcagaaaaatgggacaaaccatcttcgcattgcatttttaccaccaatagactcaattacaagatttcttcctgattggattcgatttcataatcgctttatccagtcaccatattaa

SEQ ID NO: 247180 - DNA, 832 bp, Unknown
  Bacterial polypeptide expressing nucleotide sequence isolated from the Sargasso Sea
gttttctgcccacgcgcaggcggcggtccacgtagaagaccgaggttatcagtttggcgacggagtctacgaagtcgttagtgtactgaataaacggccaatcgatgcagacgggcatttagacaggctggagcattcgctgcgggaattgcgtatcgactggccggtgacacgcagcgtattgaatgtgctgatacgacaaattttgcgccggaacgggataaagaatggcatcgtctacatacagatcactcggggcgtcgcaccgcgcgatcacaagtttccaaagaatgcagcaccttccctggttatgacggcatcaaaagtgaatcatctcaacgcaccgagattccaagacggtgccaaggttgtgactattccggacatccgttggacacgatgcgatataaaatcgacgtcgctcctgccgaattgtctgggcaagcagacagccgctgaagcgggtgcctacgaagcgtggcaagttaccgatggcggatttatcacggaaggcacatcgtccaatgcatggatcgtaacggacgcaggcgtactcgtgacacgcgcgccgacttcgaaaattctcaatggaattacaagaatatcaatcttgaagatcgccgaagaggagggtatcgattttgtcgagagaccctttagccagtcagaagctctgtcggctcgagaagcttttacgacgagcgctacctccttcgtaacgccggtggtccagatagatgacaaaataattggtgatggaagccccggccggcttaccaaagaattgatgaaacactacgaaaactacaccgacacactgcctgagctttga

SEQ ID NO: 247181 - DNA, 569 bp, Unknown
  Bacterial polypeptide expressing nucleotide sequence isolated from the Sargasso Sea
cttgctaagctctatagaacaaaaaacttcagatctaacctcattaagtgacaaaatttgggcagcagctgaggttgcatttagagaagataaatctgctgaatatttaattgattatgctgaagcaaatggactaataattgagaaaggtctagcaggaatgccaactgcatttaccgcaacctatggtgaaggcaaaccagttattgggattattggagaatttgatgcgctacccggcttatctcaaaccacggtcccatatagagatgaattaattaaaggaggagctggtcatggctgtggtcataatctatttggaacagctagtttgggtgctgctattgcaataaaagagttgattgaaaaaggtcacctttcaggaactgtaaaattttttggaacacctgctgaagaaaagttttttgggaaactatggatgataagagagggtgtttttgatgatgttgatatttgtatggactggcatccagcagataatactgaggctaatgttcaaccatctcttgcacttgttgactttatggttgaatttactggacagtctg

SEQ ID NO: 247182 - DNA, 949 bp, Unknown
  Bacterial polypeptide expressing nucleotide sequence isolated from the Sargasso Sea
tcatgcttttaaggagttcgctaaatcttctgaatcttcattgaggaatttactgaatataagcgaagagtattctgttctatttcttcaaggtggagctacacatcagtttgctcttatcccgatgaatttttctaaaaatggtgtacttgattatcttgtaactggagcatggtcgaaaaaggcaagcgaatatgcaagcaagatatccgatgtcaatatagtatctgattcatcttcaaataactttacagatgttgcagacttaaatagttggaatatctcagacaatgcagattactttttctattgtgctaatgagacagttcatggattggaaattcatgatccaattgaaacaaactcacctgtcatatgtgacatgtcatcaacaattgcctccagacacatagatgttaataagtatgatttaatttttgcaggcgctcagaaaaatctaggtatagctggtgtaaccatcgttattgtaaaaaatcaactcttatcagatgtaaatacagaattactcccaatttttgattattcagctcatgccaatgaagcatcaatgctcaatacatctccagttttttcttggtacgtatcaggtttggtatttgattggatacatgagcaagggggtgttgaagaaatggctcgaataaataaattgaagtcagacctgctctatgactacattgatcaatcagagttttacaacaatcctgtctctaaaccttatagatcttggatgaatataccatttactctgtctagggatggtctcgatgataaatttctttcatctgcagaagaattaggtctattgaatctgaagggccatagaaccgttggaggaatgcgtgcaagtgtgtacaatgcgatgccaatcgaaggaattaagagattaatatccttcatggatgaatttgcaaaattacacgaataa

SEQ ID NO: 247183 - DNA, 697 bp, Unknown
  Bacterial polypeptide expressing nucleotide sequence isolated from the Sargasso Sea
aatgccaagaaaatttaattttggtgccggtccggcaacaatgccggaatctgttttaacagaggtccaagaagagctattagattggaatggtctgggattgtctgtaatggaaattagtcacagaagtccagagttcatagaaattgccaaacaagccgaaagtgattttcgagatttattatctatttctgaagagtatgcagtgctattcacacatggtggagccactatgcaaaatgctatggtacctttaaatttagcatctccggagggtaatgttgattatgtaaatagcggacactgggccaaacgttccatcaaagaggcggaaagatatacaaatgttaatatcgctgccacctctgaagatgaagattttaaatactttcctgctcaagattcttggaaattttctgataattcatcttatgtgcattacacccctaatgaaaccattggtggtttgtgtttaagaacattacaaaactgtgagatacctgttgtagctgattattcttcaggtattctttctgaaccaattgatgtaagtaaattttccttaatttatggaggagcacaaaaaaatattggtccttctggtctcggttttgtgattgtgaagaaagatttattgggaaaggcgcaatcctttactcctaatcttctaaattacactctaattaatgaaggcgag

SEQ ID NO: 247184 - DNA, 847 bp, Unknown
  Bacterial polypeptide expressing nucleotide sequence isolated from the Sargasso Sea
aatagagtttttaattttagtgctggtccagcagctttgcctgaagatattcttaatgagataaaagacgagcttttagatttcaatggcataggctcttctattattgaaataagtcatcgtgataagatctttattgaggttgctcaaaaagcagaacagcaagttagaaatctcttatcagtgtccgatgattatgatgttcttttcctgcagggaggagcgaccttacaattttcaatgatcccattaaattttaaacatttaggagcaacggctagttatgcagaggtggggtcttggtcagcaaaagcaatcaaagaagcatcaaaaatttgtgatttaagaatttgctcttcagcaaaagcaaataattttacaaacattgatgacttctcagaatggagcgtagatcagagtgatgcctatgttcattactgcaagaatgaaacaatccaaggcattcgtatcactcaatcgccaagctttggaaaacctgcatttgttgatatgtcgtcttgtcttttctctgaaaaaattgatattgaccaatatgattttatatacgcatgtgcacaaaaaaactttgggccatcaggcattaccttggttattgctaaaaaggagcttctggctcaatcaagtacagagcttcctaatattctaaaatacgatgctcatgcggcacaaaattctatgctcaatactcccaatacttttggatggtatgttgccggaaaaatgtttgattggtatgaagccaatggtggcgtcgataaaatggaagaaagaagtatcagcagaacaaattcagtctatgaagtaatagatgcgagtgatttttaca

SEQ ID NO: 247185 - DNA, 600 bp, Unknown
  Bacterial polypeptide expressing nucleotide sequence isolated from the Sargasso Sea
catggtttggaaattcatgatccaattgaaacaaagtcacctgtgatctgtgacatgtcatcaacaattgcctcgagacccatagatgttaataagtatgatttaatttttgcaggtgctcagaaaaatctaggtatagctggtgtaaccatcgttattgtaaaaaataaactcttatcaactgtagatacagaattactgccaatgtttaattattcagctcatgctaatgaagcatcaatgctcaatacatctccagttttttcctggtacgtatcaggtttggtatttgattggatacatgagcaagggggcgttgaagaaatggctcgaataaataaattgaagtcagatctgctctatgactacattgatcaatcagagttttacaacaatcctgtgtcaaagccttttagatcttggatgaatataccatttacactgcctagagatggtctcgatgataaatttctttcatctgcagaagaattaggtctattgaatctgaagggccatagaaccgttggaggaatgcgtgcaagtgtgtacaatgcgatgccaatcgaaggaattgagagactagtatctttcatggatgaa

SEQ ID NO: 247186 - DNA, 783 bp, Unknown
  Bacterial polypeptide expressing nucleotide sequence isolated from the Sargasso Sea
gagcttggtcaaaaaaagccagtgagtatgctaataaagttgccaatgtaaatattgtctctgactcttcctcaaataactttacaaatgttgctgatcctaaaaaatggaatatttctgatgatccagattatttcttttattgtgcgaatgagacagtacatggactagaattacataatccaatagaaagtgactcaccagtgatatgcgatatgtcatcaacaattgcttcaagaccaattgacattaataaatatgatttggtttttgctggtgcccagaaaaatctaggtatagctggtttaacgattctaattataaaaaataaacttttatctgattgcaataaagagctgttgccaatgtttgactactcagctcatgctgaagaggcttctatgttaaatacatcaccagtcttttcatggtatgtatcaggctttatttttgattggataactgaacaaggtggtgttcggatgatgggtaaagtcaatatggaaaaatctagtcttctatataattatatcgacgaatctagtttttactccaatccagtttctaagccatacaggtcatggatgaatataccatttattcttgctagagatgatctggagaatgattttatacaaagtgctgaagatgaggggcttttcaatctaaagggccatagaaccgttggaggaatgcgtgcgagtgtgtacaatgcgatgccaattgaaggaattaaaaaattaattgcctttatggatgattttgcaaaattacacgaatgaa

SEQ ID NO: 247187 - DNA, 691 bp, Unknown
  Bacterial polypeptide expressing nucleotide sequence isolated from the Sargasso Sea
attagaaatatctcacagaagtaaagaatataaagaaataatggaaaaattaaaaataaatttaactaacttgtttaatattccagataattattttattctccttcttcaagggggagccacgtatcaaaatagtattttgccttataactacggttttcaaaataatattggatgtcttgtttcaggagaatggggtaaaaaaacatatgaagattttggattagtaaaagaaactgaaatcctaaatttagatgattctaaaattgaggattttctatcaaaagagaatagtaaatattttaaaaatttagattatctacatgtaacttcaaatgaaacaataaatggaattcaaattagagattttaaaaatataaatcaccctgcccttcttgttgatatgtcatctgatataggctcatataaatttgattgggataatttaacatacatttatgctggagcacaaaaaaatatgggaatacctggagtaactatttgcataggagacaaagctaatttgcctaatattgaaaatccttcatatttgaatttaaaaaaattgtcagaaaatgactccgtcttaaatacgccatcaactttctctgtttacatattacacctagtttctgaatggatgatagaggctggaggtgtagattttttcgaaaaacaatcgataaaacac

SEQ ID NO: 247188 - DNA, 493 bp, Unknown
  Bacterial polypeptide expressing nucleotide sequence isolated from the Sargasso Sea
gctggtgcacaaaaaatttaggaaacccggcgttactatttgtattttcaagaaagattttattgaagagaatgatttaactagttacatgagtgcacaaaaccacctggaaaaagactccgcatacaatacccctccaactttctctatatacgtaatgctcaaggttttggaatggattgctgaatttggtggcttagaaaaaattcaatcgaataataaaataaaagcagattctttatataacatcttggatcaaaatagtgaaaaatttgttttgaatgttcctaaagaatttcgaagtctttcaaatatagtttttgatttcaaagataaagacaaaacctcatcttttttatcttcaagtaccaagaaaggatttgtaggattaaacggtcatcgtagtattgggggcataagagtcagcaattacaatagtgtaacaaccacaatgatgaacgatttaataactcatcttaaaggttttatttag

SEQ ID NO: 247189 - DNA, 850 bp, Unknown
  Bacterial polypeptide expressing nucleotide sequence isolated from the Sargasso Sea
ctgccgccacgtccccggcctgtacgaggagctcgagcagctccagggccgccaggagtcatgcaagaaggccctcgtggacttcatggacggcaagcgccgcatcttcgcgcgcttctacttcgtgtccgaggcggacctgctggacatcctctccaacggctcgcagccgaaaaagatcctcaagcacgtggacaaggtgctcctggcgaccaagcagctcaagctcgacgagtcgaagggcggcgaccggccgactgcctgcgggtacgtcacgggcgtgggcgccgaggccatggactacgagcccggagtgcccctcgagggcaaggtggagatctacttccaggactgcctcctcgcgcagaagcggacgctccgcgcgcacctcggccgcgccgtgccgcgcttcggcgagtttattaaaaagtccaagacgggcaagggccgcgccgagtgggtcgtctacagcaacaacaaggaccgcgacccctttatttccgagttcaagttcttcgacgccgcgcagatcgtcctgttggtggcggcgatggagtacgtcaagggggtggaagcggccttcgaggcgatcaccgctgaccccggcgcgctgaagggctacctccagaaagtggtcggtgaactcactgaccttattacggtgacccaggacacgaccctgagcaaggagacgcgcaagcgcgtcatgtgcatgatcacgctcgacgcgcacgcccgcgacatcgtcgacgggctctgccgccagggcgtgcacgagaaggagcacttcgcctggatgtcccagctgaagcagcgctacgtgtcgcccgaagagcgcgagcagcgcggc

SEQ ID NO: 247190 - DNA, 276 bp, Unknown
  Bacterial polypeptide expressing nucleotide sequence isolated from the Sargasso Sea
aatcaaaactgctttatgatgtgcttgatgattctgaactttacaaggcggtggctgatcccgaaaaccgttccatctgcaacgtcacctttcgccttgatgacgatgaaatggaaaaaagatttctcgaacagtccctaaatgaaggactctatgcccttaaaggacatcgggatgttggaggaatccgtgcttcgatttacaactcgatgcccttggaaggggtgaaagctctggctgattttatgcaggatttcgaaacttgtgaaacttagc

SEQ ID NO: 247191 - DNA, 99 bp, Unknown
  Bacterial polypeptide expressing nucleotide sequence isolated from the Sargasso Sea
catgacacgccacttcaacttctgcgccggcccggcggcgctgcctaccgcggtgctggagcgggcccgcgacgagatgctcgactaccacgggcgcgg

SEQ ID NO: 247192 - DNA, 222 bp, Unknown
  Bacterial polypeptide expressing nucleotide sequence isolated from the Sargasso Sea
gcccagtgccagaaagtgatcgatcccaaatgaatgtggtgtttagacataaagatcatgatgaagcatttgaaaaaagatttatttctgaatctaaaatagcagcgtttgatggtatcaaagggcatcgatcagttggtggtttaagagccagtatatataacgctcaaacaaaagaaaatatcatacaatttgcccattttattaaaacgttttcataaa

SEQ ID NO: 247193 - DNA, 328 bp, Unknown
  Bacterial polypeptide expressing nucleotide sequence isolated from the Sargasso Sea
aatgagaaaatggaatttctcagctgggcccgcaatcgttcctgaatctgttcttaaggaaacacagtcagagcttttagaatttaaatccaccggtatgtctgtgatggagatgagccatagatccaaagattatggtgagatcgccaatgctgctagagatgatttaatcgaacttttagacgttcctgattctcatgatgttttatttcttcagggcggcgctactcttcaatttggcttaattccaatgaactttgcccacctaggtattcctgaatatttagagactggaacttggtccacaaaggctattaaagaatgttct

SEQ ID NO: 247194 - DNA, 593 bp, Unknown
  Bacterial polypeptide expressing nucleotide sequence isolated from the Sargasso Sea
taatataaatcacccttctttatttattgatatgtcttcagattttggttcatacaattttgaatgggaaaatatatcatacatttactctggcgcacaaaagaatatgggaataccgggtgttactatttgtgttggtaaaaatgaagtactaaataatacagtaaatccatcttatttagatttaaaaaaactagttgaaaatgattctgtatacaacacaccacctacattctctgtgtatgttttatatttagttactgaatggatgctaaattgcggaggaattaaatattttgaagagaaatcaataagtagctctgaattaatatatagacaacttgcggagcatgggaaacacataatcctccctgtttctgaatatgcaagaagtagatcaaatgtagttttcaattttaatgacccctctttagaagaagacttttttaagaaagctgaagaggaaaatatattaggcattaaagggcacaggagcgtaggtggtgtaagaattagtttatataatgccattaatcaggaaatgattgactatttgaataaatttatttcaagattttttgaaaaaatatgag

SEQ ID NO: 247195 - DNA, 175 bp, Unknown
  Bacterial polypeptide expressing nucleotide sequence isolated from the Sargasso Sea
aatgacttcaacgacgacctcccgtaaattcaatttctcagccggccccgccgttctgccggaatctgtgatcgaacaggctcaacaggacatctgggatctggacgggacaggcattggactgctggaacacagtcatcgcggcaaagccatcaccgaggtcttgacgaaacgg

SEQ ID NO: 247196 - DNA, 601 bp, Unknown
  Bacterial polypeptide expressing nucleotide sequence isolated from the Sargasso Sea
ccaatagaaagcgactcaccagtcatatgtgatatgtcatcaacgattgcttcaagaccaattgacattaataaatatgatttggtttttgctggtgcccagaaaaatctaggtatagctggtttaacgattctaattataaaaaataaacttttatctgtttgcaataaagagctgttgccaatgtttgactactcagctcatgctgaagaggcctctatgttaaatacatcaccagtcttttcatggtatgtatcaggcttgatttttgattggataactgaacaaggtggtgttgggatgatgggtaaagtcaatatggaaaaatctagtcttctatataattatatcgacgaatctagtttttactccaatccagtgtctaagccttacaggtcatggatgaatataccatttattcttgctagaaaagatctggagaatgaatttatacaaagtgcagaggatgaggggcttttcaatctaaagggccatagaaccgttggaggaatgcgtgcaagtgtgtacaatgcgatgccaattgaaggaattaaaaagttaattgcctttatggatgattttgcaaaattacacgaatgaa

SEQ ID NO: 247197 - DNA, 523 bp, Unknown
  Bacterial polypeptide expressing nucleotide sequence isolated from the Sargasso Sea
tttttcttacatttttgctgggtgctcaaaaaaattttgggtatacctgggtgttacaatttgtattttcgataaagattttatccaaaaagaagatttaccaagttatatgaatataaataatcacattgataaaaactcaacatttaatacaccccctacattttcaatttatgtaatgttaaaagttttggaatggatcgaaagaaatggtggcttggaggaatttgaacgaaacaacatcaacagagcaaataaaatttacaattttttggataataatttagacgatttaacccctctagctcctaaagaatttagaagtacctcgaatatcgtttttgattttaaagacaaaaagaagaccaaaatatttttagaaaaaagttacgaaaataaatttttaggattaagtggacatagaagcgttggaggtatcagagttagtaattacaacagtgtaactgatgaaatgatatcagattttttaatttttcttgagaagtttatttcaagtaattga

SEQ ID NO: 247198 - DNA, 679 bp, Unknown
  Bacterial polypeptide expressing nucleotide sequence isolated from the Sargasso Sea
gcatctgaccggggcgttcttctccgactgaccacaacagtaggaatggcctatttgcccacaggattcgcttttggcgtactggccacgcaagcgggattgtcacccgctgttgtgattgcaatgagcatctttatctttgccggcgcacttcaatttgcggcggtgccgttattgagtgtcgccacggggctcggcgcatttgccatgaccacgctgctgatcaacctgcgccatgttctctacgccatcccgctgattgagcacctgcctgcgcggcgctggcaacgggcctatatcgttgcagcgctaaccgacgagaactattccgttctcactacccttcccacagacaaacggcagcagttcgcgatggcagtgacgttgatccatcacgtctattggatcgcgggaaccgtccttggtgtgctgctcggacaaaaggttgcggattggattcccaacctggacttcgcgctgccgtcactgttcaccatcctcgccatcgaacagtacctatcgcagagaagattgactccggcgctgataggcgtactggcttactttgcagcgacgcgaatggcgacgaactatctattgatcacggccctcggattcggactggcgacgctgttggcgcgcgcacttgtccgcggtaacgcagtggaagcatcctgaa

SEQ ID NO: 247199 - DNA, 193 bp, Unknown
  Bacterial polypeptide expressing nucleotide sequence isolated from the Sargasso Sea
atataacttttcatttggtcaggaaagactactccagaaatttttatcagaatcagaaaaagaggggttatttgctcttaaaggacatgcttcagtaggaggaataagggcttctatttacaactcaatgcccctggacggcgtaagacaactagctgattttatgaaggaatttgaacgtaaaaacggttag

SEQ ID NO: 247200 - DNA, 882 bp, Unknown
  Bacterial polypeptide expressing nucleotide sequence isolated from the Sargasso Sea
ttacgggctacatattggggaaggaaaacctgttataggtattattggagagtttgatgcattaccaggactatctcaaacggcagactcgttcaggaatgaattgactgaaggtggagctggccatggatgtggtcataatctatttggtacagccagccttggtgcagctgttgcaattaaagaattaattgaaaaaggagatttaacaggtactgtcaagttttttggaacacctgctgaagagaaattttttggaaaactttggatgataagagagggagtatttgatgatgttgatataactatggattggcatcctgcagaccatactgaagcaaatgttcaaccctcattagctcttgttgattttatggttgagtttactgggcaatctgctcatgcatctgcagatccatggaatgctaggagtgcaaatgatgcattagaattatatacatcaggaataaatgcatatcgagagcatgttaagccttcagtcaggatgcattaccatatacaagatgcaggacaagttgttaatgttgttccagactactcaagaatttgggttagagtgagagatataacaaaagaaggattacagcctgtttatgaccaggttagaaggatggctggaggtgcagcaataatggcaaatgttgagcacaaagtctcactaatttcagggattcatgatcttctcccgaatagaacaggaggtgcaataatgcagaaaaatctcgaaattctaggagatattcaatacactcaagatgaaattgattttgcattagacatgcaaaaagcaaatggaaaaccacaaattggaattgatggtaaaattagaccattaagagagacactggagagcccaggagg

SEQ ID NO: 247201 - DNA, 732 bp, Unknown
  Bacterial polypeptide expressing nucleotide sequence isolated from the Sargasso Sea
gccgctgttgctataaaggagttaattgaaaaaggagatttaaagggaactgttaaattttttgggacaccagctgaggaaaaattttttggaaaattatggatgatcagagaaggagtatttgatgatgttgatatatgtatggactggcacccgggagataatactgaagcaaatgttcaaccatcattagctctagtcgattttatggttgaatttacaggacaagctgctcatgcctctgctgacccatggaatgctaggagcgcatcagatgcactagagttatacacatctggaataaatgcatatagagaacatgttaggccttctgtaagaatgcattatcatattcaggatgcgggacaagttgttaatgttgttccagattattcaagaatttgggttagagtaagagatataacaaaagagggattacaacctgtttatgatcaagttagaaaaatggctgggggtgctgcaataatggcaaatgttgatcataaagtctctttaatttcagggattcatgatcttcttccaaatagaacaggaggagcagctatgcaaaaaaatcttgaagttcttggtgatattgagtactcacaggaagaaattgattttgcgattgaaatgcaaaaagctaatgggaaacctacgctagggattgatggaaaaattaggccattaagagaaacacttgaaagtcctggtggaggctctaccgatgtg

SEQ ID NO: 247202 - DNA, 520 bp, Unknown
  Bacterial polypeptide expressing nucleotide sequence isolated from the Sargasso Sea
aatggtctatgccggtctgcaaaaaaatctcggtccgtcaggattggcattggtcctgatccgtgaggacctactgggatttgcactgcctcaaactcccaaactgctggattatcagcttgtccatgcacaacgttcgttggccaataccaccagtgttttttctatctacgtcactttgaaaatgcttcgttgggtagaaaagcagggtggtgtcgcagtcatggaacaacggaaccgggaaaaatcaaaactactttatgatgtgcttgatcattctaagctatacaaggcggtggctcatcccgaaaaccgttccatctgtaacgtcacctttcgtcttgatgacgatgaaatggaaaaaagattcctcgaacagtccctgaacgaaggactctatgccctaaaaggacatcgagatgttgggggaatccgtgcatcgatatacaactcgatgcccttggaaggggtgaaagctctggctgattttatgcaggatttcgaaaggcgagaaacttag

SEQ ID NO: 247203 - DNA, 412 bp, Unknown
  Bacterial polypeptide expressing nucleotide sequence isolated from the Sargasso Sea
tatgcaggcagtgacggagaaattcatggcgacggttgctgatagggtatttaacttctcagcagggcctgcagtattgccattgccagtgctcgaaaaagctcagggggaattgctggccttgccaggcgttggctcatcagtgcttgaaatcagtcatcgtagtaaagcattcgatggcattcttgatcgtacgctagcgggtctgaaaagccttctaggaattggtgaagactatgaagttgtattgcttcagggaggagcgagtctccagttctctatggttccgatgaattttcttgcgggtcagtctggtgctgccaactacatactcactggaacatggggcaaaggagggcttaaggaagcaagtcggattggtgaaacgcatattgcttgggacggcagcacg

SEQ ID NO: 247204 - DNA, 914 bp, Unknown
  Bacterial polypeptide expressing nucleotide sequence isolated from the Sargasso Sea
attgaattctcttgagcaaaagtcatctgctttaatctctgtaagtgataatatatgggaagcagcagaagtggcatttagagaggaaaaatctgcagaatatttaatagaatacgcagaagagaatggattaaaggttgaaaaaggcttagctggaatgccaacagcttttactgcaacatatggagagggaaaacctgtaattggaattattggtgaatttgatgccctacctggtctttcccagacaactgttccgtataaaaatgaattagtcgcaggaggtgctggtcatggatgtggacataacctttttggaactgccagtttaggagccgctgttgctataaaggagttaattgaaaaaggagatttaaaggggactgttaaattttttgggacaccagctgaggagaaattttttggaaaattatggatgatcagagaaggagtatttgatgatgttgatatatgtatggactggcacccgggagataatactgaagcaaatgttcaaccatcattagctttagtcgattttatggttgaattcacaggacaagctgctcatgcctctgctgacccatggaatgctaggagcgcatcagatgcactagagctatacacatctggaataaatgcatatagagaacatgttaggccttctgtaagaatgcattatcatattcaggatgcgggacaagttgttaatgttgttccagattattcaagaatttgggttagagtaagagatataacaaaagagggattacaacctgtttatgatcaagttagaaaaatggctgggggtgcagcaataatggcaaatgttgatcataaagtctctttaatttcaggaattcatgatcttcttccaaatagaacaggaggagcagctatgcaaaaaatctttg

SEQ ID NO: 247205 - DNA, 761 bp, Unknown
  Bacterial polypeptide expressing nucleotide sequence isolated from the Sargasso Sea
attgaattctcttgagcaaaagtcatctgctttaatctctgtaagtgataatatatgggaggcagcagaagtggcatttagagaggaaaaatctgcagaatatttaatacaatatgcagaagagaatggattaaaggttgaaaaaggcttagctggaatgccaacagcttttactgcaacatatggagagggaaaacctgtaattggaattattggtgaatttgatgccctacctggcctttcccagacaactgttccgtataaaaatgaattagttgcaggaggtgctggtcatggatgtggacataacctttttggaactgccagtttaggtgccgctgttgctataaaggaattaattgaaaaaggagatttaaagggaactgttaaattttttgggacaccagctgaggaaaaattttttggaaaattatggatgataagagaaggagtatttgatgatgttgatatatgtatggactggcaccccggagataatactgaagcaaatgttcaaccatcattagctctagtcgattttatggttgaatttacaggacaagctgctcatgcctctgctgacccatggaatgctaggagcgcatcagatgcactagagttatacacctctggaataaatgcatatagagaacatgttaggccttctgtaagaatgcattatcatattcaggatgcaggacaagttgttaatgttgttccagattattcaagaatttgggttagagtaagagatataacaa

SEQ ID NO: 247206 - DNA, 652 bp, Unknown
  Bacterial polypeptide expressing nucleotide sequence isolated from the Sargasso Sea
tttgcacctaacttcaaacgagacaataaatggagttcaattaagggaattcaataaaattccacatgattcattactcattgatatgtcctcagatattggttcttatagttttgaatgggacaatttagcttatgtttatgcaggagctcaaaaaaatatgggtatacctggtgtctcaatatgtataggaaatgaaaaatatttaaattcagaagataattcaagataccttaatcttggacaattggtggaaaagaactctttattaaacacacctcctactttttcgatatacgtcctcaagcttgttaccgattggatgatagaaatgggaggtattaaatattttgaagagaaatcaataagacaatcatcaagactttatgaacaattacagacctatgaggaatttttaatattgccagttaatgactactcaaaaagtagatccaatattatttttaaatttttaaatgaggatttagaaaaaaagtttcttattgaagcaatcgaaaaaggaatacttggtttgaatggacatagaagtgaaggaggaataagaattagtctttacaattcagttacagatgagatggttgattacttgtcagaatttatggacaaattttttgcgggtaatggaaaataa

SEQ ID NO: 247207 - DNA, 213 bp, Unknown
  Bacterial polypeptide expressing nucleotide sequence isolated from the Sargasso Sea
aatgaggcagtggaatttttgtgccggacctgccgcaatttctgaagaagttattttagaagttaaatcagaacttcctgaatatggaactgcaggtgcttcaattatggaaataagtcatcgatcagatgtcttcatggaagttgcctacgaggcaaaaaaagatctcatagaaatattaaacataccagatgactatgatgttttgtttct

SEQ ID NO: 247208 - DNA, 1138 bp, Unknown
  Bacterial polypeptide expressing nucleotide sequence isolated from the Sargasso Sea
ttgaactctcagagtgtaaataaattaaagaaagacttattaaattcgatagaagaaaaaacattagaactaacctcgttaagtgataaaatttgggaagctgctgaagtagcgtttagagaagataaatctgctgaatatttgattgagtatgcagaggcaaacggtttaacaattgaaagaggacttgcaggtatgccaacagcatttacagcttcgtatggaaaaggaaaaccagtaattggtattataggagaatttgatgcccttcctggcctttcacaaacaactgctccctacagagatgaattaattgagggaggagctggtcatggctgtgggcataatttatttggaactgccagtttaggtgctgctatcgcaataaaagaattaattgaaaaaggctctattgaaggaactgttaaattttttgggacacccgctgaagaaaagttttttggcaaactatggatgattagagaaggggtttttgatgatgttgatatatgtatggattggcatccagctgataaaacagaggcaaatgttcagccttcacttgcacttgttgactttatggttgaatttactggacagtctgcacatgcctcaatggatccatggaatgcgagagcagcaaacgatgcattagaactttatacttctggaatcaatgcatatagagagcacgttaagccttctgtaaggatgcactatcatattcaggatgctggtcaagtcgttaatgttgttccagattattctaggatttgggttagagtaagagatattacaaaagaaggtttacaacctgtttatgatcatgtcagaaaaatggctggaggagcagctataatggctaacgttgaacataaagtttccttaatatcaggaattcatgatcttcttccaaatagaacaggaggggctgctatgcaaaaaaacctcgaagccctaggagatatacaatatactcaagaagaaattgattttgctcttgaaatgcaaagaaataatgggaaacctaaaattggcattgacggtaagataagatcattaagagagactcttaaaagtcctggaggtggttcaacagatgttggagatgtaagctataatgttcccagtagttagc

SEQ ID NO: 247209 - DNA, 1084 bp, Unknown
  Bacterial polypeptide expressing nucleotide sequence isolated from the Sargasso Sea
atgaagaatagggtccataattttagtgctggcccagctacactaccacttgaagttttagaatccattagagaggagcttataaattataaagacatagggtcttcgatcattgaaataagtcatagagataaaacttttgtcgaaatagcagaaaaaacagaagagacactcagagatttattatctattccagacaactatgatgtactctttttgcaagggggagcgacccttcaattttctatgattcctcttaacttttctcatttaggggatattgcaaattatgcagagattggatcttggtcatcaaaagcaataaaagaagctagcaaattatgtaatttaaatatttgcacttcttctaagaaaaataattttacacaaattgataatttgaatgaatgggatattaaaagcaattcatccattattcactattgtaaaaatgagactatacagggaattcaaataaaagatgagcctaactttgaaggttctgtttttgtagatatgtcatcttgtcttttttctgaagatatagatgtttctaaatacgattttatttatgcctgcgctcaaaagaattttggccctgcaggtataacattagtcttagcaaagaaagagttgatatctaaatcaaacccagaactacctaatattttgcgatatgatgctcatgcatctgaaaaatcaatgcttaatacaccgaatacttttggttggtatgtagcaggtaagatgtttgattggtataaaaaagagggcggcatcaagaaaatggaagaaacaagtattgagaaatctaataaactctattctctcattgataaatcagatttttatattaacccagtcaataaggaacaaaggtcaagctgtaatgttgtatttactctttcaaacccaaaactggatagcacatttttagaagattctgataatgaaggtttgaaatatttaaaaggacatagaactgtaggaggaatgcgagcaagcatttataattctttatccatggatgcagttgaatcattaactgattttatgagatcatttgagacaaaatatggatgat

SEQ ID NO: 247210 - DNA, 1072 bp, Unknown
  Bacterial polypeptide expressing nucleotide sequence isolated from the Sargasso Sea
atgcaaatacataatttttcaccgggtccagcaagattagatccttctattatcagcaagtcccaagaggcaatagctaattatcaaaaaactggtttgtcaattctagagattggacacagatctaaagattttgaaacattaataaacgctcttcaagagaatatgataaatatttttaatattccatctaattatttcactcttctcttgcaagggggagcaacatatcagaatacctttatcgctaataactttgataaagaaaataaacttttaggatgtctagtcacaggaacatgggggaggtactcagttgaagatttctcaaaaattagagatacgaaaataattgaagtaagcgataatgaaattgaaaattatattcaaacaccttgggacctcgaaggtgttgattatttgcacctaacttcaaacgagacaataaatggtgtccaattaagggaattcaataaaattgaacatgattcattactcattgatatgtcctcagatattggttcttatagttttgaatgggacaatttagcttatgtttatgcaggagctcaaaaaaatatgggcattccaggagtctcaatatgtattggtgatgaaaaatatttaaattcagaagataattctagatacctcaaccttggacaattggtggaaaagaattctttgttgaacacacctcctactttttcgatatacgtcctaaagctggtaaccgattggatgattgcaatggggggtataaaccattttgaagaaaaatcaattagacaatcatcaagaatatatgaacaattagagagttatggtgattttgtaataatacctgtcagtgactattcaaaaagtagatccaatataatttttaaattcaaaaatgaggatttggaaaagaaatttcttatagaagcaactgaaaaaggaatacttggtctgaatggacatagaagccaggggggaataagaattagtctttataattcaattacagacgagatggttgactacttgtcagaatatattgaccgattttttgcagataatggaaaataat

SEQ ID NO: 247211 - DNA, 970 bp, Unknown
  Bacterial polypeptide expressing nucleotide sequence isolated from the Sargasso Sea
tgttgaagtctctcatagaagccatgctttcaaagaatatgcagaatactcagaatcttcattaagaaacctgctgaatataaatgatgaatatacaattttattccttcaaggtggtgcaacacatcagttcgctttaatacctatgaacttctcaaaaaatggtgtacttgattatctaataaccgggggttggtcaaaaaaagctagtgagtatgcaagtaaagttgcaaatataaatattgtatctgactcttctacaaataattttacagatatcgctgattctaaaacatggaatatttctgatgacccagattatttcttttattgtgcaaatgaaacagttcatggattggagatacatagcccaatagaaactgactcaccaattatttgtgatatgtcatcaacgatcgcctcaagaccaattgacattcataagtacgacttaatttttgcgggggcgcagaaaaatctcggtatagctggattgaccattgtaattgtaaaaaatgaactattatctgattcaaataatgagttgctaccaatgtttgattactcagctcatgctcaagaggcatctatgttaaatacatcaccagtattttcatggtatgtgtcaggattaatttttgattggatagcagaacaaggcggtgttgataagatggctcatgtcaatagggaaaaatctagccttctttataactatttagatcagtctaatttttactctaatccagtatcaaagccatatagatcatggatgaatataccatttctactctctagagatgatctgcaagataaatttgttcaatgtgctgaggatgagggtcttttcaatctaaagggacatagaaccgttggaggaatgcgtgcaagtgtgtacaatgcgatgccaattgaaggagttaaaaaattaattgcctttatggatgaatttgcaaaattacacgaataa

SEQ ID NO: 247212 - DNA, 343 bp, Unknown
  Bacterial polypeptide expressing nucleotide sequence isolated from the Sargasso Sea
tgtttagtgagtatgaggtggttaaaaaataacggaggtttagcagagattgagaaaaaaaatattaacaaggcatcattaatatatgaagagattgacaaaaatgaaatgtttactggttttgcttcaaaagatgatagaagtattatgaatgtcacattcaatttaatagataaaaaatataaatcagcgtttgatgatctattaaaagaaaacaatatctctggtattaatggccacagatctgttggtggatatagagcatcaatttacaacgctatggaaatcgagtctgtagaagtattagtggacactatgaaaaaatttgaaaaaaatatataaa

SEQ ID NO: 247213 - DNA, 439 bp, Unknown
  Bacterial polypeptide expressing nucleotide sequence isolated from the Sargasso Sea
tatgattaaaagagatgtaccttccatgcttagctacaaggttcatatagacaaggatagttcatttaacacaccgcctgttttttcaattttttctgtattgatgaatttaagagaaattaaatctgaaggtttagaaagtattgaaaagaaaaattcagaaaaatctaagttgatatatgatgaaattgataagaataaatgttttgtcggattttcagatatcaatgatagaagtcatatgaatgcaacatttaatctagcggatggttgtgatgctgatttatttaaaagcatatgctctgataataatatttctggaattaatggacatagatctgttggaggtttcagagcatctatttacaatgcactagatattgatagtgttaaaactctaataacttgtatgaaagaatttgaatcaaactataattaa

SEQ ID NO: 247214 - DNA, 643 bp, Unknown
  Bacterial polypeptide expressing nucleotide sequence isolated from the Sargasso Sea
atgtcaaaagatatattcaacttttctgctggccctgcagtaattcctgattcagtaatagctaagataaatcttggactgcatgattttgatcgtggaatgtcaatcattgaagtatctcacagaagtcatgcttttaaggagttcgctaaatcttctgaatcttcattgaggaatttactgaatataagtgaagaatattctgttctatttcttcaaggtggagctacacatcagtttgctcttatcccgatgaacttttctaaaaatggtgtactagattaccttgtaactggagcatggtcgaaaaaggcttctgcttatgcaaaaaagttttctaaagtaaatatcgtatctgattcatcttcaaataactttacagatttagcagacctaaatagttggaatatctcagataatgcagattactttttctattgtgctaatgagacagttcatggattggaaattcatgatccaattgaaacaagctcgcctgtcatatgtgacatgtcatcaacaattgcctctagacccatagatgttaataagtatgatttaatttttgcaggcgctcagaaaaatcttggtatagctggtgtaacaatcgttattgtaaaaaataaactattatcggaagcaa

SEQ ID NO: 247215 - DNA, 1351 bp, Unknown
  Bacterial polypeptide expressing nucleotide sequence isolated from the Sargasso Sea
gttggtaaattctattgatatgaaaacatcagatttaacttccctaagcgataaaatatgggaagctgctgaggtagcttttagagaagataaatctgcagaatatttaattgagtatgctgaagcaaatgggttaattgtcgaaaaaggtattgctggaatgccaactgctttcactgctacctatggagaggggaagccagtaattggtataattggtgaatttgatgctcttccaggtctctcgcaggataccgtaccccataggcatgaattaatagagggtggagctggtcatggttgtggacataatctttttggaacagccagtttaggtgctgctattgctataaaagagcttattgagaaaggagaacttcaaggaactgtaaaattttttggaacacctgctgaagaaaagttctttggaaaactttggatgataagagatggagttttcgatgatgtagacatctgtatggattggcatccagcggacaagacggaagcgaatgtacaaccatctcttgcactagttgatttcatggttgaattcacagggcaaactgctcatgcgtctgttgatccgtggaatgcaagagctgctaatgatgcacttgaactctacactgcaggaattaatgcatacagagaacacgtaaagccgtcagtaagaatgcattatcatattcaggatgcaggaaaagttgtaaatgttgttcctgactattctagaatttgggtcagggttagagatattactaaggaaggattacaacctgtctatgaacaagtaagaaagatggctggaggtgcagctataatggcaaatgttgagcacaaagtttcattaatatccggtgtacatgatcttcttccaaatagagttggaggtgcagctttgcaaaaaaatcttgagactcttggtgatattcagtatactcaggaggaaattgattttgcattggaactacaaagaaataatggaaaacctgaaataggtatcgatggcaaaataagaccattaagagagacccttgatagtccaggtggaggttctactgacagtggtgatgtaagctataatgttcctgtagttagcttagctgctactaccgcgcctaagggtgtcccatggcattcatggtcagtagttgcaagctctgggatgtctattggacataaaggaatgcttcatgcggcaaaagctcttggaatgacaatggttgacatatttaaagacagtaaattaagagagaatattaaaaaggagttcgatgaaaaaattggtgaatatgagtacgatccatatctagatccaggtccacctcctatagattatgtggactaa

SEQ ID NO: 247216 - DNA, 199 bp, Unknown
  Bacterial polypeptide expressing nucleotide sequence isolated from the Sargasso Sea
atgagaaaatggaatttctgtgcaggtcccgcagtaatttctgaagaagttcttaaagaagttcaatccgaaattttagaatttaatgaatcaggaatgtctgtgatggaaatgagtcacagatcagacatatattctaaagttgcttttgatgcaaaaaaagatttgattaatctttttagagttccaaacgaatatg

SEQ ID NO: 247217 - DNA, 580 bp, Unknown
  Bacterial polypeptide expressing nucleotide sequence isolated from the Sargasso Sea
cctggtgagcgactcaacttccgacatcctctccaggaaagaggattactccaggttcggactggtctatgccggtctgcaaaaaaatcttggtccgtcaggattggcattggtcctggtgcgagaggacctactgggactcgcattgcctcaaactcccaaactgctcgattaccagcttgcccatgaacaacgttcgttggccaacaccaccagtgttttttctatctacgtcactttgaaaatgcttcgttgggtagaaaagcaggggggagtcgcagtcatggaacaacgcaaccgggaaaaatcaaaactgctttatgatgtgcttgatgattctgaactttataaggccgtggctgatcccgaaaaccgttccatctgcaacgtcacctttcgccttgatgacgatgaaatggaaaaaagattcctcgaacagtccctgaacgaaggactttatgcgctaaaaggccatcgggatgtaggaggaatccgagcatcgatatacaactcgatgcccttggaaggggtaaaagctctggctgattttatgcaggatttcgaaaggcgggaaacttag

SEQ ID NO: 247218 - DNA, 577 bp, Unknown
  Bacterial polypeptide expressing nucleotide sequence isolated from the Sargasso Sea
aaatgaagacaagttaataagctttttagaaaaaaattgcaactttcgttttgttgaaataaaaaacgcccttaagcttaaagaaattaatttgataattttaaaaaaagatataacggataataatattttagaaattttaaaaaatccaaactattttaactctcaaatttttgcccacaaatctttacaagataaaattccacttaattacaaggtaattttttatcctactaagatttcaacattccaaaatacaattaaaaaatatcaagaaataaatttatcttataaggatatatatttatcccaagacagctttcttataaattcaaacaatcagaaaaaaatatatgttaccgaaaaagagtttgaaataattagtcttttttttaaaaaaaaagttataaaaaaagaattaatacaagaagaaattttgaacctacaaaaaactgtagatacaaaatcccttgattctcacttaacccgtataagaaataagtttttagaaatagatagtggacttaatatttcttctgttaaaaatgattgtcttgaaattaaaaaactagtttag

SEQ ID NO: 247219 - DNA, 808 bp, Unknown
  Bacterial polypeptide expressing nucleotide sequence isolated from the Sargasso Sea
atgaggaagtggaatttttgtgctggccctgcagcaattcctgaagaagtattaatagaagcgcaaaacgaactcttggagtggggcctctctggttcttcagtcatggaggtgagtcatcgatctgatttatttgctgaagttgcaacctcttcaactacagatataaaagctcttttaaatattggtgacgatcatgaagttctttttctgcaaggcggagcaaccctccaatttacatctgttccattaaacttcactaaaaacagttctattgtaagctacctaaataccggactatggtcaaaaaaagctattaaggctgcatcaaaatatgcctcagttaatgttgtcgcatcttcagaggaatcaaactatacatatgttcctagtactaatgaatggagagtagattccgatagcatttattttcattatgttatgaatgagacaatacaggggcttgcaatgcgagatccaatctcatctgagatacctgttatttgtgatatgtcttcatgcattcttagtgaagaagttgattttcataaccttgatcttgtatatgcgggcgctcaaaagaatattggccctgctggattaactttagtaatcataaaaaaagattttttagaaaaagctaatgaagatattcctgacattcttagttataaaaaaaatagtcaggcaggctctatgttaaacactccacctacttttgcatggtatcttgcaggaaaagtatttaaatggcttttaaaaaaaggtgggagtaaaaagtatcaaaaagaaaataaaaaaaagcaaa

SEQ ID NO: 247220 - DNA, 622 bp, Unknown
  Bacterial polypeptide expressing nucleotide sequence isolated from the Sargasso Sea
atgaataacaaagtacataatttcagtgctggtccctccatacttccagataaggttttcgaacaagcctcctcttcaataaataattttaacggtaaaaatttgtcaattttagagatatcgcacaggagtaaagactttatggatgttcttgaagaagcaagatctttagctatagaaatttcagagctagataaaaataaatatacctgcctttttcttcaaggtggtgcaagtatgcaatttttgatgactgcttataatttcttaaacaaaaatgctgcttatattaatacaggtagttggtccactaaggcaattaaagaagctaagttatttggaaatgttactgaaattgcatcatcatctgataaaaattttaattatataccgaaaaatataagtataaatgaagattatgattacttacacataacatcaaataatacaatttttggaacacaatttcattcttttccagaatctaattgtcctctaatagctgatatgagttcagatattttttctagaaagattgatttttccaagtttgatctcatatatgcaggagcacaaaaaaatcttggtcctgcaggtgcaacgatggtaatgattaataaag

SEQ ID NO: 247221 - DNA, 466 bp, Unknown
  Bacterial polypeptide expressing nucleotide sequence isolated from the Sargasso Sea
catgaggaaatggaatttctgtgctggccctgcagtaatttcagaagaagtattatctgaagtccaatcagaaattccagaatacaatgatataggatcttcaataatggagataagtcatcgatcaaaaatttacacaaaaattgcttctgaagctaaagaggatttaaaagacattcttggcatacaagaaaattacgaaatattatttcttcaaggaggtgcaacatttcaattttcaatgataccaatgaattttaaacatcttacaggatcagccgactatataactactggtacatggacaaaaaaagcatttatagaaggctcaaaaataatggatattaaaaatatatattcttctgagaataataattttacaaatgcaccagatcttgaagaattagatttttcagaaaatgcttcctatgttcattattgccctaacgaaactatccaaggaaat

SEQ ID NO: 247222 - DNA, 604 bp, Unknown
  Bacterial polypeptide expressing nucleotide sequence isolated from the Sargasso Sea
atgagaaaatggaacttttctcctggacctgctgcaattcctaatgaagttttactggaagtccaatcagaattattagaatttaaagattctggtatgtctataatggagatgagtcatagaacagatctttattcatcaattgcatttgaaactaaacaagacctaatagatattttaaatattccagatgattatgacgttttatttttacaaggcggagcaacacatcaattttccatgattccaatgaattttagtaaattaaataacactgccgtttatataactactggaacatggacaaaaagggcttatgaggagggctctaaaattgctaaattagatcaaatttttacctcagaagataagaattttacttatgccccaaattttgaagatcttaaaattccagaagatgcatcatatgttcactactgccctaatgaaacaatacatggggtttcatttaatcatatccctttaattgataatccattagttgctgatatgtcatcctcaatattaagtgagccaatagacataagtaaattttccttaatttatgcatcagcacaaaaaaatatggaccatcaggattaac

SEQ ID NO: 247223 - DNA, 301 bp, Unknown
  Bacterial polypeptide expressing nucleotide sequence isolated from the Sargasso Sea
atgcatcagttgaacaaggagaaggccgcgctgctctatgaagtggtcgatgcgtcggccgggttttatcggccgcatgcggaaaccgattctcgtagcttgatgaacgtgaccttccaactgccaggcgacgcgattcaggccaaatttatcgaacaggcggccgagcaatcactctgcaacctcaagggccaccggagtgtgggcggcattcgcgcctcgatttataacgcgatgccccgtgagggcgttgaacgactcgcggagttcatgcgtaccttttatcagaaaaacagctgag

SEQ ID NO: 247224 - DNA, 500 bp, Unknown
  Bacterial polypeptide expressing nucleotide sequence isolated from the Sargasso Sea
aaaaatatggggtcctgcaggaacaacacttgtagtaattaaagatgatatccttgggaaagtaaacagaaaaataccttcaatgcttgattataaaattcatatagataaagaaagtatgtttaatactccgcctgtttttgctgtatatacctccctattgactcttaggtggattgaatcaaatggaggaattgttggaattgaaaaacaaaacaacaaaaaagctgaaatgatatataacgaaattgatagaaataatgcatttaaaggttttacaagagaagaagatagaagtattatgaatgcgacattcaacttaaaagatggtttaaatgaagaaaaattcaataaactttgtgaagaaaatggaattagtggtttaaaaggccatagatctgttggaggttatagagcgtctatttataacgctttaccttttgaaagtatagaggttttaattgatgttatgaaaaaatttgaaaaaataagtttatgaa

SEQ ID NO: 247225 - DNA, 261 bp, Unknown
  Bacterial polypeptide expressing nucleotide sequence isolated from the Sargasso Sea
atagatttatagataagtctgatttttattcaaataaaattgaagaatcttctagatctattatgaacataccttttttactgggaaaagaagaattaaacagcaaatttttaatagactcatctaataatggcttgttagccttaaaaggccacagatcagtaggaggtatgagagctagcatttacaatgccatgccggaagaaggagtagatgctcttatagagtttatgaagctctttgaaaaagagaatctataga

SEQ ID NO: 247226 - DNA, 544 bp, Unknown
  Bacterial polypeptide expressing nucleotide sequence isolated from the Sargasso Sea
ggccactggggcaagaccgcggtcaagcaggccggtgtctacgtcgacgtcaacattgccgccagcagcgaggccgatggctaccgcacgctgccgccgcgtgccgactggcagctctcgcctgaggccgcctacgtgcacatcaccgccaacgagaccatccacggcgtcgagttccgtgatgtgcccgacaccggcaatgtcccgttgatcgccgacttcagttcgtccatcgccagcgagccgctggacgtgcgccgctacggcgtgatctacgccggcgcgcagaagaacctcggcccggtcggcatcgcggtgatgatcatccgccgtgacctgcttgaacgcagtggccagccgcgcgcggacatcttcgattaccgctcgcacgtcgcccgcgattcgatgctcaataccccgccgacctggaactggtacctggccgggctggtgttcaagtggatgctggccgaaggtggcgtggccgagttcgccaagcgcaacgccgccaaggccgccctggtgtacggcgccatcgacggct

SEQ ID NO: 247227 - DNA, 754 bp, Unknown
  Bacterial polypeptide expressing nucleotide sequence isolated from the Sargasso Sea
atgaggaagtggaatttttgtgctggccctgcagcaattcctgaagaagtattaatagaagttcaaaacgaacttttggagtggggtctctctggctcttcagtcatggaggtgagtcaccggtctgatttatttgctgaagtcgcagactcttcaactaatgatataaaagctctcttaaatattggagactaccatgaagttctttttctgcaaggcggagcaactcttcaatttacatctgttcctttaaacttcactaaaaaaagttctattgtaagctatttaaatactggaatatggtcaaaaaaagctattgaggctgcatcaaaatttgcttcagttaatgttgttgcatcttcagagaaatcaaactatacattcgtgcctaatactcaaggatggagagtagatcctgatagcatttattttcattatgttatgaatgagacaatacaggggcttgcaatgcgagaccgaatctcattagagatacctgttatttgtgatatgtcatcatgcatactaagtgaagaagttgattttcataaccttgatcttgtttatgcgggcgctcaaaagaatattggccctgctggattaactttagtagtcataaaaaaagattttttagaaaaagctaatgaagatattcctgacattcttagttataaaaaaaatagtcaggcaggctctatgttaaatactccacctacctttgcatggtatcttgcaggaaaagtttttaaatagc

SEQ ID NO: 247228 - DNA, 836 bp, Unknown
  Bacterial polypeptide expressing nucleotide sequence isolated from the Sargasso Sea
aatgccggaatctgttttaacagaggttcaagaagagttattagattggaatggtctgggattgtccgtaatggaaataagtcacagaagtccagagttcatagaaatcgctaaacaagccgaatgtgactttcgagatttactatctatctctgacgagtttgctgtgttattcactcatggtggagccactatgcaaaatgcaatggtgcctttaaatttagcatctccggagggtaatgttgattatgtaaatagtggacactgggccaaacgttccatcaaagaggccgaaagatatacaaacgttaatatcgctgccacctctgaagatgatgattttaaatattttcctgctcaagattcttggaaattttctgataattcatcttatgtgcattacacccccaatgaaactattggtggtttgtgtttaagaacattacataactgcgagatacctgttgttgctgattattcttcaggtattctttctgaaccaattgatgtgagtaaattctccttaatttatggaggagctcaaaaaaatattggtccttctggtctcggttttgtgattgtgaagaaagatttattgggaaaggcgcaatctattactcccaatcttctaaattacactctaattaatgaaggcgagtctatgtctaatactcctccaacttttgcttggtatgttgctggtaaagtatttaaatggcttagatctataggaggagtagaagctatttctataataaataatagaaaagccaacaagttatatgactatattgattcttcagatttctattcaaataatataaatatagaaaata

SEQ ID NO: 247229 - DNA, 237 bp, Unknown
  Bacterial polypeptide expressing nucleotide sequence isolated from the Sargasso Sea
gatgactagggcatttaatttttgcgcaggtccagctgcacttcctgaagaagtcttgaaggagttacaggaagaaactctagattataaaaatcatggtttagcggttatggaaatgagccatagaagtaaagagtttgtatccatagcggagcaagcaaaacaggattttattgatttattatccatacccgatgagtacgatgttttatttattcaaggggggggccagtttac

SEQ ID NO: 247230 - DNA, 292 bp, Unknown
  Bacterial polypeptide expressing nucleotide sequence isolated from the Sargasso Sea
aaaaaagcaaaactcctttatgactttatagattcctcttctttttactcaaatccagttgagaaagaatatcgatcaattatgaatgttccttttcttcttgatgatcataatgctgattcttcatttcttgaaaaggcagaaataacaggcctcttgaatctaaaaggtcatagatcagttggaggtatgcgtgcaagtatatataatgctactccgtttgaagctgtggaggatttagtttctttcatgagtgattttgagagaagctatactgggaatggaaaataaa

SEQ ID NO: 247231 - DNA, 562 bp, Unknown
  Bacterial polypeptide expressing nucleotide sequence isolated from the Sargasso Sea
atgaagatctacaattttagtgcgggtccagcctgtcttccagaaccggtcttaaatgctactcaaaaagcagctatagagtataaagaaaccggtatgagtattatggaaatgagtcaccgttcagaggctattgcagacctttttcatgaaacaacatcaaaagtgagagaacttcttgatgtaccatctaattatcatgtgttatggcttcagggtggtgcatctatgcagttcgctatggtgcctatgaatttgctaagtaatacatctactgcagattatatcgaaacaggatcctggtctacgaaagcgatcacagaatgtaataaggtggctaaggcgaatgtgatagcaagttctaagcaggatatcttcagctatataccaaaggaatacaagcagaaaatagattcaaaatatttacatatcactagcaataacacgatatatggaacacaatataaagtatttcctaaagttgataatcgtgatggatgtcttgtcgctgatatgtcatctgatattttctctgccccaatcaatgtgtccgattttggac

SEQ ID NO: 247232 - DNA, 351 bp, Unknown
  Bacterial polypeptide expressing nucleotide sequence isolated from the Sargasso Sea
aagtatttaaatggcttttaaaaaaaggtggagtaaaaagtattcaaaaagaaaatgaaaaaaaagcaaagctcctatatgactttatagattcctcttctttttactcaaatccagttgataaagaatatcgatcaattatgaatgttccttttcttcttgatgatcagaatgctgattctttatttcttgaaaaagcagaaattaaaggcctcttaaatctaaaaggtcacagatcagttggaggtatgcgtgcaagtatatataatgctactccgtttgaagctgtggaggatttagtttctttcatgagtgattttgaaagaagctatactgggaatggaaaataaa

SEQ ID NO: 247233 - DNA, 930 bp, Unknown
  Bacterial polypeptide expressing nucleotide sequence isolated from the Sargasso Sea
cacaatcagaatttttagaatttaatagttctggtatgtcaataatggagatgagtcataggtctgatctttatttatcaatcgcacttgaagctaaaaaagatctaatagatattttaaatatcccagaaaattatgaagttttatttttacaaggcggtgcaacacatcaattttcgatgattccaatgaattttagtaaattaaatggaactgctaattatataactacaggaacatggtcaaaaagagcttttgaacagggttctaaaattgcaaaaatagaacaaatttttacatcagaagataagaactttacttatgcaccaaactttaaagatcttaaaatctctaaagatgcatcgtatattcactattgcccaaatgaaacaattcaaggtgtctcatttgaccatataccattacttgataaaccattaattgctgatatgtcatcttcaattttaagtgagcctattgatataagtaaattttctttaatttatgcatctgcacaaaaaaatattggaccatcaggtttaacaattataattattgagaaaagttttatgaatcaaggaaataaagaccttacaaatttgcttacatattttgagcactcaaagcaaaattctatgctcaatacaccccctactttttcttggtatatggcaggtaaagtatttaagtggattaaaaaattaggtggactaaattattttaaggaacttaataatttaaaagcctcaaagctatatcaatttatagatgattcagaattttatataaatactgtggagataaataatagatctattatgaatataccttttatattgaaggataataagcttgattcagcttttttaaaggagtctcatgaagctgggctactaaatctcagaggacatttcttagtggaggaatgag

SEQ ID NO: 247234 - DNA, 532 bp, Unknown
  Bacterial polypeptide expressing nucleotide sequence isolated from the Sargasso Sea
atgtctttttcaaaccgaattcataactttagtgcggggcctgcaattttaccggaagaagttttagaagttgcaaaatcagaattattaaactttaaagcatcaggaatgtcgattatggagatgagtcatcgatctaaagaatttgatgaggtaatcacaacagctgagtcaacattaagatcattattagggctatctgataagtattccgttttatttttacaaggtggcgcaagtttgcaattttctatggttcctcttaatttaagagtagaaggtaagccatttgatgttgtgaatacagggtcttggactgaaaaagcaattaaggagatcaaaaaggtaggagactgtcgtataattgcatcaggtgaatctaataatttcacatcaattccgactgatattccattaaataatgatgcatctatgttgtatttatgctcaaataatacaatttttgggacacagtggtcacaatttccaaatacggggtcagtgccattggtagcagaatatgtcctccgat

SEQ ID NO: 247235 - DNA, 658 bp, Unknown
  Bacterial polypeptide expressing nucleotide sequence isolated from the Sargasso Sea
atgaaaaattttctcacgattttattcgctacaataacaattgtttcagtacaatcccagagtgctaataaacttaaaaaagaattattaaatagtatagaacaaaaaaaaactgaattgacaacattaagtgataatatatgggaagcagctgaagtagcatttagagaagataaatctgcagagtatcttattgagtatgctgaagcaaatggcttaatagttgaaaaaggattagctggaatgcctactgcttttacagcaacatatggagaaggaaaacctgttatcggtattattggcgagtttgatgcacttcctggactatctcaaactacagattctcataggaatgtattaattgaaggcggagcgggtcatggctgtggacataatttatttggcacagcaagtcttggtgcggccgttgcaataaaagagttgattgaaaaaggagaccttaaaggaacagtaaagttttttggcacacctgctgaagagaaattttttggaaaactatggatgattagagatggagtatttgatgatgttgatatatgtatggactggcacccagcagacaaaaccgaagcaaatgttcaaccatctcttgctcttgtagattttatggttgagttcacgggtcaattctgctcac

SEQ ID NO: 247236 - DNA, 559 bp, Unknown
  Bacterial polypeptide expressing nucleotide sequence isolated from the Sargasso Sea
tatgagtatatcaagcaaacttgtacataatttttctgcaggaccaagcgctcttccaaaaaaagtaattgaaattattaaaaatgattttcctaattggaatgaatcgggtatgtccataattgaagtcagccatcgtagtaaagaatttgtagaggttgctctaaaagcagagaagaacctaagaaagcttctcgatatttctgacaattatcatgtattgtttcttcaaggaggagcctcattacaattttcaatgatacccatgaacctttcaaaaagtgattctagtgttgattatgctgtcacaggttcttgggggaaaaaagccgttgcggaggcgaaaaaatttacaaaagttaatattgtatgcgattctcacgcttcagattatacctctatcattgatgaggaggagtggataaagagtgaagaagccgattatgttcacattacttcaaatgaaacaattgcaggtgtcgagtatcattttgatccagagacgaatgaagtaccactgataaccgatgcctcaagcactcttttatcacgatctctt

SEQ ID NO: 247237 - DNA, 400 bp, Unknown
  Bacterial polypeptide expressing nucleotide sequence isolated from the Sargasso Sea
tacccatgtgaaaaaagattccatgttcaatacaccacctgtactatcggtttttgtggtcaatgagacattaaaatggatagaagatcagggtggtgtgggctctatagagaattctaataagaccatgtctgaaaaactatatgcagagatcgaaagaaatatgctgttccgatcaccggttgctattgaggacagatctactatgaatataccttttgtatttaatgatgattctatggatgataacgattttttacaattttgcgatacccgaggtctaaagacattgaaaggccatcgttcggttggtggttttagggcatctatatataatgctatgccaatggaaggagtggatgctctgatcaaggcgatgcaggattatgaagatagataa

SEQ ID NO: 247238 - DNA, 760 bp, Unknown
  Bacterial polypeptide expressing nucleotide sequence isolated from the Sargasso Sea
atgaggaagtggaatttttgtgctggccctgcagcaattcctgaagaagtattaatagaagcgcaaaacgaactcttggagtggggcctctctggttcttcagtcatggaggtgagtcatcgatctgatttatttgctgaagttgcaacctcttcaactacagatataaaagctcttttaaatattggtgacgatcatgaagttctttttctgcaaggcggagcaaccctccaatttacatctgttccattaaacttcactaaaaacagttctattgtaagctacctaaataccggactatggtcaaaaaaagctattaaggctgcatctaaatatgcctcagttaatattgtcgcatcttcagaggaatcaaagtatacatatgttcctagtactaaagaatggagagtagattccgatagcatttattttcattatgttatgaatgagacaatacaggggcttgcaatacgagatccaatctcatctgagatacctgttatttgtgatatgtcttcatgcattctaagtgaagaagttgattttcataaccttgatcttgtatatgcgggcgctcaaaagaatattggccctgctggattaaccttagtaatcataaaaaaagattttttagaaaaagctaatgaagatattcctgacattcttagttataaaaaaaatagtcaggcaggctctatgttaacactccacctacttttgcatggtatcttgccggaaaagtatttaaatggcttttaaa

SEQ ID NO: 247239 - DNA, 1084 bp, Unknown
  Bacterial polypeptide expressing nucleotide sequence isolated from the Sargasso Sea
atgaagaatagggtccataattttagtgctggcccagctacactacctcttgaagtcttagaatcaattaaagaagaacttataaactataaagatataggatcttcgatcattgaaataagccatagagataaaacttttgttgagttagctgaaaaagttgaggaaacactcagaaatttattatctattcctaaagattatgatgtccttttcttacaaggaggcgcaacttttcaattttctatgattcctcttaacttttcttatttaggagatattgcaaattatgcagagattggatcttggtcatcaaaagcaataaaagaggcgagcaagttatgcgatttaaatatttgcacttcttctaagaaaaataaattcactgaaattgatgatttaaataaatgggatataaaaaacaactcatctattattcactattgtaagaatgaaactatacaaggaatccaaataaaagatgagcctaattttgcaagttctgtttttgtagacatgtcatcctgtcttttttctgaagatatagatgtctcgaaatacgattttatttatgcttgtgctcaaaagaattttggccctgcaggcataacattagttatagcaaaaaaagaattaatatctaaatcaaaccctgagttgcctaatattttaagatatgatgcgcatgcatctgaaaaatcaatgcttaatacacccaatacttttggttggtatgtagcaggcaaaatgtttgattggtacacaaaagaaggcggagttaagaaaatggaagaaagaagtatcaaaaagtctgatgctctatattctcttattgataactcagatttttatattaatcctgtaaataaagcacaaagatcaatttgcaatgttgtgtttaccctttcaaatccagatcttgataataagtttttagaagaatccgatgctcaaggattgaagtatctgaaaggccatagaaccgtgggaggtatgagagccagcatttataactctttacctatggaagcagttgaatcattggtagattttatgagatcatttgagacgaaatatggatgat

SEQ ID NO: 247240 - DNA, 1072 bp, Unknown
  Bacterial polypeptide expressing nucleotide sequence isolated from the Sargasso Sea
aatgcaaatacataatttttcaccaggtccagcaagattagatccttcaattattagcaagtcccaagaggcaatagctaattatcaaaaaactggtttgtcaattctagagattggtcacagatctaaagattttgaaacattaataaactctcttcaagaaaatatgataaatatttttaatattccatccaattatttcactcttctcttgcaagggggagcaacatatcagaatacatttatcgctaataattttgataatgaaaataaacttttaggatgccttgttactggaacatgggggaagtactcagctgaagatttttctaaaattagagatacaaaaataattgaagtaagcgagaatgaaattgaaaattatgttcaatcaccctgggatcttgaaggtgttgactatttgcatctaacgtcaaatgagacaataaatggagttcaattgagggaattcaataaagttcagcatgattcattactcattgatatgtcctcagatattggttcatatagttttgaatgggacaatttagcttatatttatgcaggagctcaaaaaaatatgggtattccaggtgtctcaatatgtattggagatgaaaagtatttaaattcagaagataattctagatacctcaatcttggacaattggtagaaaagaagtctttgttgaacacaccacctactttttcgatatacgtcctaaagcttgtaaccgattggatgattgcaatgggaggtataaaacattttgaagagaaatcaattagacaatcatcaagactgtatgaacaattagagagctatgaggattttataatattacctgtcagcgactattcaaaaagtagatcaaatattatatttaaatttaaaaatgaagatttagaaaagaaatttcttataaaagcaactgaaaaaggcatacttggtttgaatggacatagaagcgaggggggaataagaattagtctttacaattcaattacagatgagatggtagattacttgtcagaatttatggacaaattttttgcagataatgaaaaataa

SEQ ID NO: 247241 - DNA, 1078 bp, Unknown
  Bacterial polypeptide expressing nucleotide sequence isolated from the Sargasso Sea
tatgccacgggatatattcaatttttcagctggtcctgcattaatacctgactcagtaatagaaaaaattcaccttggacttgatgatttccatcgtgggatgtcaattgttgaagtctcccatagaagccaagcttttaaagaatatgcatactactcagaattatcattaagaaatttattaaatattaatgatgaattttcaattctatttcttcaaggtggtgcaacacatcagttcgcattaatacctatgaacttctcaagaaatggtgtgcttgattatctcgtaactggtgcctggtcaaaaaaagccagtgagtatgcaagaaaagttgcaaatataaatattgtatctgactcttcttcaaataattttacaaatattgctgattctaaatcatggaacatctctgataattcagattatttcttttattgtgcaaatgaaacagttcatggattagagatacataatccaatagaaagtgagtcaccagttatatgcgatatgtcatcaacgattgcttcaagaccaattgatattcaaaattatgacttaatttttgcgggcgcacagaaaaatctcggtatagctggattaaccattgtcattgtaaaaaatagacttctatctaattcagacaatgaattgctgccaatgtttgattactcggctcatgctgaagaggcatctatgttgaatacatcaccagttttttcatggtatgtgtcaggcttagtttttgattggatagctgaacaaggtggtgttgaggcgatgggtaaactcaataagaagaaatcaactcttctatatgattatatagatcaatctagtttttactccaatcctgtatcaaagtcatacagatcatggatgaatataccatttattttggctagaaaagagttggaggataagtttaatcaatctgctgaggatgtggggcttttcaatctaaaaggccacagaaccgttggaggaatgcgtgcaagtgtgtacaatgcgatgccaattgagggaattaaaaaattaattacctttatggatgaatttgcaaaattacacgaatga

SEQ ID NO: 247242 - DNA, 892 bp, Unknown
  Bacterial polypeptide expressing nucleotide sequence isolated from the Sargasso Sea
atgaggaagtggaatttttgtgctggccctgcagcaattcctaaagaagtattaatagaagcgcaaaatgaactcttggagtgggacctctctggttcttcaatcatggaggttagtcatcggtctgatttatttgctgaagttgcagcctcttcaactaaagatataaaagctcttttaaatattggagacgaccatgaagttctttttctgcaaggcggagcaactctccaatttacatctgttccattaaacttcactaaaaaaagttctattgtaagctacttaaataccggactatggtcaaaaaaagctattaaggctgcatcaaaatatgcctcagttaatgttgccgcatcttcagaggaatcaaactatacatatgttcctagtactgaagaatggagagtagattctgatagcatttattttcattatgttatgaatgagacaatacaggggctcgcaatgcgagatccaatctcatctgatatacctgttatttgtgatatgtcttcatgcatactaagtgaagaagttgattttaataaccttgatcttgtgtatgcgggcgctcaaaagaatattggccctgctggattaactttagtaatcataaaaaaagattttttagaaaaagctaatgaagatattcctgacattcttagttataaaaaaaatagtcaggcaggctctatgttaaatactccacctacttttgcatggtatcttgcaggaaaagtatttaaatggcttttaaaaaaaggtggagtaaaaagtattcaaaaagaaaatgaaaaaaaagcaaagctactatatgaatttatagattcttcttctttttattcaaatccagttgagaaagaatatcgatcaattatgaatgttcctt

SEQ ID NO: 247243 - DNA, 863 bp, Unknown
  Bacterial polypeptide expressing nucleotide sequence isolated from the Sargasso Sea
tatgtcaaaagatatattcaacttttctgctggtcctgcagtaattcctgattcagtaatagataagataaatcttggactagatgactttgatcgtggaatgtcaatcattgaagtatctcacagaagtcatgcttttaaggagttcgctaaatcttctgaatcttcattgaggaatttactgaatataagcgaagagtattctgttctatttcttcaaggtggagctacacatcagtttgctcttatcccgatgaatttttctaaaaatggtgtacttgattatcttgtaactggagcatggtcgaaaaaggcaagcgaatatgcaagcaagatatcggatgtcaatatagtatctgattcatcttcaaataactttacagatgtagcagacttaaatagttggaatatctcagataatgcagatttctttttctattgtgctaatgagacagttcatggattggaaattcatgatccaattgaaacaagctcacctctcatatgtgacatgtcatcaacaattgcctccagacccatagatgttaataagtatgatttaatttttgcaggcgctcagaaaaatctaggtatagctggtgtaaccatcgttattgtaaaaaataaactcttatcaggtgtaaatacagaattaccaccaatgtttgattattcagctcatgccaatgaagcatcaatgctcaatacatctccagttttttcttggtacgtatcaggtttggtatttgattggatacatgagcaagggggcgttgaagaaatggctcgaataaataaattgaagtcagatctgctctatgactacattgatcaatcagagttttacaacaatcctgtatcaa

SEQ ID NO: 247244 - DNA, 855 bp, Unknown
  Bacterial polypeptide expressing nucleotide sequence isolated from the Sargasso Sea
tatgaaagtttataacttttcacccggtccagcaaaattagattcctctattatttccaaatctcaacaagcaatgtacaattttcaaaatactggtttatcaattttagaaattggtcacagatctaaagaatttgaaaaattaatgaattctcttcaggagaatataagaaacattttcaatgttccaacaaattatttcaccttatttcttcaaggaggtgcaacatttcagaatacatttatcgctaacaattttgatatgagggacaaagatttaggttgtttggtaactggtacttggggtaagagtacttttgatgatttttcaaaaattagagaaacaaaattaatagaacttagccaagatgaaatagagaattttgttgagagcggtgaggatctgaaaaatgttgactatttacaccttacatctaatgaaacaatcaacggcgttcaattaagagaatttaacaaaattaatcatgattcattactgattgatatgtcatcggatattggttcatataggtttgaatgggacaacatagcctatatctatgcaggagcacaaaaaaatatgggtattccaggtgtttcaatatgcattggcgatgaaaagcatttaaattcagccgataattcaaaataccttaacattggacaattagtggaaaagaaatctttattgaacacacctcctactttctcaatatatgtcctaaagcttgtcactgattggatgattgaaatgggaggaatcgaatactttgaagaaaaatcagtttcacaatcatcgagactgtataaacaattagaaagttataaagattttctaaatttacctgtttgtga

SEQ ID NO: 247245 - DNA, 1078 bp, Unknown
  Bacterial polypeptide expressing nucleotide sequence isolated from the Sargasso Sea
atgccaaaggatatattcaatttttcagcaggacctgcattaattcctcaatcggtaattgaaaaaatacattctgggcttgatgactttcatcgtggcttgtcaattgttgaagtctcccatagaagccatgcttttaaagaatatgcaaaatcctctgaatcatcattaaggaacttattgaatataagtgatgaatattcaattctatttcttcaaggtggggcaacacatcagttcgctttaattcctatgaatttctcaaaaaacggtgtgcttgattatctcgtaactggagcttggtcaaaaaaagccagtgagtatgctagtaaagttgccaatgtaaatattgtctctgattcttcctcaaataactttacaaatgttgctgatcctaaaaaatggaatatttctgatgatccagattatttcttttattgtgcgaatgaaacagtacatggattagaattgcataatccaatagaaagtgactcaccagtaatatgtgatatgtcatcaacgattgcatcaagaccaattgacattaataaatatgatttggtttttgctggtgcccagaaaaatctaggtatagctggattaacgattctcattataaaaaataaacttttatctcattgtaataaagagctgttaccgatgtttaactactcatctcatgctgaagaggcctctatgttaaatacatcaccagtcttctcatggtatgtatcaggcttgatttttgattggataactgaacaaggtggggttgggatgatgggtaaagtcaatatggaaaaatctagtcttctatataattatatcgacgaatctagtttttactcaaatccagtgtctaagccatacaggtcatggatgaatataccatttattcttgctagagatgatctggagaatgattttatacaaagtgcagaggatgaggggcttttcaatctaaagggacatagaaccgttggaggaatgcgtgcaagtgtgtacaatgcgatgccaattgaaggaattaaaaaattaattgcctttatggatgattttgcagaattacacgaatgaa

SEQ ID NO: 247246 - DNA, 211 bp, Unknown
  Bacterial polypeptide expressing nucleotide sequence isolated from the Sargasso Sea
tatgaatgttccttttcttcttgatgatcagaatgctgattctttatttcttgaaaaagcagaaattaaaggcctcttaaatctaaaaggtcacagatcagttggaggtatgcgtgcaagtatatataatgctactccgtttgaagctgtggaggatttagtttctttcatgagtgattttgaaagaagctatactgggaatggaaaataa

SEQ ID NO: 247247 - DNA, 643 bp, Unknown
  Bacterial polypeptide expressing nucleotide sequence isolated from the Sargasso Sea
aatagttgatgtaaatgtagtttgttcctctgagttatctaattttaataatgtgcccaaggagagtagctggaagagatcagaaaatgcagcttacttacattacgttgcaaatgagacaattcaaggcaatgcgttacatatcccacctaccaccaatgcgccgttaataactgatatgtcatcggtaatcctaagcgaaccaattgatatttcaaagttttcaatgatttacgcaggcgcccaaaaaaatattgggccagctgggctaactatttgtattatcaaaaatgaatttttgaaaacagcttcaattgatttgcctggcatgcttcaatattctaaacatgcagatgcagattctatgttcaatactccacccacttttgcttggtatttatcaggtaaagtttttgcttggcttaagggcaaaggaggcttagattctataggtaaaataaataggctcaaggctaaaaaaatatatgattttatagataattcagaattttatacgaatcccattaatcttgataatcgatctattatgaacataccttttctattaaaaaactctgatttaaatgctgaattcttgcatgatgcagaaaatgcaggtctactaaaccttaaaagggcatag

SEQ ID NO: 247248 - DNA, 812 bp, Unknown
  Bacterial polypeptide expressing nucleotide sequence isolated from the Sargasso Sea
ttgtgcagactacatagatacgggatcatggtctgcgaaggctatcgtagaatgtaagaggataggtagggtcaatattattggcagttctcgggattctctttatacatatataccaaaagatgctttaccaatagagggagcgtcctatcttcatatcacaagtaacaatactatttatggaactcaatataaagaatatccatcgatcaataatgataaatgttttttagttgctgatatgagttctgatattttatcacaacctattgatatttctaattttggtctgatctatgcaggtgcacaaaagaatatgggtccagctggtgtaactcttgtgattattagatctgatcttgcagaaattaattatagagatattccaactatgatgaaatacagtacacatgtttcgaaagattcaatgtttaacaccccgcctgtgtttagtgtttgcgttgtcaatgagacactaaaatggattaattcaattggcggtctcaatcaaatgaaaaccattaatgagagcaaggcttcattactttataatgagatcgataggaataccttgttcaaaagcccagtggtttatgaggatcgctctaccatgaatgtccccttcatttttaataataataatctaaaagatgaggaatttctagaattctgtgaaaaaagaggtctaagaacattaaaagggcatagatctgttggaggattcagagcatctatatacaatgcgatgcccgaggctggtgttgaagctctaattgcagcaatgcaggaatacgaacacatacactcgtaaa

SEQ ID NO: 247249 - DNA, 874 bp, Unknown
  Bacterial polypeptide expressing nucleotide sequence isolated from the Sargasso Sea
gattacaataataacggtataagcatccttgaaatgagtcaccgttctcaacctgtcgttgatttaatgaatgagacctcttctttggctagggaattactatcaatcccagataattttcatattttatggttacaaggaggagcttcaacgcaattttctatgattcctatgaatctactttcagatgatcaaactgcagactatacagatactggtttatgggctgcgaaggcgattgatgaagcgaaagtatttggagatataaatatagcttcttcatctaaagaatcgttatatagcttaataaataaggacttaagtcaaacatctaaagctatttatttacatataacaagtaataatactatatatggaacgcaatggaagaagtttccaaaggtcttaaattctgaaggatttattgttgcagatatgtcgtcagatatattcagtcgaaaaattgattttaagtcttttggattaatttatgcaggggcacaaaaaaatatgggacctgccggagttactatggtaattattcgagatgatattataggtaaaatgaaaagacatattcctaccatgttggactatagaacacacattaataaaagttcagcatataatacacctccagtttcaacaatatttgtcgttaatagaaccttaaaatggttagataaaattggtggtatagctgttatagagaaaaaaaataaaattaaatcagataaactctatgaagagttagaaagaaactctgttttcacttctccaattagaaaagaagatagatcccaaatgaatgttccatttgtttttattgaagaaaaagatgaaaatgaatttttgaaattttgttcgaataaag

SEQ ID NO: 247250 - DNA, 851 bp, Unknown
  Bacterial polypeptide expressing nucleotide sequence isolated from the Sargasso Sea
atctgttccattaaacttcacgaaaaaaagttctactgtaagctacttgaataccggactatggtcaaaaaaagctattaaggctgcatcaaaatatgcctcagttaatgttgtcgcatcttcagaggaatcaaactatacatatgttcccagtactaaagaatggagagtagattccgatagtatttattttcattatgttatgaatgagacaatacaggggcttgcaatgcgagatccaatctcatctgagatacctgttatttgtgatatgtcttcatgcatactaagtgaagaagttgattttgataaccttgatcttgtatatgcgggcgctcaaaagaatattggccctgctggattaactttagtaatcataaaaaaagattttttagaaaaagctaatgaagatattcctgatattcttagttataagaaaaatagtcaagcagactctatgttaaatactccacctacttttgcatggtatcttgcaggaaaagtatttaaatggcttttaaaaaaaggtggagtaaaaagtattcaaaaagaaaatgaaaaaaaagcaaagcttctatatgacttcatagattcctcttctttttactcaaatccagttcagaaagaatatcgatcaattatgaatgttccttttcttcttaatgatgagaatgctgattcttcatttcttgaaaaggcagaaataaaaggcctcttaaatctaaaaggtcacagatcagttggaggtatgcgtgcaagtatatataatgctactccgtttgaagctgtggaggatttagtttctttcatgagtgattttgagagaagttatactgggaatggaaaataaa

SEQ ID NO: 247251 - DNA, 892 bp, Unknown
  Bacterial polypeptide expressing nucleotide sequence isolated from the Sargasso Sea
tatgaggaaatggaatttctgtgctggaccagcagtaatttcagaagatgtattattagaagtccaatcagaaactcttgaatataatgatattggttcttctgttatggagatcagccatcgctctaaaatatacaaaaaccttgccaacgaagctaaagaagatttaaaggaaattctaagcatacctgaaaactttgaaatattgtttcttcaaggaggtgcaacctttcaattttcaatgatacctatgaattttaaacatcttacaggaacagccgattacataaccactggaacatggacaaaaaaagccttgaatgagggctcaaagattatgaatattaataatatatattcttcagaagatgataattttacatatgccccggaccttgaaaaattaagttattcaaaaaatgcttcttatgttcattattgtccaaatgaaaccattcaggggaatgcaatacataaaatacctaaaatagataaaccattaattgcagatatgtcatctgtaattcttagtgcgccttttgatgtaagtaattttgctttaatttatgcaggtgctcaaaagaatattggacctgctggattaacaattgtaataattgataaagactttatgaaaaatggtaatcctaatttaccaaatttactgaggtattctgaacattcaaaatctgattcaatgcttaacactcctccaactttttcttggtatgttgctggtaaagtattcaaatggataaaaaaatgtggtggattagactattttaaggaacaaaataacttaaaggcttcgaagttatatgattttattgataaatccgatttttattcaaatccagttaaaattgagaaccgatctattatgaatattcca

SEQ ID NO: 247252 - DNA, 574 bp, Unknown
  Bacterial polypeptide expressing nucleotide sequence isolated from the Sargasso Sea
gcagacatgacttctgtaatacttagtcagcctcttgatgtaagtaaatttgatttaatttatgcaggagcccaaaaaaatataggacctgctggcttaaccatagtaataatctctaaagagcttatggaaaaaggggattctagccttccaaagatccttagttactctgagcattcaaaagcaaattcaatgcttaatactccaccaacgttctcttggtactttgctggcaaagtatttaaatggataaaaagatcaggagggttagatcattttgcagctttaaataaaaaaaaggctgaaaaactatatgatttcattgattcatcagatttctacttaaataatcttcaaaaatcacaacgctctgtaatgaacgttacgtttaatttaaaaaatgatgatcttaatagttctttccttgatgagtcaaaagcaaatagtttgctcaatttaaagggccacgctcttgttggaggaatgagagcaagcatatataatgctatgccccaggagggtgtgacgaaattaattcagtttatgagtgaatttgaatcaaaatatggataat

SEQ ID NO: 247253 - DNA, 561 bp, Unknown
  Bacterial polypeptide expressing nucleotide sequence isolated from the Sargasso Sea
gatgaaatcaatttataattttagcgcaggtcctgcgacccttcatccttcagtggtaaaatcaacttcagacgccacaattgaatttaaagatactggtatgagtcttatggagatgagccatcgttcacaaccagtagttgacatggtaagcgaaacagaggatttggtgagaaaactacttaatctttccgataattataaagttttatttcttcagggtggagcatcattgcaattttgtatggtgccgatgaatctactcgggaagggtcaggtagcagactacacgaacacaggtacgtggtcacaaaaagctataaatgaagctatgatttacgggaaagtaaatgttatatcctcttcaaaagactctaattataattatataccaaaagaattgaaccaatctgacaatgcgcagtatttacatctgacatcgaataatactatttttgggactcaatggaacagctttccaactcctatgagaaaagaatcatatttagttgcagatatgtcatctgatatttttagtagagagtttgaaattgatgattt

SEQ ID NO: 247254 - DNA, 853 bp, Unknown
  Bacterial polypeptide expressing nucleotide sequence isolated from the Sargasso Sea
aatgagaaaatggaacttttcagcaggtcctgctgctattcctgaacctgttttgcaagaagctcaatctgaaatgctggaatggcaagattctggtatgtcagtcatggaaatgagccataggtcttctgattacataaacatagcaaatcaagcacgacaagacttaatagatttattagatatcccaaatgattatcaagttttatttcttcaagggggggcaactcttcaattctctatgattccaatgaattttgcatcagagaaggttgctgactatgctctaactggaagttggtctcaaaaagctatcaaggaagcatcaaaaataatagatgtgaatgtcgtgacaagttctgaatcatctaattttgatcatgtgccaaacgaagaaagttggacctgctctgaagacgctgcatacctgcattatgtcgccaatgagacaattcaaggcaatgctttgcattttcctccaacaataaatgtgcctctaatagtagatatgtcatcagtgattttaagcgagcaaattgacgtatcaaaattttctatgatttatgcaggcgcgcaaaaaaatattggccctgctgggttaactatttgcatcataaaagacagctttctaaatacagcctctaataaattacccggtatgcttcaatatgcaaaacatgcaagtgcagaatccatgtttaatactccaccaacatttgcatggtatttatccggtaaagtttttaaatggctaaaagatttgggtggtttaaaatgcattggcgagattaacaagcataaggcaaagaaattatatgattttatagatcaatcagattttttttcgaatcct

SEQ ID NO: 247255 - DNA, 810 bp, Unknown
  Bacterial polypeptide expressing nucleotide sequence isolated from the Sargasso Sea
gaatttgaagtgttgtttttacaaggaggcgcttctttgcacttctcaatgattcctatgaacttactaactaaagatgctgttgctgattacacggatacagggtcatggtcttacaaggctttaaatcaagcaaagttatttggaaaagtgaatattgcctcttcatcaaggaccagtaattatagttttattcctaaggatataaaccaattaactgaatcaatctatttacatatcactagcaacaacaccatatatggaacacaatggaaagaatttccaaaacctctcaatagttcagggtttttagttgcagatatgtcatcagatatctttagtcgcccattaaatttcgataattttggtttaatttatgctggtgcacaaaaaaatattggtccagcgggagtaactcttgtcgtaatacgaaaagagttactaaaagagatagatcgaaaaattccagatatgttatcatatcgtattcatatagaaaaaaattcaatgttcaacactccccccgttatgtcaatttatgctataaattgctcattaaaatggttaaaaagcgttggaggggtagagtcaattaataaaaataattcaattaaagcaaaattgctttatactgagattaaaagaaattcactttttcagtcacctgttgcaaaagaagacaggtcgttaatgaatatcccgtttgtcttcaatgaagatataaaagaaaatgatactctctttttagaattttgtgataaaagagggttaaaaaccttaaaagggcatagatcagtaggtggttttagg

SEQ ID NO: 247256 - DNA, 568 bp, Unknown
  Bacterial polypeptide expressing nucleotide sequence isolated from the Sargasso Sea
tttcttcagggtggagcaaccttgcagttttctatggtccctatgaattttgggttacagggagtagctgactatgttttatctggaagctggtcaaaaaaggctatttatgaagcttctagactagttgacactaatgttgtttgtacttccgagccatctaattttaataatgtgccaaacgagactagttggaattgcaccgaaaatgccgcttatttacactatgttgctaatgagacaattcaaggaaatgcattacatattcctccaatgacaaatgcaccattgatatccgatatgtcgtctgtaattttgagtgaaccaattgacatatcaagattttcattgatttatgcaggcgctcagaaaaatatcggtcctgctgggttaactatttgcatcataaaaaatgactttttaaaaactgcttctgctgagttaccaggcatgcttcaatatgctaagcacgcagatgcagattctatgtttaatacaccacccacctttgcttggtatctttctggcaaagtttttgcttggttaaaaaataaaggaggcttagatt

SEQ ID NO: 247257 - DNA, 886 bp, Unknown
  Bacterial polypeptide expressing nucleotide sequence isolated from the Sargasso Sea
atgaggaaatggaatttttctccggggcccgcaacaattcctgaagatgttttattagaagttcaatcagaattattagaattcaataatgctggcatctctataatggaaatgagccataggactgagctctattcatctattgcatttgaggctaaaaaagattttatagaaattcttaacatacccgataattacgaagttttatttttacaaggtggtgcaacccatcaattttcaatgataccaatgaatttttctaatttacaagggaggcctgcctatataactactggaacttggacaaagagagcctttgaagaaggctctaaaattactgaaatagatcaaatcttttcatcagaaaacgagaattttatttacgcacctaattttaaagacttaaaaattcctgaagatgcatcttatgttcactattgcccaaatgaaacaatccatggtgttgcatttgatcatattccaacaattaataatccgttagttgcagatatgtcatcttcaatattaagtgaacccattgatgtgagtaaattttctttaatttatgcttctgctcaaaaaaatattggaccatctggattaacagttgtgattgttaaaaaaagttttatgaagcaaggaaacaaagctttaactaatttacttagatattctgaacattcaaaacaagattctatgttgaacactcctccaacattttcttggtatgttgctggtaaagtttttaaatgggtaaaaaaattaggtggactatcttactttaaagaattaaacacattaaaggcttcaaaattatatcaagttattgataattcagatttttatataaaccctgtgcatattaacaatagatctattgttaata

SEQ ID NO: 247258 - DNA, 712 bp, Unknown
  Bacterial polypeptide expressing nucleotide sequence isolated from the Sargasso Sea
gaatttaattttactaatgtaccaaaatttacagactggaaatttagatcatcaaatggctattttcattatgtagccaatgaaacgatccaaggcaatgcaattcatgacgttccatcagttgaaaatcccatcattgctgatatgtcatctgttattcttgcagaaccaatagacatctcaaagttttcaatgatttatgcgggtgctcaaaagaacattggcccagcaggattaaccatagcaattattagcaaagatttattgtcaacatgcaataaagatcttccaaatatcatgaattatgataaacacgctcaatcaggttcaatgctgaatactccgccaacatttgcatggtatatggcaggaaaagtttttaaatggcttaaatctttaggcggtcttgaggcagtaaaagagagtaattatttaaaagcgtcaacattgtatgactacattgataggagtgatttctacagcaacccagttgccaaaaaaaatagatcaattatgaacattccctttattctaaaaagccctgatctagatggcgcatttctaaacgaagccgaaagtgaaaatctccttaatttaaaagggcatagatcagttggaggaatgagagctagcatctataatgccatgcctcaggaggcaatagatgatttaatagcctttatggaggcttttgaatcaaaatatgggtaat

SEQ ID NO: 247259 - DNA, 487 bp, Unknown
  Bacterial polypeptide expressing nucleotide sequence isolated from the Sargasso Sea
cctgctggtttgactattgtcattattaagaacagcctaataaaaaacaataaagctaaaatcccagcaatgcttgattatagaaattatatagaaaaacagtctatgtataatactccgccagttttctcatggtatgtggctggattagtatttgaatatctcattaatttggggggccttgaagcaattgaaaaaacaaatataaaaaaatcgaatctactttacgattatattgataactcagatttttactcaaatccagtcgagaaaagctgtagatcaagaatgaatattccttttttactaaaagataaagatctagaaaatatctttttaattgactctcttaatgcgggtttagctaatctcaaaggtcaccgttctgtaggcggaatgagagcttcgatttataatgcaattgaggtggaagctgtgcaggatttaatttcttttatgaaagaattcgaacaaaagtatggataaa

SEQ ID NO: 247260 - DNA, 655 bp, Unknown
  Bacterial polypeptide expressing nucleotide sequence isolated from the Sargasso Sea
aatttttgttcatatctgctcaaacgaaacgataggtggggttcagttcaaagaatttccgtcactggaaaagattttaattgctgatatgtcgtctgaattgttgtctcgtcagataaatataaacgactttggccttatatatgctggagcccaaaaaaatattggcccagccggtttgacgatagttatagttagaaaggacctttgctcgaaggcaagacccgagaccccagccgtatttgattatggggcgcaagcagaggcagattctatgttgaacacaccaccaacatacagctggtatcttgctggtttagtctttgagtggctgttggagttgggcggattggatacggtcgaaaaaattaataatgagaaggcgcagaatctttatgacactatagacgctagtgatttttatgattcgcctgtagatcctcgttatcgttcaactatgaatgttccctttaaattaaaagatgaatctctggatgacgccttcttaaaggaggctgaacaggttggcttgataaatttgaagggccacaggagcgtcggaggaatgagagccagcatatacaatggtgtgccacccgaggcggtttacgcgctcctggatttcatgaaagagtttgaaaccaaatatggataa

SEQ ID NO: 247261 - DNA, 365 bp, Unknown
  Bacterial polypeptide expressing nucleotide sequence isolated from the Sargasso Sea
aacatttgcatggtatatggccggaaaagtttttaaatggataaaaaaacaaggaggacttgaatttttcaaacaacaaaattattcaaaatcatcaaaattatatgaatatattgatagttcagatttttattcaaataatatagatattgaaaatagatcaattatgaatgttacattttttcttgaaaatgatgaattagattctccattcttattgcatgccgaagaaaatggccttttaaacttaaaaggacatagatcagttggaggaatgagagccagcatatataatgcaatgcctcttgagggggttgaggaacttataaagtatatgaaatactttgagtcaaaatatggttaac

SEQ ID NO: 247262 - DNA, 904 bp, Unknown
  Bacterial polypeptide expressing nucleotide sequence isolated from the Sargasso Sea
catgtcggtgatggagatgagtcatcgcagcgatgagtttgttgccattgcagaagcggctgagaaggatctccgtgaattggccggtatttcagatgattacgctgtactcttcatgcagggtggagcttccagccagttctcgaccattccgctgaatctgcttggtgacaaggcctcggccgattacgtgaacaccggtatctggtcgaaaaaggccattgccgaagccaagcgctacggtaatgtgaatgtggttgccagctctgaagacagcgggtttaccaccattccggatcagtccggctggaataccagtgccgatgccgcttacctgcattacacgccgaacgaaaccatcggtggcctggaatacgattttattccggacagtggcaatgtgccgctggtggcggatatgtcttccaccatgctgtcccggccgctggatatcagcaaattcggtctgatctatgccggcgcccagaagaacatcggcccctcgggcctggtggtggtaattatccgtaaggatctcctgggtaaggcccggaaagagacgccgaccatgatgaactatcaggtcatcgccgataacggctccatgtacaacaccccggcgacctattcctggtacctgtccgggctggtgttcaagtggctgaaagagcagggcggtgttcaagccatgggcgagatgaacgcccggaaagcaaagaagctgtatggcttcattgatgccaacgatttctacgccaaccccattgaaccacgcttccgctcctggatgaacgtaccgttcactctggccgatgatgcgcttaatgctgaatttctgaaaggcgctgaagcccggcatctgctcaacctgcaggggcatcgctccgtcggtggtatgcgtgcc

SEQ ID NO: 247263 - DNA, 715 bp, Unknown
  Bacterial polypeptide expressing nucleotide sequence isolated from the Sargasso Sea
ttatacatatgttcctagtactcaagaatggagattagattccgatagcatttattttcattatgttatgaatgagacaatacaggggcttgcaatgcgagagccaatctcatctgagatacctgttatttgtgatatgtcttcatgcattcttagtgaagaagttgattttcataaccttgatcttgtatatgcgggcgctcaaaagaatattggccctgctggattaactttagtaatcataaaaaaagattttttagaaaaagctaatgaagatattcctgacattctcagttataaaaaaaatagtcaggcaggctctatgttaaacactccacctacttttgcatggtatcttgcaggaaaagtatttaaatggcttttaaaaaaaggtggagtaaaaagcattcaaaaagaaaatgaaaaaaaagcaaagctcctatatgactttatagattcctcttctttttactcaaatccagttgagaaagaatatcgatcaattatgaatgttccttttcttcttgatgatcagaatgctgattcttcatttcttgaaaaggcagaaataacaggcctcttaaatttaaaaggtcacagatcagttggaggtatgcgtgcaagtatatataatgctactccgtttgaagctgtggaggatttagtttctttcatgagtgattttgagagaagctatactgggaatggaaaataa

SEQ ID NO: 247264 - DNA, 597 bp, Unknown
  Bacterial polypeptide expressing nucleotide sequence isolated from the Sargasso Sea
catgagcaaacagatttacaacttctgcgccggccccgccatgttgccggtcgaagtcatggagcgcgcccagcgcgaattttgtaatttccaggggctgggagcctcggtcatggagctttcccaccgcggcaagccctacatggcggtcgccgccaaggccgaagccgatctgcgcgagttgctggcggtgccggacaactacaaggtgctgttcatgcacggcggcggccgtggccagttctccgcggtgcccatgaacctgctggggggcgccaacaagaaggctgactatctgctgaccggtgtctgggctgcgagtgccgtggacgaggcgcgcaagtacggcgatatccagacctttgacggggtggccaagagtgccgagggtatctcccacctgctgccgaccccggcgtttcgcgccgatgcggcctatgtgcactactgcccgaacgaaaccatcgacggcatcgagatgttcgacatcccggccaccggtgacgtgccgctggtggcggatctctcctccaccatcctctcccgtcccatcgatgtgagccgcttcggtatcatctatgccggcgcccagaagaa

SEQ ID NO: 247265 - DNA, 630 bp, Unknown
  Bacterial polypeptide expressing nucleotide sequence isolated from the Sargasso Sea
ggcttgcaatgagagatccaatctcatctaagatacctgttatttgtgatatgtcctcatgcatattaagtgaagaagttgattttcataaccttgatcttgtatatgctggcgctcaaaagaatattggccctgctggattaactttagtagttataaaaaaagattttttagaaaaagctaatgaagatattcccgacattcttagttataaaaaaaatagtcaggcaggctctatgttaaatactccacccacttttgcatggtatctagcaggaaaagtatttaaatggcttttaaaaaaaggtggagtaaaaagtattcaaaaagaaaatgaaaaaaaagcaaagctcctgtatgactttatagattcatcttctttttactcaaatccagttgagaaagaatatcgatccattatgaatgttccttttctacttgatgatgagaatgctgactctttatttcttgaaaaggcagaaataaaaggcctactgaatctaaaaggtcatagatcagttggaggtatgcgcgcaagtatatataatgctactccgtttgaagctgtggaggatttagtttctttcatgagtgattttgagagaagctatactgggaatggaaaataaa

SEQ ID NO: 247266 - DNA, 564 bp, Unknown
  Bacterial polypeptide expressing nucleotide sequence isolated from the Sargasso Sea
tatgacaaggtcgatcaatttttcagcaggtcctgcgacactgccaacagaagtgttggagcgtgctaaagccgagcttttagactaccagcatactgggatgtcgatcatggagatgagccaccggggagacgagtttcgcgaagcactgatcaaggcggaatccgattttagatcattgttggcaatctctgaagactatcatgttcttttcttacagggaggagctactgctcagtttgctgctgtgcccttgaatttagtaagagaacatagaaatacggattatctggatactgggtcatggtcgagaaaagctatcaaggaagctggtgctttttctgatgttcatacggtcgcgactagcgaagaagattcttatcacctcataccccctgaagatgagtgggatataagaacagaaacatcctatgtacacatttgctcaaatgaaactataggcgggttacagttcaaacagttcccaaagctagaagttccgttggtcgcagacatgtcttcagacatcctttctcgagagttagatattgaaaattttggagc

SEQ ID NO: 247267 - DNA, 749 bp, Unknown
  Bacterial polypeptide expressing nucleotide sequence isolated from the Sargasso Sea
taacctgttgcgcgctaagagcaccgctgactacattaatattgggcagtggtcgactaaggcgatcaaagaagcgaaaaacttctgtacggtaaatatagtggcctcgacggaaggaaataattttacttctgcgccttctcaggcggagctgaaactcaaccctgatgcggcttatgttcattacactccgaacgaaaccattggtggcgtcgagtttgactacattcctgacactggcgatgtgcctttggtggcggattattcctcgtccattctttctgaaaaaatcgatgtgtcgaagttcggattaatttacgccggagctcagaaaaacattggccctgctggtttgtgcgtcgtaattgttcgtgaagacttattgggtgatgttattgctggcacgccaacgatgttcgactataaggtggctgctgataacgcatctatgtacaacactcctccaacctacagttggtacctggccggtcttgtattcgcctggctgaaggaacagggtggtgttgaggccatggcggagataaaccgtcgtaaagccgagaaactgtaccgctttatcgataccaatgatttttacgccaacccggtggcgttgaacaatcgctcccgtatgaacgttccatttacccttgctgatgatgcgttagataaggtgtttcttgaagagagcgaacaggcaggtcttatgaatctggctggacatcgcagtgttggcggaatgcgtgcca

SEQ ID NO: 247268 - DNA, 631 bp, Unknown
  Bacterial polypeptide expressing nucleotide sequence isolated from the Sargasso Sea
tggaactcagtttaaaaaatatccatcaatgaataatgataaatgttttttagtcgctgatatgagctcggatattttatcacaacctattgatatttctaagtttggtttgatctatgctggcgcacagaagaatatgggtcctgctggtgtaactcttgtgattattagatctgaccttgtagaaattaattatagagatattccaactatgatgaaatacagtacccatgtttcaaaagagtcaatgttcaacaccccgcctgtgtttagtgtttgtgttgtgaatgagactttaaaatggattaattcaattggtggtctgaatcaaatgaaaaccattaatgagagcaaggcttcattactttataatgaaatcgataggaataccttgttcaaaagcccggtaaatatagaagatcgttctaccatgaatgtgcctttcattttttatgataatgacttaaaagatgaggagtttttaaaattctgtgaaaaaagagacttaagaacattaaaggggcatagatctgttggaggattcagagcatctatatacaatgcgatgcccgaggctggtgttaaagctctaattgcagcaatgcaggaatacgagcatataaactcttag

SEQ ID NO: 247269 - DNA, 859 bp, Unknown
  Bacterial polypeptide expressing nucleotide sequence isolated from the Sargasso Sea
caatttacatctgttccattaaacttcactaaaaaaagttctattgtaagctattttaatactggactatgtcaaaaaaaggctattaatgctgcatcaaaatatgcctcagttaatgttgtcgcatcttcagaggaatcaaactatacatatgttcctagtactaatgaatggagagtagactacgatagcatttattttcattatgttatgaatgagacaatacaggggcttgcaatgcgagatccaatctcatctgagatacctgttatttgtgatatgtcttcatgcattcttagtgaagaagttgattttcataatcttgatcttgtatatgcgggcgctcaaaagaatattggccctgctggattaactttagtaatcataaaaaaagattttttagaaaaagctaatgaagatattcctgacattcttagttataaaaaaaatagtcaggcaggatctatgttaaacactccacctacttttgcatggtatcttgcaggaaaagtatttaaatggcttttaaaaaaaggtggagtaaaaagtattcaaaaagaaaatgaaaaaaaagcaaagctcctatatgactttatagattcctcttctttttactcaaatccagttgataaagaatatcgatcaattatgaatgttccttttcttcttgatgatcataatgctgattctttatttctcgaaaaggcagaaattaaaggcctcttaaatctaaaaggtcacagatcagttggaggtatgcgcgcaagtatatataatgctactccgtttgaagctgtggaggatttagtttctttcatgagtgattttgagagaagctatactgggaatggaaaataaa

SEQ ID NO: 247270 - DNA, 673 bp, Unknown
  Bacterial polypeptide expressing nucleotide sequence isolated from the Sargasso Sea
cgatagtatttattttcattatgttatgaatgagacaatacagggtcttgcaatgcgagatccaatctcatctgagatacctgttatttgtgatatgtcttcatgcatactgagcgaagaagttgatttttataaccttgatcttgtatatgcgggcgctcaaaagaatattggccctgctggattaactttagtaattataaaaaaagattttttagaaaaagctaacaaagatattcctgacattcttagttataagaaaaatagtcaggcaggctctatgttaaacactccacctacttttgcatggtatctggcaggaaaagtatttaaatggcttttaaaaaaaggtggagtaaaaaatattcaaaaagaaaatgaaaaaaaagcaaagctcctgtatgactttatagattcctcttctttttattcaaatccagttgataaaaaatatcgatcaattatgaatgttccttttcttcttgatgatgagaatgctgactctttatttcttgaaaaggcagaaataaaaggcctactgaatctaaaaggtcacagatcagttggaggtatgcgcgcaagtatatataatgctactccgtttgaagctgtggaggatttagtttctttcatgagtgattttgagagaagctatactgggaatggaaaataa

SEQ ID NO: 247271 - DNA, 771 bp, Unknown
  Bacterial polypeptide expressing nucleotide sequence isolated from the Sargasso Sea
taatttagccaaaaccggtgtcagtgcagattatatagtctcaggcgcctggtctaaggctgcggttgaagaagctgaaaaattcaccgcgttaaaagctcagactattcagtttaagcaagatggtcttcgtactttagtgccagcttcagattggcagctcaatgacaacgccagctttgtgcatttttgcccgaacgaaactgtggatggcatggagtttatcgacttacccagcaccaaagcgcctttagtggccgatctgtcatccaccatcttatcgcgtcagattgatgtcagccggtacggtgtgatttacgccggtgcccagaagaatattgggccttcaggtttaacccttgccatagtgcgtgaagacttgttacccgccaaaggcagtagcattccgagcgttctggattatcgtttggctgctgacaacgacagtatgtttaatacaccgcctacttatgcctggtatctggcaggactggtgttccagtggctgaaacgtcagggaggtgttgaggcgatgcaacagcgtaatgccctcaaagcacaaaccttgtatggttatatcgaccaaagcgatttttatcgcaatgacgtggcgccacagttccgttcatcaatgaacgtgccgtttttattggctgacgaaactctgaacgacttgtttgtcaacgaagccgaagccaatggtttgttggcattaaaaggccatcgtatggtcggcggtatgcgcgccagtatctacaatgcgatgccatt

SEQ ID NO: 247272 - DNA, 748 bp, Unknown
  Bacterial polypeptide expressing nucleotide sequence isolated from the Sargasso Sea
ttggatgtgagcaagagagcctataacttctgtgccggtcccgcggcgcttcctgaagcagtcctgcagcgtgcgcagggtgaactcctcgactggcatggaaaaggcctctccgtgatggaaatgagccatcgcagcgatgagttcgtgtctatcgccaacaaggccgagcaggacctgcgcgacctgctggacatcccatccaattacaaagtgctgttcttgcagggtggtgcgagccagcagttcgcccagttaccgctgaacctgctgcccgaaggcggcactgccgactatatcgacaccggtatctgggggcagaaggccattgaggaggcctcgcgctacggccatgtcaacgtggcgggcaccgccaagccctacgactacttcgctattcccggtcagaacgagtggaagctgaccaaggacgcggcctacgttcactacgtcgcgaacgaaaccatcggcggcctggaatttgattgggtgccgcaagtaggtgacgttccgctggtgtgcgacatgtcttcggacatcctctcgcgcccgatcgacgtgtccaagtacggcatgatctacgccggcgcgcagaagaacatcggcccgagcggcatcctggtcaatatcatccgcgaagacctgctgggccgtgcccgttccctgtgcccgaccatgctcaactacaaggtagcggccgataacggctcgatgtacaacacaccgccggcgtttgcctggtacctgt

SEQ ID NO: 247273 - DNA, 999 bp, Unknown
  Bacterial polypeptide expressing nucleotide sequence isolated from the Sargasso Sea
ataattttagcgctggaccctctattttgcctaaagaagtctttgatggctcttcaaatgctttacttgaatatcaagagacgggattatctataattgaaatgtcacacagatccaaagaggttggattgattattgaagaatcaaaatctcttgtgattgaattattaaaactcaatgagaatgaatatgatgttctttttttacaaggtggagcaagcttacaattttcaatggtcgcttacaatctactaaatacaaaagcaggatatttaaataccggaagttggtctgaaaaagcgatcaaagaagctaaactctttggagaagtcattgaattaagttcttctaaaagcaatgaatatcgaaatattccaaaagattttaatatcccagatgatattgactaccttcatatgacatctaataatacaatttacggcacacagtatcattcagttccaaaaactgatgctccaatagttgttgattcaagctcagatattttctctagagtatttgattattctttttatgacctaatctatgcgggagcacaaaagaatattggcccggcaggagttacattagttgttgttaaaaaagatatattaggaaaagtttcaagagaaattccctcaatgttaaattataatgttcatatcgaaaagaaaagtttgtttaacaccccccctgtttttgctatttacgcaactcttttaaatttgagatggattaaaaaacaaacaattgagtttatcgatcaaactaatcataagaaggctaaaatgctttatgatgagattgataataattcactatttaatggatttgcagatgttcaggacaggagtataatgaatgtgacttttgatcttgttgataatagtttatctagtacttttgatgctttgatagaaaaatcaaaaattagcggagttaaaggtcaccgatcaataggaggatatagagcttctatgtataatgcttaccgatgaa

SEQ ID NO: 247274 - DNA, 801 bp, Unknown
  Bacterial polypeptide expressing nucleotide sequence isolated from the Sargasso Sea
ttccggcggtgctacgttgcaaaatgccatgatacccctcaacttgtcacctgagggaggaacagctgactatatatatactggacattgggcaaagagatcaattagtgaagctaaaaaatatactaacatcaatatagcggcttcttctgaagataaagattttacttattttccaaaacagtcttcgtggaatttaagtaaaaattctgcttatgttcatataactcctaatgaaactattggaggtttaagatttaaggatctagaagattctgaagttccaatagttgctgactactcttccgcaatattgtctgaagttattgaagtgaatagattttctcttatttacggaggggctcaaaagaatataggcccagccgggcttggctttgcaattataaagaaagaacttttaggaaaagctcaatcaattactccaacaatgcttaattattctgaaatgcttgaagggaagtccatgtataacactcctccaactttcgcctggtacgttgctggtaaaatatttaaatggttaaaatctatgggcggggtttcagagatagaaaaactaaattataaaaaagctaagaagttatattcttttatagatcaatcagacttttatgagaacaagatcaataaagaagatagatcgataatgaatattccatttcaactaaatgatgaagatttaaactctagattcttagaagagtctagaaatgctggattactggcactcaaaggtcataggtctgttggaggtatgagggctagtatctataatgcaat

SEQ ID NO: 247275 - DNA, 600 bp, Unknown
  Bacterial polypeptide expressing nucleotide sequence isolated from the Sargasso Sea
ataatgataaatgttttttagtcgccgatatgagctcggatattttatcacaacctattgatatttctaagtttggtctgatctatgcaggtgcacagaagaatatgggtccagctggtgtaactcttgtgattatgagatctgatcttgtagaaattaatcatagagatattccaactatgatgaaatacagtacccatgtttcgaaagagtcaatgttcaacaccccgcctgtgtttagtgtttgtgttgtgaatgagacattaaaatggattaattcaattggtggtctcaatcaaatgaaaaccattaatgagagcaaggcttcattactgtatgatgagatagataggaataccttgttcaaaagcccggtaaatgtagaagatcgttctaccatgaatgtgcctttcattttttatgataatgatttaaaagatgaggagtttttaaaattctgtgaaaaaagaaacttaagaacattaaaggggcatagatctgttggaggattcagagcatctatatacaatgcgatgcccgaggctggtgttgaagctctaattgcagcaatgcaggaatacgagcatataaactcgtaga

SEQ ID NO: 247276 - DNA, 956 bp, Unknown
  Bacterial polypeptide expressing nucleotide sequence isolated from the Sargasso Sea
aatgagaaagtggaacttctgtgcaggacctgcagttatttcagaagcagtattagaggaagtaaagtctgaattattagaatttaagcaagttggtgcttccataatggaaataagccataggtcaaaaacattcatggaggtagcagaacaggcaaagaatgatttggttgatatattaaaaattcccaaaaattatgatgtattatttcttcaaggtggagcaacacatcaattctcaatggtgccttataactttggccacaataatgggcaagctgactacgttttgtcaggcacatggtcaaaaaaagcaatagctgaagcatcaaaaattaccaaggtaaatactattgcttcttcagaggcaaaaaatttttcatatgctccagatccaaaacattggagagttgatcaaaattccgcatacgttcattactgtccaaatgaaactattcagggtgtcgcaattcatgagcctccagatataaataaacccattatttctgacgcctcctcagtaatattgagcgaacccctcgatgtaaataaattttcattaatttatgcaggagcacaaaagaatattggacctgcaggacttaccatagttattattgacagagattttatggaactaggaaaccaacatataccaaaaattttaaaatattctgaacattcaagatcaaattcaatgcttaatactcctccaacattcgcttggtatatggctggaaaagtttttaaatggataaaacaatgcggaggacttgaatactttagggaacaaaatcatttaaaagcgtctaaattatatgaatttgttgacaaatcaagtttttatttaaataacattgacattaaaaacagatcaataatgaacgttacattctttctcgaaaatgatgaattaaatagcgcatttctactagaggctgaaaaaatggattttt

SEQ ID NO: 247277 - DNA, 509 bp, Unknown
  Bacterial polypeptide expressing nucleotide sequence isolated from the Sargasso Sea
aggtgcccaaaaaaatattggaccagctggattaactttagtaataattgaaaaagaatttatgcaaaaagataatagtgatttaccaaatctcttaagatattctcagcatgcaagatcagaatctatgctcaatacaccaccaacttttgcttggtatatggcaggtaaagtctttaaatggataaaaaaatctggtggattgaaattctttaaagatcaaaataatgccaaggcatcaatgctatattcttatattgataattcatccttttataacaattatgttaattttgaaaacagatctaagatgaatgttgtctttaacttatcagacgatgcacatgacgcaaaatttttaaccgaatcaaatgaaagggggctattaagtcttaaaggacacagatcagttggaggaatgagagcaagcatatataatgcaatgcctttggagggggttaaagaattaataaaatttatggattattttgaatctaaatatggatagt

SEQ ID NO: 247278 - DNA, 349 bp, Unknown
  Bacterial polypeptide expressing nucleotide sequence isolated from the Sargasso Sea
tatggccggaaaagtttttaagtggataaaaaagaaaggaggacttgaattttttaaacagcaaaattattcaaaatcatcaaaattatatgaatatattgatagttcagatttttattcaaataatatagatattgaaaatagatcaattatgaatgtcacattttttcttgaaaatgatgaattagattctccattcttattacatgccgaagaaaatggtcttttaaacttaaaaggacatagatcagttggaggaatgagagccagcatatataatgcaatgcctttagagggggttgaggaacttataaagtatatgaaatactttgagtcaaaatatggttaa

SEQ ID NO: 247279 - DNA, 803 bp, Unknown
  Bacterial polypeptide expressing nucleotide sequence isolated from the Sargasso Sea
ggcagctattcctgaggaggttttacaggaagctcaagctgaaatgctcgaatgggaaggctcaggtatgtcagttatggaaatgagccataggtcttctgaatacacagatatagcaaataaagcccggcaagatttaattgatttattgaaagttccaaatgattatcaggtgctttttcttcagggtggagcaaccttgcagttttctatggtccctatgaattttgggttacagggagtagctgactatgttatatctggaagctggtcaaaaaaggctatttatgaagcttctaaactagttgatacaaatgttgtttgtacttccgagccatctaattttaataatgtgccaaacgagactagttggaattgcacagaaaatgccgcttatttacactatgttgctaatgagacaattcaaggaaatgcattacatattcctccaatgacaaatgcaccattgatatccgatatgtcgtccgtaattttgagtgaaccaattgacatatcaagattttcattaatttatgcaggcgctcagaaaaatatcggtcctgctgggttaactatttgcatcataaaaaatgactttttaaaaactgctactgctgagttaccaggcatgcttcaatatgctaagcacgcagatgcagattctatgtttaatacaccacccacctttgcttggtatctttctggcaaagtttttgcttggttaaaaaataaaggaggcttagattcaattggagaaattaataagctcaaggctaaaaaattatatgattttatagacaatt

SEQ ID NO: 247280 - DNA, 796 bp, Unknown
  Bacterial polypeptide expressing nucleotide sequence isolated from the Sargasso Sea
atgaagcaaatatataactttagcgctggtccagcttgtctaccaaaggctgctattaaaggtgctgaggaggcgataaaaaactttcaggacaatggtattagccttttagagatgagtcacaggtctactcctgttgttaatctttttaaagagacaacaaataatgtcagagaccttcttgaaattccagataattatgatataatctggttacaaggaggtgcatcaacgcaattctctatggttccgatgaatctacttcctgaaaatggttatgcagactatattgatacaggatcatggtctgcaaaggctatcgtagaatgcaagagagtaggcggggttaatattataggaagctccaaagattcactgtactcatacataccaaaagatttaatacaatcgggaaaatcctcttatctccatataacgagcaataataccatctatggaactcagtttaaagaatatccattagtcaataatgataaatgtttcttagttgctgatatgagctcggatattttatcaaagcctattgatgtttctaagtttggtttgatctatgcaggtgcacagaagaatatgggccctgctggtgtaactcttgtgattattagatctgatcttgtagaaattaattatcgagatattccaactatgatgaaatacagcacacatgtttcgaaagattcaatgtttaacaccccgcctgtgtttagtgtttgtgttgtgaatgagacactaaaatggattaaatcccattggtggtcttcatcaaatgaaaacc

SEQ ID NO: 247281 - DNA, 835 bp, Unknown
  Bacterial polypeptide expressing nucleotide sequence isolated from the Sargasso Sea
gttccctataatttttggacataataccaaagaggcagactatgttttatcaggttcttggtctaaaaaagcaatctcagaagcttcaaaaataattaaagttaatactattgcatcatctgagggcaagaactttacctatgcaccagatccaaacgattggaaagtttcagaaaaatctgcatatttacatttttgtccaaatgaaactattcaaggagtagcaattcatgaaccaccaattattgataaacctctcatatcagacgcatcttctgtaatcttaagtgagcctttagatgtttcaaagttttctttaatttatgctggagctcaaaaaaatattggaccatcaggtttaacaattgtaattatagaccgtgaatttatggaatatggagatcaaaatatacccaatattcttaaatattctgaacactctaattctgattcaatgcttaatacacctcctacatttgcctggtatatggcaggaaaagtatttaaatggataaaagattctggaggcttagattattttagtattcaaaataataaaaaagctagtgagttgtataaatttattgatgaatcttcattttattccaacaatatagatataaaaaatagatcgattatgaatgttactttttttcttgcaaatgatgatcttgataagacattcttgtcaaatgcagaagaaaacggattattaaacctaaaaggccatagatcagttggaggaatgagagcaagcatatataatgctatgccctttgagggggttgaggaattgattaaatttatggaatattttgaatcaaaatatggatag

SEQ ID NO: 247282 - DNA, 715 bp, Unknown
  Bacterial polypeptide expressing nucleotide sequence isolated from the Sargasso Sea
tgtctaccgaaagctgctattcaaggtgccgaagaggcgataaaaaactttcaggataatggaattagccttttagagatgagtcacaggtcagtacctgttgttaacctttttgaagagacaacaaataatcttaggaatctccttaaaatcccagataattatgatataatctggctacaaggaggcgcatcaacacaattctctatgattccgatgaatctcctacctgtgaacggttgtgcagactacattgatacgggatcatggtctgcgaaggctatcgtagaatgtaaaagggtaggtagggtcaatattattggcagttctcaggattctctttatacatatattccaaaagatgctttaccaatagaaggctcatcctatctccatattacgagtaataataccatttatggaactcagtttaaagaatatccatcgataaataatgatgaatgttttttagtcgccgatatgagctcggatattttatcacaacctattgatatttctaagtttggtctgatctatgcaggtgcacagaagaatatggggccagctggtgtaactcttgtgattattagatctgatcttgcagaaattaatcatagagatattccaactatgatgaaatacagtactcatgtttcgaaagagtcaatgttcaacaccccacctgtgtttagtgtttgtgttgtgaagagacata

SEQ ID NO: 247283 - DNA, 837 bp, Unknown
  Bacterial polypeptide expressing nucleotide sequence isolated from the Sargasso Sea
tctggttacaggaggcgcatcaacacaattctctatggttccaatgaatcttcttcctgagaatggttgtgcagactacattgatactggatcatggtctgcgaaggctattgtagaatgtaagagggtaggttcggtcaatattattggcagttctcgggattctctttatacatatataccaaaagatgcttttccaatagagggctcatcctatctacatatcacaagtaataatacaatttatggaactcagtttaaagaatatcctacgactaatgataaatattttttagtcgccgatatgagctcggatattttatcaaagcctattgatgtttctaagtttggtctgatctatgcaggtgcacagaagaatatgggtccagcaggtgtaactcttgtaattattagatctgatcttgcagaaattaattatagagatattccaactatgatgaaatacagtacccatgtttcgaaaagttcaatgtttaacaccccgcctgtgtttagtgtttgcgttgtcaatgagacactaaaatggattaaatccattggcggtcttcatcagatgaaaactattaatgaaagcaaggcttcattactgtatgatgagattgataggaataccttgttcaaaaacccagtggtttatgaggatcgctctaacatgaatgtccccttcatttttaataataataatctaaaagatgaggaatttctagaattctgtgaaaaaagaggtctaagaacattaaaagggcatagatctgttggaggattcagagcatctatatacaatgcgatgcccgaggctggtgttgaagctctaat

SEQ ID NO: 247284 - DNA, 553 bp, Unknown
  Bacterial polypeptide expressing nucleotide sequence isolated from the Sargasso Sea
tgcggtgccaagatcgacgtttcggagcacgacctgatctacgctggtgcccagaagaacctcggtccgagcggagtgaccgtggtcatcctatcgccgtgggcgtctagcaggcgcaaggaagggctgcccacaatgctggactatcagacgcatatctcgaagggatcgatgttcaacacccccaacacgttcgggattttcgtcctggacagggtcctggcctgggtcgagaggaacggagggctagagggcgccatagggaggaacagcgagaagtcgggagttctgtacgacatactcgactccagcgacttctggaggccgcatgccgactccggctgcaggtcgatgatgaacgtgacatggaggctggctgatgagagtctggagcaggtcttcctggaggaggccgtagacagcgggatgggcggcctgaaggggcaccgtagcgtcggggggatcagggccagcctgtacaacggatgccccatagagagcgtggaagcgctcgcatccttcatgacagacttcgagagtcgccacggatgag

SEQ ID NO: 247285 - DNA, 781 bp, Unknown
  Bacterial polypeptide expressing nucleotide sequence isolated from the Sargasso Sea
accggagcatgggctaaaaaagctgcaaaagaaggcggatttgttggcaatagcaaaataatcgcatcctctgaagataaaaactttaactacataccaaaaaattattctcttgacaatagtttagattatttccatgtcacttcaaacaacaccatttttggaacgcaattgaaaagtttacctgaaacaaatgttcctattgtgtgtgacatgtcttcagatattttctcaaaaaaagtaactatttcaaattatgatctaatttacgctggagctcaaaaaaacatgggtcctgcaggaactactctgtatattgtcaaagattcagttcttgaatctaatgctgttccaattcctaccatgctcaatttaaaaacgcatgtagacaaagattccatgtttaataccccacctgtatttgctatttatacttcaatgcttacattgagatggttgaaaaaaaatggcggaatcgattggatagaaaagttaaatcaatctaaagccgatttaatttacaatgaggttgatagaaactcactctttacaggtactgcaaatattgaagacagaagtaacatgaatgcaacatttgacctaacaaatcaagatattaaaacagaatttgatcaacttttatcagaaaataacataagtggactaaagggacatagatcagttggtggatatagagcatcaatgtacaacgctttacccttagaaagtgtagaagtactagtaaactcaatgaaggaattagaaaataaaaaaggataaa

SEQ ID NO: 247286 - DNA, 448 bp, Unknown
  Bacterial polypeptide expressing nucleotide sequence isolated from the Sargasso Sea
atggagctagaaaatgaaaatttaccgaatatattaagatactccaaacactcagaatctgattctatgttaaacacgccaccaacctttgcatggtatatggcagggaaagttttcaagtggataaaaaaatcaggtggtttagagtttttcaaagaacaaaatcatttaaaagcatcaactctttataactacatagacaactcagaattttattcgaacccagttaagatagaaaataggtctattatgaacgttccttttatacttgctgatagtgatctagatagcctattcttgaaagagtctgaagaaaacggattgttaaaccttaaaggccatagatctgttggcggaatgagagcaagtatatataatgcaatgcccttggagggaattaacgagcttgtagacttcatgaaagtctttgaagctaaatatggctaaa

SEQ ID NO: 247287 - DNA, 1090 bp, Unknown
  Bacterial polypeptide expressing nucleotide sequence isolated from the Sargasso Sea
catgagcaaacagatttacaacttctgcgccggccccgccatgttgccggtcgaagtcatggagcgcgcccagcgcgaattttgtaatttccaggggctgggagcctcggtcatggagctttcccaccgcggcaagccctacatggcggtcgccgccaaggccgaagccgatctgcgcgagttgctggcggtaccggacaactacaaggtgctgttcatgcacggcggcggccgtggccagttctccgccgtgcccatgaacctgctcggcggcgccaacaagaaggctgactatctgctgaccggtgtctgggctgcgagtgccgtggacgaggcgcgcaagtacggcgatatccagacctttgacggggtggctaagagtgccgagggcatctcccacctgctgccgaccccggcgtttcgcgccgatgcggcctatgtgcactactgcccgaatgaaaccatcgacggcatcgagatgtttgacatcccggcaaccggtgatgtgccgctggtggcggatctctcctccaccatcctctcccgtcccatcgacgtgagccgcttcggcatcatctatgccggtgcccagaagaatatcggcccgtcggggctggccatcgccatcgtgcgcgacgatctgctgaaccaggcccgcgccgatgtgccgtcgatcttcgactaccagctcaccgccaagaacgactccatgttcaataccccgcccacctacgcctggtatctggccgggctggtgttcgagtggctgaaagaacagggtggcctcgcggcgatggaagcgcgcaacaaggagaaggccgatttcctctacggctatctcgatcagtcgagcttctatggcaaccaggtggatgccagctgccgttcgcggatgaacatcccgttccagctgaaaaatgccgaactggacaagctgttcctggccgaatcggaagccgccggcctgctggcgctcaagggacaccgcatcgtcggtggcatgcgtgccagcctctacaatgccatgccgctggaaggggtgaaggcgctggtcagctttatggacggctttgccaagcgccacggctga

SEQ ID NO: 247288 - DNA, 790 bp, Unknown
  Bacterial polypeptide expressing nucleotide sequence isolated from the Sargasso Sea
ttgtcgggctcatggtcaaaaaaagcaatttctgaagcatcaaagataataaaagtgaacacaattgcatcatctgaagctaaaaattactcttatgcccctgatccaaaaacttggaagatatcagaaaaatctgcatatgttcattattgtccaaatgagacgattcaaggagttgcaatccatgaagcacctaatgtaaataaacctattatttcagatgcatcttcagtaattttgagtgagcctctagatgttagtaaattctcgttaatatacgcaggtgctcaaaagaatattggacctgctggcttaacaattgtaattattgatagagacttcatggaattgggaaatcaaaaaattccaaatattctgaaatattctgaacattcaattgcagaatcaatgttaaatacaccccctacatttgcatggtatatggctggaaaagtttttaaatggataaaaaagaaaggaggacttgaattttttaaacagcaaaattattcaaaatcatcaaaattatatgaatatattgatagctcagatttttattcaaataatatagatattgaaaacagatcaattatgaatgtaacattttttcttgaaaatgatgagttagattctccattcttattatatgctgaagaaaatggccttttaaacctaaaaggacatagatcagttggaggaatgagagccagcatatataatgcaatgcctttagagggggttgaggaacttataaagtatatgaaatactttgagtcaaaatacggttaac

SEQ ID NO: 247289 - DNA, 784 bp, Unknown
  Bacterial polypeptide expressing nucleotide sequence isolated from the Sargasso Sea
cttgtctaaaggtgccgtgacgaaagcaaacaaatacaaccacgccaaagtggtgggtgaagtgtctgaaaaagacggctgtcactacgttgcgcagcctcagttgagcgatattgatcaatctgccgcgtattaccatttctgtccaaatgaaaccgttgacggaatcgcttttgattggctaccagagtcgggcaaggttccgctggtttctgatatgtcttcgactatattgtcgcagccgttagatgtagcaaagcatggcgttatatacgctggggcacaaaagaatatcggcccaagcggcttatcagttgttattgttcgcgaagacctggttggcaaagcacgtaaagaaacgccctctatcttcgattatgcattagcggcaaagtctgactctatgtacaacacaccgccaacgttctcatggtacttagcggggcttgtatttgaatggcttaaagatatgggcggcgttgacgctatggctaaacgcaatgctgaaaaggcggcgttattgtattcagctatcgatagctctgacttctattcaagtaaagttcaccctgacaaccgttcaaaaatgaacgtgccgtttcatttagccaatgctgaacttgacggattgttccttaaacagtcacaagaagcagggttacttgctcttaaagggcatcgttcagtagggggcatgcgtgccagtatttataatgcaatgccagtagagggcattgttgcgctagttgaatttatgcgcgaatttgaaagagtgaatggataa

SEQ ID NO: 247290 - DNA, 1039 bp, Unknown
  Bacterial polypeptide expressing nucleotide sequence isolated from the Sargasso Sea
aatgaggaagtggaatttttgtgctggccctgcagcaattcctgaagaagtattagcagaagcgcaaaacgaacttttggagtggggtctctctggttcttcagtcatggaggtgagtcatcggtctgatttatttgctgaagttgcaacctcttcaactaaagatataaaagctcttttaaatattggagacgaccatgaagttctttttctgcaaggcggagcaactctccaatttacatctgttccattaaacttcactaaaaaaagttctattgtaagctatttaaatactggactatggtcaaaaaaggctattaatgctgcatcaaaatatgcctcagttaatgttgtcgcatcttcagaggaatcaaactatacatatgttcctagtactaatgaatggagagtagattacgatagtatttattttcattatgttatgaatgagacaatacaggggcttgcaatgcgagatccaatctcatctgagatacctgttatttgtgatatgtcttcatgcattcttagtgaagaagttgattttcataatcttgatcttgcatatgcgggcgctcaaaagaatattggccctgctggattaactttagtaatcataaaaaaagattttttagaaaaagctaatgaagatattcctgacattcttagttataaaaaaaatagtcaggcaggctctatgttaaatactccacctacttttgcatggtatcttgcaggaaaagtatttaaatggcttttaaaaaaaggtggagtaaaaagtattcaaaaagaaaatgaaaaaaaagcaaagctcctatatgactttatagattcctcttctttttactcaaatccagttgataaagaatatcgatcaattatgaatgttccttttcttcttgatgatcagaaagctgattctttatttctcgaaaaggcagaaattaaaggcctcttaaatctaaaaggtcacagatcagttggaggtatgcgcgcaagtatatataatgctactccgtttgaagctgtggaggattaa

SEQ ID NO: 247291 - DNA, 1081 bp, Unknown
  Bacterial polypeptide expressing nucleotide sequence isolated from the Sargasso Sea
aatgactagcagaaaatataattttggggctggtcctgcaactatgcctacagaagttctgttagaagttcaggaagaactactagattggaatggaatgggtatttccgtaatggagattagtcatcgcagtcccgagtttacgaagatagcagaggaagcagaatctgattttagagatttattatctataccagaaaattatgcagttttattcacacatggtggtgcttccttacaaaatgcgatgatacctttaaatttatcaaaacaagggattgttcagtatgtagattcaggttattgggcttcaaggtcaataaaagaagcatcaaaattttgtgaagttggtatagctgcttcttcaaaggataaagattattcgtattttccttctcaagaaagttggcaaatagacaaaacagcaaattacatccatataacgcctaatgagactattggtggggtggctatgaggtcatttaatgatacgacaatacctttagttgctgacttttcttctagtattctttcagagaatcttgatgtttctaaatttggtcttatttatggtggagcacaaaagaatataggcccttctggattaggttttgtaattttgaataaagatctaataggccatgcaatggatggaactccatcaatgctagattatcaggtcataaatgaaggaaagtcgatgtttaatactcctcctacttttccttggtatgtagctggaaaagtattcaaatggttaaagtctcttggaggagttgatgagatatctaagattaatgtaagaaaagccaataagctctatgaattcatagataactctgatttttattcaaataatatccaaaaagattcaaggtctattatgaatattcctttccttcttaggaatgaagacttaaatgaaagtttccttcaaaattctaaagaagcaggtcttttagctttaaagggtcatagatctgttgggggtatgagagcaagtatttataatgctttacctgaagaggctatagatacacttattgaatttatgtcttcatttgaaaaaaaggcagggtaa

SEQ ID NO: 247292 - DNA, 1069 bp, Unknown
  Bacterial polypeptide expressing nucleotide sequence isolated from the Sargasso Sea
tatgagcaaaaaaattcacaactttaatgctggaccatcagtattacctaaggaaattttcaaaaaaacatctgaatcaatagttaatcttgatggatctggattgtcaattcttgaaatctcccatagaagtaatgatttcaaaagtattttgagtgaagctcaggaattggttcttaatattagtaatcttgattcaaacgaatattcttgtcttttccttcaaggtggagcaagcactcaatttttaatggttgcttataattttctatataatcaagcaggataccttaatacgggcagctggtctgataaggctataaaagaggctaaacattttggaaatgttaccgaattagcatcatcgaaagacaaaaattacaattatattcctaaagattatataattcctactaatctagattatatacatattacaactaacaatactatatatggaacccaaataagttcattctcaaaatttgatcagacattagttgcggatatgagctcagatatattttcaagagaaattaattattctgcttttgatttattttatgcaggtgcacaaaaaaatattggacctgctggagctacgatagtggtaatcaaaaatcaaatgattgaaaaaataaatagagaggtgccttctatgcttaactataaagttcatatagaaaaagaaagttcttttaatacgcctcctgttttttcaatatatgcatgcttaattaatttaagagagatcaaatccaaaggattaaaaaatatcgaattagaaaataaagctaaagcagagcttttatataaggagattgacaacaactcatgttttgatggatttgcagaaacagaagatcgaagttatatgaatgttacgtttaatctaaatgatgagaataactctgagatatttgaaaaactatgtaaagagaaaggaattattggtgttaatggtcacagatcagtaggtggttacagagcttctttatataatgcacttaaaatagatagtgttgaggcacttatagactgtatgaaaaaactagaatctttaatttaa

SEQ ID NO: 247293 - DNA, 1087 bp, Unknown
  Bacterial polypeptide expressing nucleotide sequence isolated from the Sargasso Sea
tatgaaaaaaatatataactttagcgctggccctggaacacttcctcaagatgctctaaatgcggcctctcaggctatgctagagtatgaggaaaatggaataagtattttagagatgagtcatcggtctcagcaagttgtggaattaatgaaaaatactacggacttagctagagagcttttatctgttccaaataattttcatattttatggttacaaggaggcgcgtctacacaattctctatggctccaatgaatttgcttcctaataataaaacagcagattatacagataccggtttgtgggcagcaaaggctattagtgaggcaaaagcatttgggtcaatcaacatcatatcttcgactaaagaaagtttatataatcatatatataaagatttagaacaaacacctaatgcaatttatatgcatatcacaagcaataatactatttatggaacgcagtggaagtcttttccaaatacattaaatccagatggatatattattgcagatatgtcatcagatatttttagtagaaaaattaattttgacccttttggtttaatttatgctggtgcccaaaaaaatatgggtcctgcaggagtaacaatggtaattatacgagatgatattcttggcaaagttaatcgtcaaattccgactatgcttgattataatacacatattaataaacaatcagcatttaacacgccgcctgtatctgcaatatttgtagttaataaaaccttaagctggttaaataagttgggtggagtagataaggtagaaaatataaatagaattaagtcggaacgactttatcatgagatagaaagaaattctatttttacatgtcccgtaaataaagaggatagatctgaaatgaatgttccatttattttgactgataatggtgatgaaaatgaatttttgaaattttgcgctgatcgaggacttttagcgctaaaaggccatcgatcagttgggggatttcgtgcttccatttataatgcaatgcctatagatggaatagatgctttaatcttagctatgcaagattatgaatcgcatcattctaaatag

SEQ ID NO: 247294 - DNA, 1084 bp, Unknown
  Bacterial polypeptide expressing nucleotide sequence isolated from the Sargasso Sea
gatgcgcgtctttaatttctccgccggccccgcggcgatgcccgaggaagtgctgcgacaagcggccgacgaaatgctcgactggcacggcagcggcatgagcgtgatggagatgagccatcgcggcaaggaattcatgtcgatccacgaggccgcgctgaccgacctgcgcgacctgctcggcgtgccggccagtcaccggatcctgttcctgcagggcggcggcatcgcggaaaacgcgatcgtaccgatgaacctgctcgggtcgcgcacgacggccgacttcgtcgtcacgggctcgtggtcgcagaaatcgttcaacgaggcgaggaaatacggcacgccccatctcgccgcaaccggcaagacggaagacggcttcacgcgtgcgcccgcgcgcgccgaatggcagctgtcggacgatccggcctacgtgcatctgtgtaccaacgagacgatcgacggcgtcgagacgttcgagattcccgatctcggcgacgtaccgctggttgctgatgtctcgtcgcacatcctgtcgcgtccgatggacgtcgcgaagtacggcgtgctgttcggcggcgcgcagaagaacatcgggatggccggcgtgacgctcgtgatcgtgcgcgaggatctgctcgaccgcgcgctgtcgatctgcccgtccgcgttcgagtggaagaccatcgcggcgaacaactcgctgtacaacacgccgcccacctacgcgatctatatcgcgggcctggtgttccagtggctgaagcggcagggtggcctcgaagcgatcgaggcccgcaatatcgaaaaagcgaagctgctctacgacacgatcgatgcgagcagtttctatctgaacaaggtcgagccggcagcacgttcgcggatgaacgtgccgtttttcctggccgacgaaacgcgcaacgaagacttccttgccggcgcaaaggcgcgcgggctgctgcagctgaagggccacaagtccgtcggcggcatgcgggcgtcgatctacaacgcggtgccgctcgagggcgtgaaagcgctcgtcgagtacatgaaggacttcgagcagcgcggcgcctga

SEQ ID NO: 247295 - DNA, 1066 bp, Unknown
  Bacterial polypeptide expressing nucleotide sequence isolated from the Sargasso Sea
catgaaaaaacataattttagtgctggtccaagtatactttcaaatgaagtgtttagtaaagcttcagagtctgttttgaacttaaataatattggcctctctctcattgaaatttcacacagaagtaaagatttcgtagctataatggaagaagctagagaacttagtatcgatctgctaggtctaaaagctgaagattacacctcgttatttttacaaggtggtgccagtactcaatttttaatgatagcatataattttttgagcaatgatgcaggatacattaatacaggctcttggtctgtaaaagctatgaaagaagccaagctttttggtaaagttcatgaattagcctcatcagcagataaaaacttcaactacatacccaaacaatttaacaatcataattcacttgactatttacacataacatcaaataataccatttttggaacacaatatcatcacattccagaaactaattcgaatttatttgctgatatgagctctgacattttctctagaaatattaattactcgaaattttctttgatatatgcaggtgcacaaaaaaatattggtgctgctggcacaacattggttataattaaaaagagtttattagataaaatatgtagagaagttccctcaatgctgaattataaggttcatgtagacaaagacagtatgtttaatactcctccagtattcgcagtttacacatgtttgttaagtcttaaatggctagcaaacaatggtggtattgatgaaattgagaaaaaaaacattctaaaatccaagctattatatgatgaaattgacagaaactcacaatttgaaggttttgcaaatattgatgatcgaagtattatgaatgttactttcaatctagttgatgaatcaaaaaaggaagtatttgacaaattatcacaacaatcaaacatctcaggaattaatggtcacagatccgttggtggatacagagcctcaatctacaatgctatgcctaatgaatctgtacaaacccttgtggatgtgatgaaaaaatttgaaaatatcatatga

SEQ ID NO: 247296 - DNA, 676 bp, Unknown
  Bacterial polypeptide expressing nucleotide sequence isolated from the Sargasso Sea
tttggatgcagagtctgcatatgttcactacacacctaatgaaacaataggcggactttgtttaaggactctcgaaagttcctctgttccagtagttgcagactattcctctggcattctatctgaacccattgagatagataatttctctttgatatacggcggagctcaaaaaaatataggaccttcaggtttgggttttgtgattattaaaaaagagctcttaggaaatccgcaacctataacgcctaatcttctcaactacacattaattcatgaaggagaatctatgtcgaatacaccacctactttcgcatggtatgtagctggcaaggttttcaaatggcttaagtcgatcggtggcgtagaggctatagctgaaatcaataatagaaaagcaacaaagctttatgactttattgacaattctgatttctataagaatgaaataaaaacagagaataggtcgataatgaacgttccttttctgttgaacaatgaggaccttaattctctatttttagaggagtctaatcaagctggcttattggctctcaaaggacataggtctgtcggaggaatgagggcaagtatctataatggtttgcctgaagagggagttgatgcacttttaaattttatggaatctttcgaacaaaaatactccaatgcctaa

SEQ ID NO: 247297 - DNA, 421 bp, Unknown
  Bacterial polypeptide expressing nucleotide sequence isolated from the Sargasso Sea
agtattcttaagtactcagagcattctaaatttgactcaatgcttaatactcctccaactttttcttggtatgttgctggcaaagtatttaaatggataaaaaaatgtggagggctagatttttttaaagaacaaaatcacttaaaagcttctaagttatatgattttattgataaatctggtttttactctaatccggttaatattaaaaatcgatccataatgaatattccattcactctaagtgataacgagcttgattccactttcttaaaagaatctgaacaaaatggcttaataaatttaaaaggccatcgctcagttggaggaatgagagcaagcatatataatgctatgcccttagaaggagtagaagagttaataaaatttatggattattttgaaaaaaaatatggttaaa

SEQ ID NO: 247298 - DNA, 1078 bp, Unknown
  Bacterial polypeptide expressing nucleotide sequence isolated from the Sargasso Sea
atgagaaagtggaacttctgtgcaggacctgcagtcatttcagaagcagtattagaagaggtaaagtctgaattattagaatttaagaaaattggagcctccataatggaaataagccataggtcaaaaacatttatggaggttgctgaacaggcaaagaatgatttagttgatatattaaaaattcccaaaaattatgatgtattatttcttcaaggtggagcaacacatcaattttcaatggtaccctataactttggccataataatgggcaagctgactacgttttgtcagggacatggtcaaaaaaagcaatagctgaagcatcaaaaattaccaaagtaaataccattgcttcttcagaggcaaaaaatttttcatatgctccagatccaaaagattggagagttgatcaaaattccgcatacgttcattactgtccaaatgaaactattcagggtgtcgcaattcatgagcctccagatataaataaacccattatttctgacgcttcctcagtaatattgagcgaacccctcgatgtaaataaattttcattaatttatgcaggagcacaaaagaatattggacctgcaggacttaccatagttattattgacagagattttatggaactaggaaaccaacatataccaaatattttaaaatattctgaacattcaagatcaaattcaatgcttaatactcctccaacattcgcttggtatatggctgggaaagtttttaaatggataaaacaatgcggaggacttgaatactttagggaacaaaatcatttaaaagcgtctaaattatatgaatttgttgacaaatcaagtttttatttaaataacattgacattaaaaacagatcaataatgaacgttacattctttctcgaaaatgatgaattaaatagcgcatttctacaagaggctgaacaaaatggatttttaaatttaaaaggacatagatcagttggaggaatgcgcgctagcatatataatgctttgcctctggagggggtggaggaacttattaaatttatgacttattttgagtctaataatggctgaa

SEQ ID NO: 247299 - DNA, 323 bp, Unknown
  Bacterial polypeptide expressing nucleotide sequence isolated from the Sargasso Sea
aaaaaagaaaggaggacttgaattttttaaacagcaaaattatacaaaagcatcaaaattatatgaatatattgatagttcagatttttattcaaataacatagatattgaaaacagatcaattatgaatgttacattttttcttgaaaatgatgaattaggttctcaattcttattgcatgctgaagaaaatggccttttaaacttaaaaggacatagatcagttggaggaatgagagccagcatatataatgcaatgcctcttgagggggttgaggaacttataaagtatatgaaatactttgagtcaaaatatggttaat

SEQ ID NO: 247300 - DNA, 364 bp, Unknown
  Bacterial polypeptide expressing nucleotide sequence isolated from the Sargasso Sea
acttttgcctggtatgtagctggccgagtattccagtggttggagtctagtggtggcatttctgagatggaaaaaacaaataatataaaagctgaaaagttatattcttttatagaccaatcagaattttatgaaaacaatatcaataaagaagatcgatcaatcatgaacgttccttttcaactaaaagatgaagatttaaattcaatattcttggaaacgtctaaagatgcaggattgctagctttaaaaggtcacaggtcagttggaggtatgagggctagtatctataatgcaatgcctgaagaaggtgtagatgccttagtgagcttcatggcaacatttgagaaagagcgatcctgat

SEQ ID NO: 247301 - DNA, 1072 bp, Unknown
  Bacterial polypeptide expressing nucleotide sequence isolated from the Sargasso Sea
aatgaaaaataaggtacataatttcagtgcaggcccctcaatcctccctaatatagtttttgaaaaagcttcatcagcaataaacaatttcaataactctgggttgtcgatattagaaatttcccacagaagcaaagattttattgaagtattggaggaggcaagatctatttcacttgatattgcatcattaaataaagatgattattcttgtctttttcttcaaggaggtgcaagcatgcaatttttaatggtagcttataattttttaaataacaaagcaggttacgtaaatactggaagctggtcaacaaaagctattaaagaagcaaaaatgtttggagatgtatctgaaattgcatcttctgcagataaaaacttcaattatatacctaatttatcaactattaatgatgattttgattatgtccacatcacatcaaataatacaatatttggaactcaatttcattcattcccagaaactgcttctcctttatttgctgatatgagttctgatattttttcaagaaatattaatttttcaaaatttgatttaatatatgcaggtgctcagaagaatttaggtcctgctggggttactatggttttaatcaaaaaccaattattagatattattaaaagagatgtaccttccatgctaagctacaaggttcatatcgacaaggatagttcttttaatactccaccagttttttcaattttttctgtattgattaatttaagacttattaaatctgaaggtttagatagtatagagaaaaaaaattcagaaaaatctaagttgatatatgatgaaattgataggaataaatgttttattggattttcagacaataatgatagaagtcatatgaatgcaacatttaatctagcggatggttatgatgctgatttatttaaaagcatatgctctgataataatatttctggaattaatggacatagatccgttggaggtttcagagcttctatttacaatgcactagatattgaaagtgttaaaactctaataacttgtatgaaagaatttgaatcaaactataactaa

SEQ ID NO: 247302 - DNA, 1084 bp, Unknown
  Bacterial polypeptide expressing nucleotide sequence isolated from the Sargasso Sea
atgaaaagaatatataattttagcgctggccctggtatcttacctcaagatgcgcttgatgcggcttctgaggcagttatagattacaataataacggtataagcatccttgaaatgagtcaccgttctcagcctgtcgttgatttaatgaatgagacctcttttttggctagggaattactatcaatcccagataattttcatattttatggttacaaggaggagcttcaacgcaattttccatgattcctatgaatctacttccagatgaacaaactgcagactatacagatactggtttatgggctgcgaaggcaattgatgaagcgaaagtatttggagatataaatatagcttcttcatctaaagaatcattatatagactaataaataagaacttagggcaaacatctaaagctatttatttacatataacaagtaataatactatatatggaacacaatggaagaggtttccaaaggtcttaaatcctgaaggatttattgttgcagatatgtcatcagatatattcagtcgaaaaattgattttaactcttttggattaatttatgcaggggcacaaaaaaatatgggacctgccggagttactatggtaattattcgagatgatattataggtaaaatgaaaagacatattcctactatgttggattatagaacgcatattaataaaagttcagcatataacacacctccagtctcaacaatatttgtcgttaatagaaccttaaaatggttagataaaattggtggtataactgtgatagagaaaaaaaataaaattaaatcagataaactctatgaagaattagaaagaaattctgttttcacttctccaataagaaaagaagatagatctcaaatgaatgttccatttgtttttattgaagaaagagatgaaaatgaatttttgaaattttgttcaaataaaggtctaataaccttgaaggggcatagatcagttggtggttttcgtgcttctatttataatgcaatgcctatagaaggtgtagacgcattgatttctgcgatgcaagagtatgagtctattctatcttaag

SEQ ID NO: 247303 - DNA, 1081 bp, Unknown
  Bacterial polypeptide expressing nucleotide sequence isolated from the Sargasso Sea
atgctaaggaagtataattttggcgctggtccagcgactatgcctgaagctgttttaaaagaagtccaagatgaattattagactggaatggcctgggtctttctgtgatggaaataagtcatagaagtccagaatttattgagattgcaaaacaagcagaacaggattttagggatctattatctatctcagaagatttcgcagttttgtttacccatggaggagcaacgatgcaaaatgctatggttcctctaaatctcgctactcaggatggtaatgcagattatgttaacagtggtcactgggccaagcgctctattaaggaagctcagagatataccaatgtcaacattgcagcttcttccgaggaagaagatttcagattttttccaaaacaagagtcttggaagctctctgagaattcttcgtatgtacattacactcctaacgaaaccattggaggtttatgtttgaggtctattgaacattcagaagtgccaatagtggcagattactcttcaggtattctttcagagcctctcgatgtgagcaaattttctttgatttatggtggggcacaaaaaaacatcggcccttctggtcttggctttgtaatcataaaaaaagatttactaggtaatcctcaacccataacaccaaatcttttgaattacaccctcatacatgaaggtgaatctatgtctaatacgcctccaacttttgcttggtatgttgcaggtaaggtattcaagtggctgaaatctttgggtggagttgaagaaattgcaaagatcaatatcagaaaagcagataaattgtacagctatatagatggttcaaacttttatagaaacaatataaatactgaagatcgatctattatgaatgtgccttttttattagccaatgaagatctaaatgataaatttctagaacaatccaaagaagctggattattggctttaaagggtcataggtctgtaggaggcatgagggctagcatatataacggtcttccagaggaaggggtagatgcccttgtggactttatggaagtattttctaaagaaaattcttgat

SEQ ID NO: 247304 - DNA, 838 bp, Unknown
  Bacterial polypeptide expressing nucleotide sequence isolated from the Sargasso Sea
gatgataccaatgaattttaagcaccttacaggaactgctgactatgtaactactggttcttggacaaaaaaggcctttgaagagggctcaaaaataatggacattaaaaatatattctcttctgaagatagtaattatacaaatgcgccagatattgaggaattagatttatcagcaaatgcttcttatgttcattattgccccaacgaaacaatccaaggaaatgcaatacataaaactcctaaaatagataaaccattaattgcagatatgtcatctgtaattttaagcgaacctttagatgtaagtaatttttctttaatttacgctggtgctcaaaaaaacataggacctgcaggactaacaatagtaataattgaaaaagaattcatgcgcaacggtaatccggacattccaaatcttcttaaatattctgaacattcaaaatttgattcaatgcttaatacccctccaactttttcttggtatgttgctggtaaagtatttaaatggataaaaaaatgtggaggattggatttttttaagaaacaaaacaacttaaaagcctccaagctatacaattttatagataattctaatttttatacaaatccagttgaaacaaaaaaccgatcaatcatgaatatcccatttattttgagtaatgataagcttgaatcatcttttctgaaggagtctgatcaaaatggcctcttaaacttaaaaggacatcgttcagttggaggaatgagagcaagcatatataatgctatgcccttagagggggtagaagaattaataaaatttatggattacttcgaaaaaaaatatggctaa

SEQ ID NO: 247305 - DNA, 603 bp, Unknown
  Bacterial polypeptide expressing nucleotide sequence isolated from the Sargasso Sea
atatagcagactctgaagttcctatcgtcgcagattattcttcagccatattatctgaatctatagatgtaagtaaatttgcattaatctatgggggtgcacaaaagaatatagggcccgccggtctaggctttgcaattattaaaaaagatcttttaggagcggctcaatccattacacctacaatgcttaattattcagagatgcatcaaggcgcatccatgtacaacactcctccaacgtttgcttggtacatggctggaaaaatatttaaatggttgaaatctatgggcggaatttcagagatagaaaaattgaataatcaaaaggctaagaagttatattcttttatagatcaatcagaattttatcgaaacggaataaataaagaggatagatcgattatgaatattccgttccaattacgacaagaagatttgaatgaacaatttttaatagactcaagagatgcagggttattggcgcttaaagggcatagatcagttggaggtatgagagctagtatctataatgcaatgcctgaagaaggtgtagatgccttgatagacttcatggagctatttgaaaaagacaaatcttgat

SEQ ID NO: 247306 - DNA, 1081 bp, Unknown
  Bacterial polypeptide expressing nucleotide sequence isolated from the Sargasso Sea
tatggcaaggtcaataaattttgcggcggggccttcggcactgccaacagaagtgttggagcgtgctaaagccgagcttttagactaccagtatactgggatgtccatcatggagatgagccaccggggaagcgagtttcgcgaagtactggcgaaggcggaatccgattttagatcattgttggcaatctccgaagactatcatgttcttttcttgcagggaggggcgactgctcagtttgctgctgtgcccttgaatttagtaagagaacatagaaatacggattatctggatactgggtcatggtcgagaaaagctatcaaggaagctggtgctttttctgatgttcatacggtcgcgactagcgaagaagattcttatcatcacataccccctgaagatgagtgggatataagaacagaaacatcctatgtacacatttgctcaaatgaaactataggcgggttacagttcaaacagttcccaaagctagaagttccgttggtcgcagacatgtcttcagatatcctttctcgagagttagatattgaaaattttggagcaatttacgcgggcgctcaaaagaatattggcccagctggtcttgcaatagtagttgtacgaaaagatctcctaggattgaacaataactctatcccgtcttttttggattattccttgcaggccgaagccgattcgatgttaaacactccgcccaccttcacaatttacttagcaggactggtttttgactggctgcggagtaagggtggattgtcagaaattgaaaaagaaaacgagtacaaggcgggtttgatctatgaggttatcgagagaggggatttttattcttgtcctgtccatcgagcttttcgatcaactatgaatattcctttccgattgaaagttgaagagctagagccagtttttttggaaagcgctgagcatgctggtttgttcaatttaaagggccatagaagtgttggtggtatgagagcgagtatttacaacgctgttcctgtaagctgggtagaagaccttatcaagtttatgaacgactttgagaatgaatacggataa

SEQ ID NO: 247307 - DNA, 1078 bp, Unknown
  Bacterial polypeptide expressing nucleotide sequence isolated from the Sargasso Sea
aatgagaaaatggaatttctgtgctggtcctgcagtaatttctgaagaggttttagaagaagttaaatctgagttattagaatataacaactctggaacttctataatggaagtaagccacaggtcaaggttatattcttcagttgctgtagaggcaaaacaagacttaattgatattttaaatatacccaaaaattatgatgttttattcctccaaggaggtgcaacacatcaattttcaatggttccatataattttggtaacagttcaggtgaggcagattacattttgtcaggctcatggtcaaaaaaagcaatttctgaagcatcaaagataataaaagtgaatacaattgcatcatctgaagctaaaaattactcttatgcccctgatccaaaaacttggaagatatcagaaaattctgcatatgttcattattgtccaaatgagacgattcagggagtagcaattcatgaagcacctaatgtaaataaacctattatttcagatgcatcttcagtaattttgagtgagcctctagatgttagtaaattctcattaatatacgcaggtgctcaaaagaatattggacctgctggcttaacaatagtaattattgatagagacttcatggaattgggaaatcaaaaaattccaaatattctgaaatattctgaacattcaattgcagaatcaatgttaaatacacctcctacatttgcatggtatatggccggaaaagtttttaaatggataaaaaagaaaggaggacttgaattttttaaacagcaaaattattcaaaagcatcaaaattatatgaatatattgatagttcagatttttattcaaataatatagatattgaaaacagatcaattatgaatgttacattttttcttgaaaatgatgaattagattctccattcttattacatgccgaagaaaatggccttttaaacttaaaaggacatagatcagttggaggaatgagagccagcatatataatgcaatgcctcttgagggggttgaggaacttataaagtatatgaaatactttgagtcaaaatatggttaa

SEQ ID NO: 247308 - DNA, 1084 bp, Unknown
  Bacterial polypeptide expressing nucleotide sequence isolated from the Sargasso Sea
atgaagagtaagattgcaaatttcagtgctgggccagcagcaattccacaagaagttttacaagaagttaaaaatgaattactaaactataaaaatattggttcatcaattattgaaatcagtcacagagataaaactttcgttgatatcgcaaaccaagcaaaaattgatgttatagatttgcttaatgtgccgaatgattatgaggtgatttttcttcaaggtggtgccactttgcagttctcaatgattcctttaaatttttcatatcttggtaaagtggcaaacttcgctgaaattggatcatggtcatcaaaagctattaaggaagcaagtaatatttgtgaggtgaatgtatgcacctcatcaaaagataataattttacaaagatagaaaatttcgatgaatggaatatagttcaagatacttcaattgttcattattgtaaaaatgagaccatacaaggagtaagggtaaatcatgacatagagactaattatccactctttgttgatatgtcatcatgtcttttttcagaaactatagatattaaaaaatatgattttatatatgcatgtgcacaaaaaaactttgggccatctggaatcacattaattatcttaaagagagaattgctagaaaaatcaaataaagaccttccaaatattcttaaatatgatgctcatgcaaaagaaaattcaatgttaaataccccaaatacttttggttggtacgtggctggtaaaatatttagctggtacaagaaaaatggaggtgtaaaagaaatggaaaaaaatagtattaaaaaaacaaatcatctataccaaataatcgataattctgatttttatataaatcctgtattccaagagcagaggtcaatttgtaatgttgttttcacacttcaaaatgatgaactggagagcaaattcttatcaggtgctgaagaaaatggtttgttttatctcaaaggtcacagaagtgttggtggaatgagagcaagtatatataatcctcttgagtttgagcatgttgagcgcttagggcagtatatgattgattttgaaaaaaaatatggatgaa

SEQ ID NO: 247309 - DNA, 859 bp, Unknown
  Bacterial polypeptide expressing nucleotide sequence isolated from the Sargasso Sea
tggcgctactcatcaattttcaatgattgcttataattataaacatttaagcgggacagcagattatgtaacaacaggatcttggtctacaaaggcttttaatgaagcatcaaaaatttttgattcaaatgaaatttttagatcagatgaaagtatttgtacaaaagtacccaatatagaggaattaaaattatcaaaaaacgctgcttatttacattattgtcctaatgaaacaattgaaggagtagcatttcacgagactccaaaaattgatactcctctagtcgcagacatgtcttctgttattttaagtcaaccattagacgtaaataaattttcaattatttatgcgggcgcacaaaaaaacataggccctgccggcctaactattgttattattaataaagaatttatggagatgggtaatacgaatttacctaatattttgaaatattctgaacattcaaaatctaattctatgttgaacactccaccaaccttttcatggtatcttgctggtaaagtctttaagtggatgcttagtcatggaggcttagattattttgaaaaacaaaacaaattaaaagcatctatgctttacgattttattgataattcagatttttatgtgaatataattgatgctaaaagcagatcaatcatgaacgtaccctttatccttaaaaaaccgatgtatgaagaaaaatttttaaatgaagcatctaataatggatttttaaatttaaaaggacatcgttcggttggaggaatgagagcgagcatatataatgctatgcccttagagggagtaaaagagttaataaaatttatggattacttcaaatctaaaaatgggtga

SEQ ID NO: 247310 - DNA, 299 bp, Unknown
  Bacterial polypeptide expressing nucleotide sequence isolated from the Sargasso Sea
aatggaaaagcttagcattcaaaaatcatcccttctttacaacattattgattcgtctgatttttatttaaatcctgtaaatccaaaacaaagatctagatgtaatgttgtatttaccctcttagatgagaagttagagaagaaatttgttgatgaggcggattcagaagggcttaaatacttaaaaggtcataggtcagttggggggatgcgagcaagcatttataatgcaatgaagctttcctcagtagaagcacttgcaagttttatggaagaatttgagaaaaagtatggatgag

SEQ ID NO: 247311 - DNA, 541 bp, Unknown
  Bacterial polypeptide expressing nucleotide sequence isolated from the Sargasso Sea
attgaaaaccgtatataattttagcgctggtccagcagtattacatccttcagttatacgatccactgcagacgctgcaaataatttcaataatagcggtatgagtttgatggaaatgagccaccgctccaaaccagtagttgatatggtcaacgaaactgaagagctttcacgggaattgcttcaaataccaagagaatttgaagtgttgtttttacaaggaggcgcttctctgcagttctcaatgattcctatgaacttactaactaaagatgcccaagctgattataccgatacaggctcttggtctttcaaggctttaaatcaagcaaagttgtttggaaaagtgaatattgcctcttcatcaaggaccagtaattatagttttattcctaaggaaataaaccaattaactgaatcaatctatttacatatcactagcaacaacaccatatatggaacacaatggaaagaatttccaaagcctctcaatagttcagggtttttagttgcagatatgtcatcagatatctttagtcgc

SEQ ID NO: 247312 - DNA, 1057 bp, Unknown
  Bacterial polypeptide expressing nucleotide sequence isolated from the Sargasso Sea
ggccctgccgcgctgccgaccgctgtactgcaacgcgcccaggccgagatgctccactggcaaggcaagggcctctcggtgatggagatgagccatcgcagcgacgagtacgtggccatcgccagccaggccgagcaggacctgcgtgatctgctcgctgtgcccaacgactacaaggtgctgttcctgcagggcggtgccagtcagcagttcgccgagattccgctgaacctgctgccggaaggcggcgtggccgactacgtcgaaaccggcatctggtcgaagaaggccatcgaagaggcccgtcgttacggtgccatcaacgtcgccgccagcgccaaggcgcatgattacttcgccattcccgggcagaacgactggcagctgtcgaaagacgctgcctacgtgcattactgcagcaacgagaccatcggcggtctgcagttcgactgggtgccgcaggtcggcgataccccgctggtcgccgacatgtcttcggacatcctctcgcgttcgctggatgtttcgcagttcggcctgatctacgccggtgcgcagaagaacatcggcccgagcggtctggtggtggtgatcgtccgtgaagacctgctcggtcgcgcccgttccagctgcccgaccatgctcgactacaagatttccgctgataacggttcgatgtacaacaccccggcgacctattcctggtacctctccggcctggtcttccagtggctgaaggagcagggtggcgtcgaggccatggagcgcatcaaccgcgccaagaaggacctgctgtacaaggccatcgacgacagcgatttctacagcaaccccatcgcccacaacgcgcgttcctggatgaacgtaccgttccgcctggctgacgagaggctggacaaggccttcctcgctggtgccgatgagcgcggcctgctcaacctgaaagggcatcgctcggtcggtggcatgcgtgcctctatctacaacgccgttggcatggatgcggtcgaggcgctggtggcctatatggccgagttcgagaaggagcacgcctgat

SEQ ID NO: 247313 - DNA, 619 bp, Unknown
  Bacterial polypeptide expressing nucleotide sequence isolated from the Sargasso Sea
ggtgtagcaatccatgaaattccaaaagtagatattcctctcattgcagacatgtcctcagttatcttaagtcaacctttggacgtaaataaatttgcaattatttatgcgggcgcccaaaagaatataggtccagcagggttaactattgttattattaataaggaatttatgcaaatgggtaataagaatttaccaaatattttaaaatattctgaacattctaagtctaattctatgttaaatactcctccaactttctcatggtatctcgctggtaaagtttttaaatggatgataaaccttggaggtctagattattttgaagaacaaaataaattaaaagcttctttgctttatgattttatcgataattcagatttttacatcaatccaatagatacttcatgcagatcaatcatgaatgtgccttttgttcttgaaaactcgatgcttgaagaaaaatttataagcgaggcctcagataatggatttttaaatttaaaaggacaccgcttagttggaggaatgagagcgagcatatataatgctatgcccttagagggagtaaaggaattaataaagtttatggattattttaaatctgaaaatgggtaat

SEQ ID NO: 247314 - DNA, 1078 bp, Unknown
  Bacterial polypeptide expressing nucleotide sequence isolated from the Sargasso Sea
atgcggaaatggaatttttctccggggcccgcaacaattcctgaagatgttttattagaagttcaatcagaattattagaattcaataattctggtatctcaataatggaaatgagccataggactgagctctattcatctattgcatatgaggctaagaaagatcttatagaaattcttaatatacccgataattacgaagttttatttttacaaggtggtgctacgcatcaattttcaatgataccaatgaacttttctcatttacacggaaagcctgcatatataactactggaacttggacaaagagagcctttgaagaaggttctaaaatcactgaaatagatcaaatcttttcatcagaaaatgagaattttatttatgcacctcattttaaagatttaaaaattcctaaagatgcatcttatgttcactattgcccaaatgaaacaattcatggcgttgcatttgatcatattccaacaattagcaatcctctagttgcagatatgtcatcttcaatattaagtgaacccattgatgtgaataaattttctttaatttatgcttctgcacaaaaaaatattgggccatcaggattaacagttgtgattattaaaaaaagttttatgaagcaaggaaacaaaactttaactaatttacttagatattctgaacattcaaaacaagattctatgttgaatactcctccaacattctcttggtatgtggctggcaaagtgtttaaatggataaaaaaattaggcggacttgatcactttaaagagttaaatacattaaaagctttaaagttatatcgagttattgataattcagatttttatattaaccctgttcatattaataatagatctattgttaatattccatttgtattaaaggataaaaagcttgagccattatttttaaaagaatctactgaaaatggcttattaaatttaaaagggcactttacagttggaggaattagagcaagcatatataatgctatgcccttagaaggagttgaggatttgattaagtttatggattattttgaatctaaatatagttaga

SEQ ID NO: 247315 - DNA, 1081 bp, Unknown
  Bacterial polypeptide expressing nucleotide sequence isolated from the Sargasso Sea
atgactagggcatttaatttttgtgcaggtccagctgctcttcctgaagaagtcttgaaggagttacaagaagaaactttagattataaaaatcatggtttagcggttatggaaatgagccatagaagcaaagagtttgtatccatagcggagcaagcaaaacaggatttcattgatttattatctatacctgatgagtacgatgttttatttattcaaggaggcgccagtctgcaattttcaatgattccaatgaatctcggaattaagaaccaaaaactagattatttagaagtcggatcgtggtctaaaaaagctatagctgaagctaagaaatttcatgacgttaatatagccgcatcttcaaaagatatttcattcaaaaaatatccttcaataaatgattggaatattacagatgattcctcctacatacatatggtgatgaatgagacaattgaaggagttgcatgcaggtcgttaaatgatttaccagaaaaagtaatagtttcagactgttcttccaacatactctctgagccactagatgtaaaaaagtttggactcatttatgcaggcgctcaaaaaaatattggcccagctgggttagcaattgtaattattcgaaaagacttaattcaaaaaagagatgatcttcccgctttaatgagttatcagacatatgcagattcagaatcaatgtacaacacgcctccaacatttgcttggtatctttcaggtaaagttttttcttggcttaaaaggaatggtggccttaaatcaattgaagaaattaatctgagaaaagcaaaaaaactatacgattacatagacaacagtgatttttactacaacgatgtatctatcgagagtaggtctatcatgaatgttccattcttattgaacgatgattccctaaatgattcatttctcaaagaaagcgaaaaagaaggtttactgaatcttgctggtcatagatcagttggagggatgagagctagcatatacaatgctgtgccagaagaagctatagatgctctagtttcttttatggatgtatttgcaaataagtatggctaac

SEQ ID NO: 247316 - DNA, 509 bp, Unknown
  Bacterial polypeptide expressing nucleotide sequence isolated from the Sargasso Sea
tggtgcacaaaagaacattggtccttcgggcttatccatcgtgatcgtgcgtgatgatatgttgaaactgccgagtttaacccaatcatccatcatggattaccgtttagcagtagagcatgactctatgttcaacacgccaccaacctttgcttggtacttagcggctgaagtatttgcctggcttaaatccttaggtggtgtggccagtatcgcgaaagtcaatcagcaaaaagcgcaaatgctgtatgcctgtatcgatgccaatcctttctataagaatggtgtcgtcgcggcaaaccgctcacaaatgaacgtgactttccagctggcggatgaatcccttgatggcgccttcttaaaagaggccgaagcggcgggcttagtggccttaaaagggcaccgaattgtcggtggcatgcgtgcaagcctctacaatgcgatgccacttgaaggcgtagccgcgctggtgagctttatgaacgaatttgcggcaaagcatagttaag

SEQ ID NO: 247317 - DNA, 1090 bp, Unknown
  Bacterial polypeptide expressing nucleotide sequence isolated from the Sargasso Sea
atgaggaagtggaatttttgtgctggtcctgcagcaattcctgaagaagtattaagagaagcgcaaaacgaactcttagagtggaacctgtctggttcttcagtcatggaggtgagtcatcggtctgatttatttgctgaagttgcagcctcatcaacgaaagatataaaagcacttttaaatattggagacgaccatgaagttctttttctccaaggtggagcaactctccaatttacatctgttccattaaacttcactaaaaaaagttctattgtaagctacttaaataccggactatggtcaaaaaaagctattaaggctgcatcaaaatatgcctcagttaatgttgtcgcatcatcagaggaatcaaactatacacatgttcctagtgctcaagagtggagagtagattcagatagcatttattttcattatgttatgaatgagacaatacaggggcttgcaatgcgagacccaatctcatctgagaaacctcttatttgtgatatgtcttcatgcatactaagtgaagaagttgattttcataatcttgatcttgtatatgcaggcgctcaaaagaacattggccctgctggattaactctagtaattataaaaaaagattttttagaaaaagctaatgaagatattcctgacattcttagttataaaaaaaatagtcaggcaggctctatgttaaacactccacctacctttgcatggtatctagcaggcaaagtatttaaatggcttttaaaaaaaggtggagtaaaaagtattcaaaaagaaaatgaaaaaaaagcaaaactcctatatgactttatagattcttcctctttttactcaaatccaattgagaaaaaatatcgatcaattatgaatgttccttttcttcttaatgataaaaatgctgattctttatttcttgaaaaggcggaaataaatggccttttaaatttaaagggtcacagatcagttggaggtatgcgtgcaagtatatataatgctactccgtttgaagctgtggaggatctagtttctttcatgattgattttgagagaagctatactgggaatggaaaataaa

SEQ ID NO: 247318 - DNA, 1078 bp, Unknown
  Bacterial polypeptide expressing nucleotide sequence isolated from the Sargasso Sea
atgaggcagtggaatttttgtgcaggccctgcagcaatctctgaagaagttcttcaagatcttaaatcagagttattagaatacaagaattctggtacttcagttatggaaatgagccatcgctcagaaatatacacaaagatagctcatgaggcgaaaagcgatctgattgaaattttaaatattccaaataattatgaagttctgttccttcaagggggtgcaacttatcaattctcaatgataccaatgaattttaaacatctcacaggcacagctgattatgttacaactgggacttggactaaaaaggctcatgctgagggatcaaaaattattgatattaatgaaatatattcatcagaagattctaattttacatgtgcgccagatatagaaaaattagatatttcagaaaatgcatcatatgttcattattgccctaatgaaacaatccaaggtaatgctattcacgatgtaccaaatataaataaacctttaattgctgatatgtcttctgtgattttgagtgagccgattgatataagtaaattctcattaatatacgcaggagcacaaaaaaatattgggccagcaggcctaaccatagtaattattgataaagaatttatgagtatggacgataatagtcttccaaatcttttaagatattcacagcattcaaagtctaattcaatgttgaacacaccaccaacttttgcttggtacatggcgggaaaagtcttcaaatggattaaaaattctggtggattagattactttaaggaacttaatcacaaaaaggcgtcaaaattatatggatatatagatgattcatcattttacagtaatcctgtagatataaataatagatcaataatgaatgtaacatttgtattagcagatagtggtttagattctttatttttagaagaatcaaatacaaatggcttgcttagcctaaaagggcatcgatctattggaggaatgcgagctagcatatataatgcaatgcctttaaagggagtagaggaattgatagagtttatgaagtattttgaatcaaagtatggataat

SEQ ID NO: 247319 - DNA, 1078 bp, Unknown
  Bacterial polypeptide expressing nucleotide sequence isolated from the Sargasso Sea
atgataaaaacatacaattttagcgcaggaccggcaatgctaaatccttatgtgcttgaagcgacatctcaagctactatcgaatacaatgattgcggtatgagcttaatggaaatgagccaccgatctcagcctgtggtagatatggttaaggagactgaattacttgtaggggagcttctgcaattaccacagcattatcaggtccttttccttcaagggggagcctcgctccaatttagcatgataccaatgaaccttcttggaccagatcaagttgctgactatacggatacaggtgcttgggctcataaagcaattactgaagcacaattgtttggcaaggttaatgttgcttgttcttcaaaagattcttcatacaatcatatccctaagaacctcaaatgctcaaaagatgctgtttacctacatcttacatcaaataacacaatctacggtacgcaatgggcttcatttcctaatttagatgattcacgttcatatcttatagcagatatgtcttcagatatttttagtagagaatttgatataaccaattttggtttgatctatgctggtgctcaaaaaaatattggccccgctggagtaacgcttgttatcattagggatgatatcttaggtaaaattaaacgtgaagctccgatgatgatgcgctatcaaactcacattgaaaaacaatctatgtttaatactccccctgttatggcgatctatgctgtcaataggagtttagaatggttaaaaaataatggaggtgttagtggtattgagcaaaaaaaccttattaaagcagaaaaactttatgcagaaatcgagcgtaacaatttgttcaaatctcctgttgcaatagaagacaggtcccttatgaacgtaccttttatttttagcggcaaaggtagtgatgaagattttttatcattttgcgataagcgcggtttaaaaacattaaaaggtcatcgatcagttgggggttttcgagcttcaatctacaacgcaatgcctttagagggtattaatgctctagttcaagcaatgcaagattatgagtctaaatgaa

SEQ ID NO: 247320 - DNA, 893 bp, Unknown
  Bacterial polypeptide expressing nucleotide sequence isolated from the Sargasso Sea
gttgctcgaatacaatagctctggcgcttcaataattgagattggccatagaactgatatttactctcaagttgcagaggaatccaagaatgatttaatagaaatattaaaaatcccaaattctcatgaagttctctttcttcaaggtggggcaactcatcaattttcaatgattccattaaattttagaaatatgggcaacaatgcagattatgttgtgtctggaacatggtctaaaaaggctgctgatgaagcatctaaattaattgatgtaaatatctcggcgtcatctgaaaatatgagtttttcagtatttcctaaatgttcagattgggatatttcaaaacactcgtcatatgttcattattgcccaaatgaaactattcagggtattgctatgcatgagattcctgaaatagataaaccacttatggcagatatgacttctgtaatacttagtcagcctcttgatgtaagtaaatttgatttaatttatgcaggagctcaaaaaaatataggacctgctggcttaacgatagtaataatttctaaagagcttatggaaaaaggtgattctagccttccaaagatccttcgttactctgagcattcaaaagcaaattcaatgctaaatactccaccaacattctcttggtactttgctggtaaagtatttaaatggatcaaaagatcaggaggattggaacactttgaagctttaaataaaaaaaaggctaaaaaactatatgatttcattgattcatcagatttctacgtaaataatctttcaaaatcacaacgctcgctaatgaacgttacatttaatttgaaaaatgatgatcttaatagttttttcttaaatgagtcaaaagcaaatagtttgctcaatttaa

SEQ ID NO: 247321 - DNA, 1084 bp, Unknown
  Bacterial polypeptide expressing nucleotide sequence isolated from the Sargasso Sea
atgaagaaaatatataactttagtgctggtccagcctgtctgccacagtctgctattgaaggtgccaaagaggcaataaaagactttcaaggtagtggtataagtcttttagagatgagtcacaggtctactcctattgtcaacctttttgaagagacaacaaataatctcagaaatctccttaaaatcccagataaatatgatataatctggttacaaggaggcgcatcaacacaattctctatggttccaatgaatcttcttcctgagaatggttgtgcagactacattgatactggatcatggtctgcgaaggctattgtagaatgtaagagggtaggtgctgtcaatattattggcagttctcgggattctctttatacatatattccaaaagatgcttttccaatagagggctcatcctatctacatatcacgagtaataatacaatttatggaactcagtttaaaaaatatcctacaaccaatgataaatattttttagtcgccgatatgagctcggatattttatcaaagcctattgatgtttctaaatttggtttgatctatgcaggtgcacagaagaatatgggtccagcaggtgtaactcttgtgattattagatctgatcttgcagaaattaattatagagatattccaactatgatgaaatacagtacccatgtttcgaaagattcaatgtttaacaccccgcctgtgtttagtgtttgcgttgtcaatgagacactaaaatggattaaatccattggtggtcttcatcaaatgaaaactattaatgacagcaaggcttcattactgtatgatgagattgataggaataccttgtttaaaagcccggtggtttatgaagatcgctctaacatgaatgtccccttcatttttaataataataatctaaaagatgaagaatttctaggattctgtgaaaaaagaggtctaagaacattaaaagggcatagatctgttggaggattcagagcatctatatacaatgcgatgcccgtggctggtgttgaagctctaattgcagcaatgcaggaatacgaacatatacactcgtaga

SEQ ID NO: 247322 - DNA, 568 bp, Unknown
  Bacterial polypeptide expressing nucleotide sequence isolated from the Sargasso Sea
tatgtcatcatgccttttttcagaaactatagatattaaaaaatatgatttcatatatgcatgtgcacaaaaaaattttgggccatctggaatcacattaattatcttaaagagagaattgctagaaaaatcaaataaagaccttccaaatattcttaaatatgatgctcatgcaaaagaaaattcaatgttaaataccccaaatacttttggttggtacgtggctggtaaaatatttagctggtacaagaaaaatggaggtgtgaaagaaatggaaaaaaatagtattaaaaaaacaaatcatctataccaaataatcgataattctgatttttatataaatcctgtattccaagagcagaggtcaatttgtaatgttgttttcacacttcaaaatgatgaactggagagcaaattcttatcaggtgctgaagaaaatggtttgttttatctcaaaggtcacagaagtgttggtggaatgagagcaagtatatataatcctcttgagtttgagcatgttgagcgcttagggcagtatatgattaattttgaaaaaaaatatggatga

SEQ ID NO: 247323 - DNA, 1078 bp, Unknown
  Bacterial polypeptide expressing nucleotide sequence isolated from the Sargasso Sea
aatgacgaaggtatataatttttcagcgggtccggcaatgttaccagaagcggtgatgcagcaggcgcaacaggagctactagactggcagggcctgggtgtctcggtgatggagatctcgcatcgttcggctgaattcaaagccattgcggcgacggctgaagcggatatgcgagaattactgggtgtctctgatgactatgcggtgttatttctccatggtggcggacaaagtcagttttccatggtgcccatgaatttattgggcgatgctgatgaggttgcatacactgattttggtacctgggggcacttagcgattgccgaagcgcgtcgctatgcaaaggtgcgcgtggtggctgagttacaaacagaagggctcattgcgttgccaccgcagtcacagtggcaagcggcggatgactgtgcttatttatacacggttgataatgagacagtgcagggggttgagataccgtggcaggttgattcgcctgttccgctggtgtctgacatgtcgtctaatttgttgacgcgtcctgttgatgtgtcgcgatatgggttgatatacgcctgtgctcaaaaaaaccttggcccggcaggggtgaccattgtggttgttaagaagtcgctattggagcgtgtacccatttctaccacacctaaaatgttcgattaccgccagcatgtcgacaagcagtccatgctgaatacgtcacctacttttccttggtacatgacggggctggtgctgaagtggatgaaggcagagggtggggtggctgaatttgcgcgtcgcaatgcagaaaaagcgcaagcattgtatgcgtgtattgacgcatccgaatggtttgtgagtcaagtagatcccgcttgtcgatcacgcatgaatgcggtatttcactgccgagaaccacaacatgaagcggcgtttttacagttcgcacacaacgaagggctgctgggattaaaagggcatcgctcggtcggtggtttgcgtgccagtatttacaatgccatgccaatggcgggtgtgcagcgcttaattgaagtaatacaagccttttccccggtgtga

SEQ ID NO: 247324 - DNA, 1093 bp, Unknown
  Bacterial polypeptide expressing nucleotide sequence isolated from the Sargasso Sea
atggggccatcgggtcgcatccacaacttcggcgcaggtcctgccgttctacccctcgaggtcgtgaaagaggtagccgaaacactccccaacttaggcggcagcggcttcggactgatggaggtatcacacaggagccagaccttccaggatgtgatagactcggccatgtccaggctcagggggttacttggcatacccgatgattacgaggtcctgttcctccaaggtggagcctcgacccagttctacatgagtgcactgaacctgatgagcgagggcgggatggctgactacctggtcacaggcatctggtcgaagaaggccctagtggaggccaataggatcggggacgctagtgccgtttgggacgattccggcagtggtttcaggagcgtcccaggtgacggcgattattctgtgagagacggtgctgagtaccttcactacacatccaacaacacgctattcgggactcagttccaccacctcccagacagtggaggcaagcccagggtagttgacgccagctcggacatctgcggtgccaagatcgacgtttcggagcacgacctgatctacgctggtgcccagaagaacctcggtccgagcggagtgaccgtggtcatcctatcgccgtgggcgtctagcaggcgcaaggaagggctgcccacaatgctggactatcagacgcacatctcgaagggatcgatgttcaacacccccaacacgttcgggattttcgtcctggacagggtcctggcctgggtcgagaggaacggagggctagagggcgccatagggaggaacagcgagaagtcgggagttctgtacgacatactcgactccagcgacttctggaggccgcatgccgactccggctgcaggtcgatgatgaacgtgacatggaggctggctgatgagagtctggagcaagtcttcctggaggaggccggagacagcgggatgggcggcctgaaggggcaccgtagcgttggagggatcagggccagcctgtacaacggatgccccatcgagagcgtggaagcgctcgcatccttcatgacggacttcgagagtcgccacggatgag

SEQ ID NO: 247325 - DNA, 1120 bp, Unknown
  Bacterial polypeptide expressing nucleotide sequence isolated from the Sargasso Sea
ctgttcgtttttcgcgccagcttccaggatctcatgatgcgcgtctttaatttctccgccggccccgctgccatgcccgaagaagtgctgcgtcaggcagccgacgaaatgcttgattggcagggcagcggcatgagcgtgatggaaatgagccatcgcggcaaagaattcatgtcgatccatgaggaagcgctcgtcgatctgcgtgagttgctccaggtgcccgccagccatcgcatcctgtttctgcaaggcggcggtctgggcgaaaacgccatcgtgccgatgaacctgatgggcgcgaaagcgcgcgcggatttcatcgtgacgggttcgtggtcgcagaagtcgttcaaggaagcgcaaaagtacggcacggcacatctcgcggcgagcggccagacagccgaaggcttcacgcgcgcaccggcacgctcggaatggcaactgtcggacgatccggcttacgtgcatctgtgcaccaacgagaccattcacggtgtcgagacgttcgaaatccccgacctcggcaatattccgctggtggcggacgcctcatcacacatcctgtcgcgcccgatggatatcgccaaatacggcgtgctgttcggcggtgcgcagaagaacatcggcatggccggtgtgacggtcgtgatcgtgcgcgaagacatgctggatcgcgcgcaagcgatctgcccgtcggcgtttgaatggaaaaccgtcgccgaaaacaattcgatgtacaacacgccgcccacgtacgcgatttacatcgcggggctggtgttcaagtggttgaagaagcagggcggccttaccgcgatggaagcgcgtaacctcgaaaaatcgaagctgttgtacgacgcgatcgattcgagcagcttctatctgaacaaggtcgaacgtggctcgcgctcgcggatgaacgtaccgtttttcctcgccgacgagtcgcgcaacgaagatttcctggccggcgcgaaagcgcggggaatggtgcagctaaagggccacaagtccgtcggcggcatgcgggcgtcgatttataacgctgtcccgctcgaaggcgtcaaagcgcttgtcgaatacatgaaggaattcgaacagcgcaccgcctgag

SEQ ID NO: 247326 - DNA, 949 bp, Unknown
  Bacterial polypeptide expressing nucleotide sequence isolated from the Sargasso Sea
aatgaggggatggaatttttcagccggccctgcagcaatacctcaagaagtcatcaaagaagtccaagaagagttgctcgaatacaatagctctggcgcttcaataattgagattggccatagaactgatatttactctcaagtcgcagaggaatccaaaaatgatctaatagaaatattgaaaatcccaaattctcatgaagttctctttcttcaaggtggagcaactcatcaattttcaatgattccattaaattttagaaatatgggtaataatgcagattatgttgtttctggaacatggtctaaaaaggctgctgatgaagcatctaaattaattgatgtaaatatgtcggcgtcatctgaaaatatgagtttttcagtatttcctaaatgttcagattgggatatttcaaaacactcgtcatatgttcattattgcccaaatgaaactattcagggtattgctttgcatgagattcctaaactagataaaccacttatcgcagacatgacttctgtaatacttagccagcctcttgatgtaagtaaatttgatttaatttatgcaggagcccaaaaaaatataggacctgctggcttaacgatagtaataatctctaaagagcttatggaaaaaggggattctagccttccaaagatccttcgttactctgagcattcaaaagcaaattcaatgcttaatactccaccaacgttctcttggtactttgcaggcaaagtatttaaatggatcaaaagatctggtggattggatcactttgaagctttaaataaaaaaaaggctgaaaaactatatgatttcattgattcatcagatttctacgaaaataatcttcaaaaatcacaacgctctctaatgaacgttacatttaatttaaaaaatgatgatcttaatagttccttcttagatgagtcaaaagcaaat

SEQ ID NO: 247327 - DNA, 496 bp, Unknown
  Bacterial polypeptide expressing nucleotide sequence isolated from the Sargasso Sea
aaatattggtccttcgggcctcggttttgtgattgtaaagaaagatttattgggaaaggcacaatcaattactcccaatcttctaaattacactctaattaatgaaggcgagtctatgtccaatacccctccaacttttgcttggtatgttgctggtaaagtatttaaatggcttaaatctatgggaggagtcgaagctatttctatgataaataatagaaaagccaacaagttatatgactatattgattcttcagatttctattcaaacaatatcaatatagaaaatagatctattatgaatgttccctttttactagggaatgaagatttaaatgataagtttcttgaggcatctaaagaagctggtttgttggctttaaagggtcacagatctgtaggaggtatgagagctagtatatacaacggtcttcctgaagaagcagtagatgccttaattgaatttatggatgtctttcaaaaagaatatagttaa

SEQ ID NO: 247328 - DNA, 896 bp, Unknown
  Bacterial polypeptide expressing nucleotide sequence isolated from the Sargasso Sea
tgtaccgtcaaattatcatgtattatggcttcaggggggtgcgtctatgcaattctctatggtgcctatgaatctgcttagtaaaagatctactgcagattatatagaaacaggagcgtggtccacaaaagctattacagagtgcaatagagtggctacggctaatgtaatagctagttctaaggaggaaatcttcaattatataccaaaggaatacaatcaaaatatagaatcgaaatatctacatataactagtaataacacaatatatggtacccagtataaagtatttcctaaacctagaaacacagagggttatctcgtagccgatatgtcatccgatattttttctagatcgatcaatgtttctgattttggactaatttacgcaggtgctcaaaagaatatgggaccggcgggagttacattggtgatcgttagagatgacctggtcattaatgaacttgaccatctacctactatgatgcgttatgatacccatgttaagaaagattccatgttcaatacaccacctgtattatcggtttttgtggttaacgagacattaaaatggatagcagatcaaggcggtgtgggctccatagagaattctaataagatcatgtctgataagttatacacagagattgaaagaaatactcttttcagatcaccggtggctattgaggatagatcaactatgaatgtagcctttgttttcaatgatcgatcaatggatgataatgaatttctgcaattttgtgatgcccgtggtctcaaaacactgaaaggacatcgttcggttggtggttttagagcatctatatacaatgcaatgccaatagagggagtggatgcacttatcaaggctatgcagaattatgaagatagataaa

SEQ ID NO: 247329 - DNA, 622 bp, Unknown
  Bacterial polypeptide expressing nucleotide sequence isolated from the Sargasso Sea
gatagcttattgttgcgccaaaaataatgttctatttatcgtcgatgaaatcgcaacaggatttggtcgaactggcaccctttttgccagcgaacaggcgaatattatgcctgatataatgtgcataggcaaagctctcaccggcggctgcattggaatggccgcaacagcagccagcgagagggtgttttcggcatttttgtccaacgatgtggacgtcgcctttatgcatgggccaacctatatggcaaatccactcgcggcgacggcggccaatgcgtcacttgatctgtttgaaaatggtgagcggcttcagcaggttgaccggataaaaaatacgttaagtgaggagctcgagccctgccggaaaattccaggtataaaagatgtgcgtgtgatgggggccgtcggtgtcgttcaaatgaccagtccccgagatatcgattggctacggcaacggtttacagaagaaaatgtatggatccggccctttggagatgtcgtctatctgatgccttcatttataatcaataaagacgaactgaccgccctaacaagggccgtagtgcgcgtcatgactgagtggtcgaatcgacaaaaacaagaccaggaacaaatatag

SEQ ID NO: 247330 - DNA, 848 bp, Unknown
  Bacterial polypeptide expressing nucleotide sequence isolated from the Sargasso Sea
tttgaacaaacctcatccaaatctttggtatccatatgcacagatgaagcatttagactttgtaccaaaggcaaaaaaaacattaggatcaaaaattaccttagaaaacggtgaagttctcattgatggagtagcatcatggtggacatcatgtcacggttataatcacccagatataattaatgccatgcaaaaacaattaaatgatatgccacatattatgtttgggggttttacgcataaacctgctgaagatttagcatcaaatttaaaaactttgcttccctcaatttataatcactatttttttgtagattcaggctctgtagctgtagaagtttcaatgaaaatggctatacaatattgggtaaataaaaataataaaaataagagaaagtttttgagttttaagaatggttatcatggggacacattgggagcaatgtcaatttgtgatccattagaaggaatgcattctttattcaaagattatgtacctgagcaaataaatacagatattccaattgataaagctaaaaaagaaaactttaaaaatattgtttttgataataaagaagagcttgccgcaataataattgaaccattagtacagtgtgctggaggttttaagtttcataatgatagtactttaaagtttattagtgaaattgctaaggagaataatattctttttattgtagatgagatagcgactggttttgggagaacaggcagcatgtttgcttttcaaaatagtaaaatattaccggatataatttgtttagggaaggctcttacaggaggggttatatcgcttgcatctgtagtatctacagatgcagtatatg

SEQ ID NO: 247331 - DNA, 767 bp, Unknown
  Bacterial polypeptide expressing nucleotide sequence isolated from the Sargasso Sea
cgccgacggcgttcgtataaagctcagcgacggtaaggatctcgttgatggcacatcctcctggtggacggcatgtcatggttatgggcatcctcatataattgagaaagtcacagaacaattgaattcaatgccccacgtgatgctgggcggtttcgttcatgagccagttttaaccctcgcaaaacgtttgactgatttattgccgggtgacttaaaccacgtttttttctctgaatctggatcagtgtctgtcgaaatttctttgaaaatggccattcaatattggcgcaatcagggtgataaacgacgggtaaaatttatcagttttcgcggcggctatcacggcgataccatgtcggcgatgtcggtttgcgatcctgaggagggcatgcacaaactgtttaaaggtgttattctcgagcaattcgtcctggatttgccacgagataaagccggttttgttggcctggaatcatttctacaaagagaagcaacgcgcgttgcggcggtcgtactggagccattggttcaagccgcaggcggcatgaagttccacacgcccgaaatactagcaaagattgctgacacgtgtcgacgctacgatgtactgcttattttagacgaaattgctacaggatttgggcgaactggcagcatgtttgcctgtgaacaggctgatgtgatccccgatattatgaccctttctaaggcacttactggaggaactatggcgttggcggcaacggtcgcaacggaccggggtt

SEQ ID NO: 247332 - DNA, 510 bp, Unknown
  Bacterial polypeptide expressing nucleotide sequence isolated from the Sargasso Sea
gatgaatccctcccagctctggctgccctattgccagatgcaaaccgcccctgcaccgcagaccgctgtgcgtacggaaggcgtgcgaattttcctgcaggatggccgtagcctgatagatggcacgtcttcatggtggacagcttgtcacggctacaatcatccgcacatccgccacgcagtggcagagcagcttgaatccatgccccacatcatgctgggggggttggtacatacccctgttctgaggcttacggatcggttggcccgcctttttccgggagagttgaactacgtcttctattgcgagtccgggtcggttgccgtcgagattgccatgaagatggcgcttcagtactggatcaaccaggacatctccggccgcactcgtttcgtgagttttcgagacgcctaccacggtgacactttcgcggcgatgtcggtctgcgatcctgaggatggcatgcatcgcttgttcaaaggcgtgttggcagagcagctcatcctgga

SEQ ID NO: 247333 - DNA, 538 bp, Unknown
  Bacterial polypeptide expressing nucleotide sequence isolated from the Sargasso Sea
attgcaactggttttggtagaactggaaaattatttgcttatgaacacacgaaggtgacaccagatatcatgtgtattggcaaggcgttgacgggcggctatttatcattagcagcaactcttactacaagcaatgtacacgaagtgattgatggtggtgaccctggtgtttttatgcatggccccacatttatggcaaatccattggcctgttgtgctgcgctagcgagtacagatttattactccagtcgtcttggcaaaaagctatatcgcgaattgaaaaaaatttagaaaatggattaatgccttgcatagatatgaatcaggttaacgatgttcgagtgatgggcgggattggtgttgttgagttaaaaaatgaagttgatatgcaaaaaataatcccagaattcgtcaagagaggagtatggattagaccttttgggaaattggtttacctaatgccgccctacatcactaatgatgatgatttaaatctactaaccaaggcgattgttgaagttgttaatactcaataac

SEQ ID NO: 247334 - DNA, 292 bp, Unknown
  Bacterial polypeptide expressing nucleotide sequence isolated from the Sargasso Sea
catgcgcggccctgatacagaacagcttgcctttgacagtcagcatatctggcacccctattcgtccatgatcaacccgccacagatgttcccggtggagtccgcttcgggcgtacgcctgcgcctgacagacgggcgtgaactgatcgatggcatggcctcctggtggtcagtggtccatggttacaatcatccggctctgaaccaggccgcgcatgagcagatcgatcgcatgtcccatgtgatgttcggtggtctgacacactcacccgctattgagttgtcacgcaaa

SEQ ID NO: 247335 - DNA, 859 bp, Unknown
  Bacterial polypeptide expressing nucleotide sequence isolated from the Sargasso Sea
accatcctaccaggaccgctgaaccgtgtctttttcgccgattccggatctgtcgccgtcgagatcgccatgaagatggcggtacagtaccgactgaaccggggcgataccggccgcacgcggtttctcagtttccgcaacggttatcacggcgacacgctggccgcgatgtcggtaacggacccggatgaaggtatgcacgcgctgttcaagggctacctgccggaacaggtgatcgcgccggtgccgcgcgacgacgccaccgccgccgaattccgccgcctgctggatgcccatggcgacgagcttgccggcgtgatcgtcgagcccctggtgcagtgcgcgggcggcatcaagatgcacgacccggcagttctgaagacgatcggcgatgccgcgcaccgcgccggtgcgctactgatctgcgacgaggttgcggtcaatttcgggcgcaccggcaccctattcgcgcacacccaggcgaacatcgcaccggacgtcatttgcctgggcaaggcgttgaccggcggcgcaatcaaccttgccgcgacggtggcgacggcagaagttttcgaggcgtttctgtccgacgacgcgaatgccgcgctgatgcatggcccgacctacatggccaacccgctggcatgcgccgccgccaacgcgtcgctcgacctgttcgagaccgagccgcgcctgcagcaggtggccaccatcgaggcccagctgagcagggaacttgcaccgctggcggaaacaccgggcgttgtcgacgtccgtgtgaaaggggcggtgggcgcggtagaggttgccgatctccacgatctcgactggcttaaagcgcagttcgtcgacgcaggta

SEQ ID NO: 247336 - DNA, 643 bp, Unknown
  Bacterial polypeptide expressing nucleotide sequence isolated from the Sargasso Sea
tatgcgcaatttactcgattttgattttgatagcgcccatatttggcatccttatacctccatgacccgcgcacttcctgtttttggggtacacagtgcccaaggctgcgagctggaattggtcgatggccgtaagcttatcgatggcaccagctcttggtgggcctgcgtacatggctacgggcacccggcgatattaacggcgatggagcggcagctgcaccaacttagccatgtgatgtttggcggcattacccatgagcccgccattacactctgcaaaaaactgctggcgatgacctgcgagcccctcactaaagtctttctgtgtgactcaggctcgattgccgtcgaagttgccatcaaaatggcgctgcaatattggcaggggcaagatttgcctttagcgcaaaaggcccaaaaacagcgcattcttacggtgaagaagggttaccatggcgatacttttgccgccatgagtgtctgcgatcccgaaggtggcatgcataccatgtttggcgaggccgtcactaaacagtgttttgtcgacgcgccacaaacgcccttcggtgagccattacgccaagatgatttagcccccaatgcgacgtattttacgcgagcaacatcaagacatgccgcc

SEQ ID NO: 247337 - DNA, 679 bp, Unknown
  Bacterial polypeptide expressing nucleotide sequence isolated from the Sargasso Sea
ctgtggacttggcgaagttattactgcagatggtgccaaagggttaaacaaagtcttttttgccgacagcggctctatttcagtcgaagtggcgattaaaatggcgttgcagtgctggttaggtttaggccaaccggagaaaagccggttactcaccattcagaagggctatcacggcgatacctttgctgctatgtcggtctgcgatcctgtggatggcatgcactcgatgtttaaacatcagatcatccctcagctatttgccccagcaccacaaagccagtttgacggcgattttttggctgaagatgagcaggctttgacggctttgtttgagaaacatcaccagcacttagcggcttttattctggaacccatactgcaaggcgctggcgggatgcgtttttatcatccggagtatttaaagctggcgcgtaaactttgtgatcaataccaggtactgctgatagccgatgaaatagccacaggttttggtcgtaccggaaaactctttgcttgtcagcacgcagacataagcccggatattatttgtctgggtaaagctttaacaggcggctatctgacgcttgctgcgaccttgtgcaacgaaaaagtcgctgacggcatagccaagggcgctgtgcctgcattaatgcatggcccaacttatatggccaat

SEQ ID NO: 247338 - DNA, 781 bp, Unknown
  Bacterial polypeptide expressing nucleotide sequence isolated from the Sargasso Sea
gcgatattaacggcgatggagcggcaactgcaccaacttagccatgtgatgtttggcggcattacccacgagcccgccattacactctgcaaaaaactgctggcgatgacctgcgagcccctcactaaagtctttctctgcgactcaggctcaattgccgtcgaagttgccatcaaaatggcgctgcaatattggcaggggcaagatttgcctttagcgcaaaaggcccaaaaacagcgcattcttacggtgaagaagggttaccatggcgatacttttgccgccatgagtgtctgcgatcccgaaggtggcatgcataccatgtttggcgaagccgtcacgaagcagtgttttgtcgacgcgccgcaaacacccttcggtgagccattacgccaagatgatttagcgccaatgcaacgtattttacgcgagcaacatccagagattgccgccgtgattatcgagccgattatgcagggcgctgggggaatgcgattctacagcagcgagtatttacgcggcctgcgtgccctgtgtgatgaatataatgtgctgcttattctcgatgaaatcgccacgggttttgggcggactggtaagttatttgcctatgagcatgccgacatcacgcccgacattctcagcctgggcaaagcgttaacgggcggttatatcagtcttgccgccaccttgtgcacggataacgtcgcccaaggcattagccaatcgcccgcaggtgtctttaagcatggcccgacatttatgggcaatcccctcgcct

SEQ ID NO: 247339 - DNA, 929 bp, Unknown
  Bacterial polypeptide expressing nucleotide sequence isolated from the Sargasso Sea
ttgggcggcattacccatgccccggctattgcgctgtgtcgccagttggtggcgatgacgcccgaggcgctggagtgcgtttttctcgctgattctggttcggtcgccgtggaagtcgcgatgaaaatggcgctgcaatactggcaggccaaaggtgaatcccgtcagcgtttcctgacatttcgtaacggttatcacggcgatactttcggcgcgatgtcggtctgcgatcctgacaactcgatgcacagtctgtggaagggttatctgcctgataacctgtttgcgcccgctccgcaaagccggatgggcggcgaatgggacgaactggatatggtgccttttgcccgtctgatggccgcacatcgccacgaaattgcggcagtgatccttgagccgattgtacagggcgctggcggcatgcgcatgtatcaccccgaatggttaaagcgcatccgtaagatgtgtgaccgggaaggcattttgctgattgccgatgaaatcgccaccggatttggtcgcacgggcaagctgtttgcctgtgagcatgccgatatcactccggacattttgtgccttggaaaagcgttaaccggcggaacgatgaccctttccgccaccctgaccacgcgcctggttgcggaaaccatcagtaacggtgaagccggatgttttatgcacggcccgactttcatgggtaatccactggcctgcgccgtcgcctctgccagcctgtcgctgctcgaaaccggcgaatggcgctcgcaggtcgcggccattgaagcgcagttgcgtgaagaactcgccccggcggcagattcccgttgggtcgccgacgtacgcgtgcttggtgccatcggcgtgatagaaaccacgcatccggtgaatatggccgcgttacagaagttctttgtcgaacggggcgtgtg

SEQ ID NO: 247340 - DNA, 862 bp, Unknown
  Bacterial polypeptide expressing nucleotide sequence isolated from the Sargasso Sea
tggcttattgatggtatatcttcttggtggaccgcttgccatggctacaatcatgaacacatcattgatgcgatgcataaacagctcgatgaaatgccgcatataatgtttgggggactgacccacgaaccggcactaaaacttgcctcccgattaaccgatatactaccgggagcaggaagccctaacgccctatcacatatatttttctcagattccgggtctgttgctattgaggttgccctgaaaatggctttgcaatactggataaatataggcgagaaaactcgcaagcgctttgtctcttttaaaaatgcttatcacggcgataccactggtgcgatgtcagtttgtgatcctgatgaaggtatacacgccaattttaaaggcgccattcttgaacaaatcattatcgaaataccgaagactgctgaccagatttcagaattcgaaaatctcttggtggggggtcgaaacgagatagcaggtgtaattattgaaccattggtgcaggcagcaggaggcctgaagttccatactaatcagacgttatcagttatttatgaaatttgtgtaagaaatggtattttgtttattgctgacgagatagccacagggtttggtcgtacggggtcaatgttcgcatgccatcaagctgatattacgcccgatataatgtgccttggcaaagcattaactggtgggaccattagcatggctgctacggcttctaatcaggaagtattttcggcgtttctatcaggcgacgaaaaaacagccttaatgcatggaccaacatttatggcaaaccccttagcagcagctgcagcaaatgcatcactagatttattgaagacggcca

SEQ ID NO: 247341 - DNA, 815 bp, Unknown
  Bacterial polypeptide expressing nucleotide sequence isolated from the Sargasso Sea
tacgggcacccagcgatattaacggcgatggagcggcaactgcaccaacttagccatgtgatgtttggcggcattacccacgagcccgccattacactctgcaaaaaactgctggcgatgacctgcgagcccctcactaaagtctttctctgcgactcaggctcaattgccgtcgaagttgccatcaaaatggcgctgcaatattggcaggggcaagatttgcctttagcgcaaaaggcccaaaaacagcgcattcttacggtgaagaagggttaccatggcgatacttttgccgccatgagtgtctgcgatcccgaaggtggcatgcataccatgtttggcgaagccgtcacgaagcagtgttttgtcgacgcgccgcaaacacccttcggtgagccattacgccaagatgatttagcgccaatgcaacgtattttacgcgagcaacatccagagattgccgccgtgattatcgagccgattatgcagggcgctgggggaatgcgattctacagcagcgagtatttacgcggcctgcgtgccctgtgtgatgaatataatgtgctgcttattctcgatgaaatcgccacgggttttgggcggactggtaagttatttgcctatgagcatgccgacatcacgcccgacattctcagcctgggcaaagcgttaacgggcggttatatcagtcttgccgccaccttgtgcacggataacgtcgcccaaggcattagccaatcgcccgcaggtgtctttatgcatggcccgacatttatgggcaatcccctcgcctgcgccgccgcctgcgccagctt

SEQ ID NO: 247342 - DNA, 1309 bp, Unknown
  Bacterial polypeptide expressing nucleotide sequence isolated from the Sargasso Sea
tatgagcattaatcttgagtttgatcgccagcatatctggcatccctacacctcgttaagtaaacctttgcctgtgtaccctgtggtcagcgctcatggttgtgagctgatgctggaagatggcagaaccttggtggatggcacttcgtcctggtgggctgctatccatggctacaatcatccggaattaaatgccgcgcttgttacgcaaagtcaaaaaatgagccatgtgatgtttggtggtattacccatcagcctgctgtggacttggctaagttattactggagatggtgccgcaaggtttaagcaaagtgttttttgctgacagtggctctatttctgtcgaagtagcaatcaaaatggcgctgcagtactggttaggcttgggccaaccggaaaaaagccggttactgaccattcaaaaaggctatcacggtgataccttcgccgctatgtcggtgtgcgatccggtggatggtatgcattcgatgtttaaagatcagatcatcccgcagctattcgcccccgctccacaaagccagtttgacggtgaatttttagcagcagatgagctggctttgacggcattatttgagcagcatcatcagcaattggcggcttttattctggaacccatattgcaaggcgccggagggatgcgtttttatcatccggattatttaaaactggcgcgtaaactctgtgatgagtatcaggtgctgttgattgccgatgaaatagctacaggatttggtcggaccggaaaattgtttgcttgccagcatgctggcatcagccccgatattatctgtttgggtaaagctttgactggcgggtatctgacgctcgcagcgaccctgtgtaacgataaagtcgcggatggcatagctcagggcgctgtgcctgcgttaatgcacggccctacttatatggcgaatccactggcctgtgctgttgctttgaaaagcctgcaattggtgcaaaagaactattggccagcacaagttgcagctatagagcagcaattaaaactggagcttgagccctgccgaaattcaccttatgtcgctgatgtgcgggtattgggtgctattggggtggtggagatgaaacagaatatcgatgtcgcagccatgcaaaaagcttttgttgaactgggagtctggatccggccttttggcaaactgcagtatttaatgccgccttatattattagtaaaacacagctttctaaattgacctctgcactttgccttttgagccatcaggcgcagcagaaggatatccaggcattacccggagcctga

SEQ ID NO: 247343 - DNA, 1061 bp, Unknown
  Bacterial polypeptide expressing nucleotide sequence isolated from the Sargasso Sea
aatgaccaatcaagaattcgacctgcaccacgtctggcacccctatacctcccttacccatcccctgccctgctatgaagtggccagtgccaggggagtgaccctcaccctcagcgacggccgcgagctggtggatggcatgagctcctggtgggcttgcgtgcacggctatcaggtgccggagctcgatgcggccgccacagcccagctcggcaagatgtcccacgtgatgtttggcggcctcacccacgcccccgcagttgatctgtgccgcaagctggtggagatcacgccagccaagctggatcgggtgtttctggcggactcgggctcggtggcggtagaagtggcgctcaagatggctcagcagtactggcacgccaaggggacgcccagggccaaatttgtcgccctgcgcggcggctatcacggcgatacctttggcgccatgagcgtctgcgatccggatggcggcatgcacgagctctacaagggcttcctgcccgagcaccattttgtcgaagcgccgagctgccgcttccacgcagagtgggacgagcagtgcgtggtggagctcgccaccctggtagccgatcatcatgaggaaatcgccgccatcgtgctcgaacccatagtgcagggcgccggcggcatgcgcttctaccatccccgctacctgcagtgggtacgggccctgtgcgacgagttcggcctgctgctgattgccgacgagatcgccaccggctttggccgcaccggccagctgtttgcctgcgactgggccggcatcagccccgacatcatgtgtctgggcaaggcgctcaccggcggctatctgacactgtcggccacgctcactaccgagcatgtggctcgcaccgtgtgtgacggcaaggccggcgtcttcatgcacggccccaccttcatgggcaaccccttggcctgcgccgtggccaacgcctccatcgatctgctgctggcctcaccttggcaggagcgggtgcgtgccatcgagcatcagctgcgaacagaactggtggcgctgaccctgcacccggcgg

SEQ ID NO: 247344 - DNA, 1360 bp, Unknown
  Bacterial polypeptide expressing nucleotide sequence isolated from the Sargasso Sea
atgcgcaatttactcgatttggattttgatagcgcccatatttggcatccttatacttcaatgacccgtgcacttcctgtttatggggtacacagtgcacaaggctgcgagctggaattggtcgatggcagtaagcttatcgatggcaccagctcctggtgggcctgcgtacatggctacgggcacccagcgatattaacggcgatggagcggcaactgcaccaacttagccatgtgatgtttggcggcattacccacgagcccgccattacactctgcaaaaaactgctggcgatgacctgcgagcccctcactaaagtctttctctgcgactcaggctcaattgccgtcgaagttgccatcaaaatggcgctgcaatattggcaggggcaagatttgcctttagcgcaaaaggcccaaaaacagcgcattcttacggtgaagaagggttaccatggcgatacttttgccgccatgagtgtctgcgatcccgaaggtggcatgcataccatgtttggcgaagccgtcacgaagcagtgttttgtcgacgcgccgcaaacacccttcggtgagccattacgccaagatgatttagcgccaatgcaacgtattttacgcgagcaacatccagagattgccgccgtgattatcgagccgattatgcagggcgctgggggaatgcgattctacagcagcgagtatttacgcggcctgcgtgccctgtgtgatgaatataatgtgctgcttattctcgatgaaatcgccacgggttttgggcggactggtaagttatttgcctatgagcatgccgacatcacgcccgacattctcagcctgggcaaagcgttaacgggcggttatatcagtcttgccgccaccttgtgcacggataacgtcgcccaaggcattagccaatcgcccgcaggtgtctttatgcatggcccgacatttatgggcaatcccctcgcctgcgccgccgcctgcgccagcttagatttaatcaatcagcaggagtggccagcacaggttgccgccatcgagcagcaaatgcagcgcgagcttgccgatgccatcgatattcccagcgtgaaagaggtgcgcgtgctcggcgcggttggcgtgctcgaaatgcaccaagcggtcaataccgccgcactgcaacagcaatttgtcgacttaggcgtatgggtgcgcccctttgccaacctgatttatattatgccgccctatgtgattagttcttcacagctcacaaggctgactcaggcgatgaagcaagtggcggcaacgattgcaccgccccatgccaatcaaagcgaggcactggtgacagagagcatcactatcagccacggctaat

SEQ ID NO: 247345 - DNA, 1360 bp, Unknown
  Bacterial polypeptide expressing nucleotide sequence isolated from the Sargasso Sea
tatgcgcaatttactcgacttggattttgatagcgcccatatttggcacccttatacctccatgactcgtgcacttcctgttttcggggtacacagtgcccaaggctgcgagctggaattggtcgatggccgtaaacttattgatggcaccagctcttggtgggcctgcgtgcatggctatggtcatccggcaatattaacggcgatggagcggcagctgcaccaactcagccatgtcatgtttggcggcattacccacgagcccgccattgaactctgtaaaaaactgttggcgatgacctgcgagcccctcactaaaatctttctgtgcgactcaggctccattgccgttgaggttgccatcaaaatggcgctgcaatattggcaggggcaagatttacctttagcgcaaaaagcccaaaaacagcgcatccttaccgtgaagaagggctaccatggcgatacttttgctgccatgagtgtctgcgatcccgaaggtggcatgcataccatgtttggcgaggcggtcactaaacaatgttttgttgacgcgccgcaaacgccctttggtgaatcgttacaccaagacgatttagcacccatgcagcgtatattgcgcgagcaacatcaagacattgctgccgtgattatcgaaccgattatgcagggcgcagggggcatgcgcttctacagcagcgagtatttacgcggcctgcgtgccctgtgtgatgaatataatgtgctgcttatcctcgatgaaatcgccacgggttttggccgaaccggtaagttatttgcctacgaacatgccgacatcacgccggatatcctctgcctaggcaaagcattaacaggtggttatatcagtcttgccgccaccttatgcacggataacgtcgcccaaggcattagccaatcgcccgcaggcgtctttatgcatggccccacatttatgggcaatcccctcgcctgcgccgccgcctgcgccagcttagatttgatcaatcagcaggagtggccagcgcaggttgctgccatcgagcagcaaatgcagcgcgagcttgccgatgccatcgatattcccagcgtaaaagcagtgcgcgtgcttggcgcggtcggcgtgctcgaaatgcaccaagcggtgaataccgcggcgctgcagcagcaatttgtcgacctaggcgtatgggttagaccctttgccaacctgatttatattatgccgccctatgtgataagccctgctcagctcacacagctgactcaggcgatgaagcaagtcgcggccaccattacaccaccgaaaaccacttcggatgacgcaagtcgaggccaaaacatctgcatcagccatggctaa

SEQ ID NO: 247346 - DNA, 427 bp, Unknown
  Bacterial polypeptide expressing nucleotide sequence isolated from the Sargasso Sea
catgaacacctttgaacagttcgagaaaaacgaatcggatattcgcagctactgccgctcgttcccggtggtcttcaagcaggcccgtggcgccgagctggtgacccgcgaaggcaagagctacatcgactttctggccggtgccggcaccctgaactacgggcacaacaacccgatcctgaaaaaggcgctgatccagtacctggaagatgacggcatcacccacggcctggacatgtactccgacgccaaagagcgcttcctggagaccttcaaccgcgtgatcctggagcctcgtggcctgggcgcgtacaaggtccagttcagcggcccgactggtgccaactcggtcgaagcagccctcaaactggcccgcagggtcaccggtcgcagtaacgtcatcagcttcaccaacggcttccacggc

SEQ ID NO: 247347 - DNA, 847 bp, Unknown
  Bacterial polypeptide expressing nucleotide sequence isolated from the Sargasso Sea
atgaatgacataaatttagaaattcacttaggtgacaacttaaaaatactaaaaaaattcaaagataaatctattgatctaatttatattgacccaccatttaatacaggaaaaatacaatcaaggactcgaataaaaacaacaagatctgatgatggtgacaggattggattcaaaggccagacttacaaaactgaaatacttggaaagcaaagctataaagatatttttgatgattacatagaatttttaagagaaagaataattgaagcaaaaagaattttgaaacctaacggtagcttttttttacatctcgattatagagaaatacactatgcaaaagtaatgtgcgatgaaatatttggtagagagtcattcattaatgagataatttggtcatatgattacggtgcaagaagtaaaagtaaatggtctgctaaacacgataacatcctatggtatgcaataaacccagatgattacactttcaattatgatgaaatagacaggatcccctatcttgccccaagtttagtaggtcctgaaaaagctgcaaaaggtaaaacaccaacagattcttggtggcacacaatagtgagtccaaatagtaaagagaaaacaggttatcctactcaaaaacctatgggagtattaaacagaattatcagggttcactcaaacaaaaatgataaagttctagatttttttgcaggagcagggacaacaggagaagctgcaatccaaaataaaagaaacgctatcttaattgataattatgatcaagctgtaaaagtaatgaaaaagcgtttcgaatttcataaaaacacaaaatatttaatccactagt

SEQ ID NO: 247348 - DNA, 370 bp, Unknown
  Bacterial polypeptide expressing nucleotide sequence isolated from the Sargasso Sea
catgactgtatttgatcgccttgaatcggaagtccagagctatgcacgctccttccccgtcacctttgaaaaagcagaaggtgcctggctcaccgacgacaacggtaaccgctatcttgattttcttgctggcgcaggcagcctgaattacgggcacaaccatccggtcttgcaggaaaagctgattgattacatcaaatcaaacggcattacccacggtctggacatgcataccaaggcaaaggcagccttccttgaagcgcttgaaggcaaaatactcaagccgcgtgacatggaatacaaggtccagtttaccggcccgacgggcaccaatgccgtcgaagcggccctgaagctggcacgccgcgtc

SEQ ID NO: 247349 - DNA, 727 bp, Unknown
  Bacterial polypeptide expressing nucleotide sequence isolated from the Sargasso Sea
actgcttctccctcttgaagcagactatcggcaaaacattgagcggatggtcgatgtaacgaacagaaacgcacgcgacgtaggattcgtctacctgtgcaacccgaacaaccctaccggcgtgaccgtgacggcagatgagatctcctaccttctagacaacattccggaagatatcccggtacttattgatgaagcttatcatcatttcgttgaagaccccgcctacgaagagtcgctcaagtacgtccgagacgggcgtcgcgtagtgatcgctcgaaccttctcgaaaatttatggaatggccgcgatgcgaatcggcttcgccatagcgccccctgacatgattcaagaaatgcggccgtacagtaccgggtccgttaacgctctagctcgctggggagctgtcgcgtccatggaagaccagccggccgcagaacgcatgcttgtccacaacaagcgcttgcgcgagcaaacgatctcggaccttgagagtctcggatacgagtgtattccatcccagaccaatttctttatggtcaatctgcgtcagacagtagccccgatccgtcaggcgttccgccagcgtggcgttgccgttggtcgcgacttccctccaatgctcgaccatctgagggtatcgatcggcaccgaagacgagatgggtcgtttcatgaacgcctttgaagacattatgaagaccatgtcggctggtgccggtgattga

SEQ ID NO: 247350 - DNA, 990 bp, Unknown
  Bacterial polypeptide expressing nucleotide sequence isolated from the Sargasso Sea
ggtggcctcagtaaaattgaaggtgttaataaattttataaattatcatcaaatgagaatccctttggaccaagctctaatgcaattgcagagtatgagaaagtttcaaatgatttagggctgtatccagactcatcaaatacagcgctaaaattggctatatcaagtaaatattcaatagatagcgatagaatagtttgcggttgtggttcagatgaaatacttcatttgcttgcaagagtttatttggatgaaggaaatcaaggtctagtttcagaaaatgcatttgcagtttacccgcttgccattcaaagctctggtgcaacagtcgttcgtgcgaaagaagaggattttcagccaaatatcgataattttatttcatcattaaccgatgagacaaagattatttatattgcgaatccaaataatcctactggaagctatataaaatttgatgaaattgagagattaaatagatctgttcctaatgatgtattgtttgtaatagatgcagcatactcagaatatgtagaagaggaagactattcaataggttttgaattagcaaaagacagtgaaaatattgtaattacaaaaactttttcaaaggcttttgggctagctggcttaagagttggttgggcatattgcccaaaaaaaattgctgaaaaactagatattctaaaagttccattctcagtaaatacagctgcacaaatggctgcgataagtgctctagaagacgatgatcacattaatttttctatagagcataacagtaaatggaaaaaaatattaaatgattgttttgctgaagttggtttaattgtgtatccgagtcaatgtaattttatacttgttgaatttttagaatcttctaaattttctgcgaaagaggcttatcatctgttaatttctaaaggaataattgtaagagagatggaagaatataatttaccaaactgcttaagaataaccatcggaaaagag

SEQ ID NO: 247351 - DNA, 319 bp, Unknown
  Bacterial polypeptide expressing nucleotide sequence isolated from the Sargasso Sea
aatgtctaagttagtcagagaaaatatcgctagtatgcaaggctattcttggggagaacagccaaagaccagcacgaatctcataaaactcaatacaaacgaaaacccctatcctcctagcccaaatgttatcagggcactgcaaactttagacacggaaggattaagaacttacccaaaccctttggcggacgaactcagagcagaagtcgcgaagcttaatcaaatcgcagatgaaaatgtcgttatcacaaatggaggcgacgaaggtctaagactgtcactaactacctttgttgatcctggggagaccgtctgt

SEQ ID NO: 247352 - DNA, 775 bp, Unknown
  Bacterial polypeptide expressing nucleotide sequence isolated from the Sargasso Sea
tatggatcttaaaaaactagtaaacaaagggattgatggattaagtccatatgaacctggcaaaccaattgaagatctagaacgagaactaggaataaaaaatgcagttaagcttgcaagtaatgaaaatcccgttggccccagcccaaagattattgattctattgaaaaaattgtaaaagaaacccatcgttatcctgatggtaatgctactcggctgaaagcaaagatttccagtaaatttaatattttggaaaatcaagttactgttggaaatggttccaatgacatcatagaattcgttgcaagaagttttttaggtccaaatgatagtgcggtttattctgagcatgcatttgcagtttaccctcttgttgtaagagcagttggggcaatgggaattgaggtgcctgcaaagaatttttctcacgatttagaggcaatgttagattccatcgaggaaaatactaagttaatttttatcgctaatcctaataaccccactggatctttcattcaacaatctgaattattaaactttcttgaaaaagtgcccgaagaaattattgtccttcttgatcaggcttattttgaatattcttcttttgagacttcagatctagagtttgatgtattagagagatttccaaatcttgtaatcagtagaagtttttctaaagcttatggtttagctggatttagagttggctactctgtttcatcaatagaaatagcagattacctcaaccagggtaagacaacccttcaatgcaaa

SEQ ID NO: 247353 - DNA, 562 bp, Unknown
  Bacterial polypeptide expressing nucleotide sequence isolated from the Sargasso Sea
cgcactggaggagcttatcctatcattcaagggaccaataatcattgatgaggcatatgtagaatttgcagatacatcagtggttagtctcgttaagcaatttgataatttaatcgtagtacgaacactatccaaggcatttggattagctggtttaagattaggatattttgcagcaagcaagaaaatagccgacgtctttacaaaaattatacagtatccatatccattaaacacactagcaattcaatgtggaatactggctttggagaaatcaaacaagatatcatcaattttttcattagtcaaaaatgaaagaaaaaaaatcatacaaagtttgaaaaaaactggagcatttgacgtatttgattcaaatgcaaattttgtactgtttgatgcaagaggagcagatagaagggtatacaatgcactaatcgaacaaggaatttctattcgtaaactcggaaaactaggcgtgcacaaagggtgtctacgagtaactgtaggaacttctgaaatgaactcaaaattcttgctggcaatacgtgatcttttagaatga

SEQ ID NO: 247354 - DNA, 655 bp, Unknown
  Bacterial polypeptide expressing nucleotide sequence isolated from the Sargasso Sea
attaaccgatgagacaaagattatttatattgcgaatccaaataatcctactggaagctatataaaatttgatgaaattgagagattaaatagatctgttcccgatgatgtattgtttgtaatagatgctgcatactcagaatatgtagaagagaaagactattcaataggttttgaattagcaaaagatagtgaaaatattgtaattacaaaaactttttcaaaggcttttgggctagctggtttaagagttggttgggcatattgcccaaaaaaaattgctgaaaaactagatattctaaaagttccattctcagtaaatacagctgcacaaatggctgcgataagtgctctagaagacgatgatcacattaatttttctgtagagcataacagtaaatggaaaaaaatattaaatgattgttttgctgaagttggtttaattgtgtatccgagtcaatgtaattttatacttgttgaatttttagaatcttctaaattttctgcgaaagatgcttatcatctattaagttctaaaggaataattgtaagagagatggaagaatataatttaccaaactgcttaagaataaccatcggaaaagaggaagctaatctgttacttatagaaacagttaatgcttttaaaaaataa

SEQ ID NO: 247355 - DNA, 265 bp, Unknown
  Bacterial polypeptide expressing nucleotide sequence isolated from the Sargasso Sea
aatgtctaagttagtcagagaaaatatcgctagtatgcaaggctattcttggggagagcagccaaagacgagcacgaatctcataaaactcaataccaacgaaaacccctatcctcctagcccaaatgttatcagggcactgcaaactttagacacggaagcattaaggacctatccagacccgttggcggatgaactgagagcagaagttgcaaagcttaatcgaatcgctgacgaaaatgtcgttatcacaaatggaggcgac

SEQ ID NO: 247356 - DNA, 643 bp, Unknown
  Bacterial polypeptide expressing nucleotide sequence isolated from the Sargasso Sea
atggaagttatggcagaacgagctggaataccggccagcgatataatacgtctgaatggtaacgaaaatccatatgggccgtccccacaggtgacacgagctctgggctcattcgagcactacaatcactatccggatcctggacagaggactttgcgcggtatcttgtcgcattatctcaatatagcacccgagttaatcgtatgcgggaacggaagcgatgaactcatcgatttgattctaagattatttctggcacctggagacaatataatacttcctacacctactttcggaatgtatgcctttagcgccgaagtcgtaggaggacgcgctatcagcgttcccagaacatctgattttgaaatcgatgaacaggctattcttagatcaatcgattcccacacgaaagcaatatttttcgcgtcgccgaacaaccccacaggaaacaccgcttcagacaagcaaatcagggctctgctagatacaggtgttatagttgtagtagatgagacatattacgagttctgcgggcagtcctccctcaatttattatccgaatacgaaaacctcattatccttaggacattcagtaaatgggctggtctcgccggcctaagaataggcttaggtgttatgtctg

SEQ ID NO: 247357 - DNA, 679 bp, Unknown
  Bacterial polypeptide expressing nucleotide sequence isolated from the Sargasso Sea
atgagatttcctaaaccaaataacatagtagctgagaaatatgttgctggcatgagcctattcaagagtaaattggcaaagattaaattatctgctaatgagtcagctcttggccctagcccgaaagcaagaaaacaatatttagaggtttcaaaaaactttgcaagataccctgactctgacgggacctttttaagaaaaacattagctgataaattcaaaattgataaaaatagaataattttaggatcaggttctgatcaaatctttgaacttatatgtaaatcttttttaaaaagaggagacgaagttatagttcctaagtttagttttataatttatagaatttatagcaggatgaacggagcaaaagttatttattcaaatgaagataattttactgcttcagttaaagatattctaaaaaaagttacaaggaaaactaaaatagtttttttagctaacccaaataacccaactggaacgtatatttcaaaaaaagagttgctctttttaagaaaaaaattgagaagcaatattctattagtcgtagatgatgcatattttgagtatgtaaaacaaaaagattatttgtcaggtttaaaaacttttacaaattttaaaaatgtagtcatgacaagaaccttttcaaaaatatatggtttagcagggctaagag

SEQ ID NO: 247358 - DNA, 775 bp, Unknown
  Bacterial polypeptide expressing nucleotide sequence isolated from the Sargasso Sea
ttgcaagaaaaagataaatcaacaataaatgctaaaagatcaattaattcaattaaagtttataaaggaggaaaatcttcgctcattggaaaaaataatattattaagctgtcttctaatgaaaactcatatggcccatcaccgaaagtgctagagaaaataaattcaaatgaaaaattatcaaactttcatcgttatccaagtattgatggagttaaattaagagaaaaaatagcaactatcaaccagttaaatgcagatcaaattgttttaggttgtggatctgatgagacacttttatttgcagctttagctttttgtcaagatggtgatgaaattattcatgcgcaatatggttttgagatgtattcaataattactaaaatagttggagctacttctaaattagtgaaagaagatgataattataaactcagtgtttctgcaattttagatcaggtaacagattcaacaaagattatttatttggcaaatccaaataatcctactggaacttatttaacgcgcaaagaaataataaatcttttaaataatttgccaaaacacatcatactattgctagatggtgcatatgcagaatatgttactaatgaagactatgatcaaggtttttctctggtagaacaatttgaaaatttaattataacgcgtactttttctaaagcatatggacttgctggattaagattaggttggtgttattcaagtaaaaaagtagcttctgttttaaataaagttaaaggacctttcaata

SEQ ID NO: 247359 - DNA, 585 bp, Unknown
  Bacterial polypeptide expressing nucleotide sequence isolated from the Sargasso Sea
tcccaccagagcaacttcttgaccttgcggaacaactgccgtgtccgctggtggtcgatgaggcctacggtgattttagtgagagcaattgtcttgaattggtggagaaaagcgaccggattattgtgacgcgatcaatgagtaagtcgtacgcgttggcaggaattcgttttgggtttgctgtcgcccagcctgccgttatcgaacaactcgcaaaagtaaaagactcatacaattgtgatgccatagcaattgcagcggcgaccgcagcaattgctgatcagggttggttgagaaaaaatcagagtgcaatcagagcgacacgagcgaggctagtcacccaacttcggcaattcggtttttcggtggttgatagccaggcgaattttgtctggtgcacccacacggagtcttcacataaagagatctatgagtccctcaggaagagatcaattctgatccgctttatggtttacagcggttggggtgatggcttgagaattacagtgggcactgatgcagagatagacgtactgctcggtgccatggagagcatcatgcaagaaaaaaatagtaaggagtgat

SEQ ID NO: 247360 - DNA, 895 bp, Unknown
  Bacterial polypeptide expressing nucleotide sequence isolated from the Sargasso Sea
aacatgaaattacctaaatttaaaaaaataaaggcagaaaggtatattgccggtcctagcctctttaaaaaaaaagcagcagaaataaaactttctgctaacgaatctgccttgggtccaagccctagagcggtgagggaatataatagagtttcaaagagttttaaaagataccctgatcctgatggtatttttttaagagaagctctggcaaaaaaattcaagttagatcccagccgcattatacttggctcaggatctgatcaaatatttgaaattatttgtagagcatttattaataaaaatgacgaagttattgtcccccagtatagttttataatttatagaatatatagcaaaattagtggggccaaaattgtatattcgaaggaaaaaaactttaaaatatcagtagataatattctttcttgtgtaacaaaaaaaacaaaaattgtttttttagctaatccaaataatccaactggaacatatataggtaaaaaggatttaattagactcagaaaaaaactaagaagcaacatactcttggttgtcgatgacgcttattgggaatatgttaacaaaaaagattattcttcaggtttaaaattattttttaattctaaaaatgttgttattacaagaacattttctaagatatatgggctagctggacttagagtaggctggggctattcatcaaggagaattattaaagttttgaatcagctaaaaccaccttttaatgttagtagaccggcactttttgcggcatccgctgctctctcagacaaaacttggttaaaaaaagagataaatcatgttaacaaatggtctaaaaatatgtttgaagtgtttaccaaacttaaaattgcaactaataaaagtagcacaa

SEQ ID NO: 247361 - DNA, 340 bp, Unknown
  Bacterial polypeptide expressing nucleotide sequence isolated from the Sargasso Sea
tatgaatttaccaaagccaataaaatttgaggttgaaagatatattggagggttatcccaatttaaaaatatttcaaatccaataaaattatcagcaaacgaatctgctcttggaccaagtccaaaagcaattgaagtatttgaaaaggaaaaaaataaaatttttaaatacccagaatctgattcgacttcattaagagaagttttgtctgataaatttaaaatagactcgcaaagaattatttgtggatcaggctcagatcaaatatttgatttaacatgccgtttatttattcagccaggagacgaagtaattgttactgaatttggttttataatg

SEQ ID NO: 247362 - DNA, 874 bp, Unknown
  Bacterial polypeptide expressing nucleotide sequence isolated from the Sargasso Sea
gtcctcaggaataagacgtttttttgatttggtaatgaattcaaaagatgttatttctttgggcgtaggtgagcctgattttgctactccttggtcagttagagaagaagctatttattctttggagaaaggaactacagcatatacttcaaatcaaggtattgaagaattgcgtaacaaaatttctgcttatcttaatagtagatttagtgttaaatattcacataaacatgaagtattagtaaccgttggggcatctgaagccattgatatttctttacgcactattttaaatcctggggatgaagtgattatatttgagccttcatttgtgtcatattctccattagtaaaattagctggaggcattcccatatctttagatactacaactactgattttcttcctgatatcaaagagttaaaaaaacttatttctaaaaagactaaagctgttattttttgtagcccgaataatccgacaggagctgttattcctagaaaattattgataaaaatagctgaattagctgaaatatttgatttttgggttatttctgatgagatttatgctgaaatttgttttgataagacatttgtttcatttgcttctttaccttctgttaaaaagcgatgtattttaattagtgggttttctaaggctttttcaatgacaggatggcgtttagggtatttgtgtggacctaaaccctttattgaacgggctttgaaaattcatcaatattcaatgatgtgtgcatcaacacaatcacagtatgctgctattgaagcattaaacgatgatgtaatgatcgagattgaaaaaatggttgattcatatgaaaaacggtgtcggtattttgtttctcaatag

SEQ ID NO: 247363 - DNA, 450 bp, Unknown
  Bacterial polypeptide expressing nucleotide sequence isolated from the Sargasso Sea
aatgccattggtaccatcatatattgaaaatttggaaaattatgtacctgggaagcctattgaagaagtacagcgtgaattaggacttgaccatattgacaaattagcttctaacgaaaatccaatcggtccttctccaaaagctgttaatgaaataaaaaaatctctaaataatcttcattgttatcctgacgcttcaggatataacctaagaaataagctcgctaaagcatttaacataaaaatggggaatgttattcttggtgctggaagtgaaggaattatgtcaacgattattagaacttttttaatgggtaacgatgaaatgatatctgctagtaattcatttattggcttccgtgttttagcaaatgcttctggtaaaaaagttcactgggtacccatgaaaaatcaccgatatgatttaaaatccatggtgaaaatacttaa

SEQ ID NO: 247364 - DNA, 715 bp, Unknown
  Bacterial polypeptide expressing nucleotide sequence isolated from the Sargasso Sea
aatgaaatcgcccacaccaaggaaatctatattcgaattagttccatacaaaccgaattttggaaaatcaaatgtaaaaagttttattagattatcagctaacgaaaatccatatggtttctctccaaaaatattaaaaaaagtgaataataccgattttaacagatacccacttcaacataatgaaaaattaattaatgtaattgctgatagacatcatttagataaaaacaaaattattcttggaaatggttctgatgaattaatttcaattttatcacaatcttacttaaaccctggagaccaagctatttgcacagagtatggatttttacaatttccacaatcaatccttatctctggaggtaaacctgtcatcgctaaagataaaggtctaactgtatctgtaaaaaatatattggaaaatgtcacaaaaaaaactcggttagtttttattgcaaatccaaataatccaactggaacatttattaataaaaaagatgtaataaatttaattgaaaatttacctaaaaatattttattagtttatgatgctgcttatgcggaatatattgacgaaaaatcatatattgatggaagtgaactagttgagaaatataacaatgtaattatgttacgaacattttcaaaaatgcatggtctggcagcattacgattaggttggggatattgttcagaaaaaattttaaatact

SEQ ID NO: 247365 - DNA, 481 bp, Unknown
  Bacterial polypeptide expressing nucleotide sequence isolated from the Sargasso Sea
gatatagattttgatgtcttaaatagatttcctaatttaattatgagtcgaagtttttcaaaagcttatgggcttgcaggatttcgagtaggtttttgtgtatcttcaacagagatcgctgactacttaaacagggttagacagccattcaatgccaactcattagccttatttgccgctgagaaagctctggaagatcaagattttatagataaatgtcttcagctgaatttagaacaaaaggaactactattcaaagaattagagttcctcgggtttgactgtcttcctagtaggggtaattttatatcttttgactgtaaacaagactctagagaggcattcaataagcttttaaaggaaggcgttattgtgagatcactcgcggtttataagatgccaaattatttgagagtttcagtaggtttacctgaagagaatctttcatttttagaaaagattaagtcaactcttctctaga

SEQ ID NO: 247366 - DNA, 536 bp, Unknown
  Bacterial polypeptide expressing nucleotide sequence isolated from the Sargasso Sea
gaataaacccaagggcagcgtgctggttgtggacgaggcttatatcgacttctgcgacgcccccagttgcgtaagttgggtcaaggaacaccacgacctgctggtactgcgtaccttctcgaagatctatggcatggccggtgcgcgcctgggcctggcgatcggccacccggcgctactggagcggttggccgtgttcggcggcgacaacgtcccggccggcgccagcttgctggccgcccgtgcgagcctggaagacgcgcaactggtgggccaacgcagagcgctcaatgccaggttgcgcgatgagacgatcgcctggctcaagggccgaggctttacctgcaccttttcccacagcaactgcttcatgatcgacgtgaagcgcccggcagagcaggtgattgagcagttggcggcacggaatgtactggtcgggcgggtgtggaaggactggccgcagtgggtgcgggtgacggtgggcaatgagcaggagatggagcgctttcgcgaggcgttcgcggcgcaggtctagc

SEQ ID NO: 247367 - DNA, 385 bp, Unknown
  Bacterial polypeptide expressing nucleotide sequence isolated from the Sargasso Sea
aaataacccaactggaacatatatttcaaaaaaagaattgttatttttaagaaaaaaattgagaagcaatattcttttagtagtagatgatgcttattttgagtatgtaaaacaaaaagattattcatctggtttgaaaacttttacaaattttaaaaatgtagttatgacaagaaccttttcaaaaatatatggtttagcaggacttagagttgggtggggatatgggtcaaaagaaattatttctgcattaaataaggttaagccacctttcaatgtgagtagaccagctttgtttgcagcctctgctgcagtaaaagacagtttatggctaaataaagaaattaaacatgtaaataaatggagtaaaaaaaatgtattctga

SEQ ID NO: 247368 - DNA, 811 bp, Unknown
  Bacterial polypeptide expressing nucleotide sequence isolated from the Sargasso Sea
ttgtttaaagcatcttctaaacttcaacttgttaatgatgagtatattcaaactaaaagatctatagaaagcatagaagtttataaaggaggtaaatctaatatattaggtttaaaaaatgttattaaattatcttcaaatgaaaattctcatggcccatcttcttctgttgtaaaacttttaaattcagataaatttttttcaaactatcatcgttaccctgaaataaatggtgaaacactaagaaatgcaattgctcgtaaacatggtattgaagctgaaagaattgttttaggttgtggttcagatgaaactcttcttttttcagcattatcattttgtcaagatggagatgagataatttatgcagagcatggtttcgagatgtattctattatttccaaaattgttggcgcaacatcaaaaacaattaaggaagatgactcatacaaaatatctgtacaagcgatattaaatgaaattactgttgcttcaaaattaatttatatcgcaaatcccaataatcctacaggaacttacttaagtagatcagagattgtaaatataatgaaaaaaattccaaagcatgtaattgtagttcttgatggtgcttatgcagaatatgtaatgaaagaagattatgataagggtttttcattggtggatgagttcgataatttaattgtaacacgtactttttcaaaagcttatggactggctggtttgagaataggttggtgttattcaagtaaaaaagtatctaatattcttaaaaaagttaagggtccttttaatactacagccttcgctc

SEQ ID NO: 247369 - DNA, 652 bp, Unknown
  Bacterial polypeptide expressing nucleotide sequence isolated from the Sargasso Sea
atagtatctcaatacagttttataatttatagaatttatagtagaataactggagcaaaagtattatttgctaaagaaaaaaattataaaatttctataaaaaatatactgtcaaaagttacaagtaagacgaagatagtttttttagcgaatccaaataatcctacaggtacattccttaataagaaggacttattatatctaagaaaaaaattaagaaaaaatatattgttagtaatagacgatgcttataatgagtatgtaaaagataaagatttcagttctggattaacgctattttctaaatcaaaaaatgttgtggttacaagaacattttcaaaaatttatggcctagctggtttaagagttggatggggttacggaccaaagtatatcttgaaagtattgaatattttaaaaccaccctttaatgtaaacagagctgcattattcgcagcctctgcagctataaatgataccagttggctgaaaaaagaaataaaacatgttagaagatggtcaaaaatattatattatgaatttaaaaaacttaaaattgaaacaaataagagtggaggaaattttttacttgttaatttcaataaaatcaaaagggactctaaggaaatttttcaaaaattagcaaataatg

SEQ ID NO: 247370 - DNA, 628 bp, Unknown
  Bacterial polypeptide expressing nucleotide sequence isolated from the Sargasso Sea
tgccgtttttgtttgtaatccaaataatccaactggtgtactaaccaaaaaatctaatatgataaaaattatcaaaaacgcacaaaaaaaatcaagttttgtttttgtcgatgaaacgtttattgaattaatctcagaaaaaaatcaatcattgataaaatcaatcaaaacatatgaaaatttattcattttacgttcatttacaaaatcttttggtttagcaggtcttagaattggatacggagtaggtaacaaagaacttgtgagtgttctacagaaattaaagattccatggaatgtaagtaatatagcacaaaatgcagcaagcgctgcaatctgctatcatccatttcttgaaaaatctagagcattaattgaaaatgaaaatcagtttttaaaaaaatctatttctaaaataaaaaatttcagttgttataattcatcaacaaatttcattttgttaaatacaaaaataaaatcaaaaacattgcaaaaaaaactactaagaaaaaatattctaattcgtgattgtagtacttttcgtggattaaatgaaaattatgttagaattgctgtaaaaaaacgtaaagacaatctaaaactaatcaaagcattggaggcgatttaa

SEQ ID NO: 247371 - DNA, 925 bp, Unknown
  Bacterial polypeptide expressing nucleotide sequence isolated from the Sargasso Sea
gagggacctcaagtaagactttctagcaacgaatcttcctatggctgcagcccaatggcgacggaagctttcgtgaacgcccaattcgaattgtatcgttacccagatggcgatcagttgaagctgcgcgaagcggttgccgatatctataatttgtcggaggctcaaattgtctgcggtaatggttctgaagagttaatcggtctgtgtacgcgaagttttgttggcagcggagacgaggttattttgactcggaatcactttgtcatgtgcccgatctatgttcggggacagcgcgcagaagttattttggcggaagaggcaaatgatgtgattgatgttgaacaaattttgtcggcaattactgacaagactcgcatgatcatcgtggcaaatcctaataacccgacgggtacttacattaacgaaacggagttaggcagactcattgaggggattcctgactcggtaattcttattcttgatggagcttatgctgaatacgtgacagcggccgattttgatgatggtttaggtcatgtgagtgaccatgagaatatcgtagtcacccacactttctcaaaaatttacggcctcgctgggcttcgagtaggctgggcctgtgcccaagaatcggtattagagaaagtcaacaaactgcgcaccccatttaatgtaaatggcccagcgatggcggcggccgtcgctgccgttagagatcagtctttcgtcgaaaaagtaagaaatgctaatcgtggggagcttaattggatcttgcctgcaatgcgtgatctaggttttgaggtggccgatagcgtcgccaatttctatctggttgatactgcgccggtagaaggtgcgaccaccgagggggccgtcagttatcttgagtcttgcggcgtgacgccgagatcgggcggcattg

SEQ ID NO: 247372 - DNA, 645 bp, Unknown
  Bacterial polypeptide expressing nucleotide sequence isolated from the Sargasso Sea
tctcatgacctggaagcgatgcataaggcaatagaggaaaatacaaaattaatctttatagctaatcccaataatccaacgggctcatttgctgaatttgaagagttgatggattttttagggaaagtaccaaaaaatataataatcttattagatcaagcttactttgactattcttcgtttgaaactgtggatgcagatttcagtatcttaaaaaaattcccaaatctcgtaatgagtagaagtttttctaaagcttatggccttgctggttttagagttggctactctgtttcgtctgaagatatagctgattacttaaatagagttagacaaccatttaatgctaattcacttgctctatatgctgcagaaaaagctttggaagatgatgaatatatgaaccaatgcctccaacttaactcagagcaaaagaaagtgctttatgaaggattgaattctcaaggatataaatatctccctagtagaggaaactttatttcttttgactgcaagaaagattcacgcgatgcctttaataaacttcttcatgagggggtaatagttagatctttgggtgtgtataaaatgcccaattttttaagagtctctattggcttgcctgaagaaaaccttcttttttta

SEQ ID NO: 247373 - DNA, 877 bp, Unknown
  Bacterial polypeptide expressing nucleotide sequence isolated from the Sargasso Sea
atgcctcttgtcccttcatatataaaaaaactatccagttacaaacctggagcaaatattgatgatattaaattagaaaaatcattaaaaaatgtaataaaattagcatcaaatgaaaattctatgggttcatctcctcttgcaatctcagctattaacaaacaaataaagaaggttaatcgatatccagatgcttcagggaaaaaacttcgtaaaaaactcgcaaacaagtttaacgttaaatccgagaatgtaattattggatctggttcagaaggtataatgtcaaatatattacgaactttcttattaaccgatgatgaaattattgggtcggcaaattcatttattggcttccgtgtattagctactgctactggtagaaaaattaactgggtagaaatggaaaatcataaaactgatcttaaaggcataataaaacagattaatgaatatacaaaaattatttatatagctaatccagataaccctatgggaacatatataactgataaagaatttgatgaattttatgaatatgtcccagaaagagttttagttatactagatgaagcatattttgaatatgcaaatcatttaaatgattacccaaattcaatgaattatagatatgataatgttattacacttaggacattttcaaaagcatatggtcttgcagggtttcgaattggctatggattttctcatgagagcttgattgaaaatttattaaaagtaaaagtgccttttgaaccatcgtatttagctcaagtagcaggtactgcagctttagatgatagtgaattcatgcgagaaacaattaaaaagaacaagaatcaaaaaattaaaatagaaaaaaaacttatgagctagg

SEQ ID NO: 247374 - DNA, 701 bp, Unknown
  Bacterial polypeptide expressing nucleotide sequence isolated from the Sargasso Sea
tatgaaaaaacttaaaaatataaagctttacgaaggaggtatttcatcaattcctggcaaaaagcaagttattaaggtgtcctctaatgagtcaccatttggtccgagcttgcgagtacaaaaggcgatatcaacggctaagtcaaaaactcacaaatatcctgacggaaatagtctggaattaaaaaatgccttatcaaaaaaaaccaaattaaatatcaacaacctcttcgttggaaatggatcagacgagatactaggcctggcttgtcaactttttctaaataaaggagacgaagttattattcctaaacacagttttttaatgtttgaaatttactctaaaatcagtgggggcgttgttaaacgttcatcaacaaaaaatttacgttttgatgtaaaaagtattttaaataaaatcacaaaaaaaactaaaattatatttattgcgcagcccaataatccaacaggattttatctatccaaagaagaattaagattgcttatctcacgtgtccctaagaagatatttataattattgattctgcctatgcagaatatgtaactgataaagattactctaatggcattaactttgccaaaaaatataaaaatatcattgtcactagaactttctcaaaaatttatggtttggcgtccttaagattgggttggtgctatgcccatacagatataataa

SEQ ID NO: 247375 - DNA, 886 bp, Unknown
  Bacterial polypeptide expressing nucleotide sequence isolated from the Sargasso Sea
tgtgatcaatatcttgattcaagaaaatttaataatgatgaaataggaatattcaatggggcagacgctgcaataaatgcaattttcaattgctttggagaaaaagatcaaatatttctaaccacgaatccaacttttggttactattctccttgttcagaaatgcgaggaatgaagaaaataacttgttcttacattgaagaaaattttctattccccatcgaagaatttagtgaaaaaattataaagtatattccaaaattaatatttatttgtaatccaaataatccaacaggaacagttctaagtgctcaagagataattaatttagctaatatcaaaaaagattcattgataattgttgatgaactatatgaaaaatttaatggagatactcttcttgaatcgatagattttgaaaagaataacaatatactaataatccaatctctttcaaaaacggcaggtttagctggtttaagagtaggttttacttttggcaataaaaatttaattcagtacattaacaaagttacaggaccatatgatgtaaatagctttgctattacggcagcattagcagcacttaaagataaatcatatattgataattatgttttagaagtaaaaaaagcaagggaatggattttaaataaatttaaatcaacaaaaatcagaactcactttagtggtggcaattatttcttaatttggccaaaaaaagatcctaaaattttaatacaacagatgagagaaaaaggtattcttatcagaagtatggaaaacaaaaaagatattggtaagtcaataagggttagtattggaactaaagaacaaatgatttttttctgggacaattacaaggtcttagatttaatcaattaat

SEQ ID NO: 247376 - DNA, 691 bp, Unknown
  Bacterial polypeptide expressing nucleotide sequence isolated from the Sargasso Sea
aaagtactggacaaagtcagattgaatgcaaatgaaagtccatattccgtgactcagtctgccactagtgagtcattgaatctttacccagacgcgagacctgatgaaatcagaaacatggttgctagatacttagatatatcaagcgataatattgtcattaccagaggaagtacagaggccattgacgtcgcgatccgaacattttgcattccaaataaggatggaatattagtctttccccctacatttgaaatgtataaattttatgctgaagttcagggaatagagttgcattcaatactccttgatcaagacaataagtattctctggatttaaaggcattagaagcatttgatccaagtaaagctaagttgacatttatatgttctccttcaaacccactcggacataagttcagcaaagaatccatttatcgtgtatgcgagtattttttagattctggacttgtagttttggatggggcatatgttgagtttgatagtgatgaagtttataaagagattttgtctaaatatgacaatgtaattattctcagaactttatcaaaagcatttggcttggctggtgtgagatgtggagctttaatctctagcgatgaaatttgtcaatatattgagagagtgataccaccctactcgttcagcacccctgctgtgaacgcggtca

SEQ ID NO: 247377 - DNA, 526 bp, Unknown
  Bacterial polypeptide expressing nucleotide sequence isolated from the Sargasso Sea
agtagttttggatgaggcttatattgaatttagcgaattgaaaacaatgacagctaagataaatacatacgaaaacctaattatattgagaactctctctaaggcatacgctcttgctggagtaagatgcggagcaataattgcaaattctgagatttcagaatttataaaaaaaattcttcctcccttctgttttgctactccaacaattgagctaattaaaaactcaataacacctgaaaacattgataatgctaaagctcaaatcaatcttataaaaaaagagaaggaaagagttaataaagagttaaataaatctgctattgtgaataaagtatttcaaagtgaaggaaattttttacttgtgaaattcaatgatataaataaactaaaatctattcttgagaatacaaatataattattggatttttaaaatatccttcattaagtaaatttgcccgaatcacgataggtaccagagaagagaatgatattctgcttaatttattaatgaaaatacaatag

SEQ ID NO: 247378 - DNA, 907 bp, Unknown
  Bacterial polypeptide expressing nucleotide sequence isolated from the Sargasso Sea
gctgagtttatttaaaagtagaagaagtccaataaagctatctgcaaatgagtcggcgttaggacctagcccaaaggctgtaaaatcttatagctcaataggaaaaggatttgttagatatccagattctgacggaaccttttttagaaaagttcttgcaaaaaaatttaaaattaaaagagaaagaataatacttggatcaggttcggaccaaatttttgaattagtttgcaaactttttttaaataaaggtgatgaagttattgttccagagtacagttttataatttacagaatttacagcaggatgtttggagctaaagtaagatacgctaaggaagaaaattttaaagcttcagttacttctattttaaattgcgtaaatagaaagactaaaatcgtttttttagcgaatccaaacaatccaacaggtacgtatttggggaaatctgaaattataaaattaagaaaaaaattaaggagtgatattttattagtcatagacgatgcatactatgaatatattgaagaccctaattactcatcagggatagatctattttctaaatctgaaaatgtaattgttacaagaactttttcaaaaatttatggtttagcaggattaagaataggttggggctacggttcaaaaaatattattaaaaagctttacgagattaaaccaccttttaatgtcagcagacctgctctttttgcggctacacaagccgtacaagatagcaaatggttaaaaaaggcagtcgaccataatactttttgggctgaaaaaatatttgaagttgcagatcaaataggaattacaacgaataaaacaaatgtaaattttttcctttttaattttaactatgtaaagctaaactcatctcaagtatttaataaattagcg

SEQ ID NO: 247379 - DNA, 634 bp, Unknown
  Bacterial polypeptide expressing nucleotide sequence isolated from the Sargasso Sea
atggatttaccaaaaccaataaaatttgaagttgaaaggtatgttggaggattatctcaatttagaagaattgataatccaataaaattatcagcaaatgaatcggctcttggaccaagcccaaaagcagttaaagcttatgaaaaagaaaaaaataaaattttaaaatatccagaatctgattcaagctctttgagagaagctttatcttataaatttaaaatagatcaaaaaagaattatttgtggatcaggttcagatcaaatattcgatttaacttgccgtttatttattaatccaggagacgaagtaatagtatcagaatttggttttattatgcataaaatatatgcatctctttacaaggctaaggttataacggcaaaggaaaaaaattttaaagtttctgtagaagaaataataaaaaaagtttctgataaaacaaaaattgtatttgttgcaaatcccaataatcctacaggcacatatttgtcaaaaagtgaaatacttgatttaagaaaaaaacttagaagcaacattcttttagtcgttgatgatgcatattttgaattcataaattctggtaattttaattcaggattagatcttttcaaagattctcccaatgtaataa

SEQ ID NO: 247380 - DNA, 719 bp, Unknown
  Bacterial polypeptide expressing nucleotide sequence isolated from the Sargasso Sea
actgttaggtgtttctggaataacccttcctcttgctggtgtagcaagtacaacagatccctttccagctagagtaattaggaaagaaggagaacctataaagttaagctccaatgaaaatccctacggcccatcagataatgttcgaaatgccataataaaagcctttgatgaggcttgcagatacccttatggaagagttacagaattagaagaaaagattgctaaaaaagagggagtaagccctgacatggtacttgtaacaggaggatcaaatgaagccttaagggcaactggaagatattttggaatagaaaaaaaagaaataattgcttgtaaaccgacttatctagcactaatgacatatgccgaagattttggttgtgatataaattgggtgccacttgatgaagaattaaaatacgatctaaatgaaatttctagaagagtttcggataagacaagcatggtatttatatgtaacccaaacaatcctactggaacaataaacacagctagtgacttagaagatttttgtctatctacctcaaagaaaacatgtgtttttgtggatgaggcgtactatgactattcaattcctgatggatatcctactatgacaaaattagttaaagaaggacatgatataatagtttcaagaactttttcaaaagtctatgggttagcgggagttagagttggctacataatctcaaatg

SEQ ID NO: 247381 - DNA, 679 bp, Unknown
  Bacterial polypeptide expressing nucleotide sequence isolated from the Sargasso Sea
atgtcaaatatcaatcctttaaattatattcacgatagatggcgtaggctttcaccttatgaagccgtagatcctccggagaaattggctgaagctgcaggcattcaagagaatgaagtcataaagctcaatgctaatgaaaacccttatggtccttcacctctggtgctagaggctctacgagatcttcctaatgtccacatttaccctgacccagcgcaagtagccatgcgtaaagccataggagattacattaaggttgatccacataatgtcgtagttggcaatggtagtgatgaaataattgatctggtgttccgtgcagttctatcggacggcgatgcaattattaatgcagtgcccacttttgggatgtacccagtaacggcccagatttgtggggctaatactatttctgtacccaggggttcttcatttgaaatacctgttcatcaagtaatggcatgtgcaagcaaagccaaaataatagtagttgtatcccccaataacccaacaggcaatttaactccccttgcagatatcgaggttttacttgactcaggctcattacttgtattggatgaggcatatgcagaatttagtaatcaaactgctatggaattaattaataagtatccaaatttaattatcctccgaacattgagtaaatggggtgggc

SEQ ID NO: 247382 - DNA, 679 bp, Unknown
  Bacterial polypeptide expressing nucleotide sequence isolated from the Sargasso Sea
gatgaataattatcattatgatttggatggtatcttgtctaaaattaatgcacaaactaaaattatatatttagcaaatcctgataatccaactggaacatattttaataaaaaaatgttcgatgattttataaaacaagttccaaatagagttttggttatcttggatgaagcttattttgagtatgcatcccatttaacagattttccagattcaatgatatataagtatgacaatgtaattacattaagaactttttctaaagcttatggattagccggattaaggattggttatgggtttgggcatcaagaattaattgatagtctaatgaaggtgaaattgccatttgaaccttcttcttttgctcaaatggcaggtttagcatcgttggatgataatgaatttttagctaaaacagtaaagagtaatgcaactggaatgcaaaaaatattaaattctttaaagaattacgatgtaattccatcagttacaaattttgttactattgaattcaatagtaataaagactctcatgattttactaaattcatgttgtcaaatggagtgatagtaaggaatttaaaaggatttggattggaacattgtgttagaataagtatcggcactgaagtagaaaacgatttcttttgtgatgttttatataaaataaaatag

SEQ ID NO: 247383 - DNA, 436 bp, Unknown
  Bacterial polypeptide expressing nucleotide sequence isolated from the Sargasso Sea
tccaaagttatgggattagcaggattaagagtgggatggggatatgcttctaaagagattattaattctttaaataaaattaaacctccttttaatgtaagtagacctgctttgtttgccgcttctgccgctattcaagatagtgtttggcttaaaaaagaagttaatcatatttctaaatggaataagatattattcaaaaaatttaaagaaatgaaaattgcaacaaacgagagtaaaacaaattttttattgttaaattttgatagagtgaatataagttcaaagagagtatttcaaaaattaggtaatgcaggtattttagttagagcaatgaatgtttatggaataaaaaattctttaagaattactattggaaagactatagaaaataaaaagttaatttttaaacttaggaaaattttaaatgtttaat

SEQ ID NO: 247384 - DNA, 836 bp, Unknown
  Bacterial polypeptide expressing nucleotide sequence isolated from the Sargasso Sea
cctgattcgtcctgaagttttaaaattaaaaccatatgtcccagccaccaaagtactggacaaagtcagattgaatgcaaatgaaagtccatattccgtgactcagtctgccactagtgagtcattgaatctttacccagatgcgagacctgatgaaatcagaaacatggttgctagatacttagatatatcaagcgataatattgtcattaccagaggaagtacagaggccattgatgtcgcgatcagaacattttgcattccaaataaggatggaatattggtatttccccctacatttgaaatgtataaattttatgctgaagttcagggaatagagatgcattcaatccttcttgatcaagacaataattattctctggatttaaaagcattagaagaatttgatccaagtaaagctaagatgacatttatatgttctccttcaaacccacttggacataagttcaccaaggaatccatttatcgtgtatgcgaatatttttcagattctggacttgtagtcttggatggagcatatgttgagtttgatagtgatgaaaattataaagagattttgtccaaatttgacaatgtaattattctcagaactttatcaaaagcatttggcctggctggtgtgagatgtggagttttaatctctagcgatgaaatttgtcaatatattgagagagtgataccgccctactcgttcagcacccctgctgtgaatgcggtcattgaaagcctttctgatgaaggcattaaggaatcaaaaagaaacatagagaccatcatcgaagatagaagatggctcgagacggaattggaatcat

SEQ ID NO: 247385 - DNA, 393 bp, Unknown
  Bacterial polypeptide expressing nucleotide sequence isolated from the Sargasso Sea
ttggctatggatatggtgattctgatttaatcgccttgttgaatcgtgttagacaaccatttaatgttaatagtttatctcaagtagcagctataagcgcattaagcgattctgattttttaaatcattgtaaaaaggcaaatgatttagggcgaaagcagttagttgaaggcttaagtcgtctagggttaaaggtttatggaggttctgctaattttgtctttgcccaagtaggtcagggtcaaaaacttttcaaaaagcttcaagctaagggtattatcattcgtccattagacagttatggtttacctgaatatattcgtattactattggtactgaaacccaaaatgatcgatttttaaagattctagagaaagagatggattcttaac

SEQ ID NO: 247386 - DNA, 766 bp, Unknown
  Bacterial polypeptide expressing nucleotide sequence isolated from the Sargasso Sea
cctgggaaaaggaatgttattaaactatcttctaatgaatctccttttggaccaagtccaaatgtggctttaaaaataagaaaagcaattaaaaaaacaaatcgataccctgatggagattataaacaattaaaagaggctattggaaaaaagtttaagctaagagaatcgaatttattttgtggaaatggatctgatgaaattctcggaattgtttgtcaattatttttaaataaaggagacgaggtaatcattccaaaacatagttttttaatgtttaatatttattcaacagtaaatggaggtactattaaaacttctaaaaccagaaaccttaagtttcaggttgaagacattttaaaaaaaataaattcaaaaacaaagattatttttttagctcagccaaataatcctactggattttatttaaaaaaaaatgaattagcgaaactaataaaaaaagtaccgaagcggatagtaattgtaatagatgccgcttacgcagaatatatgactgataatgaatatacagcaggaataaattttgctaaaaagaataaaaatatcattgttacaagaacattttctaagatttatggaattgcttcactaagacttggatggtgttatgctcatagcgatattatcaatcttatgaataagattagaggtccatttaatgttaaccatgtagctcaagaagctggaattgcagcattgagagataaaaagtatgaattaaaggcagttaaacataataaattct

SEQ ID NO: 247387 - DNA, 661 bp, Unknown
  Bacterial polypeptide expressing nucleotide sequence isolated from the Sargasso Sea
tttgaatgaaatgaaaaatagggtatcagacaaaacaagtatgatttttgtatgcaatccaaataacccaacaggcacaatgttagactcaaatgctttagaaaatttttgtttaaatatttcaaaaaagacttgtgtttttgtagatgaagcttactatgattactcaattaatgacggataccctacaatgactaaacttgttaaaaaaggtcataatattattgtttctagaacattttctaaagtctatggtttagctggattaaggattggctatcttatttcgaacaaggaaagaataagtcaattgaaaaaatgtacaatggctggaactaatattctagcttctcacgcagcaattaatgcatatgatgatatagaattttttaattatagtttgaataaaaataatgaaggattaaattttttatattctctttttgaagatctggacttagaatataaaaaatcatacacaaattttgttttttttaaatcaggacatcatatagataaggttcaagattttatgaaaaagaaaaatattttagtaggtagagcatttcctccttattacaattggtgtagaattagcactggaaagatggaagatttagaaaaattttcaattgctttaaaagatttttacaaaacctga

SEQ ID NO: 247388 - DNA, 700 bp, Unknown
  Bacterial polypeptide expressing nucleotide sequence isolated from the Sargasso Sea
caaaataggctttgatgaaaaattaaatctaaaaattgatgatcttatatcatcaataaataaacaagtatgtttaatagtcatagcaaatccaaatagcccaactggcacaatcatcagtgaaaaaaatatcgatataattattaaaaaagctaataaatatggagcaaaagttttgatagatgaagcgtattttgaattttcaaaatataactgtataaaaaaaatttcaaagtataaaaatttagtaataataagaactttttcaaaaatttatggtctagcaggtctaagatgtggatatgttgtttcaaattacaaaatcataaaagaatatactgctataaaaccaatgtatgaaataaattctattgctgtaaaagctatcgaaactattttgagcaacaaacgaattatcaaatcttatttgaatgaattaaaaatttcagaaaaagcagcatcagatttttgtaaagaaaataaatatgaatttataaaatgtcatgcaaatttttttcatgtttcgtttaacaataatcctttaaaaattcaaaattttctcgaaaaaaatatgtttttgataaaaggtggtccaggtacgaaagaatatagcgaatatgtaagaataagtttggcaaataaaaatacaatacttaaaacattaaataaaattaaatcttttttaagtaaaaaaagatga

SEQ ID NO: 247389 - DNA, 839 bp, Unknown
  Bacterial polypeptide expressing nucleotide sequence isolated from the Sargasso Sea
tatggtaagtattggctttaatgaaaatccatatggaccttcaccacgtgccatcagagctgtcactgattctatcatggacgtcaatcgatacgactttgttgcgtatacaaatcttgagaatgcaattggcgatcatcttggtttggaaaaagatccaaatcctgcttttggggcgaacccattgttcggtaaaagtctctatcctgtatacgttgagggaggttccagttttattttaaatcaagtgacaatgctttatggtgttaagaatggtgtaggtgaaataatagaaattgatcctggttatggaggagtgactagggctgccatgacactccgatcccagttcggcgctgaaataaaaattaaaagaatcccaactacttcaaaatttgtccatgatctaaaagcaatggaggaagcagtcacagataatacaactcttgtggtgattaccaatccaaacaatccaactggaacacttctcacacatcaagagttggagagatttataaacaccattccaagtcatgttactttgcttattgatgaagcatatattgattttgtgagagaagaaaattatgaaactggggtttctttagcacaaaaatacaataatgtgattgttaccagaacgttttcaaagatgtatggattagcggccatgagaattggctacgcagttgcaaataaatcgataatttctgatttacgtgcatctggaaacagttggggacttcccagcatcaattgttatgctgctgctgctgctttgaaagatttatccttcactaggcaggttaaaagacttacagatgagacgaaggattatt

SEQ ID NO: 247390 - DNA, 762 bp, Unknown
  Bacterial polypeptide expressing nucleotide sequence isolated from the Sargasso Sea
gttgtcagcaaatgaaagtgcattgggcgcatctttgggagccattaatgctcttaaaacttttcctactgatctaaatagatatccacctcaagtgagtgatgagttgacaagtgcaatatctaaaagatatttacttaataagaaaaaaattattttaggaaatggttcagatgaattgatatcaattctttctcaaacctttttaaactcaaatgacgaagcaatttacacagaatttggatttcttcaatttcctcaagctattgcaatagctggtgcaaagggagttatagcaaatgatgtaaattttacagctaacgttgacaatattctttcaaaaatcaacaataaaactaaattaatctttcttgcaaatcctaacaacccgactggtacatttataaccaagaatgaaataattagattacatgattcaataccttcaaatattcttttagtttatgacgctgcttactcagaatttgttgttaatgatgattacacagatggtagtgaattggcggatgaatatgataatgtgatcatgttaagaacattttcaaaattacatggactagcttctttaagattaggatggggttacgcgtctgaaaatataattgataaccttatgaaagttcgaggaccatttagtgtaaacactgcagcaattatggcaggtgtagctgcattagaagatttagaatttcaaaaaaaatctgttcaacataatcttaaatggatgtcttggtttgaaaa

SEQ ID NO: 247391 - DNA, 153 bp, Unknown
  Bacterial polypeptide expressing nucleotide sequence isolated from the Sargasso Sea
gctgcgggcacgcttagaaaatagtcacctcatcaggagtcgagtcgtgagccgttactggagcgatatcgttcagcaacttgtgccctatgtcccgggcgaacagccggccatcgcgcggcccatcaagctgaacaccaacgagaacccgta

SEQ ID NO: 247392 - DNA, 886 bp, Unknown
  Bacterial polypeptide expressing nucleotide sequence isolated from the Sargasso Sea
aagataattgattctatcgaaatgatcttaaaagaaacccatcgttaccctgacggtaatgcaacccgtctcaaagctaagattgcagataaatttgatgtgcttgaagatcaagtaaccattggaaatgggtccaacgatattatcgagttcgttgcgaggagctttttaggtcccggtgatagtgcaatctattctgagcatgctttcgctgtttatcctttggtagtgcaggcagtcggtgcaaaggggatagaggtccctgctaagaatttttctcacgacctatatgcgatgttagattctataaaggaaagtactaagctgattttcattgctaatcctaataatcccactggttctttcatagaatattccgaattgatcgattttcttgaaaaagtgcctgaggatgttcttgtcctgcttgatcaagcctacttcgaatattcgtcttacgaaacaaaagatatagattttgatgtgctacaaagattctcaaatcttgttatcagcaggagcttctctaaagcttatggtcttgccggatacagggtaggcttcgctgtctcttccatagagatagcagactatttgaacagagtgagacaacctttcaatgctaattctcttgcacttcatgctgcggaaattgctttaggtgacgaaaaatttatccaaaaatgcctagagctgaatcatgagcaaaagcagatcctttttacagaattgggatcgttgggttatgaatgcttgccgagcagagggaactttatttcgtttgattgtaaggaggattcgaaagatgcatttaataaattgttacttgagggagtaattgtaaggtcattaacagtttacaagatgccaaattacctacgggtct

SEQ ID NO: 247393 - DNA, 635 bp, Unknown
  Bacterial polypeptide expressing nucleotide sequence isolated from the Sargasso Sea
aatgaataatcctactgctaagttaagcattgaaaaattagaaacttacaagccaaactttggcaaaagcaaaataagtaatctaattagattatcagcaaatgaaggcgctttaggaacgtctttgaaagctataaaggcgttaaattcttttactcaaaatataaatagatatccacctcaagttagtaatgacttaataagcgctatagcaaatagatactctcttgataaaaagaaaattattttaggaaacgggtctgatgagttaatttcaataattacccaagcttttttggacaccacagatgaggccatctacacagaatttggctttcttcaatttcctcaagcaatatctgttgctggagccaagggtgtagtggcaaaagatgttaattttacagctaatgtagataatattctttcaaaaattaataaaaaaacaaagctaatttttttagctaatgcgaacaacccaacaggtacctttattccaaaagaggaagtcattaggttacataaatcaataccctccaatattttgctaatttacgatgccgcatattcagaatttataaataataatgattatatagatggaagtaatttaggtgataatcatgataatgtga

SEQ ID NO: 247394 - DNA, 883 bp, Unknown
  Bacterial polypeptide expressing nucleotide sequence isolated from the Sargasso Sea
caaaagctatcagaattttatagtctaccacgagataactttattataggagagggtatcgatggccttttggggaacctagtaagacttttcattgagccaggcgatgaggttgtttcttcacttggagcttaccccactttcaaataccatgtagatggctttggtggtaagatttctcttgttccttatagaaactatttcgaggatctagatgccttattgattgcagctaaaaagagaaaggcaaaaattttgtatttgtctaatccagataacccaatgggaacttttcatcccaaagatcatatggaagatttcatcgataaaattcctgatgatacgatattatgcctagatgaagcgtatgcagatttcgttgataaaaatgaattagcatcaatcgatttggaaaaggaaaatgtaataagatttagaactttttccaaagcctatgggttggccggcttgaggattggttacggaattggaaacaaaaaaatggttaaagcttttaataaagtaagaaatcattttggagtaaataaacttggtcaaatcgctgctaaagtggcattagaggataaagatcatttaaagaccgttttgaaaaaagttgatcaatcaaaaaacgatattgccgcggtatttcagaggtttggctttacctcattatcgtctcgaacaaactttgtacctgtaaacagtggtggggatggtaaattcgcagctaagttaatgagaagtttaatccaagaaaaaatctttgtacgtatgccaagcgttagtccattaaattcttttataagaatcactgcaggtacaagtgatgatttgacagttttggataatgctttgaataaaataattaaaaagatttaag

SEQ ID NO: 247395 - DNA, 661 bp, Unknown
  Bacterial polypeptide expressing nucleotide sequence isolated from the Sargasso Sea
tctggatttaaaagcattagaagcatttgatccaagtaaagctaagctgacatttatatgttctccttcaaacccactcggacataagttcagcaaggaatccatttatcgtgtatgcgaatatttttcagattctggacttgtagtcttggatggagcatatgttgagtttgatagtgatgaagtttataaagagattttgtctaaatatgacaatgtaattattctcagaactttatcaaaagcatttggcctggctggtgtgagatgtggcgttttaatctctagcgatgaaatttgtcaatatattgagagagtgataccgccctactcgttcagcacccctgctgtgaacgcggtcattgagagcctttctgatgaaggtattaaggaatcaaaaagaaacatagaaattattattgaagatagaagatggctcgagacagaattggaatcattggacgaagtcatagaggtttttcaatcatatacaaacttcatacttgtcaaagtgaatgatgccaaagcattttgtaaaaagtctcaagatttaggatttttattaagagatgtcagctatcaaccattgcttgaaaattgtgtaagaatcactgtcggcacgactgaacaaaatcaaaaactaatcagaggactcaaataa

SEQ ID NO: 247396 - DNA, 463 bp, Unknown
  Bacterial polypeptide expressing nucleotide sequence isolated from the Sargasso Sea
ttggaaaggtctataactgtgaatagtaatgaaataaagtcaaggtcacaaattcttaaaattccatcatactcgagcggtgacagcaaagttgcaaattttgaaagcccaataaaactgagttcaaatgaaaacccattggggcctagcaaagacgcaattgatgcatttatcaaggtaaaggatagtttggctgtatatcctgatagcagccactttcggctgcggtccgcaatcagtgttattcatgatattgatgttgatagaataatttgtggtgcaggttctgacgagataatacaatttttatgtcaatgctacgcaggtattggtgatgaggttatccatactagacatggttttttgatgtataaaatctcagctattgcggctggggctagaccagttagtgttcctgaggttaaaagacgagcggacgtcaccagaatatggaggctgtaag

SEQ ID NO: 247397 - DNA, 535 bp, Unknown
  Bacterial polypeptide expressing nucleotide sequence isolated from the Sargasso Sea
atgatgtataatgaaaatccttatggtccctctagaattgctcagcgcgcaatgcaaaaggcattttctgaatccaatctttataccatgcgccaagctcagaaagaatttgttcagcttattgcattattgaataatattgacaaagatcagatttcgattggctttggctccagagaaattttaaataaggccgctctaatgaatggcatagataagggtgagatgatatcaccccaattaacctttgaagcaattaataattatgctaaaaataccatgaatacaaaagttaatcggatcaaaatggatgatggtatcaatattgacttggataaaatggctagcaagatcaatgaaaggacaaagatagtttatgtttgcaatccaaacaatccaaccggtctggccttggatagtaaccagctcgaatctttctgccttgaagtgtcaaaaaaggtattggtatttgtagatgaagcatatcatgaatatgctttggatggtaattataaatcaatgtcgcatttaggaa

SEQ ID NO: 247398 - DNA, 852 bp, Unknown
  Bacterial polypeptide expressing nucleotide sequence isolated from the Sargasso Sea
tatgcctctagttccctcatatattaaaagacttgcaaactataagcctggaaaaccaatcgaagaagcaaaaagagaacttggtctaaaaaatatagttaaactcgcatcaaacgaaaacccacttggtgcatcaccaaaaacaatttcagcaataaaggattctttaacaaatattcaccggtatccagatgcatcagggtatcagctcaggtcaaagcttgctgaaaaattcagtctcaacattggaaatgtagtaattggtgccggttcagagggtataatgtccacgatcatgcgaactttcttgctccgagatgatgagttaattagcgcaaaaaattcctttattggattcaaggtacttgccaatgcttcagggtgtcgagtccattggattccgatgaaaaaatattgctacgaccttgaagccatgaaagaaaaaattaatgattatacaaaaattatctacatagcaaaccctgataaccctatgggaacttatattactaaacaagaatttgacagtttttacaaacatgtgccagaaagagttttaattattcttgatgaggcttatttcgagttcgcaaatgaaatacaagattacccagattcaatgacctatagatatgataatgttatcactctgcgaagtttttcaaaagcatatggattaggaggggtacgaattggttatggatttgctcatgaatcactggtcaataatatactaaaggtaaaagtcccattcgaaccgtctacgattgcgcaagttgcgggccacgctgcattagatgatacaaaatttctccttaaatcaataacaataaataatgaaggtaaacaatt

SEQ ID NO: 247399 - DNA, 233 bp, Unknown
  Bacterial polypeptide expressing nucleotide sequence isolated from the Sargasso Sea
tatgaatttaccaaaaccgataaaatttaaggttgaaagatatattggcgggttgtctcaatttaaaaaaattgagaatccaataaagttatccgcaaatgagtctgctattggaccaagtccaaaagcaattgaggcatatgcaaaagaaaaaaataaaatttcgaaatatccagaatctgattcaaattttttaaaagaagttttatctgataaatttaaattagattcga

SEQ ID NO: 247400 - DNA, 418 bp, Unknown
  Bacterial polypeptide expressing nucleotide sequence isolated from the Sargasso Sea
tatgacattacctaaaccaataaaatttaatgttgaaagatatattggaggattagctcaatttaaaaagattgaaaatcctatcaaactatctgcaaatgagtcagctttaggacctagtccaaaagctattgaggcgtttaatagtgaaaaagataaaattaataaatatcctgagtctgattctagctctctaagaaatattttgtctgcaaaatttagaattgatcaaaatagaataatatgcggcgcaggatctgatcaaatatttgatctaacatgccgtttatttcttgaaccaaatgatgaagttgttgtcacagaatttggttttataatgcatagaatttatgcatctttatatggagcaaaagttatatttgctaaggaaaataattttaaagcttcagtagaagaa

SEQ ID NO: 247401 - DNA, 759 bp, Unknown
  Bacterial polypeptide expressing nucleotide sequence isolated from the Sargasso Sea
aattggaattaaaccgctatccagacccagactgcaaaatattgaaagaagccatttcaaatcgtattcaaatatccccagagcaaattgttattggtaacggatctgatgaattaattcagtgtttaatgcaagttttttgcgatgaaggggatacaatagcttttccggaaccaacctttggcatgtacgcaattatgggaaaggggatggggttaaatacccaaacttttccattaaacagtaaatggaattttgaaactaaattaattattgaaaaattaattacaagccatacccggattattttcataagctatcccaacaacccaacaggaaattgtttttcccaaagtgaaattcaagagcttatcgaaaactttgaaggaatcgttgtattggatgaagcttattatgatttttcaggacaaactttcctcagtcaaatgaagaagcataacaatcttgttattttaagaagtttatctaaaataggcttagcaggactacgagtcggatacggaatatttcctagtgtcctagccaatgaaattaataaagttcgcctaccctataattcgaattcaatatcacaaattgctgcagcagagctattgaaaaatttttcaatggtgcaaaaacaaattgattcgattaaagatgagcgaattcggttactagatgaatttactaaaataaaatcgattaacgcctttcccttcagatgcaaattttattttgtttcaaacttcagatgat

SEQ ID NO: 247402 - DNA, 505 bp, Unknown
  Bacterial polypeptide expressing nucleotide sequence isolated from the Sargasso Sea
gatgttcaatgaaaatccctatggaccctctgatgtcgccaagcgtgcaatgagaaaggcctttacagaatctaatttatataccatgcgtgcagctttgaccgaatttaaggaattaatagcgaaattaaatggagttaagccggaaaatattgcaattggctttggctcaagagagatcttaaataaaactgctattatgaatggagttgatggcggtgatttgatttcaccttctttaacatttgaagcaatcaatcagtttgcatctaatacgatgaaatcaaatgttatcagagtacccatgaccagtgatatcaatattgatctgaatagaacggaagaggtggtgaactccaaaactaaaatggtctatttatgcaatccaaataaccctacaggcattataatgaattcctcagacctagaatcattctgtaagaatgtttctaaaagatcaatagtctttgtcgatgaagcttaccatgaatatgtcatgataaga

SEQ ID NO: 247403 - DNA, 1084 bp, Unknown
  Bacterial polypeptide expressing nucleotide sequence isolated from the Sargasso Sea
atgaaattacctcaaccaagaaaaattattgctgaaaaatatgtagctggtctaagtctttttaagagcagaagaagtccaattaaactctctgcaaatgaatctgctttaggcccaagcccaaaagctgttaaatcctacaattcagttggcaaaggttttgttagatatcccgactcagatggtacgtattttagaaaagtattggcaaaaaagtttaaattaaaaagggatagaattattctaggatcaggatctgatcaaattttcgaattaatctgtaaactttttttaaataaaggtgatgaagttgttgtacccgaatatagttttataatttacagaatttacagccgaatgtttggtgctagagtaagatatgctaaagaggataatttttcagcatcagtagaatcgattatgaattgtgtaaataaaaaaacaaaaattgtttttttagctaatcctaacaaccctacagggacttatttaaataaaactgaagttttaaaattaagaaaaaaacttagaagtgatattttacttgtaattgatgatgcatattttgaatatataaaagatccagagtatgcatctggaattgatcttttttcaaaatcggaaaatgtaattgttacaagaacattttcaaaaatttatggtttagctggattaaggattggttggggatatggtccaaaaaaattaataaaaaaattatatgaaatcaaaccaccttttaatgtgagtagaccagctttatttgctgccacacaagctgtcctggatacaaaatggcttaataaagctattgaacataataatttttgggctgaaaaaatatatagtgtaattgatgaaattggtatttccacaaatagaactaatgttaatttctttcttcttaattttgattttgtaaataaatctgcttctcaagtattcaacaaattagcaaattcagggatattagtaaggcaaatggatgtttatgatataaaaaattcactaagggtcacaataggaaatagtaaagaaaacaaaaaatttatttcagttttaaggaagatttttaatgtttgat

SEQ ID NO: 247404 - DNA, 1084 bp, Unknown
  Bacterial polypeptide expressing nucleotide sequence isolated from the Sargasso Sea
tatgaaattacctcaaccaagaaaaataattgctgaaaaatacgttgctggcctaagtcttttcaagagcagacgaagtccaattaaactctctgcaaatgagtctgctttaggtccaagccctaaagctgtaaaatcttacagttcaatcggaaaaggttttgtaagatatcctgactctgatggcacatattttagaaaagttttggcaaaaaaatttaagttaaaaagagatagaattattttaggttctggttctgatcaaatttttgaattagtatgtaaactttttattaataagggtgatgaagtcattgtacctgaatatagttttataatttatagaatttacagcagaatgtttggtgcaaaagttaggtacgctaaggaagaaaattttactccttctgttgaaacaataatgaattgtgttaataaaaaaacaaaaattgtttttttagctaatcctaacaatcctactggaacttatttaaataaagatgaagttttaatattaagaaaaaaacttagaagcgatattttactagtaatagatgatgcatactttgaatatataaaggatcctgaatatagttctggaattgatttattttcaaaatcagaaaatgttatagtaaccagaacattttcaaaaatttatggtttagcaggattaagaattggttggggttatggtccaaaaaaattaataaaaaaactatatgaaattaagccgccttttaatgtaagcagaccagccctttttgctgctacacaagctgtattagatacgaaatggcttaacaaggccattgagcataataatttttgggctgaaaaaatatttgatgttattgatgaaattggcatagctactaatagaacaaatgtaaatttttttctacttaattttgattttgttaatcagtctgctaataaagtatttaataaattagctaattctggcattctagtaagacaaatggatgtttatggtattaaaaattcattaagagtaacgataggaaatagcaaggaaaataaaaaatttatttcagtgttaagaaagatttttaatgtttga

SEQ ID NO: 247405 - DNA, 1071 bp, Unknown
  Bacterial polypeptide expressing nucleotide sequence isolated from the Sargasso Sea
catgagtcccgacattcttaaaaatcttaactctgggattggggatcttcgtccatatgagcctggtcgttcaatcgatgaagttgttgcagaatttggccatcatgaagtagttaaactagcgagcaatgaaaatccacttggagcatctcccaaggcgatatcaatccttacagagcttaaaaatgatttacatttatatccggatggaaatggtacaaagcttaaaaaagagatcgccgatcatgagaatgttgcttttgacaatattattataggtaatggctctaatgagattttggaattagcagcaagagccttcctgagcccaaacacctcagcaattgcttcaaagcatgcgtttgcagtatataaaattgttactaaatcctcaggcgcatcattaacagaagttccttcatgcaactggggtcatgatttaaaatcatttgatgatcacttggatagtggtacaagagtaatttttattgcaaacccaaataatccaactggcacatacaatactcacgaagaagttcattcgttgcttaaaaaagttccttcgtccgtattggtagtattagattgtgcatatttcgagtatgtaaccaaagacgattacgtaagacctatagatcttctaaatgaatttgataatttattaattacaaaaacattttctaaaattcatggtttggccagcatccgtgttgggtatggcgttgctaatccatctttagttgaggctcttaatcgaatcagacagcctttcaatgtaaatactatagcccaagctatggcttgcaaagcaatcaatgatcatgagcatattcgacaaagcatggagcttaactcacaacagtacgaatttttgtttaatcaattatccacccttggacttgactgcattccatcagttggaaactttattaccttcaaaggaaactttgtaggtaaagaaatttttgatagtctaatgaaaaaaggagtcatcgtacgatgtgtcgatttgtatgatatgaaagactatataagagtgacaattggcacagaagctgaaaacttaaaatt

SEQ ID NO: 247406 - DNA, 157 bp, Unknown
  Bacterial polypeptide expressing nucleotide sequence isolated from the Sargasso Sea
atgccattagtgccatcatatattgaaaatttggaaaattatgtccctggcaaacctattgaagaagtacaacgtgaacttgggataaaaaatattgataaactagcctctaatgaaaatccaattggcccatctcccaaagcaatgaaaaaataaa

SEQ ID NO: 247407 - DNA, 394 bp, Unknown
  Bacterial polypeptide expressing nucleotide sequence isolated from the Sargasso Sea
gatgggcacggcggggctggcattgtcgccgctgacgatggggcaggtggagatacctcccggccagattcggctgatattcaatgaaaacccctatggccccagcccgaaggcgctggccgaggtggccaagattctgcccaagactgcctactaccccggcgccattgaggacgatctcatgggtttgtttatggcgcgccaccagctcgatcgtgagcaggtgtttttggcatcggggtcgaacgaaggtcttcaggccgcaatgatggcctttggtaaacacggcaaggtcatctcacccgcgttgacgtactccgaccatcttcaatacgccgagaagctcggtgtcgcgttgcaccggggtgccgttgcgcgacgacatggctattga

SEQ ID NO: 247408 - DNA, 823 bp, Unknown
  Bacterial polypeptide expressing nucleotide sequence isolated from the Sargasso Sea
gctcttttaggctatttggtaaggctatttgtccaagtgggcgacactgttgttacatcaaatggatcctatccaacgtttaactatcacgtcgagggttttggtgggcaaatttttaaatgtgactatctagacgataaggaagatctaagttcacttattgatactgcctctaaaactaaagcaaaactagtgtacatttctaatccaaataaccctatgggcacttggatacgcggtgagcaaatagttgctctactggaaaaactgccaaaagatagtttgcttattttggacgaagcatacgttgaatttgctccagatgaagcaaaagtcccaatatttttagatgatcccagaatgattagatttcggacgttttcgaaggcctatggcgttgccggcgctcggataggatatggtattggaagtaaagagctaatcgctgaatttgataagataaggaaccattttggaaacagcttgttgtctcaggtggcagcaatagcagctataaaagatcaaagatatttgtcagagatagtaaaaaaaatctcgcttggcagggaggaaatttaccaaattgctcagtcaaacggtttaactgcgataccatctgcgacaaactttgttgctatcgactgcggtaaagatggaaaatttgcaaatcaaattatgaatggcctgcttgaagcgaaactttttgtcaggaagcccgtggttgccccacttgacagaacaatcagagtaacagttgggcgagatgaagaaatagatttgctcaagaaggctctacctgatgtccttaaagctctgcgataac

SEQ ID NO: 247409 - DNA, 515 bp, Unknown
  Bacterial polypeptide expressing nucleotide sequence isolated from the Sargasso Sea
atatgtggaagagaaagactactcaatagggtttgaattagcaaaagaaagcgaaaatattgtaattacaaaaactttttcaaaggcttttgggctagctggcttaagggtcggttgggcatattgcccaaaaaaaattgctgaaaaactagatattctaaaagttccattctcagtaaatacagctgcacaaatggctgcgataagtgctctagaagacgatgatcacattaatttttctgtagagcataacagcaaatggaaaaaaatattaaatgattgttttgctgaagttggtttaattgtgtatccgagtcaatgtaattttatacttgttgaatttctagaatcttctaaattttctgcgaaagaggcttatcatctattaagttctaaaggaataattgtaagagagatggaagaatataatttaccaaactgcttaagaataaccatcggaaaggaggaagctaatctgttacttatagaaacagttaatgcttttaaaaaataat

SEQ ID NO: 247410 - DNA, 997 bp, Unknown
  Bacterial polypeptide expressing nucleotide sequence isolated from the Sargasso Sea
atgaaatccataacaaaacctcaagattttccatccgcagcaaattttagttatttaaacgccgccaatgtgtctctgatgtttagtggtgcagaaaaaaagattcatgattggtttaatgatgtatccaaaaacggaagtaataattttacagaagaagtagaggagaatgtttttaaggatttacatctatccgctgcgaaactcattaatgccgaaccgacagaaatatcagcaggttcaagcgcaactgaattacttagctcgctggcgtggtctgtaagtcccaaaaatgagcaaaatatagtaagtactagctcagcttttcctagcacagtctacccatgggtacgcatcgctaataatactggcgctgaaatacggcttgcaaaagaaatcaataactacacctcaattgactcaatcaatgatctgatcgataaaaacaccaaaatagtttgcatatcccatactgagtatagaaatggacaaacttacgatttaaaccagcttgctgaaattgcgcatcaaaatgatgcaattttggtggtagatgcaacccaatcagcgggtgcaatacctatagatgtgaaaaaaaactcaattgatgttttggttgctggcgcctataaatggctatgtgggccttttggatctgcatttatgtatattagacataatcttgcaaatcagctagaaccaggattagtcgggtttcgaagccacgataatatgtgggatttggatgccactagaatccgctataaaaatgatgcttcgaaatttgagtttagcaccactgcttttgggtgcgctattggattgacacaatcaattaattacttaaatggaattggtattgaaaaaatttataaccataacttatttttatctgatcatttgattaaaggcttgcaaaagcttggtgcgagtattaaatcaccattaaaccaaaatgatagatcgtcaatcattactgctaatttgaaaaaataat

SEQ ID NO: 247411 - DNA, 338 bp, Unknown
  Bacterial polypeptide expressing nucleotide sequence isolated from the Sargasso Sea
tatgacgatatcatcttcccaacaagattcacgttctcttgtgcggcaagaaattgcagcaattgctggatatatccccggtgagcaaccacaggatgccggctggacaaagctcaacacgaatgagaacccgtacagtccttctggaaatgtttcaaaagctattgccgttgcttgcgaaggtcgatcccttgcgaaatatccagacccttttgccaatcagttcaggaagcaggcagcagacgtattgggagttcgtcccgatatgattctctgtgggaatgggagtgacgaccttcttaccattcttgttcgctgctatgttggagttggggatg

SEQ ID NO: 247412 - DNA, 106 bp, Unknown
  Bacterial polypeptide expressing nucleotide sequence isolated from the Sargasso Sea
aaaccataaaaaatgtaatgttactcggacattttctaaaatttacggactcgctggcttaagagtcggatggggttatgtccaaaaaaatttatttatgtattaa

SEQ ID NO: 247413 - DNA, 670 bp, Unknown
  Bacterial polypeptide expressing nucleotide sequence isolated from the Sargasso Sea
tggtcatgatcttgaagcaatgaagaaagcagtcaaaactaataccaaattaatttttattgcgaatccaaataacccaacaggaactttcttaaaaccaaacgaaataaaatctttcttagatgatcttgatgagaacattatcgtattattagatcaggcctattttgattactcatcttatcttaatgaagacgtaggctttgaatttataaatcaatatcctaacttaattataagtaggagtttttctaaagcgtatggattagctggctttcgtattggctattcagtttcttctaaagaaatttcagatttcttaaacagagttaggcaaccatttaatgctaattcagtagctttaattgctgcagaagttgctttatcagatgaagaacatctaaaaaaatctttagagattaatgctaatcaagaatctgctcttatgaaggggatagctgacttaggatatgattgcataccgactaaaggaaattttataagctttaatagtaatggagatggagaaaaactctttaatgcattattgaaagaaggcgtgattattagaactttgggtgtgtataaaatgccaaactatttaagagtcacaattgggcttccggaagaaaattctatttttttagataagttatcatcattgtcataa

SEQ ID NO: 247414 - DNA, 592 bp, Unknown
  Bacterial polypeptide expressing nucleotide sequence isolated from the Sargasso Sea
aatggcagcaggactagccggaataaccgcttcggggggaacgcttggagcgtttctcaatcatgcgcccggtttttcgcccggcaagagactcgctaacggtgatatccgccttagctccaacgaaaacccacttggggtatccccagccgcacgcgacgcgatcatagaagcaatcgtcgagtcaaaccgttacggcggcaggcgcagggaagtcatcgccgcgctttctaggtacgtgggtgtgaagcctgaacagatcacgctgggctttgggtcaacggaaatcctccaaatctgcactcaggccttccagggtccgaataccccactaatcgcagcggcaccgacgtttgaagacgttatggattatcaggataccatgccttttgaggtacacaccgtccctctcacagcggatctccagcacgacgttcagcagatgcgggatctgtcgatgaaacgtccgtcagtcgtctatttctgcaacccaaacaacccgactgggacaatcactgcgtcggccgacatcgacgcttggatagcggaagcgccagaaacgacggtattcctgatggacgaagcatacttg

SEQ ID NO: 247415 - DNA, 982 bp, Unknown
  Bacterial polypeptide expressing nucleotide sequence isolated from the Sargasso Sea
tatgcctattggatgcagagtaactagaggtgatctcactgaaagtatacatgttgcttatgctgttgctgttgctaagaatggtcaggttatattcagtactggagacccaaactatttgacctgtatacggtcttccctaaaaccatttcaagctgctgcatctgtaaaagtaggagctgttgatgcagcaggctttgatgaaaaagaattagcactgatgtgcgcatcacataagggccaagatatgcatacaagtacagctgagaatatgctctctaagttaggtctatcagttgaagattatgaatgtggctcccactatccttctgatatagatactcgccatagaatgataagagaaaatgaaggcatgaatcctcttcataataattgcagtggtaagcatgcagggatgcttgcactagcaaagcatttatctgatgatatttctctttatatccaaaaagatcaccctgtacaaaaaacaataatggaatatgttaaggatatttcaggattagaggagattcccacagaaattgatggctgttccgctcctactcctttcatgacattgcaaactattgcaaacttattccaggtattggcagcaggcattcaacctgagcttaagagagtatttaatgccatgtcatcatttccagagatgatcggtgggacaggtcattttgattcattattcattgaatcattagataaaagaggtgtcactaaagtaggaggtgaatccataagaggaatatccttaaaaacagaaaaacatggtccaataggcattgctattaaagttctagatggaaattttcgggcattaccaatcgctactatgaaattattagagcatatgcaattgttgaatgagcatgaattgaataagttggataaattcagaactaatatattaaccaatcataatggtattgagactgggcgcattgaagcatatatagatttttaa

SEQ ID NO: 247416 - DNA, 1045 bp, Unknown
  Bacterial polypeptide expressing nucleotide sequence isolated from the Sargasso Sea
atgaaattaccaaagccgagaaaaataatagctgagaagtacgttgcgggactgagtttatttaaaagcagaagaagtccaataaaactatctgcaaatgaatcagcgttaggaccaagcccaaaggctgtaaaatcatatagctcaataggaaaaggatttgttagatatccagattctgacggaaccttttttagaaaagttcttgctaaaaaatttaaaattaaaagagaaagaattatacttggatcaggttcggatcaaattttcgaattagtttgcaaactttttttaaataaaggtgatgaagttattgttccagagtacagttttataatttacagaatttacagcaggatgtttggagctaaagtaagatacgctaaggaagaaaattttaaagcttcggtcacttctattttaaattgcgtaaatagaaagactaaaatcgtttttttagcgaatccaaacaatccaacaggtacgtatttggggaaatctgaaataataaaattaagaaaaaaattaaggagtgatattttattagtaatagacgatgcatattatgaatatattgaagaccctaattactcttctgggatagatctattttctaaatctgaaaatgtaatagttacaagaactttttcaaaaatttatggtttagcaggattaagaataggttggggctacggttcaaaaaatattattaagaagctttatgagattaaaccgccttttaatgtcagcagacctgctctttttgcggctacacaagccgtacaagatagcaaatggttaaaaaaggcagtcgaccataatactttttgggctgaaaaaatatttgaagttgcggatcaaataggaattacaacgaataaaacaaatgtaaattttttcctttttaattttaactatgtaaagttaaactcatctcaagtatttaataaattagcgaactcaggaattttagtgagacaaatggatgtttataatattaaaaattctctaagggtaacgattggaaacagttacgaaaataaaa

SEQ ID NO: 247417 - DNA, 1348 bp, Unknown
  Bacterial polypeptide expressing nucleotide sequence isolated from the Sargasso Sea
atggataataaaaaattagatgtgctcaggacaaatattaatttactagatgataaaatattggacctattgaaagaaagggctgaaatagtaactgaaattggtgagcaaaagaaatctcatattgaggttgttgattatgaaagagagcaaaaagttttggatagaattctccaaagcacaaaagctaaatattcaaaagattcgattgttagaatttggagagaaatttttcaggcatctacaaaattgcaagaaaaagacaagtcaacaatagatgtaaaaagatcaattaatttaattaatatctataaaggaggaaagtcctcaataagtggtaaagataatattattaagttatcttctaatgaaagctcatatggcccatcacctaaagtattagaaaaaataaatttacaggagacactttcaaattctcatcgttacccaaatattgatggagctaaattaagagataaattagccagtatacataacttaaatgcaaatcaaattgttcttggttgtgggtctgatgagacacttttatttactgctttagctttttgtcaggatggagatgaaataatacatgcacgacatggttttgaaatgtattcaataattactaaaatagtgggagctacttctaaattagtaaaagaagatgattattttaaagttacagttacttcaattttagatcaagtaacaccttcaacaaaaataatttatttagctaatccaaataaccctacaggaacatacttaacccgtaatcaaattatagatcttttagacaaattacctaaaagcattatattagtattagatggcgcatatgcagaatatgttattaaacaagattatgacagtggcttttctttggtaggtcaatttgaaaatgtaattattacaagaactttctccaaagcttatggacttgctggaataagattaggctggtgttactcaagtaaaaaggtagcctctatccttaataaagtgaaaggaccatttaatactcaaagtttatctcaggaaatggctattgttgcattggatgataaagaatatttgaataaagtaattaaagctaatcatgaaacaaaaaattggtttgaatcggagcttgaaaaaattaaaataaaaacacttccatctgagggaaatttttcttttgttgaaatgtctaatgaagaagctaaaaaaatatctgctcatcttgccaatagcggtattatcgttagacaattagacagttatggacttgcaaattgccttcgtattactattggaacaaaagaagaaatggaagcaactatcaattctttaaaagatttataat

SEQ ID NO: 247418 - DNA, 598 bp, Unknown
  Bacterial polypeptide expressing nucleotide sequence isolated from the Sargasso Sea
aatccacttggtcataagttcagcgatgactctatttatcaagtttgtgagcatttttcagactcagggctcgttatacttgacggtgcatatgtcgagtttgatgacgatgagatttataaaaggattttgtctaagtttgataatgtcgttattttaagaaccttatcaaaggcttttggtttggcaggagtcagatgcggagttttgatttctagttctgaaatatgtcagttcattgaaagggttataccgccctactcattcagcacacccgcagtgaatgctgttttagagagtctttctgataagggcattgaggaatcaaaaagaaacataaagaccatcatccaagacagagaatggctaatgaaagagttggagtcattggatgaagtcataaaagtttttccgtcatatacaaactttgtattggtgaaggttaaagacgccaaatcattttgtaaaaaatcaaaagatataggttttttattgagagacgtaggctatcaacctttgcttgaaaactgtgtgagaatcacggttggcaccaccaagcagaatcaaaaactaatcaaagggataaaagatgagtgaa

SEQ ID NO: 247419 - DNA, 1054 bp, Unknown
  Bacterial polypeptide expressing nucleotide sequence isolated from the Sargasso Sea
catgaacttgccaaaaattagggacgacctttctttgctagaggggtaccattccccacaggttgatgtcgaaatccgactcaatacaaatgaaagtccgatcccaccgcctatcaaattgacagaagatctagggcgagagctattgaaggttaattggaaccgttacccagaccgaatggcaagtcgacttcatagtgacatagccaaatttcacgatgtagatcccagcatggtgcttgcagcgaatgggtcgaatgaagtcctccaaagtttactacttacttacggagggtttggaagaaaagcatcggtgtttgaacctacgtatgctcttcactctcacatctcggctcttaccggaaccgaagtagttgttggggaatgcagcgaagatttcactatagaagaggtaactgttgatgctgtgcttcgacaagagccagatgtgcttttcctatgttcaccgaataacccaacaggcgtagttgcagagagggagttcgttgaatcggttgtcgagagatgttcaaatcttgggactctagttattgtcgatgaagcttatggggaattttctgattggtcagcggttgacctcattcgcgaaggtttccacatagctgtaacaaagaccttttcgaaaacatggagcatggcaggaatccggctcggatatgtagtcgcaccagatgagattatcgaaaatgtccgaaatgtagttctcccatatcatctcgattccatgaaacaaattgctggatctctagctttgcaatatataggtgatatgcattcacgcatagatctactaattgaagagcgagaaagaatggcaagaaagctctccgatcttcctgttcggcaatggccaagtggagcgaatttcatcctcttccgaccaactgatgaggcaaaaatttcaggtgtatccctatgggaagctctgctcgaaaggtcaattttggtgagagactgttcatcgtggccaaggctcgaagggtgcttgagggtgacaattggaactacagaggaaaataactcgtttcttgag

SEQ ID NO: 247420 - DNA, 1023 bp, Unknown
  Bacterial polypeptide expressing nucleotide sequence isolated from the Sargasso Sea
aatgaaaataaaagacttagttcgaccagaggttttgaatctaaagccatatgtgccagctaccaaggttttggataaggtcaggttgaatgcaaatgagagcccgtattcagtgactaaatctgcatccaacgatgccttgaacttgtatccagatgctaggcccgatcagataagagagaaggttgcaagttacctaagcttatcgagtgaaaatattgttgtaaccaggggaagtacagaagcaatcgacgttgccattcgaacattctgcattcctaatcaagatggaatattggtttttccaccgacatttgaaatgtataaattctatgctgaggttcaaggcattgaaatgcacaccatccttttggatgatgaaaacgggtacacactagatatgagtgcgataaaggcattcaactccaaaaatgccaaactaacatttatctgttccccttcaaatccacttggtcataagttcagcgatgactctatttatcaagtttgtgagcatttttcagactcagggctcgttatacttgacggtgcatatgtcgagtttgatgacgatgagatttataaaaggattttgtctaagtttgataatgtcgttattttaagaaccttatcaaaggcttttggtttggcaggagtcagatgcggagttttgatttctagttctgaaatatgtcagttcattgaaagggttataccgccctactcattcagcacacccgcagtgaatgctgttttagagagtctttctgataagggcattgaggaatcaaaaagaaacataaagaccatcatccaagacagagaatggctaatgaaagagttggagtcattggatgaagtcataaaagtttttccgtcatatacaaactttgtattggtgaaggttaaagacgccaaatcattttgtaaaaaatcaaaagatataggttttttattgagagacgtaggttatcaacctttgcttgaaaactgtgtgagaatcacggttggcaccaccaagca

SEQ ID NO: 247421 - DNA, 424 bp, Unknown
  Bacterial polypeptide expressing nucleotide sequence isolated from the Sargasso Sea
atgaatgaaaagttactcaaaaacctcaataatggcataaatgatctaaatccatacaaacctggaaaaccaatatctgaagtaatgaaagagtatgggttaaccgatataattaaacttgcatcaaatgagaatcctcttggtgcttcaaaaaaagtactatctgcattaaaaggtttagataatgaaattcacctttatccagatggttcatctataaaattaaaaactaaaatttcagaaattgaaggcgtgtcctcagagcatgttattgttggaaatggctctaatgaaattcttgagttgtgtgcaaaggcttttataaattctgataaaaatgcaatcgcttcaagacactcattcgctgtttataaattaattactcaatcattaggtactaagttgagagaggtgcctacaatag

SEQ ID NO: 247422 - DNA, 1084 bp, Unknown
  Bacterial polypeptide expressing nucleotide sequence isolated from the Sargasso Sea
tatgaaattacctcaaccaagaaaaataattgctgaaaaatatgttgctggtctaagtctttttaaaagcagaagaagtccaattaaactctctgcaaatgagtcagcactaggcccaagcccaaaggctgtaaaatcctacagttcaattggaaaaggttttgtaaggtatcctgactcagatggcacatatttcagaaaagtgttagcaaaaaagtttaaactaaaaagagatagaattattttaggatcaggttctgaccaaatttttgaattagtttgtaagcttttcttaaataaaggtgatgaagttgtcgtacctgaatatagttttataatttacagaatttatagccgtatgtttggtgctaaagtgagatatgctaaagaggaaaattttgttgcatccgtagactcaattatgaattgcgttaataaaaaaacaaaaattgtttttttggctaatcctaacaaccctaccggaacttatttaaataagaatgatgttttaaatttaagaaaaaaacttagaagcgatattttacttgtaatagatgatgcatattttgaatatatcaaagacccagaatactcatcaggtattgatttattttcaaaatcagaaaatgtgattataacaagaacgttttcaaaaatttacggtttagctggattaaggatcggttggggatatggtccaaaaaaattaataaaaaaactatacgaaattaaacccccttttaatgtaagtaggccagctctatttgctgcaacacaagctgtgcttgatacaaaatggcttaataaagccattcaacataataatttttgggctgaaaaaatatttagtgtaattgatgaaatcggaatttctacaaatagaactaatgtaaacttctttcttattaattttgattttgtaaataaatctgcctcccaagtatttaacaaattagcaaattcaggaattttagtaaggcaaatggatgtttatggtataaaaaattcactcagagtcacaataggtaatagtaaagaaaacaaaaaatttatttcagttttaagaaagatttttaatgtttga

SEQ ID NO: 247423 - DNA, 1054 bp, Unknown
  Bacterial polypeptide expressing nucleotide sequence isolated from the Sargasso Sea
aatgaaaatcaaagatttgattcgtcctgaagttttaaatttaaaaccatatatcccagccaccaaagtactggacaaagtcagattaaatgcaaatgaaagtccatattccgtgactcagtctgccactagggaatcattgaatctttacccagacgcgagacctgatgaaatcagaaacatggttgctagatacttggatatatcaagcgataatattgtcatcaccagaggaagtacggaggccattgacgtagcgatccgaacattttgcattccaaataaggacggaatattggtgtttccccctacatttgaaatgtataaattttatgctgaagttcagggaatagagatgcattcaatactccttgatcaagacaataactattctctggatttaaaggcactagaagcatttgatccaagtaaagctaagttgacatttatatgttctccttcaaacccactcggacataagttcagcaaagaatccatttatcgtgtatgcgaatatttttcagattctggacttgtagtcttggatggggcatatgttgagtttgatagtgatgaagtttataaagagattttgtctaaatttgacaatgtaattattctcagaactttatcaaaagcatttggcttggctggtgtgagatgtggagttttaatctctagcgatgaaatttgtcaatatattgagagagtgataccgccctactcgttcagcacccctgctgtgaacgcggtcattgagagcctttctgatgaaggcattaaggaatcaaaaagaaacatagagaccatcattgaaaatagaaaatggcttgagacagaattggcatcattggacgaagtcatagaggtttttccatcatatacaaacttcatacttgtcaaagtgaatgatgccaaagcattttgtaaaaagtctcaagatttaggatttttattaagagatgtcagctatcaaccattgcttgaaaactgtgtaagaatcactgttggcaagactgaacaaaatcaaaaactaattagaggactcaaataa

SEQ ID NO: 247424 - DNA, 703 bp, Unknown
  Bacterial polypeptide expressing nucleotide sequence isolated from the Sargasso Sea
catggattacctaaagtacataaatccaggtattaagtctataaatacttatgaaccaggaaaatcaatagaagaagtaatggaaaaatataatctcaaaaatattgtaaaacttgcaagtaatgagaatagtttaggtccctcacctaaagctttagaggtgattaataactttaaagatgttcatctttatccagatggtgacggactcaaattaaaatctaaaatatcagaaattgaaaatattaattctgatcaaattattttaggcaatggctctaatgaaattttagagataatttcacaaatatttctttcacctgttactgagtcaatattttcaaaacatgcttttgttgtttacaaacttgcatcaaaagtacgcggttcaaaatttcatgaagttgacgcatgcaaatggggacatgatttaaatggatttctcaaaaaaataaatgataaaacaagattaatttttatagctaatccaaataatcctacaggcacgtatttatcacataacgatatattagaatttttaaaaaaagtacctaagaaagttttagttgttatagatttagcttattttgaatacgtaactgctgaagactatatagaaacgaatgaaattttagataaatttcccacatgtgatttttacaaaatctttttcaaaaattcatggtttatctgcttgagaaaa

SEQ ID NO: 247425 - DNA, 745 bp, Unknown
  Bacterial polypeptide expressing nucleotide sequence isolated from the Sargasso Sea
catgagattacctaaaccaaaaaagattatagcccaaaggtattttggaggcttaagtatatttaagcgaaaaaaggtcaaaattaaattatctgcaaacgagtctgctcttggtccaagccccaaagctattagggaatataataagatttcgaagaactttaaaaggtatcctgataccaatggcacttccttgagagaagctatagctaataaatttaatatagataaaaatagaataatacttggatctggctcagatcagatatttgaatttgtttgtaatgcttttataaaaaaaaatgatgaagttattgttcctaaatatagttttataatatatagaatttacagcaagattaacggcgcaaaagtaatttttgctaaagagaaaaattttactatatctgttaaagatatactttctaaagtcaccagaaagaccaaattagtttttttagcaaatcctaataatcctacaggcacatatattagcaaaaaagaattaatacatttaagaaaaaaacttagaagtaatattcttctggtagttgatgacgcatattttgaatatttaaaccaaaaagattatctatcgggcttaaaattattttctagacacaaaaatgttttagttacaagaacattttctaaagtttatggattggcaggattaaggataggctggggatatgcttctaaagagattattaatactttaaatcttattaaacctccatttaat

SEQ ID NO: 247426 - DNA, 1066 bp, Unknown
  Bacterial polypeptide expressing nucleotide sequence isolated from the Sargasso Sea
tatgaaaaaacttaaaaatataaagctttacgaagggggcatttcatcaattcctggcaaaaagcaagttattaaggtgtcctctaatgagtcaccatttggtccgagcttgcgagtacaaaaggcgatatcaacggccaaatcaaaaactcacaaatatcctgacgggaatagtctggaattaaaaaatgccttatcaaaaaaaaccaaattaaatatcaacaacctcttcgttggaaatggatctgacgagatactaggcctggcttgtcaactttttctaaataaaggagacgaagttattattcctaaacacagttttttaatgtttgaaatttactctaaaatcagtgggggcgttgttaaacgttcgtcaacaaagaatttacgttttgatgtaaaaagtattttgaataaaatcacaaaaaaaactaaaattatatttattgcgcagcccaataatccaacaggattttatctatccaaaaaagaattaagattgcttatctcacgtgtccctaagaagatatttataattattgattctgcctatgcagaatatgtaactgataaagattactctaatggcattaactttgccaaaaaatataaaaatatcattgtcactagaactttctcaaaaatttatggtttggcgtccttaagattgggttggtgctatgcccatacagatataataaaattaatgaataaagtgagagggccatttaacgtaaatcaaattgcccaacttgctggcgttgaggcattaaaagataaaaaatatgaaaaaaatgcaataaaccataacaaattttggctaaaaaaaatgaatagtgaactaagtagattgccagtacatgtttatgatagcagagcaaattttctactcattaatgtaggcaaatctgtaaaaaaactaaatcagtatttattgtcaaaatcaattattgtaaggttaatggataagtataatcttccagattgcattaggttatctattggtaaatctacagaaaatagaaaagtccttaaagctatgaaagagttttataatgccaagtaa

SEQ ID NO: 247427 - DNA, 1092 bp, Unknown
  Bacterial polypeptide expressing nucleotide sequence isolated from the Sargasso Sea
tagagcgccagcaatctacctgggaaaataaagtagattataatctttctgagagcggcgttcatcctagaactttaaagatgttatttgattcagagtttattgaaaaaatagaaaatactgaattgacttatggatttactgagggatcaccagacttgcgacaatccatcgcttcaatataccaaggagcaacagttgacaatgttcaagcttttaacggctctgcggaagccaatatggtttcaatcatgaccttgattgaaaccggagatgaagtagtgtatatgatgccaaattatcttcaaatctatggatttgctcgtggattgggtgcagacgtaaaaacattccaattgcatgaatctttacagtggaaaccagacctagatgaattaagatcgattgtgtctgaaaaaacaaagcttatctgtatttgtaatcccaacaatcctaccggatccgttctgccaaagcaaatggttgaagatattgtagctatagcagagagcgttgatgcatggattgtatctgatgaagtatatcgtggggcagaattgaaccacgaagaatgcacttcattttgggaacctgggtatggaaaaacaatagtaaactgtggcctttctaaggcatatgcgcttcctggactgcgccttggttggtcgctatcaaatccagattacattaagcagtgctgggcaaatcatgattatacaagtatttctgttggtcgcctaagtgatataattgctgcccatgtattgcaccccaataatcgaatgaaaacattaaactatattcgagaagctcttgcaatcaacttagatattttccagaactggatatcaggctttggcgatcaccttggatttatacctccagaagctggagcaatggcttttgtgcattacgattgggccattaactcttcagacttaatagaaaaagtaagaaaagaagcgagcgtgatgctcgtagcgggcgactggtacggtatggatcgctatatcagatttgggtacggtgcaaagcaatctgatttagagaatgcattggatagaataacgcctatatttaaatcgctatgat

SEQ ID NO: 247428 - DNA, 595 bp, Unknown
  Bacterial polypeptide expressing nucleotide sequence isolated from the Sargasso Sea
atgaaaaatttaaaaaatattaatatctatgaaggtggaatttcatcaattccaggtaaaaaaaatgtagttaaagtgtcttctaatgagtcaccttttggacccagtattaaagtaaagaaagctatttcagaaagccgacttaagacaaataagtatcctgacggtaattgtatcgagttaaaggaagctatctctaaaagttttaaattaaagaacagcaatctttttgttggaaacggttcagatgagatacttggtattgcatgtcagctatttttaaacaaaggtgatgaggttattattccaaagcatagctttttaatgtttgaaatctattccaaaataagtggtggagttattaaaagatcagcaacaaaaaatcttcgagtagatttagaaagtttattaaaatcaattacaaaaaaaacaaagattatttttattgctcagcctaataatccaacgggtttttatttgtcaaaaaaagatctcacaacgcttatcaataaagttccaaaaaaagtaatgattataattgatgcagcgtacgccgagtatatgactgataatgattactcaaatgggtcttgag

SEQ ID NO: 247429 - DNA, 1049 bp, Unknown
  Bacterial polypeptide expressing nucleotide sequence isolated from the Sargasso Sea
attgtttctagcgcaatgttctataaagtcatttaaaagaagaaggagacaacccgtgagttataaccgttcaagacgcttgtttattggtggcacagttgcagcgtcagcaataggcgcgagtggcataagtcaccttgtgagcgcccaatctgttagcgcaagcgcttccccatcgtctgttatgtatggaccaaagcctggggttgcaaagctcaatgccaatgaaaacccgtttgggccgagcccgaaagcgctagacgctatcgcaaaagcatcggcggaaggtggagcctactatgcttatcctgccgctatgacgctattggatatgattgccgagcgctatggcattactcgaaagcacatttctttgagcgcaggttcaagccctattctttcctacgccgcccttgcggccagcaagaacggaaaaattctgggcccggaccttttttgggacaccacgtctaaagcacctgaaaaacaaggtgctccagaaatagtgagagttgctaatacggcagagcttgatattgaccttgatgccatgtacgccgcaatagacgactctattggtatggtgcacatttgtaacccgaacaatccaacgggaaaagtgctcgatccgaataagcttcgcgaattctgcataaaagcatctaaaaaaacactggtgttggtcgacgaggcatataacgagcttatcgatgagcctcctaagcattcaatgattccgctcgttaaagctggtcataatgtcattgtagcgagaaccttctcaaagatttatggcttagcaggtatgcgcgtgggctatttaatcgcatcagaggaaaacactgagtggatcaatcgctatggcatgggcggctatacattgaatcaagcaggccttgccgcggctatcgccagctacaatgacgatgcctttttaactttctctaaagagaaaatttatgaaggtaaatctatggttatggacgcagtaaaagcaaatggattgacagcgctaccttctagtactaactttatttttgttaatttag

SEQ ID NO: 247430 - DNA, 790 bp, Unknown
  Bacterial polypeptide expressing nucleotide sequence isolated from the Sargasso Sea
ttagctttttgtcaggacggagatgaaataatacatgcacaacatggttttgaaatgtattcaataattactaaaatagtaggagctacttctaaattagttaaagaagatgaaaattttaaagttacagttacttcaattttagatgaagtaacaccctcaacaaaaataatttatttagctaatccaaataaccctacaggaacatatttaacccgtaatcaaattatagatattttagataaattacccaaaaacattatattagtattagatggtgcatatgcagaatatgttactaaagaagattatgacagtagtttttctttggtagatcaatttgaaaatgtaataattacaagaaccttctccaaagcttatggtcttgctggcataagattaggttggtgttactcaagtgaaaaggtggcctcaattcttaataaagtgaaaggaccatttaatactcaaagtttatcacaggaaatggccattattgcactggatgataaagaatatctgagtaaagtaattaaatctaatcgtgacacaaaaagttggtttgaatcagagcttgaaaaaatcaaaattaaaactcgaccatctgaggggaatttttcctttgttgaaatgtctgatgaagaggctaaaaaaatatttgcccatcttgctaatagtggaattattgttcgacaattagacagttatggacttccaaattgccttcgtattactataggcacaagagaagaaatggaagcaactatcaattctttaaaaggtttataat

SEQ ID NO: 247431 - DNA, 1064 bp, Unknown
  Bacterial polypeptide expressing nucleotide sequence isolated from the Sargasso Sea
ctataaaaaatacttaagagaagacataaataattttaaagaatattttattgataatcccgaaaatatgataaagcttgatgctatggaatatcctgttgataaaagtttaagagatgtcataaaatcacttaatattaatgaaaaagagatattattaaacagatatcccgagtcacattctcatgagcttgaaaaaattatcttagattattttggtctaaaaagtaacttcggagtaaattttggtaatggatccgatgaactcattcaaaatatttgtttagctttttctaaaaaaggtaataatgttatggttccctcaccctctttttctatgtatgaaaaaattatctctactattaatttaaaatatattccagaatatttgaacgaagattttgatatcaaaattgatcaaatgattaaaaatatttcaaaacacaagccagcaattatttttttagcttgccctaacaaccctacaagcaatttatgggataaagataaaattattcaaataatagagagttctgagtctattgtagttatcgatgaagcatacgttgatttctgcgaatcttcatatattgatctaatagaaaagtacgagaatttagtaatattgaggactttttcaaaaattggttttgctggccttagattagggtttatgatttcaaatagagaaatatcaagcattattaataaaatcagacttccgtttaatatcaatactgtatcattaaaaataataataaatatttttgaaaatttttccatcataaaaaaaaattgccaaaatatcataaatttaagggaaaaattgtattcggatttatctgatttaagaaatattaaagttctcaaaagctcaacaaattttttaatatttaagaccctaaataaaagctcagatgaaatctataaattactcaaagattcaaatattttgattaaaaacttgaacaataattctagcttaaagaattttcttagagtcactgtaggcaccgaggaagaaaataacagtttcgtatcaactttgtctaaatatttgtaat

SEQ ID NO: 247432 - DNA, 538 bp, Unknown
  Bacterial polypeptide expressing nucleotide sequence isolated from the Sargasso Sea
atgcggctgactcaagaacttttacgacatcgccaggttgaagatccaactccattctttaaaaaagtaactgcggaaagggttttcgaacgcgccgtggaggacttgaacccccgacatcaggttttggagacctgcgttctaccaactgaactaacggcgcattttatatgccctttaaatcattgtttaacaatgacttttattgaggaggccgaaacctcagcggtcgaagcgctgcttgacgcgtgtggctttgcccactcgctcacgcaggtagaaaagcttcgctcttcttactttacctcggcgctcaaccttaatcgatgcaacttgtggactatgaaccagaaaaattctttcaactcctattccttggaaaattctccttacggtaattgtttgatgaattcctccatgtctctttgctattacaacaccctcatagggctgaaccctctccttattgccctcactaatccggacaccaacacgaacggtatctccaacgtaaatatcagggagatctttgcctagt

SEQ ID NO: 247433 - DNA, 506 bp, Unknown
  Bacterial polypeptide expressing nucleotide sequence isolated from the Sargasso Sea
catgtcctgtgatttgttttcgttagctacatctggtgtttcggggcttaccccatatcgtcctggaaaatcaattgagcaattacaaagagagatgaatttagatgaagtcgtaaagcttgcatctaatgaaaatccactaggacctagtcagattgttctagatgcaattagcgcaacaaaagatttgtctcgttatccagatggagacggttttaacctaaagaaaagattagctaaaaaacataatcttaaagttgaaaatattacattaggcaatggttccaatgatattctagagatggtaacacgtgcttttgttacaactaatcacgaagtaatttattctcaacattcttttgcagtatatccactagtcacacaagctgtgggtgctaagcatggggtaattccagcaaatggttgggggcatgatttagatgcaatgctaagttctgttaataataaaacaagactcatatttattgcgaacccaaacaatccaa

SEQ ID NO: 247434 - DNA, 869 bp, Unknown
  Bacterial polypeptide expressing nucleotide sequence isolated from the Sargasso Sea
tatgaatttacctaggccaaaaaaaattaatgcggaaaaatatgtagctggattaagtttatttaaacagaaggcggcaaaaattaagctttcagcaaacgagtctgcattgggacctagtccgaaagcaataaatgaattcataaaagtatcaaaaaacttaaaaaggtatccagactcggatggtatttttctcagaaatatacttgctagaaaatttaaacttgatcctaaaagaatcatactcgggtcaggctctgaccaaatatttgaattaatttgtaaatcatttcttaataaaaatgatgaggtaatagttcctgaatttagttttataatttatagaatttatagtaaaatttatggagcaaagataaaatatgctaaagaaaaaaactttagaatttctatagaaaatattctttctaaggttacaaaaaaaacaaaaatagtttttttggctaatcctaataacccaactgggacaattattagtaaaaaagagttattacaattaagaaaaaagttaagaagcaatatattgctagttgtcgatgatgcttactttgaatatgttaaagataaaaattacttaccaggtatgaagttattttctaagtctaaaaatgttatagttacaagaacattttcaaaaatttatggtcttgctggattaagagttgggtggggttatggacctaaaaatttgatatatgctctaaatcaaattaaaccacctttcaatattaatagagccgctttatttgctgcagctcagtcaattaaagatagccagtgggtaaataaagaaaataaacacgttaataaatgggttaaagttttttataaaaattttaaaaatttgaaag

SEQ ID NO: 247435 - DNA, 490 bp, Unknown
  Bacterial polypeptide expressing nucleotide sequence isolated from the Sargasso Sea
gtcgccgatttactcgagtcttacccaaaccttgtggtgctacgcaccctttcaaaggcctttgccttagcaggcgcccgctgcggctttttgctcgccaatgaagggattatcgaaatcatcatgcgggtgattgcaccctatcccgtgccactgcccgtgagtgaagtggccgtgcaagcactgtcaccggctggaattgcgcggatgaaaacccaagtcaaagagctcaatgcgcagggagagcgactcgcggcggcgctgaatttgtactgcgagcaatggggcggcgccgtactaacacccaatggcaactatgtgctcgccgaatttgacgacgtggccaaagtggcacagctacttatcgataatggcattgtcgcgcgggcctataaggacccaaggctggctaaagccattcgttttagcttcagctctcaggctgacaccgaccgtttagtgtcgctctttgaatcgcaaaagctgtgag

SEQ ID NO: 247436 - DNA, 865 bp, Unknown
  Bacterial polypeptide expressing nucleotide sequence isolated from the Sargasso Sea
aatgacatttcctaaaccaaataacattgtagcagaaaagtacgttgcaggaatgagtttatttaaaagtaaactagctaaaataaaattatcagccaatgagtctgctcttggcccaagtcccaaagctaaaaaagaatacattaaagtatcgaaaagttttgcaagatacccagattctgatggaacatttttaagaaaaactttatccaataaatttaaattagataaaaatagaattattttaggttctggatcagatcaaatttttgagttaatctgtaaatcttttttaaaaaaaggggatgaggtaattgtccctaaatatagttttatcatttacagaatttatagtaaaatgaatggagctaaagttatttactctagagaaaataattttaaagtttcagtaaaagaaatcttaaaaaaagtttccaaaaaaaccaaaattatttttttagctaatcctaataatcctacgggtacttatattaaaaaaaaagatttactatttctaagaaaaaaactaagaagcaatattcttttagttgttgatgatgcttattttgaatacgtaaaacaaaaagattatcttccagctttaaagatttttaggaattataagaatgttgtaatgacaagaacattctcaaaaatttatgggctagcgggattaagagttggatggggttatgcatctaaagaaattataaatgcacttaataaagttaaaccaccattcaacgtaaacaggccagctttatttgccgcatctgcagcaattaaagatattttatggctaaacaaagaaataaatcacgtgaataaatggaataaaaaaatgtttaatgaatttaaaaaaaga

SEQ ID NO: 247437 - DNA, 605 bp, Unknown
  Bacterial polypeptide expressing nucleotide sequence isolated from the Sargasso Sea
aattgagcgtttgttgcaggcgaatacgcaaaccctggtggttatcgatgaggcctatatcgactttgccggcccccaagggcagggcggcgctacggccatcgctttggtaaaccgctacccgaacctgttggtgactcagactttgtcaaaatcccgctctctggcggggttgcgtatcggcttggcgattggtgatggcgcgctgattgatgggctaaatcggattaaagacagcttcaattcctatccgttggatcgtctggccattgccgctggcgtggccgcgtttaaagatcaggagtggttcgaaaaaggctgtgagcaagtaatcatgcagcgcgagtggctcaacgagcagctcgagcagcgaggttttgagagcttgccgtcggcggccaactttcttttcactcgccacgagcagcatagtggactttctctggcccagggtttgcgcgagcaaggcattattgtgcgtcattttggtaaacctgagcgtatcgctgactacctgagaatcactattggcacgcctgagcaaaatcaggcgttgattgtggctttagatgggttgatttcaaagtggaaaaacgccgggtaat

SEQ ID NO: 247438 - DNA, 613 bp, Unknown
  Bacterial polypeptide expressing nucleotide sequence isolated from the Sargasso Sea
atgaacgctgcctccatcctgtcgctggtgcgcgacgatctgcaggcgtttgcgggctactcgtcggcacgcagcagtgcgctggtgggcgatgtgtggctcaacgccaacgaatcggcgtgggccaacccggccgacgtggccggtggcgcgcggcgctatccggacccgcagccggcggcattgcgcgagcggctggccgctctgtatggctgcgcgcccgagcagttgctgatcgggcgcggcagcgacgaagccatcgatctgctggtgcgtgccctgtgcgagccgggccgcgacgcggtggtgaccaccccgccggtgttcggcatgtacgcggtgtgcgcgcggctgcagaacgcgccgctggtcgaagtgccgctgatagaccgcggcgacgcgctggacgccgacatcgacgcggtgatcgctgccgcattgggcggcaacgccaagctggtgttcctgtgttcgccatccaatccggccggcagcacgatcgcgctggccgagatcgagcgtgtcgcgacggcgctgcagggcagagcattggtggtggtggacgaggcctatggcgagtatgcggagcagccgtctgccacgacgctgttga

SEQ ID NO: 247439 - DNA, 811 bp, Unknown
  Bacterial polypeptide expressing nucleotide sequence isolated from the Sargasso Sea
tatgaaaacgcgcgacctttcagagcacagggaatatgccccaggcaaaagtaccggggaggttgcaatagaaattgggagggatgaatcagagatcatcaatttatcatctaatgaaaatccactagggcctagtttaaatgtgataaagacattgaaggaaaaatcagagggagtaaatagatatccgaaagaagcatccaaggacctgataaataaaatagcacagaaatggggtattggggaaagccaagtttggcttgctaatggagcagatggtgcgatagattacatatcgagggcgatgatagaacctggagatcgagtacttgttccaaatccaggttttgcatattatggcatgagttctaggttccatcacggtggggtagaagaatatgatattggaaaaaaagaagggtttgaactttctgcagaaaatgtatttagaggatacaaggggcaaaaaatagtatatttgactaatccgaacaacccaactggaggaatattccccaccaaggagattgaaaaaataatagaaggtgtaggggaggactcactggtagttgttgatgaggcatatggagaatattcaggaaaaagaagttcaattgagttatgtaaaaaataccagaatatagcagtgattcgtactttttcaaaggcatatggattggctggttgtagaataggatatgcaatagtgccagaggaagggtcaaaagaatactccagggtcaataccccatttgcagctggtgaactatcgtgttatgcggctagtgcggcgttgagagatgaaaaacac

SEQ ID NO: 247440 - DNA, 214 bp, Unknown
  Bacterial polypeptide expressing nucleotide sequence isolated from the Sargasso Sea
tatgaaccttaaagatatagtcaataaaggcattctagatttgagtccctataagcctggtaagcccattgaagacttagaaagagaattgggcataaagaatgctattaaattagccagcaatgaaaaccctttgggccctagtccactagcgatagatgctgtcaccaaagttttaaatggcactcacagataccccgatggcaatgcttta

SEQ ID NO: 247441 - DNA, 565 bp, Unknown
  Bacterial polypeptide expressing nucleotide sequence isolated from the Sargasso Sea
tatgtcgtttgaaagagaaaatatcactcgaatagagggttactctccgggagagcaaccctctagttcagatataatcaaactgaacacgaatgaaaatccatatccagccagtcctctggtagcagaaactttggcaacaattaaggttggtgagctgagacgttacccctcgccatcagccgatgaattttgtaatcttgcggctaaaatccataaggttcgccctgaaagcataatcccgactaatggcggtgatgaattacttcgactgactttgacaacttttgctgaagagaatgatactctcgccattacaaccccaagctactcgctgtaccctattctagcaagcattcatggatgctctttaattgaagttccactaagcaaagatctaacttacccagaaaaacttcctgacttattaggtaatttatctgctaaaatctgtattctagttaatcctcatgccccaacaggcgcattgctccctgcatcatttattgatgagttggcgggcaacttcgaaggcgttctagttgttgatgaagcctatgtagac

SEQ ID NO: 247442 - DNA, 691 bp, Unknown
  Bacterial polypeptide expressing nucleotide sequence isolated from the Sargasso Sea
aatgaaaaattcatttttagaaaatcttaaccaaggtgttctagggctaaaaccctatgagccaggattgcctctagagcatactcaaaaaaaattaggcctagaaaaaatgattaagcttgcaagtaatgaaaatcctttagggcctagcccaaaggccttggcagttctccaagaaaagtcaaacagcttgtcttcagaattgaatagatatcctgatggaaatgcatatgacttaaaagaggctatatcaaaaaagtacaaggtaaatatgaatcaaatcacaataggaaatggttctaatgatttaatagaatttgtttcaaggtgttttttaggaaccggaaaaaaagcaatctattctcaacacggttttgcaatctatccattagctattaaagcaactagcgcattaccaattaaatcaaaagcaaaaaattggggtcacgatttggagttgatgttggatttagttgacgatcaaactaagctcatattcattgcatcccccaataatccaactggaacagcaaaaacacttttagagattaaagattttttgaataatttacctgatgatatcttggtctttcttgatcaagcttattatgagtacatagaaggttcagaatttgatattcctttttcattaattgatgaccatcctaatttagttatttctagaagcttt

SEQ ID NO: 247443 - DNA, 673 bp, Unknown
  Bacterial polypeptide expressing nucleotide sequence isolated from the Sargasso Sea
gatgtacaatgaaaatccatatggtccctcgcgaattgcaaaaatagcaatgcaaaaagcctttagcgaatcgaatctttacactatgcgattagctcgaactgagtttaccgatcttatagctcgtcaaaacaatgttgatgcaaatcaaatctcaattggattcggttctagagaaattctaaataaagctgcgatgatgaatggaatcgataatggagaaatggtatcacctcagctcacctttgaagccattaatcaatatgctaaaaatgctatgaaaaccaaaataattcgcgtggccatgaacagtgcattacatattgatcttgataaaatggcaagcagtattacaaaaaatacaaaaatgatctatgtttgtaatccgaataacccaactggtcttgcattagatagtgatcagcttgagtctttttgcaaagaagtatcaaagaaagttgtagtattcatcgatgaggcatatcacgagtatgcgattggagatggatacaaaacgatgtcgcatttagttaattcgaataataagataattatctcaagaaccgcatcaaaggtgcatggattggcaggactgagagtcggatatgctatttcaaatcctgaggtaacatcgcgcataaagacctatttgaatggatcattaaatgtcgtt

SEQ ID NO: 247444 - DNA, 701 bp, Unknown
  Bacterial polypeptide expressing nucleotide sequence isolated from the Sargasso Sea
tgttccttataataatcattatgaggatcttgatgctttattaagtgccacaaagaaaaacaaagcaaaaattttatacttgtctaatccagataatcccatgggaacttttcactcgaaagaaaatatacaggaattcattgataatattcctgacaatacaatactatgcctggacgaagcgtacgcggacttcgtagataaaaaggaactagcaccgattaacatagaaagggaaaacgtaattagatttagaactttttctaaggcctatggcttggctggtttaagggttggctatggaattggaaacaataaattgattaaggcttttaataaagttagaaatcactttggagtgaacaaacttggtcaaattgctgctaaagtcgctttaaaagatcaggagcatttaaaggctgttttgaaaaaagttagccagtcaaaaaaaaatattgcctcgatctttaagaaatttgggtttaactcattagtgtcaagaacaaactttgttccgataaatagtggtggtgacggagaatttgcagcaaagttaatgaacagtttaattcaagaaaagatttttgtgcgcatgccaagtgttacgcctctcaattcgtttataagaatcaccgcaggcacgaatggtgatttaacagtcttagatgatgcgatgaataggataattaaggagctttaat

SEQ ID NO: 247445 - DNA, 534 bp, Unknown
  Bacterial polypeptide expressing nucleotide sequence isolated from the Sargasso Sea
atgatgcttattttgagtacgtaaaaagaaaagattatttgtctggtctaaaaactttcacaaactttaaaaatgttgttatgacaaggaccttttcaaaaatatatggtttagcaggacttagagtcggctggggatatgggtcaaaagaaattatttctgcattaaacaaggttaagccaccttttaatgtgagtagaccagctctatttgcggcttctgctgcagctagggacaattcatggcttaataaagaaattaaacacgtaaataaatggagtaaaaaaatgttttctgagtttaaaaaaatgagaatagaaacaaataaaagttttactaattttttattagtaaaatttgataaagtgaaaataaactctgctaaagtttttagactacttgcaaaatctggaatactggtccgtaaaatggatgtttatggcattaaaaattctttacgtataaccattgggacaacttcagagaatattgcattaataaaaaaaatgagaaaaattttaaatgttcaataaa

SEQ ID NO: 247446 - DNA, 695 bp, Unknown
  Bacterial polypeptide expressing nucleotide sequence isolated from the Sargasso Sea
aaaagaaaaaaattttaaaatttcgattgataatattctttcaatggtaactaaaaaaaccaagattgtttttttagcaaatcccaataacccaacaggaacaattattggtaaaaaagatttgctaaaattaagaaaaaagttaagaagtaatatattattagtggttgatgatgcctactttgaatacgtaaaaaataaaaattatttgcctggtttaaaattattttcaaattctaaaaatgttatagttacaagaacattttcaaaaatttatggtcttgcaggattaagagttggttggggatatattcctaaaaatttaatatattctttaaaccaaattaagccaccttttaatattaatagagctgctttatttgctgcagctgagtcaattaaagatgtcaagtggttaaataaggaaattaaacatgtaaataaatggtcaaaaattttttataaaaattttaaggatctaggaattgaaactaatataagctatggaaattttttattggtaaattttgacaaaattagaaaaagctcaaaaaaaatatttttaaaacttgctaaaaatggaattcttgttagaaaaatggatgcatataagattgcaaactctttaagaataactattggcaataatttagaaaataaaaaatttattaatattattaaaaaggtaatataat

SEQ ID NO: 247447 - DNA, 853 bp, Unknown
  Bacterial polypeptide expressing nucleotide sequence isolated from the Sargasso Sea
aatgacatttccgaaaccaaataacattgttgcagagaaatatgtagctggaatgagcttattcaagagtaaaatagccaagattaaattatctgctaatgagtctgctcttggccctagcccaaaagcaacaaaacaatacttagaagtttcaaaaaactttgcaagataccctgactccgatggaacttttttaagaaatactttggctaataaatttaagattgataacaatagaataattttaggatcaggttctgatcaaatttttgaacttatatgtaaatctttcctaaagaaaggagacgaagttatagtccctaagtttagctttataatttaccgaatttacagtagaatgaatggagcaaaagttatttattctaaagagaataattttactgtttcaactaaagatatactcaaaaaagttacaagaaaaactaaaatagttttcctagctaacccaaataatccaactggaacatatattccaaagaaagaattactctttttaagaaaaaaactaagaagtgatatattgttagtagtagatgatgcttattttgagtatgtaaaaaataaagattatttgtctggtttaaaaacttttacaaattttaaaaatgtagttatgacaagaactttttcaaaaatatatggtttagcagggcttagagtgggctggggatatggatcaaaagaaattatttctgcattaaataaggttaaaccaccttttaatgtaagcagaccagctttgtttgcagcttctgctgctgtaaaagatagttcatggcttaataaagaaataaaacacgtaaataaatggaataaaaaatgttttctgaaa

SEQ ID NO: 247448 - DNA, 865 bp, Unknown
  Bacterial polypeptide expressing nucleotide sequence isolated from the Sargasso Sea
aaagacattagccaataaatttaaaattgataaaaaaagaataattttaggatcaggttctgatcagattttcgaactaatttgtaaatcatttttaaaaaaaggtgatgaagttatagttcctaagtttagttttataatatatagaatttatagtagaatgaatggtgcaaaagttatttacgcaaaggaaaataatttcactgtttcagttaaagatatactaaaaaaagttacaaggaagaccaaaatagttttcttagctaacccaaataatccaactggaacatatatttcaaaaaaagagttactctttttaagaaaaaaactgagaagtaatattctattagtcgtggacgatgcatattttgaatatgtaaaacaaaaagattatttttcaggtttaaaaacttttacaaattttaaaaatgtagttatgacaagaaccttttcaaaaatatatggtttagcagggttaagagtaggttggggatatgggtcaaaagaaattgtttctgcattgaataaggtaaaaccacctttcaatgtaagtaggccagccttgttcgcagcttctgctgcggtaaaagatagttcatggttaaataaagaaattaaacacgtaaataaatggagtaaaaaaatgttttctgagtttaaaaaaatgagaatagagacaaataaaagttttacaaatttcttattggtaaaattcgataaagttagaataaactccacaaaagttttcagattacttgcaaaatcaggaatacttgttcgtaaaatggatgtttatggcataaaaaattctttacgaataactatagggacaacatcagagaatattgcattaataaaaaaaatg

SEQ ID NO: 247449 - DNA, 781 bp, Unknown
  Bacterial polypeptide expressing nucleotide sequence isolated from the Sargasso Sea
tatgaatttaccaaagccaataaaatttgaggttgaaagatatgttggagggttatctgaatttaaaaagatacaagacccaataaaactatctgcaaacgaatctgcgctaggacctagtccaaaagcaattgaagcatttgaaaaggaaaaaaataaagtttttaaatatccagagtctgactcaaattctttaagagaggttttatcaaataaatttaaaatagattcaaaaagaattatttgtggatcaggatcagatcaaatatttgatttaacctgtcgtctatttcttgacccaggcgatgaagttattgtaactgagtttggatttatcatgtataaaatatatgcctcgattcataaggctaaagttatattagctaaagaaaaaaatttcaaagcatcagtagatgaaataataaaaaaagtttccgacaaaacaaaaattgtatttgttgcaaaccctaacaatccaacaggaacatatttatctaaaaatgaaatgctcgaattaagaaaaaaacttagaagtgatattcttttagttgttgatgatgcatattttgaatttcttaattcggatgatttttcttcagggttagatctttttaaaaattctccaaatgtactagttacaagaaccttctctaaaatttatggtttggcaggtttacggttaggatggggatactcttctaaggagataattaatagcatgtaccaaataaaacctccttttaatgttaatagagctgctcttgcagcaggagtagaagct

SEQ ID NO: 247450 - DNA, 862 bp, Unknown
  Bacterial polypeptide expressing nucleotide sequence isolated from the Sargasso Sea
ttattcaaagcacggttgggtgcaaatgagaatatgtttgggccttctccaaaagcattgtctgccttaaaaaaatattcaaatgagcaatggatgtacggtgatccaactagctttgaattgcgatgcgcattggctaagaagcataaaatatctgctgataatattgttgtaggggaaggaatagatggactgctttgctacctagttcgacttattatttctgaaggagatgaggtagttacgtcagatggcgcttaccctacttttaattatcacgtcagtggttttggggggattcttcataaagtaccctatcttgctgactgcgaggatattgtttcactgattaaaaaagcgcactcggttgatgctaaactaatttattttgcaaatcctgataaccctatgggcactcacgtgcctggggataagattgtcgaagcacttaaagatttgcctgagggatgcttatttattttagatgaagcgtactccgaatttgcgcccgccgcatcacttcctagtttagacattacagataagagagttgttagattacggacattttctaaagcgtacggaatggctggctcacgtgtaggttatgcaatggcagaagaaaacctaataaaatcatttgagaaaattagaaatcattttggaatgaatagattggcccaaaaagcggcgcttgaggctttatctgataatcaatggcttttggagatggtacaaaaagtagaaaatggacgtcagagaatatacaaaatagctgccagtaataatttaaaacccatcacttcttcaactaatttcgttgccatagattgtggcaaggatggagattatgcaggaaaaa

SEQ ID NO: 247451 - DNA, 736 bp, Unknown
  Bacterial polypeptide expressing nucleotide sequence isolated from the Sargasso Sea
agttttattatttatagaatttatagcaaaatgaatggagcaaaagttatttattcaaatgaaaataattttacggtttcagtaaaagatattttaaaaaaagtaactaccaagacaaaagttgtatttttggctaatccaaataatccaaccgggacctatgttacaaaaaaagatttgttgtttttacgaaaaaaactacgaagcaatattttgttagtagttgatgatgcttattttgaatatgtaaaacaaaaaaattattcttcagctttaaaattattttctaattctaaaaatgttgcaattacaagaacattttcaaaaatttatggcctagcaggattgagagtggggtggggatatggatcaaaagaaattattgatacgttaaataaaattaagccaccttttaatgtaaacaaagcagctttgtttgctgcatccgccgcagtaaaagatagtgtttggttaaataaagaaattaaacacgttaataactggaataaaaaaatgtttaatgaatttaaaaaaatgaaaattgaaactaatagaagctatagcaatttcttattggtaaattttgataaagtaaaaataaattcatcaagagtttttaaattattagcgaaagtaggaattttagttcgtaaaatggatgtttatggtattaagaattcattaagaattacgattgggaaaagtgaagaaaatagaaaattaatttccaaaaatg

SEQ ID NO: 247452 - DNA, 893 bp, Unknown
  Bacterial polypeptide expressing nucleotide sequence isolated from the Sargasso Sea
gtcagctttaggacctagcccaaaagcaattaaagagtatttaaaagtttcaaaaaactttaaaaggtacccagactcggatggtacttttttgagaaaaaccctgtcaaaaaagtttaagttagatgttaatagaataatattagggtctggctcagatcaaattttcgaattagtttgtaaagcattccttgacaaaggagatgaggtaattgtaccaaaatatagttttataatttacagaatttacagcaagatgaatggtgcaagagttatttattcaaaagaggataactttaaaatttcagcaaaagatattttaaaaaaggttactagaaaaacaaagattgtgtttttagcaaatcctaacaatcctaccgggacgtacattgataaaaaacaattaattactttaagaaaaaagttaagaagtaatattcttttagttattgatgatgcttactatgagtatgtaaaatctaaagattattcttctggattaaatttattttctaattttaagaatgtagtaataactagaacattttcaaaaatttatggactagctggattaagagtaggatggggttatgcctcaaaagatttaattaatgctctaaatagaataaaacctccatttaatgttggacgtcccgctttgtttgcagcatctgcagcaattaaagatagcgcttggttaaataaagagattaaacacgtaaataaatggaatgaagtattatttaaagaatttaaaaagatgaagattattaaaaatagaagctttacaaactttattttagttaattttgataaattaagaattaaatctcataaagttttccagttattagcaaactctgggatacttgtaagaaaaatggatgtatacg

SEQ ID NO: 247453 - DNA, 805 bp, Unknown
  Bacterial polypeptide expressing nucleotide sequence isolated from the Sargasso Sea
ttgcaagcttttttaaacaaaggagatgaagttgttgtttcacagtatagttttataatttatagaatttacagcagaatgtgtggtgcaaatgttaaatttgctaaagaagaaaactttacatcatctgtgaaatcaatacttgaatgcgttaatagaaaaactaaaattgtttttttggctaatccgaacaatccaacaggaacgtatttggatagaaacgagatgttagaattaagaaaaagactacgaagtgatattctattagtagtagatgatgcttactctgaatttattcaagatcctaattttgcatcaggaatgaaactattttctaaatcaaaaaatgttttaataacaagaacattttcaaaaatatatggcttggcaggattaagagttggctggggttattcttcaaagccaataattaaaaaattgtatgaaatcaaacctccattcaatgttagtagaccagccttgtttgctgcaactcaagcagtacaggataccaattggcttagcaaagctatcaaacataacaattattggtgtgaaaaaatatttgatgtaattgatgaaattggaatttccacaaataaaacaaaagttaatttttttcttttaaattttgattttgttgacaaatcatcatctcaagtatttaataaattagcaaatttaggaattctagtaagacagatggatgtttatagcatcaaaaattctttgagggtaacaatagggaatagctttgaaaacaaaaaacttatttcatctctgaggaagattttcaatgtttaat

SEQ ID NO: 247454 - DNA, 589 bp, Unknown
  Bacterial polypeptide expressing nucleotide sequence isolated from the Sargasso Sea
ccactccaaagacaatatccaagattttatggctaacatccctgatgatacgatattatgcctagatgaagcgtactctgactttgtgcataaagatgaattagcaccaatcaatgtggagcatgaaaatgtaattagatttaggacattttccaaagcctatggcttggctggattgagagttggttatggaattggaaacaaaaaattgattgaagcttttaataaagtcagaaatcactttggagtaaacaaacttggtcagatcgctgctaaagccgcgttggaggaccaatatcatttgaagactgttttgaaaaaagttgatcaagcaaaaaaagatatcgctgagttgtttgggagatttggctttacctcattatcctctagaacaaactttgtacccataaacagtggtggggatggtaaatttgcagccaagttaatgagcagtttaatcaaagaaaaaatttttgtgcgtatgccaagtgtaagtccattaaattcgtttataagaattacggctggtacaaatgacgatttaatggttttagacgatgctatgcataaaataattaaagtgatttaa

SEQ ID NO: 247455 - DNA, 574 bp, Unknown
  Bacterial polypeptide expressing nucleotide sequence isolated from the Sargasso Sea
ttaagaaatctacttgagaaaattcctagtcatgtaattgtattggttgatgaagcgtattttgaatatgcaaaaattgagaaagaatatcccaattgtagttcatggataagtgatttccataatttaattgtgacacgcactttttcgaaagcatatggtttggcggccctgcgtattgggtattcattatctcattctaaaatagctgatttgttgaatcgtgtacgacagccttttaataataatagtttggctttagttgctgcagaagtagctttacaagattcagagtatattgaaagtagtattaaattaaatcagtcaggaatgaaacagttgactcaagcttttgataatatggggctcgcatatattccttcaaagggtaattttatatgtgtaaattttgagcaacctgcaatcgaaatttatgagaatttattaaaatctggcgtcattgtgaggcccatatctgattatgatatgccaaatcatttgcgtataaccattgggcttgagcatgaaaacaccaagttcattgaagaacttgagaaaataatgacaaagtgac

SEQ ID NO: 247456 - DNA, 573 bp, Unknown
  Bacterial polypeptide expressing nucleotide sequence isolated from the Sargasso Sea
accgagagctaacgagatttctagattccgttcctccaagcgtttgggtagtgttggacgaggcgtattttgagtatgtagatgactcgcaatatccccaaggtttggaattgcaagccaagtatcccaacttgattgttacccgtactttctctaaggcatatggattggcagcactcagagtcgggtattctgtttcgtcggcagagtttgcagatgttcttaatagagttaggcagccctttaacgttaactctctagcattagaggctgcgctttcagcattaggcgatcaagagttcatccgagctagcgtgagagtgaacgaaattgggatggcgcaaatatgttctgggctagacaagttaaacttaaaagttattccttcagttggtaattttgttagctttgatacaggccaatctgaaatagatatctttaatcgattactttcgaagggagtaatcgttcgtccgatagctgagtatggattaccaggcttcgtcagagttactgttggattggaacctgaaaatgctcgctttctggaggcactgggcgaggttttatgag

SEQ ID NO: 247457 - DNA, 163 bp, Unknown
  Bacterial polypeptide expressing nucleotide sequence isolated from the Sargasso Sea
tatgcctcttgttccctcatacataaaaaagttaaaaagttataagccaggaaaacccattgaagaagttcaaagagaattaggcttagaaaatataattaaattagcctctaacgaaaatccacttggcccctctccaaaagccttaagtgcaattcaaaat

SEQ ID NO: 247458 - DNA, 166 bp, Unknown
  Bacterial polypeptide expressing nucleotide sequence isolated from the Sargasso Sea
tatgagttgtgatttccttgccctggcgcagccaggggtgcagaagctgtcgccgtacgtaccgggcaagccggttgaagaactggcgcgcgagctgagtttggaccccgcaggaatcgtcaagctggccagcaacgagaacccgctggggccaagcccgaaagtg

SEQ ID NO: 247459 - DNA, 703 bp, Unknown
  Bacterial polypeptide expressing nucleotide sequence isolated from the Sargasso Sea
gatgcctaatccaaagtcaacgaatacataccaacctggactcagtgctgaactggttaaaaagaaatatgctgtatctaaagtagtaaagttagcgtcaaatgaaaatcctcttggcccatccttgaatgcaattaatgctgcgagacaagaaatactatctttgaacaggtatccagatggaaaatgctcagatcttattgaggaaattagggtttatcataagaaatataaattaaagactaaaaatataattatcggaaatggttcaaatgaaattttagaattaataggaagaacctttttagcaaaaaatgatgaagtgattattagtaagcatgcctttttagtttataagatgatatcaaattccatgagagctaagattgttgaggtaaatattaacaagaaaaatgatgcatctttcatgactgtcaacttagactcgattaaagatagcatatcttcaaagactaaggtaattttcattgctaatccttcaaatccaacaggaacaataattgattctaaaaagctaaaagaattcctaaagtcaatcccaaagaaaattattgtagtaattgatgaggcttatattgagtatgcgtgttatagaggccataaatctgctttagatttaataaaagatttcaaaaatataattattactcgttcattctcaaaaatttatgcaatcgcagga

SEQ ID NO: 247460 - DNA, 802 bp, Unknown
  Bacterial polypeptide expressing nucleotide sequence isolated from the Sargasso Sea
tatgactttaccaaaaccaataaaattcaaggttgaaagatatattggaggattatctcagtttaaaaaaattgataatccaataaagctatcagctaatgaatctgctttaggaccaagtccaaaagcaattcaggccattgaaaaagataaagataaaatttttaaatacccagagtcggactctaattctctcagagaagtcttgtctaaaaagtttaatattgattcgaagagaattatttgtggatcaggttctgatcaaatatttgatctaacatgtcatctttttttagaaccaggagacgaagtaattgtcacagaatttggatttattatgcacagaatatatgcgtcactgtataaagctaaagttatattggctaaggaaaaaaattttaaagcatcggtaaatgaaatactaggagaggttaccaacaaaacaaaaatcgtatttattgcaaatcccaataatcctacaggaacttatttatcaaaaaatgaaatgctcactttaagaaaaaaacttaggagcgatattcttttagttgttgacgatgcttattttgaatttttagattcggaggatttcacttccggattagatctttttaaagattctactaatgtattaattacaaggaccttttctaaaatttatggtttagcaggtttaaggttaggttggggatactcttcaaaagagatcattgatgctatgtaccaaattaagccgccatttaatgtgaatagaactgcacttgtttctgggatagaggctattaaagataacgaatggaca

SEQ ID NO: 247461 - DNA, 781 bp, Unknown
  Bacterial polypeptide expressing nucleotide sequence isolated from the Sargasso Sea
gacgaagtaatagtacctaaatacagtttcattatttatagaatttacagcaaaatgaatggagcaaaagttatctattctaaagaagataaatttactgtttcagtcaaagatattctaaaaaaagttacaaaaaagacaaaaattgtttttttggctaatcctaacaatcctactggaacttatattaaaaagaaaaatttacagtttttaagaaaaaaattgagaagtaatattttattggttgtagatgatgcttattttgaatatgtaaaacaaaaagattataactcagcattgggaatatttagaaattataaaaatgtagtaataacaagaacattttcaaaaatttatggattagctggattgcgtgtgggatggggatatggctcaaaagatattattaatgcacttaacaaaattaaaccaccatttaatgtgagcaggccggctttgtttgctgcttctgctgcaattagggataatgattggcttaacaaagaaataaagcacgtgaataagtggaataaaaaaatgtttaatgaatttaaaagaatgaaaattgaaactaataaaagttatagtaattttttattggtcaattttgatagagtaaaaataaattcgcagaaagtttttaaactcttagccaaaactggaattttagttcgtaaaatggatgtatatggtattaaaaattcactgaggattactattggaaaaagtgatgaaaatagaaaattaatttctaaaatgaaaaaaatattaaatgtttaat

SEQ ID NO: 247462 - DNA, 774 bp, Unknown
  Bacterial polypeptide expressing nucleotide sequence isolated from the Sargasso Sea
tatggatttaaaaaaattagttaacaaaggagtagatagtctcagtccttatgaacctggcaagccaattgaagatctagaaagagaaattggaatcaagaatgcaattaaactagccagtaatgaaaatcctataggccccagtccaaaagttttgcagtccatagatgcaatactgaaagaaacccatagatatccagatgggaatgccactaggctgaaagacagtattgctaaaaaatttaatacttcatcaaatcaagtgactatcggcaatggatctaatgacataatcgagtttattgctcgcagttttttagggcctgatgatagtgctatttattctgaacatgcattcgcagtttatccattagtcgtaaaagctgttggagcaaaaggcatagaagtcccggctaaggacttttctcatgatctggaagcgatgctcaaggcaatagaagaaaatacaaaattaatttttatagctaatcccaataatccaactggttcttttgttgagcttgatgagttactggattttttagaaaaagtgcccgaagacataatagtattattagatcaagcctattttgactactcttcgtttgaaactagagatgctaattttgatatcttaaaaaaatttccaaatcttgtaatgagtagaagtttttctaaagcttacggccttgccggatttagagttggcttctctgtttcatcagaagatatagctaattacctgaatagagttaggcaaccatttaatgctaa

SEQ ID NO: 247463 - DNA, 487 bp, Unknown
  Bacterial polypeptide expressing nucleotide sequence isolated from the Sargasso Sea
tatgacttgtgatttcctgaccctggcccagccaggcgtgcagaagctttccccctacgtgccaggcaagccggtcgatgagctggctcgcgagctggggctcgatccggccggtatcgtcaagctggccagcaacgagaacccgctgggccccagcgacaaggtgctggcggcgattcgtgccgaactggatgagctgacccgctatccggatggcaacggtttcaccctcaaggctgccctggccagccgctacgccgtcgatgcggcgcaggtcaccctgggcaatggttccaacgacatcctcgagctggtcgcccgcgcctacctggcgccgggcctcaatgccgtgttcagtgactacgccttcgccgtgtaccccatcgccactcaggctgtcggtgcccagggcaaggtcgtgccggcccgggactatggtcatgacctggacgcgatgctcgccgcgatcgacgacgacacccgcgtc

SEQ ID NO: 247464 - DNA, 1078 bp, Unknown
  Bacterial polypeptide expressing nucleotide sequence isolated from the Sargasso Sea
aatgaatttaccaaaactgaataaaattaatgctgaaaaatacgtagctggaacgagttcgtttaacagaaaaatcgctaagattaagctttcagccaatgagtcagcacttggtccaagtcctaaagcagtaagagaatttaagaaagtctcaaaagatttaaaaagatatcctgattttagcggagtctttttaagaaaagcactagcaaaaaaatttaggctagaccctaataggataatacttggctctggttctgatcagatcttcgaattaatctgtaaagcttttttaaaaaaaaatgacgaagtgatagtttcggagtttagttttataatttatagaatttatagtaaaatatgtggggcaaaaatcagatatgccaaagagaaaaatttcacagtttctgtagaaaatattctttcaaaagtaacgaagaaaactaaaattgtttttttggcaaacccaaacaaccctactggaacaatgatatataaaaaagacttattaaaactaagaagaaagttaagaagcaatatattattagttattgatgatgcatactttgaatatgttaaaaacaaaaattattcttctggaattgaattattttctaattttaaaaatgtaattgttactagaacattttctaagatctatggtctagcagggttaagagtaggatggggatatggttcaaaaaattttattaacgcgttgaataaaatcaagccaccgtttaatatcaatagagctgcattacttgctgcagttgcgtctcttaatgacacaaaatggttaaataaagaaattaaacacgtcaataaatggattaagatattttataaaacttttgtagattttgggattgaaactaatcttagcaatgctaacttcttgctagttagttttagtaaaataaaaggaaattcaaaaaaaatatttcttaagttagcaaaagctggaattttagttagaaaaatgaatgtatatagtattagaaattctttaagaataactataggaaatagtgttgaaaataaaaaatttataaaagtattaaggaatattatttaa

SEQ ID NO: 247465 - DNA, 1099 bp, Unknown
  Bacterial polypeptide expressing nucleotide sequence isolated from the Sargasso Sea
catgagttcagacattctaaaaaatcttaaccctgggattgagaatcttcatccctacgagccaggccgatctattgaagaggtcgttgacgagtttgatctcaaggaagtggttaaactagcaagcaatgaaaatcctcttggagcatctcctaaggcgctttcagctttagcagaattcaagactgatttacatttatatccagatggaaatggaactaagcttaaaaaagagattgcttctcatgagaatgtttccgttaataatattattattggaaatggttctaatgaaattttagaacttgctgcaagggctttccttaatcctagcacctcctccattgcatcaaaacatgcttttgcagtctacaaaatagtcactcaatctgctggagcaacgttaattgaagttcctacattaaactggagccatgatttaaactcatttccaaactacttagaacaaagcacaaaagtaatttttattgctaatccaaataatccaactggtacatacaatagccatgatcaagtacataccttattagaaaaagtccctgcatctgttttggttgttctagattgtgcctattttgagtatgtgacaaaagcagattatgtaaagccaattgatttattaaaagaatttgaaaatttaataattactaaatcattctcgaaaattcatggcttagccagtattagagttggatatggcattgccaacccctctctgattgaagtgctcaatcggatcaggcagccttttaatgtaaatgctatagcgcaggttatggcttctatagcgattaacgataaagagcacattcagcaaagcatcaaactaaattcattacaatataaatttttatttaacaaattatctaaacttggacttgagtgcattccatcagttggaaactttatttcttttagaggaagcttttctggtgaagaactatttcatggcttgatgaaaaaaggagttattgtaaggccggtagatttatatgacatgaaagattttatcagggtaacaattggaaccgaagctgaaaatcttaaatttattggtgcaatagaagaacttttatga

SEQ ID NO: 247466 - DNA, 1114 bp, Unknown
  Bacterial polypeptide expressing nucleotide sequence isolated from the Sargasso Sea
atggatataaaagaattagttaatagaggaattgatgacctaagtccttatgaaccaggtaagccaatcgaggatctggaaagagagttgggcattgaaaatgcaattaagttggctagcaacgagaatcccgtggggcctagtccaaaaatattagattccatagaagcagtgctgaaagagacgcatagataccctgatggaaatgccacccgattgaagtcaaccatagctcggaagttcaatgttgaagataatcaagtaacaataggtaatggctcaaacgatattattgagttcgttgctagaatatttttgagccctaatggccataatggccagaatgatagcgctatttattctgagcatgcttttgccgtataccctttggtggttaaagctgtaggagcaaaaggtatagaagttcctgctaagaacttctctcatgaccttgatcttatgcttgagtctattgaagaaagtactaaattaatcttcatagcaaatcctaataatccaactggatctttcatagaatacgacaagcttattgcttttctagagaaagttccagaacacataattgtcttgcttgatcaagcttattttgactattcctctttcgaaaccaaggatatagattttgatgtcttaaatagatttcctaatttaattatgagtcgaagtttttcaaaagcttatgggcttgcaggatttcgagtaggtttttgtgtatcttcaacagagatcgctgactacttaaacagggttagacagccattcaatgccaactcattagccttatttgccgctgaaaaagctctggaagatcaagatttcatagataaatgccttcagctgaatttagatcaaaaggaactgctatttaaagaattagagtccctcgggtttgactgtcttcctagtaggggtaattttatatcttttgactgtaaacaagactctagagaggcattcaataagcttttaaaggaaggcgtgattgtgagatcactcgcggtttataagatgccaaattatttgagagtttcagtaggtttacctgaagagaatctttcatttttagaaaagattaagtcaactcttctctaga

SEQ ID NO: 247467 - DNA, 750 bp, Unknown
  Bacterial polypeptide expressing nucleotide sequence isolated from the Sargasso Sea
gttttataatttatagaatttacagtaaaatttacggagcaaagattaaatatgctaaagaaaaaaattacaaaatatctataaataatattctttctaaagttaccaaaagaacaaaaattgtttttttagccaatcctaacaatccaactgggacaattgtagataaaaaagaattattaagattaagaaaaaagttaaggagtaatatactgttagttgttgatgacgcttactttgaatatgttaaagataaaaattatttaccaggcatgaagctattctctaattcgaaaaatgttatagtcacaagaacattttcaaaaatttatgggcttgctggactaagagttggttggggatatggtcctaaaaatttgatatatgcattaaatcaagttaaaccgcctttcaatataaatagggccgctttatttgcagctgtagaatcagttagggatgtgaaatggttaaacaaagaaataaaacatgtaaatagatgggcgaatattttttacaacaattttaagattttaggtatagaaacaaattttagttatggaaattttttactggtaaattttaataaagttaaaatgaatgcaaaaaaaatatttttaaaattagccaaaagtggaatattagtcagaaaaatggatgtatataagattaaaaattctttgagaataacgattggaaataatagggaaaataataaactaattaagactttaaggaagataatttaat

SEQ ID NO: 247468 - DNA, 1060 bp, Unknown
  Bacterial polypeptide expressing nucleotide sequence isolated from the Sargasso Sea
actggttaaaaagaaatatgctgtatctaaagtagtaaagttagcgtcaaatgaaaatcctctcggcccatccttgaatgcaattaatgctgcaacacaagaaatactatctttgaacaggtatccagatggaaaatgctcagatcttattgaggaaattagggtttatcataagaaatataaattaaagactaaaaatataattatcggaaatggttcaaatgaaattttagaattaataggaagatcctttttagcaaaaaatgatgaagtgattattagtaagcatgcctttttagtttataagatgatatcaaattcaatgagagctaagattgttgaggtaaatattaacaagaaaaatgatgcatctttcatgactgtcaacttagacttgattaaagatagcatatcttcaaagactaaggtaattttcattgctaatccttcaaatccaacaggaacaataattgattctaaaaggctaaaagaatttctaaagtcaatcccaaagaaaattattgtagtaattgatgaggcttatattgagtatgcatgttacagaggccataaatctgctttagatttaataaaagatttcaaaaatataattattactcgctcattctcaaaaatttatgcaatcgcaggaactagagtgggttatggaatatctcaaacagatattatacaaaaacttaattctatgagacaaccttttaatgtaaatcagattgcacaaattatggcaataaagtcattgaaagataaaaaatttttaagagacagtctagaaattaataaaacgtgttatgaatatattacaaaagagctggataaagattctataaaatatattgattcttatacaaattttatcacaatttattttggcaaagatgctagtgtaatttttgaaggacttttaaaaaagggaataatattgagacctctgaaaaattatggacttccaaattatttaagagttacaattggaacgatgaatgagtgcaaattatttattaaaaaccttagaatacttttaaagaggactcgctag

SEQ ID NO: 247469 - DNA, 898 bp, Unknown
  Bacterial polypeptide expressing nucleotide sequence isolated from the Sargasso Sea
aatgaaaaagacttttcctgaagatagagtaaatattggtgtaaataagataactccttataaacctgggaaatcatccgatagccttaacatgagcaaagaaaagctgataaagcttgccagcaatgagaatcctataggtcctagtaagttagctaccaaagcaattagtcatattgttgaagaagcgcatagatatcctgatggaaatggaacaaaactaaaacaagaaatttcaaagttggaaaaagttccacttgattgcatcacgttaggaaacggatccaatgatttgattgagttttcagccagagcttttttaactaatggagataatgcactttattttaaacatggatttgcaatatatccccttgccatcctagcaacaggagcagatttaagagaattgcctgtgactgaaaattatcatcaagacttaacttcagtaattaatttcgttgatgaaaaatctaaagtaatttttatcgcatcgccaaataatcctacaggatcagcaaatacattatctgaaattgaagcaatgctgaatgatttaccgaatgatttaattgtctttcttgatcaggcttactttgaatacattgaagatgaacattacaaactaccttttgaattgatcgataagtatcaaaatttagtaatttctaggagtttttcaaaggcgcacggccttgcagcttatagacttggctacagcatctcatctcaaaaaatcgcagattatttaaatcgtgttagacagccattcaatgtgagttcttttgcccttgaggcgggtattgcatctttaaatgataaggagcatttaagaaaatcaaacgatttaaaccaaagagaaaaaaataaattaatgcaattcttgaaaaagaaaata

SEQ ID NO: 247470 - DNA, 448 bp, Unknown
  Bacterial polypeptide expressing nucleotide sequence isolated from the Sargasso Sea
tatgaaacctgaagatttggtcaataaaggcattctaaatttaagcccttacaaacctggaaagcccattgaagatttggaacgtgagttaggtataaagggtgctattaaattagctagtaatgaaaatcctttgggcccaagtccgttagcaatagaagctgtttctaatatattaaatggtgcacacaggtacccagatggtaatgctttaagactaaaagaatctattagtgataagtttaagctggatatcagaaatttaacaattggcaatggttctaacgatatcattgaatttattgcaagaagctttctatcaaatgaagatagtgcaatttattcagagcatgcttttgcagtttatcccttagtggttcaggcagtgggcgctgaaagaatagaagtccctgcaagaaactttggtcatgatcttcaagcgatgaag

SEQ ID NO: 247471 - DNA, 811 bp, Unknown
  Bacterial polypeptide expressing nucleotide sequence isolated from the Sargasso Sea
tatatgtaaatcgttcctaaagaaaggagatgaagttatagtccctaagttcagttttataatttaccgaatttacagcagaatgaatggagcaaaagttatttattcgaaagagaataattttattgtttcaactgaagatatacttaaaaaagttacaagaaaaactaaaatagttttcttagctaacccaaataatccaaccggaacatatattccaaagagagaattactctttttaagaaaaaaactaagaagtgatatcttgttagttgtagatgatgcttattatgaatatgtaaaaaacaaagattattcgtctggtttaaaaacttttacaaattttaaaaatgtagttataacgagaactttttcaaaaatatatggtttagcagggctcagagtgggctggggatatggaccaaaagaaattatttctgcattaaataaggttaagccaccttttaatgtgagcagaccagctttgtttgcggcttctgctgcagtaaaagatagtccatggttgaataaagaaattaaacacgtaaataaatggagtaaaaaaatgtattctgagttcgaaaaaatgagaatagaaacaaataaaagttttactaatttcttattggtaaaatttgataaagttaaaataaattctgctaaagtatttggattactcgcaaaatcgggaatactggtccgtaaaatggatgtttatgggattaaaaattctttacgtataactattgggacaaaaccagaaaatattgcattaatgaaaaaaatgaaaaaagttttaaatgttcgataa

SEQ ID NO: 247472 - DNA, 1123 bp, Unknown
  Bacterial polypeptide expressing nucleotide sequence isolated from the Sargasso Sea
atggaattaatttcacaaatcattactttaccgaaagaagaaactcaatattccaaagcaatccacggaggcaccaatatattggaatcccgtgagttaaactatggagaggttctagatttcagcgccagcatatctccaattaacatctcttctcaaatcttagagataagtcaaaaattagacttatctcaatatcccgatccagattgtttgcttttaaaggaaaaaataacagaaggtctaaaacaatactctctctctcctaccaatatatctattggaaatggttcaaccgaactaatttatgctatagcatctgcctttctgaacaaaactaacacgctcacaagtagatccttaatttttcatcctacatatggagaatattttgctgccagttccctacacaaagcggaaatttcactaatcacccctaaatacatcaatccaggctgggaatgggattgggaattagcccacaatttcatacaagaacacaatccaaacctaatattcttatgcaaccccaataatcccactggaaactatttcagcaaatcccaaatagtccaactactagaagtaataaaaaatacctcatcaatactagtagtagacgaagcctatattgatttcgtgactgatcacaaagtgctatacgatttaatactggaatacaaactgattcttttaaggtcactaacgaaatcatacggaataaccggactgaggcttggatatagtcttgctaatcctgaaatcacttcacaaatcaatcaatatatcccaccctggtcagtaaatactttggcgcaaaatgccggaatccatcttttctcagggaataactacatacaaacagggaaagagatgattgatgagtctaaaaactatctaatacatgcattaacggaactaggctatactgttgaaccctcaaacgccaatttcctactattcaaagtcacaaatgcccagaaaatgcgggacgccctaataagtaagaacatcataatacgagattgcactagctttgggctacctcaacacgttcgaataggcatcaggtcaatatcagattgcgaaaaactaatcgaagcaatccatgaaataacataaa

SEQ ID NO: 247473 - DNA, 1252 bp, Unknown
  Bacterial polypeptide expressing nucleotide sequence isolated from the Sargasso Sea
gaaattggtaagcaaaaaaaatctacatccaatattgttgattatgatagagagcaaaaagttctagatagaatacttcaacatacaaaaacaaaatattcaaaagactccatcgttaggatttggagagaaatttttcaggcatccacaaaattacaagaaattgataggcctattatagattcaaaaagatcaattaatttaataaacatttataagggtggtaagtcttctcttaagggtaaagataatattattaaattgtcctctaatgaaaattcgtatggtccatcaccaaaggtattagaaaaaataaattttaaagagccgctctcaaactttcatcgttatccaaatattgatggtgctcaattaagagataaattagctagtgtacataatatcaatgcaaatcagattgtgcttggttgtggatcagatgaaatacttttatttgcagctttaggtttttgtcaggacggtgatgaaataatacatgcagagcatggttttgaaatgtattctatcatcactaaaatagttggcgcaacttcaaaattaattaaagaagataaaaattataaagtgacagttaactcaattttagatcaagtatctccatcaacaaagataatttatttggctaaccctaacaatcctactggcacatatttgacaagttcagagattaatgaaattttaaataaattgcccagaaatattataatggttttagatggtgcgtatgcagaatatgtgactaaaaaagattacgacaaaggtttttatttagtagatcaatttgaaaatataatattaactcgaactttctcaaaagcttatgggcttgcagggttaagattaggttggtgttatacaagcaaaaaggtagccacaattttaaataaagttaaaggcccctttaatactcaaaatttatcacaagaaatggctattattgcgctggaagataaagagtatttagatcaaatagttaaaaaaaatcaagaagttaaaaattggtttgaaagtgaacttaaaaaaatcaatatcaaaactaatccatctgaaggtaattttacttttgttgaaatgactaaggaagaagcaaaaaatatatctgcgcgtcttgctaatatgggaattattgttcgagaattagacagttatggattacctaattgccttcgaattaccataggaacaaaaaaagaaatgaatgcaaccattcatgctctcaaacaaatttaat

SEQ ID NO: 247474 - DNA, 1054 bp, Unknown
  Bacterial polypeptide expressing nucleotide sequence isolated from the Sargasso Sea
ctgcacccctatgagcctggccgttcaattgacgaagtcgttgcagaatttggtcatcatgaagtcgtaaaactagcgagcaatgaaaatcccctcggcgcatctccgaaagcgctttcaatcctcgcaggacttgaaaatgatttgcatttataccctgatggaaatggaacaaagcttaaaaaagaaatttcaaatcatgagaatgttccttttaataatattattataggaaacggctctaatgagattttggaattagcagcaagagcttttcttaatacaaacacgtcatccattgcttcaaagcatgcatttgcagtgtataaaattgttactcaatctgcaggcgcatcattgatagaagttcctacatgcaactggggtcatgatttaagatcatttgatgattatttagagagcagcacaagaattatttttattgccaacccaaataatccaactggtacatataatagtcacgaagaagttcactcgttgttgaaaaaagttccttcatctgtattagtagtattagattgtgcatattttgagtatgtaactaaagaagattacgtcaagcctatagacttgttaaatgaatttgaaaatttattaattactaaaacattctctaaaattcatggtctggccagcattcgtgttggttacggtattgctaatccctctttaattgaggttctgaatcgaatcagacagcctttcaatgtaaatactatagcccaagcgatggcttgtgtagcaattaatgatcatgagcatattcgtcaaagcatagagttaaactcacaacagtataaatttctatttgataaattatccaaacttgggcttgactgcattccatcagttgggaactttattacttttaaaggcagctttattggtaaagagatgtttaataaccttttgaaaaaaggagtaatagtaagatctgttgatttgtatgatatgaaagattttataagagtcacaattggaacagaagctgaaaacttaaaatttctaagtgtattagaagagcttttatgaa

SEQ ID NO: 247475 - DNA, 705 bp, Unknown
  Bacterial polypeptide expressing nucleotide sequence isolated from the Sargasso Sea
catgacttatccaagatatacgccccttgttagtgacctcccatccaccgttcctttcgttgggcctgaaagtcaagaaagggatagaaaacttttatttgatgcacggttgggggcaaatgagaatatgtttggaccttctccgaaagctttgtctgccttaaaaaaatattcaaatgagcagtggatgtatggtgatccaactagctttgaattacgatgcgcgttggctgaaaagcataaaatatctactgataatattgttgtaggagagggaatagatggattacttggctacctagttcgacttcttatttctgaaggagatcacgtagttacgtcagatggtgcatatcctacgtttaattatcatgtgagcggtttcggaggaaaacttcataaagttccttatcttgctgactgtgaagatattgtgtcactggttaaaaaagctcgctcagttgatgctaaactgatttattttgcaaatcctgataaccctatgggcacccatgtgcctggggataaaattgtcgaagcgctaaaagatttgcctgaaggatgcttatttattttggatgaagcgtattctgaatttgcaccagcttcatcacttcctagtctagaaattacagatatgagagtagtaaggttgcggacattttctaaagcatatggaatggctggtgcacgcgtcggatatgc

SEQ ID NO: 247476 - DNA, 1087 bp, Unknown
  Bacterial polypeptide expressing nucleotide sequence isolated from the Sargasso Sea
atgcctcttgttccttcatatataaaaaaattagcgagctataagccaggggctaatatagatgatattaaaaaagaaaaatcattaataaatgtaataaagctggcatctaatgaaaactctatgggcccatccccaatggctgtgtctgcaattaataaaagtataaataaaattaatcgttatcctgatgctcctggtaaaaaacttcgtaaaaaactggcatcaaaatttaatgttaaatctgaaaatgtaataattggttcaggctctgagggtataatgtcaaacatattaagaacatttttattaactgatgacgaaattataggggcagcaaattcttttattgggtttcgtgtattagctactgcaactggcagaaaaataaattgggttaatatgaaaaatcataaaattgatctcaatgaaataataagaaatattaatgattatacaaaaattatttatatagcaaatccagataatccaatgggtacatatatcacagataaagagtttgataagttttatcaatctgtacctgagcgcgtattagttattcttgatgaggcttattttgaatatgcaaatcatttagatgattatccaaattctatgacatatagatatgataatgttataacattaagaactttttctaaagcatatgggctagcgggtctaagaattggctatggcttctctcatgaaaccttaattaataatttactgaaagtaaaagttccttttgacccctcttttactgctcaggttggtgggttggcagcattagatgatgatgaattcatgaataaaactattaacttaaatataattgaaaaggaaaaaatagaaactaagctcgatgaattagggatagagcgcataccttctgcagctaattttataacaactcattgggatactgaaataaaagctaaaaccataacacaaaaaatgctagatcgaggaattatattaagacatttagtatcttttggttggccagaacacgtaagaatttctattggattagaaaatgagaacgaaaactttttacaaacacttgaaaaaattatttaat

SEQ ID NO: 247477 - DNA, 990 bp, Unknown
  Bacterial polypeptide expressing nucleotide sequence isolated from the Sargasso Sea
ctaacgagtctgctcttggacctagtccaaaagcaaaaaaagaatatataaaagtatcaaaaagttttgcaagatatcccgacaccaatggtactttcttaagagaaactttatcaaaaaaatttaaactagataaaaatagaattgttttgggatcaggttcagatcaaatttttgaattaatctgtaaagcatacctaaaaaaaggtgacgaggtaattgtgcctaaatatagttttattatttatagaatttatagcaaaatgaatggagcaaaagttatttattcaaatgaaaataattttacagtttcagtaaaagatattttaaaaaaagtaactaccaagacaaaagttgtatttttggcaaatcctaataatccaaccgggacttatgttgcaaaaaaagatttgttgtttttacgaaaaaaactacgaagcaatattttgttagtagttgatgatgcttattttgaatatgtaaaacaaaaaaattattcttcagctttaaaattattttctaactttaaaaatgtggtaatgacaagaacattttcaaaaatttatggcctagcaggattgagagtcgggtggggatatggatcaaaagaaattattgatacgttaaataaaattaagccaccttttaatgtaaacaaagcagctttgtttgccgcatctgctgcagtaaaagatagtgcttggttaaataaagaaattaaacacgttaataattggaataaaataatgtttaatgaatttaaaaaaatgaaaattgaaactaatagaagctatagcaattttttattagtaaattttgataaagtaaaaattaattcatcaagagtttttaaattattagcgaaagcaggaattttagttcgtaaaatggatgtttatggtatcaagaattcattaagaattacgattgggaaaagtgaagaaaataaaaaattagtttccaaaatgaaaagaatattaaatgtttaaa

SEQ ID NO: 247478 - DNA, 982 bp, Unknown
  Bacterial polypeptide expressing nucleotide sequence isolated from the Sargasso Sea
atgatgtttaatgaaaatccatatggtccatcacaagtagctagaagagcgatgagaaaagcttttaacgaatctaatttatattcaatgcgaggagctaaagccgagtttaaggaattaatggcaaagttaaatggtgtaactccagaccatattgctgttggatttggttctggagaaattttaaaaaaagctgcattaatgaatggtattgataaaggcgagctgttatctccatctttaacttttgaaacaatcaaccgttatgctaaaacaatgcaatcaaatgtgaagcgtattccgatgactaaaaatattgggattgatttagataaaatgagtgaaaaaatatcaagtaaaacaaaaatggtttatctttgtaatcctaataatccaactggattattaatggatactaatgatcttaagttattttgtaaacaaatttcacaaaaagcgattgtgtttgtagatgaagcttatcatgaatatgtcgttgacccaaaatatagatcaatgattgatcttgtaaaatctggcgagaatgtaattatatctagaactgcctctaaagttcacggactagcagggctacgcgtcgggtttgctataagcacaccgttaatcatcaaaagattagaatcttatttaacagattcactcaatattattggcttaagagccgctattgcttcatatcaagatcaaagatttcaaaagcatagtattgaaatgaataataaagcaaagagtattgttactgactttttagattctaaaggtattcagtatctcgattctcaaactaattttatatttattaaaacaggtattgaaatcactgaattacaacctgctatggaaaaaaatggagtattagttggtaggcccttcccaccgtttacgacttggtgtcggttaagtttagctaaacctgaagaaatgcctcgatttaatgaagtatttgaaaaggttatatgat

SEQ ID NO: 247479 - DNA, 640 bp, Unknown
  Bacterial polypeptide expressing nucleotide sequence isolated from the Sargasso Sea
aatgacattaagaaatataaattcagttgttgccggtttaagcccctacaaacctggaaagcctatagaggagctaagccgtgaattaggtttgacggacattgttaaactggccagtaatgaaaatccgctgggagcctctgagcaagtaaagatggctttggtctcggcagttgatgagctgacaagatatcctgatggcagtggttttgctctgaagaaagctctttccgaaaaactgaaagtagagccccatcaaattactttaggaaatggatctaatgatgttttggacttgatagctcgcgccactttagagggcgaggctgagggaattatctcagagcacagttttgttgtttatggtttgtctattaaatacgctggcggcaggacagtagttgtgcccgcattaaattatggctgtgacttgcaatcgatggcgcgagctgtcacggacaagactagagtcatatatattgcgaacccgaacaacccaacaggaacttgggtaaccaaccaaaagctgacgagatttctagattccattccgtcaagcgtttgggtggtgttagacgaggcatactttgagtatgtagatgatccggagtatcccccaaggtttggaattgcaagctaa

SEQ ID NO: 247480 - DNA, 1117 bp, Unknown
  Bacterial polypeptide expressing nucleotide sequence isolated from the Sargasso Sea
tatgaaaaataatatttcaagaaaaaaattcttaaaacaaggcgcaactctgttcgcaggcacaatgattggctctacgattgatttttcatcgatagtttatgccgcaaattataagcccatccgaatgatgtataatgaaaatccttatggtccttctagaattgctcagcgtgcaatgcaaaaagcattttctgaatcaaatctttataccatgcgccaagctcagaaagaatttgttcagcttattgcattattgaataatattgataaggatcagatttcgattgggtttggctcaagagaaattttaaataaggccgctcttatgaatggcattgataatggtgagatgatatcaccccaattaacctttgaagcaattaataattatgctaaaaatgctatgaatacaaaagttaatcggatcaaaatggatgatgatatcaatattgacttagataaaatggctagcaagattaataaaaagacaaagatggtttatgtttgcaatccaaataatccaaccggtctagccttggatagcaaccaactagaatctttctgccttgaagtgtcaaaaaaggtattggtatttgtagatgaagcatatcatgaatatgctttggatggaaattataaatcaatgtcgcatttagtgaacccaaacaataaaattcttatttcaagaacagcatccaaagttcatggtttagctggattgcgagtgggttatgccattgcaaataatgatataacgaaacgacttagttcttatttaacaggatcattaaatgtagtaggtttgcgcgcagcgattgcttcgtataatgataaaaactttcaggcgtttagtattaaaaaaaataaccaagcaagaaagattgttaccgatcacttagacaaaaaaggaataaagtatttaaaatcacacaccaactttatttttcttaaaacaggaatggatataaataaatttcaaccggcaatggaaaagcatggagtcatagttggaaggccatttcctccttataagaattggtgcagattaagcatggcaaaacctgaagagatgaaattttttaatagaggcctagataaggtgttaagcatatga

SEQ ID NO: 247481 - DNA, 613 bp, Unknown
  Bacterial polypeptide expressing nucleotide sequence isolated from the Sargasso Sea
caatcccaccggagatctggtgggccgcgacggcctcatcgccctgctggagaaggcgcgggatcgcgccatcgtggtggtagacgaggcctatatcgaattctgccccgaggcgtccgtggtggacctgctggcccgcttccccaatctggtggtgacccgcaccctctccaaggcctttgccctggcggggatccgctgcggctttactctggccggtcccgaggtgatcgccatgctggccaaggtgatcgccccctatcccatccccgagcccatcgcccagatcgcggcgcaggccctctcccccatgggactggagctgatgcaggagcgagtagtggagctcaacaagcaaaaagccgccttcaaggccgcgctggcaaccctgccctgcgtgaaggaagtgttcgaggacaagggcaacttcgtgctggtgcgctttgtggatggcgccgccgtctttgccgccatgaaggccgctggcatcatcttgcgggatttctcgaccaagcctggtctggacaacagcattcgcgtcaccatcggctatcagggcgagatggacgccgtgctggcggtattgcgtgacctgccctctccctctttttaa

SEQ ID NO: 247482 - DNA, 478 bp, Unknown
  Bacterial polypeptide expressing nucleotide sequence isolated from the Sargasso Sea
tatgagtaaatactggagcccgctggtcagcgaattgcagccgtatgtacctggcgaacagccaaaaatggctaatttggtgaagctgaacaccaatgaaaatccgtttggtccgtcgccgaaggtgatcgaagcgattcaaaaagagctgaacgacaatcttcgtttatatcctgatccggaaggccaggcgctgaaagaagcgatcgccgactaccacgttgattttgcgattaatgcaaggcaagtgttcgtcggcaacggctcggacgaagttcttgcgcacatttttcagggtttgctgaaacacgataaaccgatcctgttcccggatatcacttacagcttctacccggtgtactgcggcctgtaccagatcgaaagcacggtgattccgctgaccgacagcttcgagatcaacccggaagactacaaacgccccaacggtggcatcatcttcccgaacccgaacgcgccg

SEQ ID NO: 247483 - DNA, 826 bp, Unknown
  Bacterial polypeptide expressing nucleotide sequence isolated from the Sargasso Sea
atgagttgcgatttcctagccctggcccagccaggcgtgcaaaagctgtccccctacgtaccaggcaagccagtcgacgagttggctcgtgagctggggctcgatccggccggtatcgtcaagctggccagcaatgagaatccgctcggcccgagcgacaaggtgctggcagcgattcgcgccgaactggacgagctgacccgctacccggatggcaatggcttcaccctcaagactgcgttggctgcccgctacggcgtcgacgccgcgcaggtgacgttgggcaatggctccaacgacattcttgagctggttgcccgtgcctatctggcacctggtctcaacgccgtgttcagcgactacgccttcgcggtttaccccatcgccacccaggcagtcggcgcgcagggcaagatcgtgccggccaaggattacgctcacgacctgcaggcgatgcttgccgccatcgatgacaacacccgcgttgtcttcattgccaaccccaacaatccgaccggtacctggttcgggccggatgcgctggaagccttcctggcccaggtgccggaatcggtgctggtggtgttggacgaagcctatatcgagtacgccgaaggcgacgagctgccagacggtcttgattacctggcgcgctatccgaacctgctggtctcgcgcaccttctccaaggcctacggcctggcttcgttgcgtgtcggctacgccatcagctcgccggccatcgccgatgtgctcaaccgcgtgcgtcagccgttcaacgtcaacagtctagcgctggccgcagcctgcgcggcgctggccgatg

SEQ ID NO: 247484 - DNA, 667 bp, Unknown
  Bacterial polypeptide expressing nucleotide sequence isolated from the Sargasso Sea
gcgtgacgatttcagcatcgacccgccggactaccgcaaggccaatggcggcattatcttccccaacccgaacgcaccgaccggtgtcgcgctggggctggagcagatcgagcagattctcgatgccaacccggattcggttgtggtggttgatgaagcctatgtcgattttggcgccgaaacggccatcaccctggtcgaccgttatcccaacctgctggtcacccagactttgtccaagtcccgctcgctggccggcctgcgtgtggggctggcggttgggcatgcggacctgatcgaggcgctggagcgcattaagaacagcttcaactcctacccgctggatcgcctggcgattgtcggtgcggttgcggcgtttcaggatcagagctggttcaaccagacgcgtcaggcggtcatgcgcagccgagagagtctggccgaggcgctcgccgagcgtgggttcgaggtgctgccgtcgcaggccaacttcgttttcgcgcgccacacccagcgcgatgctgccgaactggcccaggggttgcgtgagcgacgggtcatcgtgcggcacttccgtctgccgcgtatcgatcagtttttgcgcatcaccatcggtaccgaggcgcagaacaaggcgttgctggcggctctggacgaggtgctctaa

SEQ ID NO: 247485 - DNA, 802 bp, Unknown
  Bacterial polypeptide expressing nucleotide sequence isolated from the Sargasso Sea
cccctacggcccatcgcccaaggcgctggcggcaatgcaggccgagttgaacgacaacttgcgcctgtacccggaccccaacagcgacctgctcaagcaggccgtggccaggtattacgggatcgatgccggcaaggtgttcctcggcaacggttccgacgaagtcttggcgcacatcttccatggtctgttccagcacgatctgccgctgctgttcccggacatcagctacagcttctacccggtgtactgcggcctgtacggcatcacgttcgacgcggtgccactggacgaacagttccagattcgggccactgactatgccaggcccaacggcgggatcatcttccccaaccctaacgcgcccaccggctgcgtactggcgctggacgcggtggagcagatcctcaaggccagcccggattcggtggtggtggtcgatgaagcctatatcgacttcggcggcgaaactgccatcagcctggtagaccgttacccgaacctgctggtgacccagaccctgtccaaatcgcgctcactggccggtttgcgtgtgggcctggccgtgggccacccagacctgatcgaagcgctggagcgggtcaagaacagcttcaactcctacccgttggatcggttggcgattgttggcgcggcggccgcgtttgacgaccgtgaatatttcgagaaaacctgtcagtgggtgatcgacagccgcaaccaggtcgtcgcgcaattgcagggcaaggggtttgaggtattgccgtcggcagcgaacttcatctttgcgcgtcacccgcgg

SEQ ID NO: 247486 - DNA, 859 bp, Unknown
  Bacterial polypeptide expressing nucleotide sequence isolated from the Sargasso Sea
cggcggcaaaggccacgtctggctcaacgccaacgaggcgccgctggcctatcccttcaccatcgagggcagccgtctcaaccgctaccccgagtgccagccggccgaggtggtgaacggctatgccgcctacgccggggtcaaccccgatcaggtgctggtgagccgcggcgccgacgaggccattgagctcttgatccgcaccttctgcgaagcgggtgaagatcagatcctgatctgcccgcccacctacggcatgtacgccatcagcgccgagacctgcggtgtcggtatcgtcgagcagccgctgaccgccagccgccagcctgactggcccgccattgccgatcgcctttccgacgtgaagctggtgttcctctgctcccccaacaatcccaccggagatctggtgggccgcgacggcctcatcgccctgctggagaaagcgcgggatcgcgccatcgtggtggtagacgaggcctatatcgagttctgccccgaggcgtccgtggtggacctgctggctcgcttccccaatctggtggtgacccgcaccctctccaaggcctttgccctggcggggatccgctgcggctttaccttaggccatcccgaggtgatcgccatgctggccaaggtgatcgccccctatcccatccccgagcccatcgcccagatcgcggcgcaggccctctcccccatgggactggagctgatgcaggagcgagtggtggagctcaacaagcagaaagccgccttcaaggccgcactggcaaccctgccctgcgtgaaggaagtgttcgaggacaagggcaacttcgtgctggtgcgctttgtggatggtgccgccgtctttgcc

SEQ ID NO: 247487 - DNA, 880 bp, Unknown
  Bacterial polypeptide expressing nucleotide sequence isolated from the Sargasso Sea
ggcaagcccattgaggagctggctcgtgagctgggattgaaccccgcggaggttgttaaactggccagcaacgagaatcccctggggcccagtgacaaggcaatggctgccgcccgtaaggcgctggaagaaatgtgcctgtacccggacggcaacggtttcgacctgaagcaggcgctttcgaagcgtttcggcctgggcatgaaccagatcacgctgggcaacggttccaacgatgtgctggaagtgatcgcccgctgctttgctgacagcgacagcgaagtggtgttctcccagtatgcctttgccgtttacccgattgtgacccaggccatcggggcgaagggcgtttcggtacctgccagggactggggccatgacctggacgctatggccgctgctgtaacagaccgcaccaagctggtgttcgtggccaacccgaataaccccaccggaaccgtgcatgaagcggatgccctcgaagcgttcctggatcgcattccggaacgggtgctggtggttctggacgaagcctactgcgagtatctgaccggcgatgaatacccggacggcatcaagctgctggcgcgatacccgaacctgatcgtctgccgcaccttttccaaggcctgggggctggcagctctgagggttggctatgccatcagctcgccggaaattgccgatattctcaaccgcgtgcgccagccgtttaatgtagacaccgtcgccttggcggctgccaccgcggtcctggaagacgaagcctatctgaaccgttcccgggaagtgaacgaagccgggctgcgccagctgtgcgaaggctttgaccggatgggcctgccttacattccctccgccggcaatttcgtggcggtag

SEQ ID NO: 247488 - DNA, 436 bp, Unknown
  Bacterial polypeptide expressing nucleotide sequence isolated from the Sargasso Sea
atgaccgatttcctcgccctggcccagccaggcgtacagcagctgtcgccctatgtgccgggcaagccggtggatgagctggcccgtgagctggatctggacccggccagcatcgtcaagctggccagcaacgagaatccgctgggcccaagccctaaggcgctggaagcgattcgcagcgagttggccgagctgacccgttaccccgatggcaatggtttcgagctgaaaagtcgcttggctgcgcgctgcggcgtgcagatcaatcaggtcaccctgggcaatggttccaacgacattctcgatctggttgcccgtgcctatctggcgccgggtttgaatgcagtattcagccagtacgcctttgccgtttaccccatctcgacccaggccgtaggtgcccagggcaaagtggtgccggccaaggactacggcc

SEQ ID NO: 247489 - DNA, 718 bp, Unknown
  Bacterial polypeptide expressing nucleotide sequence isolated from the Sargasso Sea
catgagccgtatcagcagtttagcccggcaaaaagtgcaacaactggtgccttatgcttcagcacgtttgagcatgagtggcggctcagtttggctgaatgccaacgaaaactcgatggcaacagactatgaactttcaggccactacaacagatacccggattgtcagccaaaagagctgatcagcgcttatgcatcttacgctggcgtggaaagcaatcaggtgctgaccagccgtggcgctgatgaaggcattgagcttcttattcgtagtttctgtgaaccaggccaagatgccatcagcatttgcccgccgacttatggcatgtataaaatcagcgccgaaagtcagctggtggatgtcaatatagtacctttaacccaagatttaactttggatctgccaaccttatttgcgcaaaaagccaatgtaaaactggtgtttatttgtagtccaaataacccaacaggggatttaatacctcgcgagcaaattatcgaggtgctggagttttataaagacaaagctttggtagtggttgatgaagcttatattgaatttgcccctgaagcttcagtggctggtttattaagccagtacaataacttagtagtgctgcgtactttatccaaagcttttgctttggcaggcctgcgctgtggttttacgttggcagagccatctgtgattgcggcacttcgccagatgattgcgccc

SEQ ID NO: 247490 - DNA, 1054 bp, Unknown
  Bacterial polypeptide expressing nucleotide sequence isolated from the Sargasso Sea
atgagccgtatcagcagtttagcccggcaaaaagtgcaacaactggtgccttatgcttcagcacgtttgagcatgagtggcggctcggtctggctcaacgccaacgaaaactcgatggcaacagactatgaactttcaggccagtacaacagatacccggattgtcagccaaaagagctgatcagcgcttatgcatcttacgctggtgtagaaagcaatcaggtgctgaccagtcgtggtgctgatgaaggtattgagcttcttattcgtagtttctgtgaaccaggccaagatgccatcagcatttgcccgccgacttatggcatgtacaaaatcagcgccgaaagtcagctggtggatgtcaatatagtgcctttaacccaagatttaactttggatctgccaactttatttgcgcaaaaagccaatgtaaaactggtgtttatttgtagtccgaataacccaacaggggatttaatacctcgcgagcaaattatcgaggtgctggagttttataaagataaagctttggtagtggttgatgaagcttatattgaatttgccccagaagcttcagtggtcagtttattaagtcagtacagtaacttagtagtgctgcgtactttatctaaagcttttgctttggcaggtctgcgttgtggttttactttggctgaaccttcagtcattgccgcacttcgtcagatgatagcgccctaccctgtgccagctcctgtggctgaaattgcagtgcaggcgttatcagtccagggccagcaaaaaatgcatgccacagtagagcaaattaatagcttacgcgaaagctttagtacttttgccaaaactttagcttatgtcagtaaagtttatccgtcgaaggctaactatgtgctgctatcagtgcctgatgccgcggcgctggttagctttatagcagagcaaggggtgcttattcgtaaccaatccagtcaactgggtttaggccaggtggtgcgggtgtcgataggcaatgccgctgaaatggcgcagttacagcagattatgtcgtcttatt

SEQ ID NO: 247491 - DNA, 1096 bp, Unknown
  Bacterial polypeptide expressing nucleotide sequence isolated from the Sargasso Sea
ttgctaaaaccttcaaaaagaattttttctttgccaaaatatacccctggaaaacccattgatgagctcgaaagagattttggaatagaaaatgctataaagttggcttcaaacgaaaaccctcttggcccatcaccaaaagcaaaagaggcaataattgaggcagcagccaaatcccacctttatccagacggagactcttatcatcttaaaaaagcgattgctcttagggaaggcattttaccaaatcaaatagttcttggtaacggatccaatgaggttcttgaattaattggccattgttatatcgaagaaggcaacgaagttcttatgggagaatattgttttattgtttatccaattgttacaatgctttcagagggaacaattgttagagtcgatatgcccaatttggtccatgacatagcatcttttaagtctagcattactgaatcaactaaggttgtttttcttgcaaatccaaacaacccgactggaacaatagtttcaacagaagaaataattggttttttagaatttttgccaaaaaatattcttttggtagttgatgaagcatattctgaatatgttgagcctaaatataagttagaagtttctagcatgataaacaaatatgacaatcttttaattctgaaaaccttttcaaaaatgtatggtattgcaggtcttagggtcgggtatgcgatgggaagtgtagatttaatttctaatcttgaaaaagctagggagccattcaatgtaaacataatcgcacaagaagcagctttggcagcactagatgatgatgaacacattgcgagatccattaaagtaaataacgaaggaatgctgtatttaaaaaccgaaatttcaaaattaggattaaaaacatatccttcttacgccaattttcttttattggaattcccattagatgcaaacaacatatatgaagagcttttaaagcatggtgtaattgtaagaccacttcaaaattataaccttagcaattgcctaagagtgactgttggaataagagatgaaaatcaaaagtttttaaatgcattaaaacaagtgttagggtcaattaaatgat

SEQ ID NO: 247492 - DNA, 1087 bp, Unknown
  Bacterial polypeptide expressing nucleotide sequence isolated from the Sargasso Sea
atgccactagtcccttcatatatcaaaaaattacaaaattataagcctgggaagcccatcagtgaggctactagagaaacaggtatttcaaatattatcaagttagcttctaatgaaaatcctcttggcccttctccgaaagccatgaaagctttgaaggaatctctaataaatatgcatcgttatccagatgcttctggatatgatcttagatcaaaacttgctgaacgatttaaagtaaaagtagataatgttgttttgggcgcaggctcagaagggataatgtctacaataatgcgtacgttcttactgaatgatgatgaattgatcagtgccgaaaattcttttattggatttcgtgttttagctaatgcatctgggagaagaattcactgggtacctatgaataagtaccgttacgacctggaacaaatggcaacaaagatcacggattatacaaagatcatttacattgcaaacccagacaatcctatgggaacatatataaccaaaaaagagtttgacgaattctataaatatattccagagagagtattgattattttagatgaagcatatttcgagtttgcaaatgagatacaggactaccctgattccatgacctaccgatatgataatgtaatcacattacgtagtttttctaaagcatatgggctaggtggaataagaatcggttatggattagcccatggcgaattgatatctaatctgcttaaggtgaaagttcctttcgaaccttcattaccagcgcaaattgcaggacttgctgctttggatgatgcagaatttttatcggagactcttaacgttaataaaaaaggtatacgatttttaaaagaagaattagatattttggggatagaaaatataccttctgcagcgaattttattacaaccgtttggaaatcagaacagcaggcacatagattgtcaaatgacctgttagcaaaaggtataattgtaagacatctggcatcttttggatggccaaattgtgtacgtatatctataggcacagaaaaagagaacaatagaatcattaacgcattgcaaaaaatcttatgaa

SEQ ID NO: 247493 - DNA, 1090 bp, Unknown
  Bacterial polypeptide expressing nucleotide sequence isolated from the Sargasso Sea
ttgcccgacaggagccaagcggtgagccgttactggagcaacatcgttcagcaactcgtgccttacgtgccgggcgagcagcctgcgctcgcacacccggtcaagctgaacaccaacgagaatccctatccgccgtcgccgcgcgtcgtcgcggcgatcgcacgcgaactcggcgagaccggcgacacgctgcgccgctatcccgatccggttgcgcgcgcgctgcgcgaaacggtcgcggcccatcaccgcatcgagcccgagcaggtgttcgtcggcaacggctccgacgaggtgctcgcgcacacgttccaggcgctgctcaagcacgaccggccgctgcgcttccccgacatcacgtacagcttctatccgacctatgcgcgcctgtacggcgtccagacgtcgatcgtgccgctcgcggacgatttctcgatccgcgtcgacgactatctcgacgacgccggcggcgtgctgtttccgaacccgaacgcaccgaccgggcgcgcactgccgcttgccgacgtcgagcggatcgcagccgcgaatccgtcgtcggtcgtcgtgatcgacgaagcgtatgtcgacttcggcgcgcagtccgcgattacgctgatcgaccgctacccgaacctgctcgtcgtccacaccacgtcgaaggcgcgctcgctcgcgggcatgcgcgtcggtttcgcattcggtgacgcagcgctgatcgacgcgctgaaccgcgtaaaggacagcttcaactcgtacccgctcgaccggctcgcgcaagttgccgcgcaggccgcctatgaagacatcgattatttcaacgcaacctgcgggcgcgtgatcgacagccggacgcgtctgacgcatgcgctggacgcgctcggcttcgacatcgtgccgtcggccgcgaacttcgtgttcgcgcgccatcccgcgcacgacgcgggcgcgatcgcggcgaaactgaaggaacgggaaattttcgtgcggcacttccggctgccgcggatcgaccagcacctgcgcatcaccgtcggcaccgatgccgaatgcgacgcgctcgtcgcggcgttgcgcgaactgctggcctgaa

SEQ ID NO: 247494 - DNA, 1114 bp, Unknown
  Bacterial polypeptide expressing nucleotide sequence isolated from the Sargasso Sea
aatgcaacagccctggaaagacatcgccttgccggatttaccgctccgcgaggacctcaagtcgcagcacgcgtacggggcgccgcagctcgatgtgccggtctgcctgaacgtcaacgagaacccctatccgccgtcggccgcgctcgtcgagcgcatcgcgaccgcggtggccgacgccgcgcgcgcggcgaaccgctatcccgaccgcgattttgccgagctgcgcgcgcatctggcggcatatctgacgcacgacaccggcgtgacgatcgacgcatcgcgcgtctgggcggccaacggctcgaatgaagtgatccagcaggtcctgcaggcattcggcggccccgggcgctcggcgctggcctttacgcccgcgtatcccatgtatgacgaatactgccgcacgactttcacgcgcctgcatacgttgccgcgcacccgggatttcgcgctggatctgggtcaggcgctcgacagcatccgcgagcaccagccgagcgtcgtactgctgacgtcgccgaacaacccgaccggcaccgcgctgccggtcgacgatatccgcgcgatactcgacgtcgcgccgggcatcgtcgtcgtcgacgaagcctatgcggaattccggcgtcgcggcgtccccagcgcggtgacgctgctgccggaccatcctcggctcatcgtcacccgcacgctgagcaaggcgttcaagttcgcgggcggccgcgtcgggtattgcgcgtgcgcgcctgcgatcgtcgaagcgctgaagcgggttcgattgccctaccacctgtccgccttcacgcaggcggcggcctgcgcggcactggccgcacgcgacgagatgctgtcgcaagtggaggcgatcaaggccgagcgcgattcgaccgtcgcgtggctgcgtggtctgggcctgacggtggccgattccgacgccaacttcgtgatgttcggcgagtttgcggatcggcaccggatctggagcggactcctgcgtcacggggtcctgatccgggagtccgggccgccggcgtatcttcgcgtgtcgatcggcaccggcgcggagatggccgcgtttcgtgctgcgctgcttgacgtgatggcgctcgaataa

SEQ ID NO: 247495 - DNA, 1090 bp, Unknown
  Bacterial polypeptide expressing nucleotide sequence isolated from the Sargasso Sea
aatgacattaagaaatataaattcagttgttgctggtttaagcccttacaaacctggaaagcccatagaggagctaagtcgtgaattaggtttgacggatattgttaaactggccagtaatgaaaacccgctgggagcctctgagcaagtaaaaacggctttggtctcggcagctgatgagcttacaagatatcctgatggcagtggtttcgctctgaagaaagctctttccgaaaaactgaaagtagagccgcaacaaattacgttaggaaatggatctaacgatgttttggacttaatagctcgcgccacgatagagggcgaggctgagggaattatctcagagcacagtttcgttgtgtatggattgtctattaaatatgcgggtggtaagacagtagttgtgcctgcattaaattatggctgtgatttgcaagctatgtcacgagctgtcacggataagactagagtcatatatattgcgaacccgaacaacccaacaggaacttgggtaaccaaccaagagctgacgagttttctagattccgttccgccaagcgtttgggtagtgttagacgaggcgtactttgagtatgtagatgatccggagtatccccaaggtttggaattgcaagccaagtaccccaacttaattgttactcgtactttctctaaggcatatggattggcagcactcagagtcgggtattcggtttcttcgttagagtttgcagatgttcttaatagagttaggcagccgttcaacgttaactctttagcattagaggctgcgctttcagcattaggcgatcaagagttcattcgagatagtgtgagattgaacgatatggggatggcacaaatacgttctgggctagacaaatttaatctaaaagttattccttcggttggtaattttgtcagttttgatacaggccaatctgaaatagaggtatttaatagattactttcgaagggcgtaatcgtgcgtccgatagctgagtatggattacccggcttcgtcagagttactgttggattggagcctgaaaatgcacgctttctggaggcattgggcgaggttttatga

SEQ ID NO: 247496 - DNA, 658 bp, Unknown
  Bacterial polypeptide expressing nucleotide sequence isolated from the Sargasso Sea
gatgagcaaattctggagccccttcgtcaaggacctggtgccttacgtgccgggcgagcagcccaagctgagcaagctggtcaagctcaataccaacgagaacccctacggcccctcgcccagggccatcgccgccatgcaggccgaggtcaatgacaacctgcgcctgtacccggaccctaacagcgaccgtctgaagcaggcagtggctgactactatggtgtgaagaccagccaggtgttcgtcggcaacggctccgacgaggtgttggcgcacgcttttcatggactgttccagcatgaagcgccgctgctattcccggatatcagctacagcttctatccggtctattgcggcctgtacggtatcgattaccagcagctggcgctggacgagcagttccagattcgcgtcgaggactatgcccggcccaatggcggcatcatcttccccaaccccaatgcgccgaccggctgcctgctgccgctcgaggccatcgagtgtctgctgcagaacagcccggacagcgtggtgctggtagacgaagcgtatatcgacttcggcggccagacggccatcgctctggtcgacaagtatccgaacctgctggtcaccagaccctgtccaagtcgcgctctctggcgggcttgcgcgtag

SEQ ID NO: 247497 - DNA, 406 bp, Unknown
  Bacterial polypeptide expressing nucleotide sequence isolated from the Sargasso Sea
cttgcgcgtaggcatcgcggtcggtcatcccgacctgatcgaggcgctggagcggatcaagaacagcttcaactcctatccgctcgatcgcatggccatcgcgggtgctgcggcggcgttcgaggaccgcgcttatttcgagaaaacctgccagcaggtgatcgagagccgtgaggtagttgttgccggtctacaggggctgggcttcgaggtgttgccttcggcggcgaacttcgtcttctcccgtcatccggacaaggatgccgcgactctggcagccgggctgcgcgagcagggggtgatcgtgcgtcacttcaagcaacagcgcatcgcccagttcctgcgtatcaccatcggtaccccggagcagaacaaggccctgctggacgccttgcaaggcctttga

SEQ ID NO: 247498 - DNA, 1207 bp, Unknown
  Bacterial polypeptide expressing nucleotide sequence isolated from the Sargasso Sea
gatgagccaagtgccaattagccaagcaccaacgagcaatgtgccagtaacaaaggttccgagcgccaatagcgccagcaatactctcgataacaatactctcgataacaatactctcgataacacaagcatcgagccaacaacccttgccgcacgtcttgcacggcccgaactgctcgagttaacgccttaccaaagtgctcgcaggctgggtggtcgtggggatatttggatcaacgctaacgaatcgccctttaataatgtggccgtcggcgagctcgatttaactaagttaaatcgttatcctgagtgccaaccgcccgcgttaatcaatgcctacagccaatacagcggtgtagcggagagcaaaattgtcgccagtcgcggcgccgatgaggccatcgagctacttattcgtgccttttgtgtcccaggcatagattccattgcgacctttgggcccacttatggcatgtacgccattagcgcgcaaacctttaatgtaggcgttaaggcgttaagcttaacggctgaatacggtctcccatccgactttgcaacggccacgcgcggcgctaagttagtgtttatctgcaatcctaataacccaaccggcactgtgattgacaaggcgcgcatagagcaagccatccaagccctgcccgatgccattgttgtcgtcgatgaggcttatatcgagttttgcccagaatatagcgtggcggatttacttgagacttacccaaatctcgttgtactgcgcaccctctcaaaagcctttgccttagcaggcgcgcgctgcggctttttactggccaatgaagaaattatcgaaatcatcatgcgagtgattgcgccctatcccgtgccacttcccgtgagtgaagtggccgtgcaagcgctgtcagcggctgggattgcgcggatgaaaacccaagtcaaagcgctcaatactcagggagagcgactcgcggcggcgctgaatttgtactgcgagcaatggggcggcgccgtgctaaaacccaatggcaactatgtcttagccgagtttgacgacgtagcaacagtggcacaactgcttatcgacaatggcattgtcgcgcgggcctataaggacccaaggctagctaaagccattcgttttagctttagctctcagtctgacaccgaccgcttagtgtcgctctttgaatcgcaaaagctgtga

SEQ ID NO: 247499 - DNA, 1087 bp, Unknown
  Bacterial polypeptide expressing nucleotide sequence isolated from the Sargasso Sea
ttgaaattaaagaacagctttagaataaattccttgccaacttataagccaggaaagtcaattgaagagctacaacgtgagctaggattcgaagatgctattaaactagcatcgaacgaaaatccacttggtcccccttctagtgctgttgatgtaattcaaaattcagctcacttggttcacctttatcctgatggagattgctataatttaaaaaaaaagatttccttcaaggagaacattcttccaaaccaaataatcgtgggaaatgggtcaaatgaagttctagaacttgttgcccacacctttttggaaaagggagatgaggccatcatgggtgaatattgttttattgtttacccaattgtaacaaatcttagcgaagcgtctattgtcagaataccaatgaaaaatcttgcgctaaatttaaatgatatacttcctagaataactaactccaccaaggttatttttattgccaaccctaacaaccctacgggtgctagatccacaaaaaaagacgtagaaggttttttagagaaggttccagccaacatagttgtggttttggatgaagcctatgctgaatacatgggtggagaaaatacaaatgtttcgactctaataaataaatatgaaaacttaatcatacttaagactttttccaaagtttatggacttgccggcctaagggtgggatatgggatggcatcctatgacatgattggacttcttaataaacctcgagaaccctttaatgtaaatcaggttgcgcaattagcagctactgttgccttagacgacgaagaacatgtaaaaaaatctatagaattaaacaaagcaggaatgatttatttaaaagctgagctcacaaaaatgaatataaagtcttacccatcatacgcaaattttatacttatagaatttaaatctagtgcaagtacaatttacgaagaacttttaaagcagggtgttattactaggccacttgaaaactatggtcttaataatcacctcagaataaccgttgggcttgaacatgaaaatgttaagctaatcaatgcattgaaaaaagttgtggcataga

SEQ ID NO: 247500 - DNA, 1207 bp, Unknown
  Bacterial polypeptide expressing nucleotide sequence isolated from the Sargasso Sea
gatgagccaagtgccaactagccaagcaccaacgagcccagcaccaacaagcaatgtgcctgtgacaaagattccgagcgccaattgcgccagcaatactctcgataacaatactctcgataccacaagcatcgagccaacaacccttgccgcacgtcttgcgcgtcccgaactgctcgagttaacgccctaccaaagtgctcgcaggctcggtggtcgaggggacatttggatcaacgcgaacgaatcgcccttcaataatgtggcggttgccgaactcgatttatctaagttaaatcgttaccccgagtgccaaccgcccgcgttaatcaatgcctacagccaatatagcggtgtagcagagagcaagattgtcgccagtcgcggcgccgatgaggccatcgaactgcttattcgtgccttttgtatctcaggcatcgacgctattgcgacctttgggcccacttacggcatgtacgccattagcgcgcaaacctttaatgtgggcgttaaggcattaagcttaacggctgagtacggtctcccaagcgactttgcgacggccgcacgcggcgctaagttagtttttatctgtaatcccaataacccaaccggtactgtgattgacaaggcgcgcatagaacaagccatccaagccctgcccgatgccattgttgttgtcgatgaggcttatatcgagttttgcccagaatatagcgtcgccgatttactcgagtcttacccaaaccttgtggtgctacgcaccctttcaaaggcctttgccttagcaggcgcccgctgcggctttttgctcgccaatgaagggattatcgaaatcatcatgcgggtgattgcaccctatcccgtgccactgcccgtgagtgaagtggccgtgcaagcactgtcaccggctggaattgcgcggatgaaaacccaagtcaaagagctcaatgcgcagggagagcgactcgcggcggcgctgaatttgtactgcgagcaatggggcggcgccgtactaacacccaatggcaactatgtgctcgccgaatttgacgacgtggccaaagtggcacagctacttatcgataatggcattgtcgcgcgggcctataaggacccaaggctggctaaagccattcgttttagcttcagctctcaggctgacaccgaccgtttagtgtcgctctttgaatcgcaaaagctgtga

SEQ ID NO: 247501 - DNA, 1072 bp, Unknown
  Bacterial polypeptide expressing nucleotide sequence isolated from the Sargasso Sea
tatgacgacacctcaagacatcatccgccgcgacgtgctcgcgatgacgagctatccggttcctgacgccacgggctacatcaagctcgacgcgatggaaaacccgtttccgctgccgccggtgcttgccgctcatctgggcgagcatctggccggggtggcgctgaatcgctacccggcgccgcgcccggaagcgctgatcgaaaagatcaagcgcgtcatgggcgtgcccgcgggttgcgaggtgctgctgggtaacggctcggatgaaatcatcagcatggtgtcggtggcgtgcgcgcaaccgggcgccaaagtgctcgcgccggtgccgggtttcgtgatgtatcagatgtcggcgaagctggcgaatctggacttcatcggcgtgccgctgaagcccgatttcacgctcgacaccgaagcgatgctggcggcgatcgccgagcatgagccggcgatcgtctatctggcctacccgaacaatccgaccggcacgctgtacgacgacgcggacatggagcgcatcatcgccgcagcgaacaaaagcctggtggtgatcgacgaggcctaccagccgttcgcgcagcaaagctggctgccgcgtgccgatgcgttcgacaacgtcgttgtgatgcgtaccgtgtccaagctcggtctggccgggatccgcctcggttatctggtcggcaaacccgcgtggctcaccgaattcgacaaggtgcggccgccgtacaacaccaacgtgctgacgcaagccgccgccgatttcctgctcgatcacgtcgacgtgctcgacgctcaggccgcgcaattgcgtgaagaacgcacgaaactcgcgcaagccgtggccgagctgccgggtgccgaagtgttcccgagcgccggcaacttcctgctggtgcgggtgcctgatgcatccgttatgttcgaaacgctgctggcagcacgggttttgatcaaaaacgtgagtaaaatgcatccattgctggtcaattgcgtgcgtttgaccgtcggttcgcccgaagaaaacgcccagttgatcgccggactgaaactcgtattgcactga

SEQ ID NO: 247502 - DNA, 1081 bp, Unknown
  Bacterial polypeptide expressing nucleotide sequence isolated from the Sargasso Sea
cttgagccgctactggagtgacatcgtccaccgtctgacgccgtatgtgccgggcgagcaaccggcggttgcgcatccggtgaagctgaataccaacgaaaatccttatccgccgtcaccgcgtgtgctggatgcgatccgccaggaattgggcgccgcggcagagtcgttgcggcgctatcccgacccgagcgcgcgcaagctacgtgaaacggtagccgcctatcacggcattcgcgcggaacaggtgttcgcgggcaacggctcggacgaagtgctcgcgctcacctttcaggccttgctgaagcacgacaagccgctgctgtttcccgatatcacttacagcttctatccgacctacgcgcggctcttcgaaatcgactatcggactatcgcactcgacgacaatttcgccatccatgtcgacgaatacaccgcgcctaacggcggcgtactgttcccgaacccgaacgcgccgaccggacgaccactgccgctcgccgatatcgagcgactgttggcaagaaacaccgaatcggtggtggtaatcgacgaggcctacgtcgatttcggtgccgaatcggccgtcgctctgatcgaccgctatcccaacctgctggtaatccagacggtatctaagtcccgctcactggccggcatgcgtgtcggcttcgcattcggcaatccggaactgatcgacgcactgaaccgcgtgaaggacagcttcaattcgtatccgctcgaccggctggcgcaagtcgcggccatcgccgcatacgaagacgatgcgtggttccgcgacaactgcgccaaggtgattgccagccgtgagcggctggcggcaggcttgaccgcgctgggcttcgaggtggtgccgtcggcggcgaatctgctgttcgcgcgccacgacggctacgacgccgcaacgctcgtggcacggctaagggaaaaggaaatcttcgtgcgtcacttcaaggcggcgcgaatcgatcagcatctgcgtatctcggtgggtaccgacgcggaatgcggcattctgctggatgcgctgcgcgacattttcagcggatacgtcggatag

SEQ ID NO: 247503 - DNA, 603 bp, Unknown
  Bacterial polypeptide expressing nucleotide sequence isolated from the Sargasso Sea
catgagcattgccaacctggcgcgccgcgtggtgcgggccctcactccctatcaatccgctcgccgcatcggcggcaagggccacgtctggctcaacgccaacgaggccccgctggcctatcccttcaccatcgagggaagccgcctcaaccgctaccccgagtgccagccggccgaggtggtgaacggttatgccgcctacgccggggtcaaccccgatcaggtgctggtcagccgcggcgccgacgagggcatcgagctcttgatccgcaccttctgcgaagcgggtgaagatcagatcctcatctgcccgcccacctacggcatgtacgccatcagcgccgagacctgcggcgtcggcatcgtcgagcagccactcaccgccagccgccagcctgactggcccgccattgccgatcgcctgtccgacgtgaagctggtgttcctctgctcccccaacaatcccaccggagatctggtgggccgcgacggcctcatcgccctgctggagaaggcgcgggatcgcgccatcgtggtggtagacgaggcctatatcgaattctgccccgaggcgtccgtggtggacctgcggcccgctcccca

SEQ ID NO: 247504 - DNA, 1075 bp, Unknown
  Bacterial polypeptide expressing nucleotide sequence isolated from the Sargasso Sea
catgacgacgccacaagacatcatccgccgcgacgtgctcgcgatgacgagctacccggtgccggacgcgagcgggttcgtgaaactcgacgcgatggagaacccgtacccgctgcccgaaccgctcgccgcggcgctcggcgagcgtctcgcgcaggtcgcgctgaaccgctacccggcgccgcgcccgaccgcgctgctcgacaagctgcgccatgcgatgggcgtgccgcccggctgcgacgtgctgctcggcaacggttcggacgaaatcatcagcatgatgtcgatggcctgtgcgaagccgggcgcgaaggtgctcgcgccggtgccgggcttcgtgatgtacgaactgtccgcgaagctcgcgcagctcgaattcgtcggcgtgccgctgaaggccgacctgacgctcgacgtcgacgcgatgctcgcggctgtcgccgagcatcgtccggcgctcgtctatctcgcgtacccgaacaacccgaccggcacgctgtacgacgatggcgacatcgaacggatcgtcgcggccgcgcggcacagcctggtcgtgatcgacgaggcgtaccagccgttcgccgttcgctcgtggctgccgcgcgccgccgagttcgacaacgtcgtcgtgatgcgcacggtgtcgaagctcggcctcgcgggcatccgcctcggctatctggtcggttcgcccgcgtggctgaccgaattcgacaaggtgcgcccgccgtacaacatcaacgtgctgacccaggcgaccgccgacttcctgctcgaccacctcgacgtgctcgacgcgcaggcggccgacctgcgggcggaacgcacgcgtctcgcacaggaagtggccgcgctgccgggcacgacggtgttcccgagcgccggcaatttcctgctggtgcgcgtgccggacgcggccgccgtgttcgacgcgctgctcaccgagcgggttttggtcaaaaacgtgagtaaaatgcatccgttgctggctgaatgcgtgcggctgaccgtcggttctcccgacgaaaacgcgcgcctgctggccgctttgaaactcgcgctgcccggttga

SEQ ID NO: 247505 - DNA, 1159 bp, Unknown
  Bacterial polypeptide expressing nucleotide sequence isolated from the Sargasso Sea
ctgtcgcatattcatctattactaattagtcgttcggagattttcatgacaacgtcattcggcccttcctatgtgcgcgcgattgcgccttacatcgccggcaagccgatttcggaagtggcccgcgagtttggcctcgacgaagcggccatcgtgaagctggcgtcgaatgaaaatccgctgggcatgccggagtcggcgcaacgcgccatggcgcaagcagccagcgaactgggccgctatccggacgcgaatgccttcgaactgaaggccgcgctgagtgagcgttacggcgtgccggccgactgggtcacgcttggcaacggcagcaacgatattctcgaaattgccgcgcacgcgttcgtcgagaaggggcagtcgatcgtctatgcccagtattcgttcgccgtgtacgcgctcgccacgcaaggcgtgggtgcgcgtgcgatcgtcgtgccggccgtcagatacggccacgacctggacgcgatgcttgccgcgatcaccgacgacacccgcctgattttcgtcgccaatccgaacaacccgaccggcacgttcatcgaaggcgcgaagctcgaagcgtttctcgacaaggtgccgcgcaacgtggtcgtcgtgctcgacgaggcgtacacggaatatctgccggaagcaaaacgctacgactcgatcgcgtgggtgcgtcgttatcccaatctgctggtgtcgcgcaccttctccaaggcgttcggtctggccggattgcgggtcggcttcgcaatcgcgcagcccgaattgaccgacttgctgaaccgtctgcgtcagccgttcaacgtgaacacgctggcgcaagccgcagcgatcgcggcgctgaacgacaaagcgtttctggaaaagagcgcggctttgaatgcgcagggctaccgtcaactgaccgaggcgttcgacaaactcggcctcgaatatgtgccgtcggacggtaacttcgtgctggtgcgcgtcggtaacgacgacgcagcgggcaaccgcgtgaacctcgaactgttgaagcggggcgtgatcgttcgtccggtcggcaactacggtttgccgcaatggctgcgcatcacgatcggcctgcccgaagaaaacgaagcattcctcgcggcgctcgaacagacgcttgccgccgcgtaag

SEQ ID NO: 247506 - DNA, 1081 bp, Unknown
  Bacterial polypeptide expressing nucleotide sequence isolated from the Sargasso Sea
atgtcggcacttatcgataacctaattaacgaaaatttagtgccgctaaagccgtatgaatcggctcgtcgcttgttttcaggtggtcaagactggcttaatgccaacgagtcaccttatgctaatgaatacagtgtagatagcagtaactttaaccgctatccgtcatgtcagcccgaagcggtagtcagtggatacgcaaactacgcagggctcgacaagtcacaacttattgttacccgcggcgcagatgaaggcatagagttacttattcgcaccttctgcacgccgggtaaagacagcattctgatatgcccgcctacctacggtatgtatgcaatcagtgctgaaacctgtgatgtgggcgttaagaaagtgccgcttaacgacgactttagccttaacgtgaatgctgtatgcgctgaagatgacgttaacgtgattttcatctgtgcgcccaacaatccaaccggtacgccagttgctcgtgaagacattaaaaccgtgctcaatcactttgccgataaagcactggttgttgtagatgaagcgtacattgagttcgatgccgacaatacgtgggcaaatgagattaacaactatccaaacttggtggtacttcgtacgctgtctaaagcgtttgctcttgccggtcttcgctgtggttttacacttgctcaggcacccgtcatccaagcactacttaaagtgatagcgccctatcccattccagagccagtagcgcagattgctgcacaagcattgtcggctgaatcgctaacgttacttgagcttcaggtggctaccattaaccgggaaaaagaggccctagccgaagcgctgaattctatcgaaggctttgaattagtgggtgatagacgagcaaactttatcttattccgctacgcaaaagcgcaagccctaatgcagtacttggtaagccaaggcatgcttattcgcgatcaatcaaaacagcttaacttacaaaactgtttacgcgtaagcataggcactgaagagcaaaaccagcgtttaatgcagctaattaacgaatttaaaaataatgaggacgcggcatgag

SEQ ID NO: 247507 - DNA, 1039 bp, Unknown
  Bacterial polypeptide expressing nucleotide sequence isolated from the Sargasso Sea
aaagccaatagaagatcttgagagagaattaggtttaaaagatatagttaagatagctagtaatgaaaacccaataggccctagtcctttggcgttaaagaagataaaagattgtctagaagaccttcatcgttacccagatggaaattcatttaacctaaagagggttctttcagataaatttaatctccaagaaaataggctaactataggaaatggatcaaatgacatcatcgagttcgtttctcgatgttttctttcaagttctgatagtgctgtcttttctcaatatgcctttgctatatatcctttagtaattcaagctcttggagctgaaggaatagtatctccagcaactaattggtcccatgatttggaaaaaatgctttcttcaatcaaatcaaataccaaaataatctttatagctaaccctaataatcctactggaacattccttccgaaagaggagctattagattttagttctcgggtcccagaaaatattttggtatttttagatcaagcatactttgattattcatcttatgaagaggaagacgtaacatttcaagatatagaggaatatccaaatctcttgatttctaggactttctcaaaggcttatgggttagctggtttaagagtaggcttttcttattcttctttagagatggctgattacttaaacagaataaggcaaccttttaatgttaactctttggcacagattgcagctgaaactgccttaagtgatcagaatcatttgcttaaatcattaaaattaaatgcaacagaaaaacaaatactttacaaagaatttgattcactagggttcgaatacattccttctctagctaatttcatctgctttgattgtaaaggagatgcagatgaattattccagtcatttttagaagaaggcattattgtaaggtctatgagggtatatggaatgccaaatcatcttaggattacaattggaaccaaagaagaaaacctaaagttcattaatgcacttagaaagttaactgatgggtaa

SEQ ID NO: 247508 - DNA, 985 bp, Unknown
  Bacterial polypeptide expressing nucleotide sequence isolated from the Sargasso Sea
aactccttagcaacagactacgagctgtcaggccaatacaacagatacccggattgtcagccgaaagagctgatcagcgcttatgcagcttatgctggcgtagaaaccaatcaggtactgaccagccgtggcgctgatgaaggcattgaacttctcattcgcagcttttgtgaaccaggtcaggatgccatcagcatttgcccgcccacttatggcatgtacaaaatcagtgctgaaagtcagctggtggatgtcaacatagtgcctttaacccaagatttaaccttagatctgcctgctttatttgcgcaaaaagccaatgtaaaactggtatttatttgtagcccaaataacccgaccggcgatttaatacctcgtgagcaaatcgtcgaggtgctggagttttataaagacaaagctttagtggtggtcgatgaggcctatattgagtttgcgccagaagcttctgtggccggtttattaaaccaatacagcaacttagtggtgctgcgtactttatctaaagcttttgctttggcaggcctgcgttgtggttttactttggcagctcctgaagttatagccgcactgcgacagatgatagcgccctaccctgtgccagctcctgtggctgaaattgcagtgcaggcgttatcagtccagggccagcaaaaaatgcgagccacagtagagcaaatcaacaacttacgtgacagctttagtgcttttgccaaaactctgagttatgtcagccgtgtttttccatctaaagccaactatgtgctgctggccgtgcctgatgctgcggcgctggtgagttttattgcagagcaaggggtgcttattcgtaaccaatccagtcagctgggtttaggtcaggtggtgcgggtatccattggttcaccagatgaaatggtgcagttacaacagattatgtcgtcttattcctacacagcaaacaaacaaacacaggagtctttatgag

SEQ ID NO: 247509 - DNA, 1078 bp, Unknown
  Bacterial polypeptide expressing nucleotide sequence isolated from the Sargasso Sea
catgaaaattgcttttttaacagctggtggtatcgcaccttgtctttcatcaagtattggtgcgcttattcaaaattataatcgcgtattaccaaattctgaaatgattggctacctaaatggctacagaggtttactgctaggtaagtctattggattccctgattctgttaaaaataaatatgaaacactttttgaatttggaggtagtccgataggcaatagccgtgtgaaacttactaacttagaagactgtgttaagaagggttatgtaaaagaaggcgaagatccattacaaattgcttcagagcagctaaaaaaagacaaagttgatattctgcataccattggaggagatgatacaaatacaatggcagcccagctatcagggtacttaaaggagaatggatataatttaactgtggttggattgccaaaaactgttgataatgatgtatatccaatatctcagaccttgggcgcatggacagcagcagagcaaggggctattttttttgaaaacattgtcaatgagaatacaaccagtacgaggcaattgatcatccatgaggtaatgggaaggaattgtgggtggctcactgcacaaacggcttttgaatatcgagatagaatgaaaaagagagagttccttcctgaactgcttatcgatcaaagcaggtgggatatagatgcggtttacatcccagagtcagattttgattttcattctgaagtaagtcgtcttggagcagtaatggatgcaaaagatggggtaaatgtatttttaagtgagggtgctggattggaaacaatagtacgtgaaatggaagaaagaggagaagaaattcctagagacgcgtttgggcatgttcgattggatgatattaatcctgggatgtggtttgcgaagcaattctcaggtgcgttaggggcagaaaaaacattagttcaaaaaagtggatattttgctcgctcagcaaagcccagcaacagagatttccaactaatacaaaaatctgcggacatagcagtagagtacgcggttgctcgaaaaaatggtgtagtggtagagatatga

SEQ ID NO: 247510 - DNA, 904 bp, Unknown
  Bacterial polypeptide expressing nucleotide sequence isolated from the Sargasso Sea
agatataaacttccagatatagaagataaaaaattctatgaagatttattcaaaaaattagaaaaatattctgttggttattttttttataatggaggtaatgattcagctgatacttgttataagatttctgaagctgcaaaaaaattaaattattctctaaatgcaattgctattcctaaaactatcgataatgatcttgcggttactgataattgtcctggttttggttcagctgctaaatatatagcaacttcagctaaagaagcttccttagatattagatcaatgtgtaaaacatcgactaaagtttttattcttgaagtaatgggaagacatgccggatggattgcagctgcagcagagttagctaatgacgatagtaatacctatgttcataaaatattaattcctgaagttccttttaatgaagagtcttttctcaatggagtgcaaaaagatgtagagaaatttggctactcagtaatagtagcatctgaaggtttaaagaatcagaatggagaattttatgcagcatctgctacaaaagattcatttggacataatcagcttggtggtcttgctccaaaacttgctaatctagttagtgaaaagctcaaacataaatatcattggtctgtatctgactatctacaaagaagtgcaagacatattgcatcagaaacagacattaagcagtcaatatctgttggaaaagccgcagctaatatggctctagaaaataaaagtggcattatgcctgtaatatctagagatagtaataatccatataaatggagcataaaagaatctgaactccaacacattgcaaataaagaaaaaacagttcctgcaaattttatttctgaagatggttttagaatcactcaaaagggagttgaat

SEQ ID NO: 247511 - DNA, 220 bp, Unknown
  Bacterial polypeptide expressing nucleotide sequence isolated from the Sargasso Sea
atattttccacgcgacctggacttctccgaagcgggccgcgtggaaaatatccgacgggtgggcgaggtcgccaagctgatggccgatgcgggcctgatcgtgctgaccgcgttcatctcacccttcaaggccgagcgggacatggtccgcgccctgcttccgcaaggtgagttcgtcgaaatcttcgtcgacaccccgttggcgaagatttcgacgaac

SEQ ID NO: 247512 - DNA, 370 bp, Unknown
  Bacterial polypeptide expressing nucleotide sequence isolated from the Sargasso Sea
gatgaaattcggcggaacaagtgtacattctaaagagtcgcgtcagcatgcaatcaagcatattcgaaggagtgttgaatccaataaaaatgttgttgttgttgtctccgcgatgggccgcaaaggagatccttacgcaactgacacactgatttcccttcttaaagatgttggagaacctgtaaatccatcagagctagatgctgttatgagtatcggggaaaatctgagttcagcttatttttcccatttgctttctatgaatggaattccttcagttgcattcacaggaggacaggcaggtatactaacagacgataatccaggaaatgctaaaattcttgaaatagatacttccagaatcccttaa

SEQ ID NO: 247513 - DNA, 265 bp, Unknown
  Bacterial polypeptide expressing nucleotide sequence isolated from the Sargasso Sea
ctcgagtccgccttcccgtgccgactagaaagcacgcagcagcaattcaacaagcagcaggtcaagaccatccacaagaacatggtgaggaacccgaagaagctcgaggaggagataaacgtcatgaagatcctcgaccacccgaatatcgtgcggctgtacgagactttcgaggactcgcggagtatctacctcgtcgtcgagttgtgcacggctaagttgttgatgaagagtgattcatcatcggaattgatgagacgatgaa

SEQ ID NO: 247514 - DNA, 1000 bp, Unknown
  Bacterial polypeptide expressing nucleotide sequence isolated from the Sargasso Sea
cttgatcggaccgttgcggtcaaggtcttggcggggcatcgatcagctgatgaggaaatgctcaggcgtttccggaatgaagcacaatctgcagcacgactcaatcatgagaatataggtcttgttcatgctgttgggtcaagtaatgggtggcatttcattgtcttcgaatatatcgaaggtacaaatctgcgggatttggttcggcaacgaggtcctttgacgattgctgctgttgtcgatatttcgatgcaaatagcagcggcgttggatcatgcctgtcaccgtgatgtaacacatcgtgatatcaagccatcaaatattcttctgactccagaaggccgtgcgaaattggttgatatgggattggctcgcttgcagcacattgctggggagcaggatctcacggtcagcgggataacccttggcacatttgactatatttccccagaacaggcgcgtgatgcacgttcagccgatattcgcagcgatctctattcgctgggatgcacaatgtttttcatgctggttggtagagcaccatttgctgaggggaccatggtgcagaaactgcttcagcatcagcaggaaaggcctcctgagatttcagatatgagggccgaggtgccacggaggcttatatcggtagttcataagttaatgtcaaagcgtccacaggatcgctttcagcatccagcggctctcgaatttgaattgttatcaatcgcagaggaagagggttttgatgtcacagcgtctcgtccagcaattgacatcgatttggctactgcagataaagccaaggtgtttttttggccttgggttattgcgggcctcagtctcattggttttgtggtctggacggctatgaatgcaccccagaaaaagtccaatccagatgtgccacaggttgtaaggccacagcgacaaatgctcgatgatacgtcggtggttcacgtcctttcgcagccgtcgcagccagatgagttggcactatgca

SEQ ID NO: 247515 - DNA, 747 bp, Unknown
  Bacterial polypeptide expressing nucleotide sequence isolated from the Sargasso Sea
gtggagatggaagtatgccaattttaaaaaaattagctaaagacggtaatatgaaaatagtagctattccaaaaacaattgataacgatgtaggagcgacggaaagttcgataggttttcatactgcagtagatgttgcaactcaagcgctggacaatttacaatctacagccgcaagccatagaagatctatgatacttgaagtcatgggtcgagatgctggacatattgcattaaatgcgggtatagctgggggcgcagatattattttgattccggagataaaatattcagtagacggtataattaataaacttaattctatgaaaaaaaatgatatccaacattcattaattatagttgcagaagcagttaaaaaagaagacggttcaagagtagttcacaaatatatggacggtgaacaaagacttggcggtattggagattatatagctcaggaattaatgaaaaaaacagatgttgagtgtagagttacgtcactagggcatgttcaaagaggagctcctccaaccgcgagtgatagaatattagctagtgcctttggagtttatgctgtagatttattaaatcaaaaaaaatttgatcgaatggttgcatggagagatagaagagtagtagacgttcctattgatgaaggtattaaaacttataaaaatgtagaaagaaaagattccttagtagaaacagctctatcattaggaatttatttaggagatgagatttaat

SEQ ID NO: 247516 - DNA, 672 bp, Unknown
  Bacterial polypeptide expressing nucleotide sequence isolated from the Sargasso Sea
aatgaaaatagcgtttcttactgcaggaggcattgcgccctgtttgtcagcatctattggtgcgttaatagaattatataatagagaagagccagatgctgatctaattggttatcttaatggatacagagggctattgcttggtaaatcgattcaattcccggctgaggtaaaatcaaattatgaaatattatttgattttggtggtagtccaattgggaatagtagggtaaaactaacaaataccaaagattgtgaagatcgaggttacgttaattcaggcgaggatcctttgaaagttgcagctgaacaattaacaaaagacaaaataaatatactccacacaattggaggtgatgacacaaatactatggccgcacaactgtctttttacctaaaagaaaatggctatgatttgactgttgttggtttaccaaagactgttgataatgatgtttttccaatacaacagacattaggcgcctggactgcggctgaacaaggtgctgttttttttgagaatattgcaaatgaaaatacaacaagcaccagacaattaattattcatgaagttatgggaagaaattgtggttggcttaccgccaaaactgcttttgattactgtaatagattagaaaaccgttcttttttaccggaattattaattgataa

SEQ ID NO: 247517 - DNA, 785 bp, Unknown
  Bacterial polypeptide expressing nucleotide sequence isolated from the Sargasso Sea
cttaatgctgcaattagatcaattttttatagagcaaaaaataaatacaaaatggatgtatatggaataagagatggtactgcaggcctaatcaaacgtccagttgatgttatgcaactaactcataaaacttttggaggatacttattaagacaaggtggaacttttttaggatctacaaataaaggcaatccttttaaaattcctacgagtaatggcaaacacgtcgataaatcaaaagaaattatagagggataccactcaatgaaacttgatggtttaataattatcggtggagacggtagtatgcaaattttaaaaaaattagccaaagatggtgatatgaaaatagttgctattccaaagacaatagataacgatgtaggggcaacagaaagctcgataggctttcataccgctgtggatgttgcaactcaagcattggataatttgcaatctacagcagctagccatagaagatctatgatacttgaggttatgggtcgtgatgcaggacacatcgcacttaatgcaggtatagcaggaggtgcagacataattttaattcctgaattaaagtattcaatagatggaattattaataaactcaattctatgaaaaaaaatgacattcaacattcattaatcatagttgctgaagcggtcaagaaagaggatggttcacgagtagttcataaatatatggacggtgagcaaaggcttggcggtattggagattatattgctcaagaattgatgaagaaaacagatgttgaatgtagagt

SEQ ID NO: 247518 - DNA, 696 bp, Unknown
  Bacterial polypeptide expressing nucleotide sequence isolated from the Sargasso Sea
aacaatcagcattgttttttaataatattgtcaatgaaaataccactagttctagacaatttattattcatgaggttatgggcagaaattgtggatggcttactgcaaaatcggcagatatttatcgacaaatgcttcagaaaaaagaatttttgccagaaattttggtgaataaaaaaagatgggatatccatgctgtttttgttccagaaatggaaattaatatggagcgtgaaatgaatcgacttcgagaaataatggacaaacacgattgtgtaaacatttttttaagcgagggcgcaggcttagattctattatttctgacatggaaaaaaatggtgagcaaataaatagggatgcctttggacatgttcgcttagatgaaataaatcctggaaagtggtttgcggaaaagtttgcaaatgcgattggagcagaaaaagttttggttcaaaagagtggatattttgctcgatcagcggcatctaatcatgaagatttggatttaatttttaaaagtgttgagtttgctgttgattcggcacttctccaaaagagcggtgttgctggattagacgatgacttaaattcagagatgtcttgtattgattttaaaagaatcaaggggggtaaaccttttgatgtaaaagaatcttggtttgttgatttattatcgaatatagggcagtattaac

SEQ ID NO: 247519 - DNA, 697 bp, Unknown
  Bacterial polypeptide expressing nucleotide sequence isolated from the Sargasso Sea
tatgagaatcgttgcgattccaaagaccatagataatgatgttggagctactgaaagttcaattggatttcacacagctgtagatgtagccactcaagcattagataatttgcaatcaactgcagcaagtcacagaagatctatgatattagaagtaatgggtagagatgctggccatatcgctttaaacgcagggatcgctggaggtgctgatataattttgatacctgaaataaaatactcgattaatggcattattaaaaaattaaattcaatgaaaaaacatgacattcaacattctttaattattgtggctgaagcagtgaaaaaagaggacggatcaagagttttacataagtatatggacggagaacaacgtttaggcggcataggggattatattgcccaagaattaatgaaaaaaacagatgtagaatgtagagtaacgtcattaggtcatgttcaaagaggtgcgcctccaactgctagtgatagaattttggcaagtgcatttggagtttacgctgttgacttattaaaccaagagaaattcgaccgtatggtagcttggaaaaatagaagggtaattgatgtaccaatagatgaaggaataaaaacatataaaaatgttgaaagaaaagactctttggtagaaactgcattatctttaggaatatatataggagatgaaatataa

SEQ ID NO: 247520 - DNA, 679 bp, Unknown
  Bacterial polypeptide expressing nucleotide sequence isolated from the Sargasso Sea
ttggtcgagggttttcgcggatcgtcgcaggaccccggtgttacggtgcatttcgatcaggtctggttcgaccagttgtcgctcgaggcgctgctggtcgacggcaatatcgtgcggtatcgcgcgaggtcgcacgacggcgtccagtcgtggctggtcgccgtgccggccgatgcgcctttggacgccgtgtcccggcgcctgcagcgcgaattcgtactggccggcaaactcgattccgcatgggccgtgcggccgctcgcgctgatacgactctcgcgaggtccggtgctggtgtacgaggacaacggcggtgcgctgatttttccgccggtcgacagcacccttgcgattggccgctttctacgcattgcgatcggcgccgcgcgcgcgctgcggctcgcgcatacgcgcggcgtgctgcatcgggatatcaagccgaccaatctgatcgaagcagccaacggcaccatccgcctgctcggttttcgcgacgccctcgggcaggccggcgatccgtccgccgagcccgtggatactctgtacggtacgctggcctatatgtcgccggaacaggcgcggcgtgcggaaggcctggccgacgagcgtagcgatctctattcgctcggcgtgacgttgtacgagttgctcaccgggcagttgccttcgaggcgaccga

SEQ ID NO: 247521 - DNA, 373 bp, Unknown
  Bacterial polypeptide expressing nucleotide sequence isolated from the Sargasso Sea
tgccatctactacggggtgtttcgctttgccatcgtgcgcttcaacctcaaaacccctggtcgtgaaaaagagagccgcgagattgaggccagcgaggctgcccagcccgcgggcaagaaggctggcaacagcggttacaacggcgaggtgatcctgaacgccttgggcggcgccgataacatcctggcgctggacaattgcatcacccgcctgcggatgtcggtacaggacatgagccgggtcgatgacaaggtattgaaggcgaacggcgccatcggggtgatcaagctcgacgagcacaacctgcaggtggtgatcgggcctcaggtccatctggtgaaaaaccagctgcagagcctgatgggggcctga

SEQ ID NO: 247522 - DNA, 595 bp, Unknown
  Bacterial polypeptide expressing nucleotide sequence isolated from the Sargasso Sea
gatgcccttttgcaacggcggctcgctcgcggacctgctgcggaagcacgggcccctctccgagaaggacgcgcgctcagtgatggtgcaggtgctgcacgggctgcgccacctgcacgcgcagccagagccggtgatccactacgacctcaagccggccaacatcctcttccacgacggcgaggtgcggctctccgactttggcctctccaaggtgatggccgccgaaggctcgatgcccgggatggagctcacctcgtacggctcgggcacgcacggctacctgcctcccgagtgctacgagggcggcaagtcgcgcatctgcccgaaggtggacgtcttctcggcgggcgtcgtgtggtacgtgctgctcttctacccgaacaagcccttcttcgcgcaggcgtcgcagcagcagatcatgggcatggcggcgcacgcgatcctcgaggagacgaaccggctcgacttcccgggcaaggtgtcggaggagctcaaggccgtgctgcgccgctgcctcgccccgcgccgcgacgatcggcccgacgtgcagagcctcttggatgacgtctacttcacgcgcgccgccaagtga

SEQ ID NO: 247523 - DNA, 295 bp, Unknown
  Bacterial polypeptide expressing nucleotide sequence isolated from the Sargasso Sea
actggtggaaagtcctaattacctaactacagctttcagctgtttattttttatgatgcttgttgcatctatatcgtatcataaagccaaggatgatgtaaccactattgatggttactttttagcaagccgtggattaagtggcattttcatagctggatctatgcttttaacaaatttatcctctgaacagttaattggtcttaatggttctgcatacggatttaatcttagcagtatggcctgggaagttactgcggcggcttctacaatatgtatggcatttgttttttta

SEQ ID NO: 247524 - DNA, 433 bp, Unknown
  Bacterial polypeptide expressing nucleotide sequence isolated from the Sargasso Sea
tatgagagaatccatacaacgctttggtggtgccgctgcaggaatggttattcctaacattggcgctttcattgcttggggtttaataacagctctatttatacctacaggatgggctccaaatgagaacctatctgaaatggtaggaccaatgatcgtttatctacttccaatattaattggatataccggtggaaaaatggttcatggtcatagaggtggtgtgattggtgctgtagttacaactgcaattgcagttggtgcatctgacccacaattctttggtgctatggtctttggaccacttagtgcttggacagctaagaaagttgatgcagttcttcaacccgcctcaccggagggttttgaaatgttaattgataacttttcattaggtatccttgcaacagttcttgcaattgttgcaaaacaa

SEQ ID NO: 247525 - DNA, 790 bp, Unknown
  Bacterial polypeptide expressing nucleotide sequence isolated from the Sargasso Sea
gagaaagtgatgaataatttaaaaatccttggcatatcttgtgttgctttttttgtaactgttttctctgcttacagtgaaacacgggtaacctacaagtccgcaaaaaccacgtcatcgtactaccagatggccgtacaaatttcagaggcactaaaaaaaggctctaacggtcaaattattgtcacggttgaagaaagccaaggatctgttcagaatgtaaaggaagttgcggtccgctccggaaactatgtttttactacgcctcctgtgttaattaagcttgcccaaaaaggcttagctatgtttaaggataaagagaacccaaaatatggcaatatccgagcgttgtttcccattccctctttaacaatgcattttgtagcccgaagagatagcggtatcagatctttttccgatctgcaggggaaaaagatattaatcggcaaagggtcatttggtgccaaagaaggcgctaaatatttaaaactttttggtttagaaaataaggttacgctagcaaacgtcgaactcaacgcagctgtaagcgccctcaagaataagcaaattgatggcttcgttactgcaggttcctggccagctcccaatgtcattgaagcaagtgccagtactgaaatagctctcttatctctcagcgatgatcagctaaagttaacaaaaagaactaaattaattattcctgcaaacacttatagaggggtaacctcgcctacgattacaacgtccttgcccgtgatagctcatacaacaactgatagaatgcagacac

SEQ ID NO: 247526 - DNA, 406 bp, Unknown
  Bacterial polypeptide expressing nucleotide sequence isolated from the Sargasso Sea
aaggcgtacgaggactacgctcgcacgctgcacgctcagttccctcgcctcaagttttccggcgagaccttctacccgggcgacttcaaaatgggcctggcgcagctgctgcaattggccttcttcggcggcctcgccatgtgcctcctcggtcgctcggtgctgcccgagccgtacgccaagttcatcgagacctaccagatgtacctcttcggcggctgcttcctctgcaacatcatcgccggcaacctgctcaacaccggcgccttcgagatttcgtacgacggcgagctcatctggtccaagatcgagatgggccgcttcccgcagctccccgagctcaaggaggcgctcgtcgaggtcatgggacgcggcgcgatcccggcggtcacggcggatcagtgag

SEQ ID NO: 247527 - DNA, 767 bp, Unknown
  Bacterial polypeptide expressing nucleotide sequence isolated from the Sargasso Sea
attgataaaatcacatctccttgaagctggcacaattattaacagcaaatataaaatagatgtgtttattggtgagggtgcttttggcgaagtttatcgtgtaaagcacgtggtcctagatgagactcaggtaatgaaggttttaaagaataaatctactcaaaataatcttgatgaaattatcgaagaggcaagaatattaataaaattgacccacccaaatattgtgagagtttttgatgtggactcattcaaaaaagaagataaggaatactattttattacgatggagtttgtcagcggtgagtcattgaatcaattattaaaaaggaaaatttcattagacccccctgttgcggtctcattaatagttgatatattaaaagggttggacaaggtacatcaaagtagaattattcatcgcgatattaatcctgacaatatatttttatcttatgataacgtaatgagacctactgcaaagcttggtgactttggtatagctagagttcaggatgaaaacaccaatctttctggtgcagcgggaagatttattttttttgctaaagaatgtttcatgaatgtttatttaccatctagtgatgttttttctgccgggattgttttatacaaaatgataactggaaaacatccatgggattatgagtttgaaaaatatgatttaacgaaacaagaaaacattcagagtatggtttttaaagcaagagtaaaaacttttttaccagcttcattttttaataattata

SEQ ID NO: 247528 - DNA, 685 bp, Unknown
  Bacterial polypeptide expressing nucleotide sequence isolated from the Sargasso Sea
atgagtaataaaaaaatcggaattttaacaagtggaggtgactgtggaggtttaaatgcagctataagatctattttttatagagctaagaacaaatataatatggatgtttatggaataagagatggtactgctggattaataaaaagaccagtcgatgcaattcaattatctcatcatacgtttggaggttatttgttaagacaaggaggaactttcttaggctctactaataaaggcaacccttttaaaattcctactaatgatggaaagcatgttgatatgtctaaagagataattgaaggctatcattcaatgaagcttgatggattaataattattggcggtgacggaagtatgcaaatactaaaaaaattggcaaaggatggtgatatgaaaatagtagcaatcccaaaaacaattgataatgatgttggagctacagaaagctctattggttttcatactgctgtagatgtagcaacccaagctttagataatcttcaatcaaccgcggctagtcatagaaggtcaatgatacttgaagtaatgggtcgagacgcaggtcatatagcattgaacgcaggtatagcaggaggcgctgatgtaattttaattccagaaattaagtactcaattaatgggataataaaaaaacttaattcaatgaagcaacatgatatcc

SEQ ID NO: 247529 - DNA, 746 bp, Unknown
  Bacterial polypeptide expressing nucleotide sequence isolated from the Sargasso Sea
gatgagcccgttcgtatgctctacattcaaggacatgcagcgggagcgcgaataccttgtcagccacgtcacctccacggtcgcccatgaatttaataagcgccgagtccgataccatgcacgcgatttccgatggggcatcacggaagaagaggtgaacagcggccaggtcataagccagtgcctggggaacgtcgatttaacgtatccgtacttcatctgcatcctcggtcaccgctacggctggtgctacgacgatgacggcacacccgacccgctactcgataagcaattcgaggttgcatctgcgctgtacccgtggctgcaggaggatcgataccgtaatatgtcgatcacagagctggagatcgagaacaggctcttccaccaagattggcggcagaatgacctagtggaggtgatgggcagggtgcgtgctgatgcgcagaagggggttgggtcatcgaagagtcagcttaacacccgcggcttcctctgttattgccgcgagcagtcggagcctgaattcaccgacacgggtgccagtgccgtgaagctgaagaagcttaaagcgaggctgcatgcgcacgggattgcggtcaagccctacaaagacgaggtcgagttcggcgcactggtgaagcaagacttgctgcaactactcgatcaggacttccctgagcgggcgtcgtcgaatgatcgcataacatgggcggatcactacgcacagcagacgagcagaaatt

SEQ ID NO: 247530 - DNA, 646 bp, Unknown
  Bacterial polypeptide expressing nucleotide sequence isolated from the Sargasso Sea
atgaaacaattcatacaacgcgttggtggtgctgcgtcaggaatggttattcctaacattggtgccttcatcgcttggggattaattacatccctgtacattggaactggctgggcaccaaatgaagatttggtatctctagttgatccaatgattttataccttctcccattattaatcggttataccggtggaaaaatgatatatggccacagaggtggagttatcggtgcagttgtaactacagcagctgttgtcggtacaagcagtccacaattcttgggtgctatgttagttggtcctggagcagcaaaagttcttaaagaacttgatgcaagactccgtgataatgtaccggaaggttttgagatgttatatgacaacttctcatcaggtatccttggttggggacttgcaatatttgtttattcatttcttgcaaacattctccaagcaattgcagacggcttaggaaactttgcttctggtatcgttgatgctggtctagttcctttagctgacatacctattgaagttgcaaaagtgttgttcttaaataacgcggtgaaccatggtgtgttgacacctcttggagctgcacaagctgcagaagaaggaaagtcaatatattacatgcttgaatcaa

SEQ ID NO: 247531 - DNA, 902 bp, Unknown
  Bacterial polypeptide expressing nucleotide sequence isolated from the Sargasso Sea
gagcacgaaaacgtgggggcgtacaatttcgatcacccggatgcgatcgatacgaaatatctcgtcgaggtgctgcagaaattgatgctgcgacaatcggtggaggtgccggtgtacgacttcgtcacgcactcgagaagcagcgaaaccattcacatcgacagcggcgacgtcatcatcatcgaggggattttggtgttagccatggaagaagtccgcgcgatgtgtcacatgaaggttttcgtggacacggacgatgatttaagattagcgagacgcttgaaacgcgacaccgtggatcgcggtagaagcgtcgacggcgtgatcacgcagtacaccaccttcgtgaaaccgatgtttgacacctttgtgtcgccgagcaaaaagtacgccgacatcatcattccttgggcgcagggacaaaacacggtcgcgatcgatctcatcgtccaacacatccggaccaagctcggacaaaacgatttacgacgaatttatcgcaacttggtcgtcttgccgccgcagtttcaaatcagaggcatgcacaccatcattcgcgaccgcgaggtgaatcgaagcgattttgtcttttacagcgatcgcatcattcgtctcgtcgtcgagcacggtctcggtcacttgcccttcaacgagaaagtggtgctgacgccgaccaacgaccaatacaagggcgtgacgttttgcagcaaactgtgcggcgtctcaatcattcgatcgggtgaagcgatggagaacgccctgcgcgcgtgctgcaagggaatcaagatcggcaaactgctcatcgagcgtcgagacaaggatggcatgctcctgcgcgcgggaagcgcgaattccgatctctcggcgtcctcaatcaaggagacgaggtcgagaattcatta

SEQ ID NO: 247532 - DNA, 760 bp, Unknown
  Bacterial polypeptide expressing nucleotide sequence isolated from the Sargasso Sea
gataaaccaatgatttattacccaatatccactttaatgctcgcaggtataagagacattaacatagttttaagtcctgattatgcaggggattttgtcagattattgggtagtgggaatcaatggggaataaattttacatttaccgaacaagctcacccaaatggattggtagaaggaataacgctatctgagaaatttcttaatggatctccgttggctttaattcttggggataacttgttccacggaagtagtttgatgcgtcatctcttgtcaggaaattctcaagaagatggagcaacaatttttgcatatcgtgtaaaagatcctgagagatatggtgttctggaattttctaaagatgggaaagtattaagtattgaagaaaagccaaaatttcctaaaagtaattacgttgcaaccgggttatatttttatgatcaaaccgtagttgaaaaagcaaaaagggttgcagtttcttctagtggagaactagaaattacttcacttaatgatatttatctgaaaagcaaaaatcttaatgttgaagtaatgggaagggggatggcatggctcgatactggtacgcacgaatcactccataaagcatcatcttttataaggagtcttgaggacaggcagggtttaagagtctcttgccctgaagagattgcttggagaaaaaaatggataaatgattttgatctaattaaattggccaaacccttattgaaaagtggatacggcagatatctta

SEQ ID NO: 247533 - DNA, 690 bp, Unknown
  Bacterial polypeptide expressing nucleotide sequence isolated from the Sargasso Sea
tggctattccaaaaactatagataacgatgtaggagcaacagagagttcaattggttttcatacagccgtagacattgctacacaggctctagataatcttcaatcgactgctgcaagtcacagaagatctatgattttagaggtaatgggaagagacgctggtcacattgccttaaacgcaggcatagctgggggagctgatattattttaataccagagataaaatattctattaacggaattataaataaactcaattcaatgaaaaaacacgacatacaacattctttaattattgtagctgaggctgtgaaaaaagaagatggaagcagagttttacataaatacatggatggagaaaaaagattaggtggaattggtgattatatcgctcaggaattaatgaaaaaaactgatgtggaatgcagggtaacctcccttggacacgttcaacgtggcgctcccccaactgcaagtgatagaattttagcaagtgcttttggtgtttatgctgtagatttgttaaatcaagaaaaattcgaccgcatggttgcttggaaagatagaaaggttgtggatgtgcctattgatgagggtattagaacatataaaaatgttgaaagaaaagactctttagtagagactgcattatctttggatatttatataggagatgacataagataaa

SEQ ID NO: 247534 - DNA, 898 bp, Unknown
  Bacterial polypeptide expressing nucleotide sequence isolated from the Sargasso Sea
atatttgaaattaaagatatttttaataaatataaatattttgataatgatgaaataaaagaaaaatttaaaaatagattaaataataaaaatattgaaaatattttaaaaatagattttaaaaaagaaattagttatattttttcaaataaagggcgtatacttacaaatttttattatatacaaaaaaatttcaatgacttaaaaccttatttagattattattcctatgttgattgttggtcaagtgtttcatttttatataaaaaaaataatctttctttacctcaatatctaattaataataaaccatatattaatctagaacaatttaataatataggtattcagaattctgttaaaaatgatattattttaaaagataaaaatctaattataactggaccaaatgctagtggaaaatctacttttctaaaatctattattttaaatattatactagcacaaactatatctttatcttctagtaaaaagtttattataactccttttacacatataaatacttatcttaacatacctgattgtcaaggtaaagaatctttatttcaagctgaaatgaacagatgttataatcaaattgaattattgaaaaaaacaaagaaaaatgaatttgtttttacaattatggatgaaatatttgtaagcactaattatcaagaaggagtatcaggtgcgtatgctattagcaaaaaaatgtcacaatttaataattcattatgtatcgtatcaactcatttcccaattctatgtaaagtatttgataatacaaataaatttaaaaattattattttagtattgaagaaaataataaaaaaacatataaaataaaagaaggttattcaaaacaacatattgcattagaattactaaatc

SEQ ID NO: 247535 - DNA, 784 bp, Unknown
  Bacterial polypeptide expressing nucleotide sequence isolated from the Sargasso Sea
atgccctctacacatgattatccaaatgataaaaggaatgaaaatatccagatttatttgaatggtaaattttatcatagatcgaaagcaaatgtatctgtattggatagtggttttctagttggcgatggtgtttgggaagggattagattatataagaaaactcttattcaccttgaggatcatttgaatcgtctttatcaaggtgcggaaagtattgatatgaaaattcccttatcaaaggaatcattaaaaatagaaattttaaagacaattcaaaaaaatagtatggacacagacgttcatatacgcctaattgtttctaggggaataaaaaaaacaccttatcaaaaccccaaagtgactaccggtcctgcaaccattgttattattccagaatataaaaaagccagagagatcgtgaaaaagaatggtattactgttggcacagttaaaacagtcagagatgataaggttcaagacccaaaaattaattcattaagtaagcataattgtattgctgcatgtattgaagcaaataagcttggagtggatgaaggtttaatgttagatccaaaaggttttgtgtcgacgtgtaattcaacgattttttttattattaggaatgatgaagtttggacttcaaacggtcaatactgtttaaacggtgttacgaggaaatctgtgatcagattgtgtaaacattataaaatacctgtatttgaaaaaaaatttaccttaggagaagtttataaatcagaagaagtatttgttacgggaacct

SEQ ID NO: 247536 - DNA, 843 bp, Unknown
  Bacterial polypeptide expressing nucleotide sequence isolated from the Sargasso Sea
agcagcaaatttaaatcatccaaatattgtacaaatttttgactggggtattgaagaagagccctactttgtaatggaatacattgagggaaatactttgacttcaattatttcaaatagaaaaactataagtttaagtgatgttttatttataggtgcacaagttgcaaatggactccaggcagcccactcacaaggtcttgttcacagagatataaaaccaggcaatataatgattaccccaagcggtaaagtaaaggtgactgatttcggtatagtttccattcaagatgaagaaagtgacattactaaaactggttcaatattaggaacagcaagttatatatcgcctgaacaagcgcaaggaaaagctgtatctgttggttcagatctttattccttaggtactgttctttatgagttaattacaggaaatcctccttttgaagctgatactcctatagctacagcaacaaaacatttaacagaaaagccagaaaagccatctaaatatagacaagacctgccaaaaggaattgaaaatgccatattgaaactacttcataaaacaccaagagatagatttaaaagcgcagaagatttaagagctgttttgctgcagcaaagaaaccaattagaaatggtacaaacccaagaaagtttggttgatcttacgaatcctaaaattaaatataaatttactcttcctgctttagttgtttcaataggattggtgctaggaactttttggactctatctcaaatatttgatggacttcccgtagatggtggtgctcctaccttaatagaaataccagacctaactggcagtgatcaagcaga

SEQ ID NO: 247537 - DNA, 768 bp, Unknown
  Bacterial polypeptide expressing nucleotide sequence isolated from the Sargasso Sea
aatggcagcgcagctatctgaatacttaaaggataatgggtacaatttaactgtggttggattgccaaaaacagttgataatgatgtgtatccaatatctcaaaccttaggtgcatggacagcagcagagcaaggggctattttttttgaaaacattatcaatgagaatacaacaagtacgaggcaattgattatccatgaggtaatgggaaggaattgcggatggctcactgcacaaacggctttcgaatatagaaatagaatgaaaaagagggagttcattcctgaactgcttattgatcaaagtagatgggatatagatgctgtttacatccccgagtcagattttgattttcagttcgaagtaagtcgtttgagagaaataatggatgcaaaagatggagtaaatatatttttaagtgagggtgctggattggaaacaatagtacgtgaaatggaagaaaggggagaagaaattcccaaagatgcttttggacatgttcgattagatgatattaatcctgggcagtggtttgcaaagcaattctcaggtgcattagaggcagaaaaaacattggttcaaaaaagtggatattttgctcgttcagcaaagcccaataatagggatcttaaactaatacaaaaatctgcagaattatctgtagaattcgccacagctcaaaaaaatggtgtagttggcaaagatatcgataataataatgagattggattaattgaatttgctaggattaaagggggcaaaccttt

SEQ ID NO: 247538 - DNA, 898 bp, Unknown
  Bacterial polypeptide expressing nucleotide sequence isolated from the Sargasso Sea
ggaagccccaacctgccggcggatgactttgtctttctgcgccgaatctatctggatgccgtcggtcgcattccaacggacgatgaagcaggggcttttctcaagaacaaggatccggaaaagcgccgtaaactgatcgataggcttcttctttcggacggataccggtcccacctgtttaattggctggccgatctgctccgtcacaagcagtcgatcaagaggaccaattacagccattacgagagatggctgaaggatcagattgccaagaatcgtccctgggacgagatggtgtacgatatgctctcggcggaggggagtattgccagttcgggtcccacgggttacctgctgcgggatcccgggatgcctctggacaacctgtccaataccctgaacgtctttctcggggccaacgtggcctgcgctcagtgtcatgatcatcctttggcggactggacgcagcgtgaattctacgagttggccgcttttttcggagccacggacgtcagcgaccgggaccctcgaaaggttggcaatcgtcttgggagcggccagctttccaagcaggacgtgatcaaggcggtcgctcccaatatggcccgcgtacataccaagggtgctcagacccttaagtttccctccgattacgcctacgacgacgtcaagccggggagtcccgttgaacccctgcttttcgtctgggaatccggtgacgagaagggacccgcctatcaggtcaaccacaagaacccgagaacccttcgctccagttttgccaaatggcttacccacgagaagaacccgcgctttgccgccacgatcgcaaaccgtctttgggctcgagcctttggcttgggcgtcaaggaacctcttgatgatcttgacgacttgt

SEQ ID NO: 247539 - DNA, 916 bp, Unknown
  Bacterial polypeptide expressing nucleotide sequence isolated from the Sargasso Sea
gtcagcagcgccagcttctggatcctggtggtggccgccatctcggccgccgccgccctcatcatcggctataccacggcgcgcagcattcagcgtccgctgcagatgatcaacaaggagctagattacatggcggccggggacatgacccgccgcatcaactatcgcagcagctgcgagtttggcgcactctcccgctccatcgataccctggccggtaaaaccggcgagctgctctcccagatcaatgccggctcccgccatctagtggaggaggcgagccgtgccgccgagataagcgaaagggccgtgtctcgggtacaggaccagaagagccaaaccgatcaggtggctgccgccatcaccgagctggaggtgagtgccaccgaggtggctcgttccaccgatggcaccaaacgggaagtggatctggccgatgatgaagcccgcagcggtcgccagaaggtggcgaccacccgtcgcatcacggagcagctggcaggtgccatggaggaggccgttggcatcacctacaagctgggcgagttcagcaacaacatcggcagcatcctcgatgtgatccgcagcatcgccgagcagaccaacctgctggcgctgaacgccgccatcgaggcggcacgggccggcgatgccggccgtggcttcgccgtggtggcagacgaggtgcgggcattggccaaccggacccagacctcgaccgaagagatccaggcgatgatcgagaacctgcagagctcgagcaagctggtggtggaggtgatggggcgcagtcaggagcagacccacaactgtgtcgagcagacccgggagatggatgcagccctgcaatccatcgccgaccggatgagcgccatcaaggcgatggcggatcaggtggcgcacgccgcccaggagc

SEQ ID NO: 247540 - DNA, 853 bp, Unknown
  Bacterial polypeptide expressing nucleotide sequence isolated from the Sargasso Sea
gctgaatataatttatattacagcactttgtatcttaacttttcctttactttattctgctaagtcagtggcggctgaatcagacatcacagatgaagttgttgtaacggctcgaaaaagagaagaaagtcttttagatattccagaatcagttcaagctataggcagtggcgatatagatagacagaacatcaaaagtttagaagacgtaggttttttaatacctaatcttaacttatctccaagggcagatggatttccaaatgtctcgattagaggattgggatcttttggtaatactcaaggggtaggcttttatttagatgatgttcaggttttttctgatgcttcttctaggtttggtgatctcgaaagaatagaagtcctaaaaggaccacaaggaactttatatgggggcagcaatataggtggggcaattaaatttgtaagtacaaggcctgatccatcttcttcaactaaaagagctaaaattctagtaggagagcaaggtattgtagatggagagattagtattaatactcctcttgaaggggattgggctctaaggctatttgcatttggggctagaaatgatggttacttagtaaatccaaatagtgcaagagtgaacggtttgtctgcagatactgacgaagatataggtcaatcagatgaatctggattgagaatatcgctagctggaaatctaaatgatactttatcagcctatgcatcatttagatggaacgattacgaaggtccaaacaatcattggattagagaattagacaaaaactctcttaaacattctaatattgtagatacaacgacaaaccctaggcatgagagagat

SEQ ID NO: 247541 - DNA, 891 bp, Unknown
  Bacterial polypeptide expressing nucleotide sequence isolated from the Sargasso Sea
caatactggtggtggaggcggtggtggagctgcaggtaatgctactcaccctcaatcattaagtaaagcaggtggttcaggtatagtagtaatcaaagaaacaacccctaaatgtgcttcaggtaggtggggtgtaaacgatatttacgataatgtatcaaatgatacatggtttaaaaggaaaccaacagtagattacttagtagtcgctggtggtggcggtggtggaatggatcttggtggtggaggtggtgctggaggttatcgtgcctctggtttcggtcctagtccattacaaggaccagcagtaactttaaaattagggtcttatgcagtcacagttggtgctggtggggcaggatcaactagtggtccatcagcaggaacacctggaggttcttcatctttctctacaataacatctgctggtggtggaggtggtggttcaagacccgctaacactggacaagctggaggttctggtggtggtggaggagccgactgtggtacagctggtgctggaaacactccccctacaagtccatcacaaggtaattctggtggaactaatgctggtggtggaggtggtgctggtggaactggctctaatcaaccaacgggaagtcatcctagatcaggtggacacggaggtaatggtgttccaaataatattttaagtcttgcatgtgccacgacatatgctggtggtggtggcgcaggatcctcagcatgtagtgattacggcgcaagcacacctaatgcaccaggtggtggaggtttaggtgcaggaccaaatccgacagtaggaggtgctggtacagcaaatactggtggtggaggtggaggtggaagtaatgctcctccaaaaccaagttgtggtgctggtggtgc

SEQ ID NO: 247542 - DNA, 710 bp, Unknown
  Bacterial polypeptide expressing nucleotide sequence isolated from the Sargasso Sea
aaaagaaggagatatgaaaatagtagcaatccccaaaacaattgataacgatgtgggagccactgaaagctccataggttttcatactgcagttgatgtagcaactcaagctttagacaatctccaatctacagcagcaagccatagaagatctatgatacttgaagtaatgggtagagatgcaggtcatattgctctcaatgcaggtatagcaggaggtgcagacgttattttgatacctgaaataaaatattcaatagatggaataattaaaaaattaaattcaatgaaaaaacatgacatacaacactctttaattgttgtggcagaagcagtaaaaaaagaggatggtagcactgtattacacaaatacatggatggtgaacaaagacttggaggtataggagattatattgctcaagagttaatgaaaaaaactgatgtagaatgtagagtaacctctttagggcacgttcagagaggagcaccgccaactgctagtgatagaattttagcaagtgctttcggtgtttacgcagttgatttattgaatcaaaaaaaatttgatagaatggttgcttggagagatagaaaagtggtagatgtgccgatcgatgaaggaattagtacttataaaaatgttgaaagaaaagactctttagtagaaactgcgttgtctttaaatatttatattggagatgaaatttagt

SEQ ID NO: 247543 - DNA, 538 bp, Unknown
  Bacterial polypeptide expressing nucleotide sequence isolated from the Sargasso Sea
atgcgcgttgccgctcgccgcgccgtcgtcggtgcagccctcctcgccgggacgagcgccctcagcactcaatcacagcgacggcggcttgaggacgaatataagctaatggaggaattaggcgccggagcgttcggcattgtgtacaaggcgcgatgcaaatcgactggtgccattgtggccgtcaagcaaatccagcggcggcgtgctgtggaggcgacggtacggcgtgaagtggccatgctgcagcgcgtaggccttcaccgcggcgtggctgccattctcgaccactttgagaccgatgatgccttctacctggtcatggagtacattggcggcggcgaactgttcgacgctctcgtcgacgcgggctccttctccgaagcgcgggcagcagaataccttcgccaagtcgccgatgcggttgcctttctccacgcacagggcctgtgccatgccgacatcaagccagaaaaccttctccttacctgccgcgaggccgacgccgcgagcgtgaaactcgttgacttggcctcac

SEQ ID NO: 247544 - DNA, 784 bp, Unknown
  Bacterial polypeptide expressing nucleotide sequence isolated from the Sargasso Sea
atgagtaataaaaaaattggaatactaaccagcggtggggattgtggtggcttaaacgctgcaatcagatctattttttatagagcaaaaaacaaatataatatggatgttttcggaattaaggacggaacagctggtttaatgcaaaggcctgtagcagcagttcaattaactcacaaaacctttgaaggatatttattaagacaaggcgggacttttttaggatctactaataaaggaaacccgtttaaatttccgacaaaagacggaaaattcatcgatacatcaaaagaaataatcgaaggttaccatcagatgaagcttgatggccttatcatcattggtggagatgggagcatgcaaatcttaaaagaacttgcaaaagagggcgatatgaaaattgtagcaatacctaagacaattgataatgatgtaggagctacagaaagttcaattggatttcataccgctgtagatgtagcaactcaagctttagataatcttcaatcaacagcagcaagtcaccgaagagcaatgattttagaggtaatgggacgtgatgcaggccatatagcattaaatgcaggtatagctggtggtgctgatataattttaattccagagattaaatattcaattgacgggataataaaaaaattaaatgaaatgaaaaaacatgacatacaacactctcttattgtagtagcagaagctgttaaaaaagaagatggatcaacagtaatgcataaatatatggacggtgaaaaaagattaggtgaatagg

SEQ ID NO: 247545 - DNA, 516 bp, Unknown
  Bacterial polypeptide expressing nucleotide sequence isolated from the Sargasso Sea
tctggataaaaaaaaaaaatttgtcgtatttgatataggatgttttcagggaaatttttctagaaatcttaagaacaagttattcagcaaaaaaattcaattttatttatttgatccaaatccaaatatcaaattaagagattttaaacattataaaattgcattttctaacattgaaaatatacaaaactattatttaaataatttttttccatcatctggatcgtcattaaaaacgatagttaaaaatgataagttttggaatttaacaagaaaatttttaagttttaatatgggtaaaaaattcaaaacttttgtagtcaaaactcaaaaattagataatttttgtaaatcaaacaaaattagtcaaatagatgttttaaaaattgatgtagagggatcagaaatggaagttcttatgggtgcaaaaaatattcttaaaaaaactaaaattatacaagtagaaatattaggaaataaaataactttaatacaaagtataagaaacttatttct

SEQ ID NO: 247546 - DNA, 565 bp, Unknown
  Bacterial polypeptide expressing nucleotide sequence isolated from the Sargasso Sea
gttggctgtttatgaacctgtgcttaaaaaaacatacgatgaccataacaagcgcgagcaagacttgaattcattaattgcgttatcggaacggtttcggtcgttagctgctatgttggatgagttcacattggagccgccagaatcatcgcaagtgggggcggatgcggtgccggatgatgatgagtatgtggtgttatcgaccattcattcagccaagggcttggaatggtcgcgggtatttgtgttgtcggtggtggatggctatattccatcgtttcgttcgttgcaggacccggcccaaattgaggaagagcgtcgcttgttgtatgtggccatgacaagggccaaagatgaactgtacttaattaaacccaatttggatgacccaagtgcctattatccggtgggtggcatgagctttagccaagtaagccgttttataacgccagaccatattgaggcgtattttgatgtgtggtcattgggggtggggcagaccatgcccagtgatgacgcatcggacccgtatttggagccacccacgcaaccttattcactataa

SEQ ID NO: 247547 - DNA, 739 bp, Unknown
  Bacterial polypeptide expressing nucleotide sequence isolated from the Sargasso Sea
atggcgacatccgtcgattcattccaggtgaaggtgtatcagggcgacagcgcggtgctgttcgcctttgatgtggccgatgccgatcgcgccgatctggccggttttgccattcaatgcacgccgcagggcggggcgccatattggatgcccaaccggctgactttcgacacgcccatccatgcagacgcgccgctgaaggccggcaagtacgccgattccatcgacgcgccgttccagtcgtttcactgggtccactttccgccgcatgctgccgcgcaactggcttacaccgtgcacgcgcgctacttcgtgtcgacgaaccccgtgcagctggagacgcgcgcgacgcgcatcgtcacggtcacgctgcagcagccgatgagcgattgggtcaccgtcggcatggtgcgcgggtatgtgtcgtcgcaggcgttcatcgaccactacggcggcaacacggcgctggcgcccgacaaacgcgcgcagaccaaatcgccgctgctgtacgacacgcagccgtatcagaacaagtatgcctacctgggggcgacgggtcgccatctcatcatcgatctgctgaaccagtgccacgcgtccgacggatacggcatcgacgtgctcgcgtacgacctggacgaaccggacatcatccgtgccattgcttggctcgcgcagaacggtcgcaaggtccgcgtgattcaggacaactatgtggcaccggcgccaacccggtggg

SEQ ID NO: 247548 - DNA, 658 bp, Unknown
  Bacterial polypeptide expressing nucleotide sequence isolated from the Sargasso Sea
atgaaagaattgacgactcgacagatagaaatattggattttatcaccaactatgaatggagacatggcttttggccgagtattcgtaatattcaaatggagtttgactataaaagcaccaatgcagtgatgggtcacctgcgggctcttgaaagaaaaggagcgattgagcgaatccccggacaagctcgaacctttagaatcaaccgccctgacagcccacaggccaactttgaatctgagattcccgacaatgcaagtgaagttgtcgagatccctgtgtacggagcaattgctgcgggttatcccgatcgcgttgagtcttcaggtgctgtcggcagattacaggtagacattcaaaacgcaggctttaccaatgccagtcgaaagcagtcctttgccttggaagtgagaggcgacagcatggtcgatgctcaaatttatgatggagatcgcgtgatcattgagcctagagaagcaagagatggcgatatagtggctgctttgattgatggtgaagtgaccttgaaacgattaattcaaaaagcgggtgaacccccctatttgaaagcagaaaataaaaactatcctgagttgcacccttcagatcaattagagattcaaggtgtggccaaggcagtcgttagagcactttaag

SEQ ID NO: 247549 - DNA, 331 bp, Unknown
  Bacterial polypeptide expressing nucleotide sequence isolated from the Sargasso Sea
ttggccgatttcgggcttgccaccacgtgcgaatcgtcgaaaccgattaccgagaagtgcgggacgcctgcattcatgtctcccgagcagcataggttgccccaccgcagccctggatacagttttcccgccgacgtgtgggctgcaggctgcacgatgtatatgattctcttcgatcgacatccctttctcgtgggtggcaaacagttggacgagcgcgcgttgctggacggtcgcctccctggtgccgcccaaggctttttcggcatgatggtggacagcggcagcacaggccgctgttcggagatgtcgatctggcaagctgggaaaa

SEQ ID NO: 247550 - DNA, 718 bp, Unknown
  Bacterial polypeptide expressing nucleotide sequence isolated from the Sargasso Sea
gtgccgctgaagcggctgggcaacggcgacgtgggcagcgtccacctggtccagctcgcggggaccaatcggctgttcgcgatgaagatactggtcaagcaggagatgcacgaaaggaacaagctgcacagggtccggacggagggtcagattttggagacggtggatcaccccttcgtcgcgacgctgtacgccgcgtttcagactgacacgcacctgtatttcgtgctcgagtactgcgaaggcggcgagctgtacgagacgctgcagaaggaaccggagaagcgatttccggagacgatcgcgaagttctacgccgcggaggttctcgtcgcgctgcagtacctccacctcatgggattcatctaccgcgacctcaagcccgagaacatcctccttcgcagggacgggcacatcatcgtgaccgactttgacctcagctattgcgcttcgtccagagcgcacgtcatcatgaaggaggggcgagcgcccggcgcgagggcgaggaaccgcagggtttcgcagcggcggtcgttcgcgggaggcgggcgtccctccgtcgccatcgacggaggaagcgggaagccgcccggcgaaaacgcgtcaggtcggtcgccccgacaatcgcagatgtccatcgacgccacacacaacggcggcgtcgccatccccggcgcgtcgccaaaatccgccgggcccgggctcgacatgatcgcgt

SEQ ID NO: 247551 - DNA, 253 bp, Unknown
  Bacterial polypeptide expressing nucleotide sequence isolated from the Sargasso Sea
ctgcacaagctctcccccgtcgtgatccaccgcgacatgaaagccgcgaatgtcctcctcgatgagaggtggcaggccaagctcacagatttcggcatctcgcgcatgaagatgggagcccagcaagcgctcacctccttctcaggcactgtcgcgtggatggcaccaggtaagcgatcgatcgaactagccatagctatagctatcgataccaagccagctagctcagacggtggagctcgctcgctctgac

SEQ ID NO: 247552 - DNA, 265 bp, Unknown
  Bacterial polypeptide expressing nucleotide sequence isolated from the Sargasso Sea
tgaacttcttaatctgatggacattaaaattttcgtagacacagatgatgatattcgacttctacgtcgtctaaaacgtgatatccacaagagagggagatcagtagaaagtgtattcgagcaatatgaaaactttgttcgccccatgcatttaaagtttgttgagcctagcaaacggtatgcggatattatcattccgaaaggtgggaaaaatctagtggctcgtgatatggttatttcctatatcgaacgaagtttaaattaa

SEQ ID NO: 247553 - DNA, 562 bp, Unknown
  Bacterial polypeptide expressing nucleotide sequence isolated from the Sargasso Sea
attggtcgttaggttagtgcaaaaattaaatcaatcttatattagatcagtagtaaaaaaagccttggaggaggaccttaaacctagtggcgatatcaccacaaaactaataaaatttaaaaataaaaaaactaaagctcaaatcgtagcaaaacaaaatggtgtgatttctggtttagatttttgtaaaactgcttttaaggtcgtaggtaaagaaacagtttttgtaagcaaagttaaagatggctcaaaagttaaaaagaataaagttattgcagaaataaaagcaaaaactaaaacaatattaattgctgaaagaactgcattaaatttcttaaatcacgcatcaggtatatccactctaactaacttatttgttcaaaaagttaaaaataaaactaagatttgttgcacaagaaaaactactcctaatttgagactattagaaaaatatgcagtcaaaataggcggaggtcacaaccatagatacaatttaagtgatgaaattttaatcaaagataaccatataagcgctgaggaaagtttaaaaaccttggttaaa

SEQ ID NO: 247554 - DNA, 574 bp, Unknown
  Bacterial polypeptide expressing nucleotide sequence isolated from the Sargasso Sea
ttacctaatacggctggctgttttacaaaaaaagaggctctgttaacagcagaacttgcaagagaatcactgaaaactgattggataaaattggagttgataagtgagaatgagatgcttttacctgatccactcgagttgtttgctacttgtgaggaattggtgaaaaaaaaatttaaaatatttgcttattgctctgatgacccaattttgtgtaagagattagaagaattaggttgtacggctgttatgccattaatttctcccattgggtctggtcttggaattagaaatgagcataatcttgagattataagaagtatatgcaaaggagtaattattgtagatgcaggtattggtactccaagccatgcttgtaaggtcatggaattgggttttgatggagttttattaaattcatcagttgcaagatcttttgaccctattcaaatggctagtgcaatgaacctagcaacaaaaagcggtagattaagttttcaatcaggaccaattgaaaaaacaaaaaaagcagtcagaagtacaccatttagaggaaagatttcaaatttttaat

SEQ ID NO: 247555 - DNA, 772 bp, Unknown
  Bacterial polypeptide expressing nucleotide sequence isolated from the Sargasso Sea
aatgcaacaagcttctgaaacgggaaaatcgattttcttcatggtggcatctaacccagggccggggttaggcctgttactcggctttgccattttcggtaaagggatgagtaaaaaatccgcgccaggtgccatgattatccacttcctcggtggtattcatgagctgtatttcccgtatgtgctgatgaagcctttaaccctgattgcgatgattgctgggggaatgaccgggacgtgggtattccacctgctggacggtgggttggttgcaggaccgagcccaggatcaatattcgcctatctggcattaacgccaaaaggatctttcctcgcgaccatcgcaggcgttacagcgggaacaattgttacttttgtgattacatctgtaatcctgaaaatggaaaagagcgtagaaacagaaagtgaggatgactttgctgaatcagccagaaccgtcaaagcgatgaagcaggaaggtaaattctcttataaaaatattaaacgcgtcgcttttgtctgtgatgcgggaatgggttccagtgcgatgggggcaaccacgtttcgtaagcgtctggagaaagcgggattaaatattaacgtcacgcactatgctatcgaaaacgttccacaagatgccgatattattgtcacccatgccagtcttgaaggtcgtgttaaacgagtgagtgaaaagccattagtacttattaagaactatattggtgatccactgttggatgatttatttaaacgcattactgcgaactaa

SEQ ID NO: 247556 - DNA, 850 bp, Unknown
  Bacterial polypeptide expressing nucleotide sequence isolated from the Sargasso Sea
tttgatgggggaattgaaaaagaaccttactttgtaatggaatacatcgaaggaaacactttaacttcaattattgcgaaaaatagaacaattagtctcagtgatattttgtttattggagcacaggtatcaagtggcttgcatgctgcacatcaaaaagggcttgtgcatagagatatcaaaccaggaaatataatgataactccagatggaaaagtaaaagttaccgattttggtattgtatcacttcaaaatgaagaaagtgatattacaaaaaccggatctatacttggaaccgcaagttacatttcacctgaacaagcacaaggaaagccggtttctattgagtctgatctttactccctaggtaccgttctatatgagcttattacagggaaagctccctttagcggagattctccaatttcaacagcaacaaaacacttaactgagaaaccagaaaaaccgtccatgtttagacgggatcttccaaaaggtgtcgaaactgcgattttaaaacttcttgaaaaagctccctatgacaggtttaaatccgctgaggatttaagagcaacactgcttcagcaaagaaaagctctgcagtctgaacagacaagggagaatttagttgaccttactaatccaaaagtgaaattaagatttacactaccggctttaattatgtctattggagtcgtcatcggaacaatatggacattaactcaagtttttgatggccttccaactgatggcggtgcgccaactttaattgaaattccagacttaactggtagtgagcaggcacaagcattagaagaccttcaaaatcttggattcaagataggtatga

SEQ ID NO: 247557 - DNA, 748 bp, Unknown
  Bacterial polypeptide expressing nucleotide sequence isolated from the Sargasso Sea
tccggcgcgttgcactcgccgcgatggatggcgcccgaggtgctcacggatgggcgttacagtaaagcctcggacgtgtactcgttcgccatcgtcatgtgggagatccaaagtctccagacgccgtggaaagaacttgacgtgtaccaaataatcagtttcgtcccggacggtgagcgtccgagcgtcgagtcggcgcacggtgaggagttcgttgacgcgccgggctatcgcgcgttgatgcaactcgcgtggcaccaagacgcgaaaacgcgtccgacgttcgaagagatcgttgaacaagtgcaacagctgttggaatcccagatgtctcgagaacaagcggcgaaaaagcgcgcaaatgcgggcttaccgccgcttccaccggctcgctcctttgaaaagaagtcggcgtcgttcggcgggagagacagtcgcgccatttcgagacgaaaatcttcgagtgctctggaggctcgcgacgtcaagtctctgaagaacgtcaacgtcacgttcagtcgcgataaaacaaaagttccagaggacgacgccgtggtcatcgacacgccggcggcgagtccggagaagagtcagcgcgacgatgacgccgtcggcgacgacgcgctcaaagagacgacaaacatcttagaattagatgctggcgacgcgccggggacgccggtgattttgcgaggcatgcgcgcgcgaaattcgttgaacggatcggttcgtcaaagaattcaatagg

SEQ ID NO: 247558 - DNA, 866 bp, Unknown
  Bacterial polypeptide expressing nucleotide sequence isolated from the Sargasso Sea
tggagcgccggtggtcccgccctcgacgcgagcttctcaccaagagtcggcagcctcgattgaccgccgagcctcggaaccaatcttggtgatgcaggaggcgccggtggttggagcagcgctcgcgcagttatcctacgacgaagtgcggactgcttgtcgaggatgggctgagtctgaaaaactgggagagggtgccgtgggttccgtgtaccgtggcagcctgggcgctttcggcccagtggcagtgaaacgcttcgacaaggttgcttccagctcgggggcaggcgcggggcttccggctatgatccgtgaggtggagatgttgcggaagtgccggcatccacatatcttggagatcttagcgcataccgacacgtcggacgaggaggaaggcgaggtttgcttggttaccccactcatggaggggggcgaccttggtcgggcactcgcgcgggtaccttggtacgcccgcctccagattgcggggcagctcgtccgcgccttgagcttccttcacgcccagggccgggtacaccgggacgtgaagtcctcaaacgtcttgttggacggttcgttgcggcatgctcggctcggggacttcgggctggcaaaggaagaggaccgacgcggtggtgattcttccatcacgcgcactgcctccatctctggtaacaccacacgaatcatggtcgttgggtccccgggcagcatggctccggaattgctccatcggtcagcctcgccagcaactgatgcatatgcccttggggtcctatttttggaaatgctcacaggcttaccaacgtgggaccccctgaaccacccagacagaccggcattggtggaccgcgtcctcgccccgg

SEQ ID NO: 247559 - DNA, 379 bp, Unknown
  Bacterial polypeptide expressing nucleotide sequence isolated from the Sargasso Sea
atgatagatataggggactataaagtcaaggacgttatagggaaaggtagttttggattagtatataaaggtatagacaaaaaaacaaataaactagtagcaattaaattagaaaataaaaataaggaatttaaaaatttaaataacgaaataaaaatttataaaaatttaaaaggtaaacatatacctagtataaaatggataggaaatactaaaaaatggaatataatgattatagattatttaggtccgagtttggaggatttatttgaattgtgtcaaaaaaaattcagtttaaaaacaattttaatgatagtcgaacaagtacttacagttattgaacacgtacacagcaaaggatacatacatcgagatataa

SEQ ID NO: 247560 - DNA, 692 bp, Unknown
  Bacterial polypeptide expressing nucleotide sequence isolated from the Sargasso Sea
aatggaatacattgagggaaatactttgacttcaattatttcaaatagaaaaactataagtttaagtgatgttttatttataggtgcacaagttgcaaatggactccaggcagcccactcacaaggtcttgttcacagagatataaaaccaggcaatataatgattaccccaagcggtaaagtaaaggtgactgatttcggtatagtttccattcaagatgaagaaagtgacattactaaaactggttcaatattaggaacagcaagttatatatcgcctgaacaagcgcaaggaaaagctgtatctgttggttcagatctttattccttaggtactgttctttatgagttaattacaggaaatcctccttttgaagctgatactcctatagctacagcaacaaaacatttaacagaaaggccagaaaagccatctaaatatagacaagacctgccaaaaggaattgaaaatgccatattgaaactacttcataaaacaccaagagatagatttaaaagcgcagaagatttaagagctgttttgctgcagcaaagaaaccaattagaaatggtacaaacccaagaaagtttggttgatcttacgaatcctaaaattaaatataaatttactcttcctgctttagttgtttcaataggattggtgctaggaactttttggactctatctcaaa

SEQ ID NO: 247561 - DNA, 697 bp, Unknown
  Bacterial polypeptide expressing nucleotide sequence isolated from the Sargasso Sea
gaaagcgccgcgtggcgacctaagcgcggcacaacttcgggccttcggcaaggaaggagaggaacaaatggaagtgagcggatactcgccctatgttgcgcaggtgaagttcgttgtgccgggaaactccagagggagaattggtctcgagtactatccggacggagatttgattgagatgttaaccgagtcggactggagtccgagtcaaacagagatacaattggctgttgctcagcttggaaaaggaattctcgatctgcaccgacaccagtatagtcatcatgatttgaaaccagcaaatgtccttctgaagagagacggcggggcgctcagattctacatcgcagattttgggctcgctgaacatgggacggactatatgaagcgggtcaactgcgggacaaaacggtatgtacccccaataaaacgtggccgaaacggcggcttcgcgccggagcacgattggttcagctacggcgtcattcttttcaacatggcaagtcatcctccaacatatccattcaaagacaactatatttatagcctaagttcctcgactttgggtcgagagttcgtgcaattggaatgcgatggccgaaaattaagtattgacttctgtacaggcttgatgcgtttccttatggacgtctggtacaagcaattgacacattctgaaaattttcaaaggcggggt

SEQ ID NO: 247562 - DNA, 833 bp, Unknown
  Bacterial polypeptide expressing nucleotide sequence isolated from the Sargasso Sea
aaaggctgctgcatgtaaagctcctggttttggagatagaagaaaagctatgctagaagatattgcaatactaactggtggaactgtaatatctgaagaggtaggattaacattagaaggtgcaagtattgaagatttgggcacatcaaaaagagttgtattaaataaagataatgcaacaattattgatggagcaggtgatcagaatgctatcgaaacaagggttaatcaaattagagctcaagtagaagagacctcatctgattatgataaagaaaaacttcaagaaagagttgctaaattggctggcggtgtcgcagttattaaggttggtgctggttccgaagttgaaatgaaagaaaagaaagctagagttgaagatgcacttcattctaccagagcagctgttgaagaaggtgttgttccaggtggaggctctgctttaataaggtgcttagaagctgttgcaaaattaaaaggtgaaaatgatgaccaaaatgttggtataaatatcgctaaaaaagctttcgaatcaccattaagacaaattgtttctaatgctggtgaagaaccatcagttattgttaataaagttattgatgggaaaggttcttttggttttaatgctgcaactagcgagttcggggatatgattgagatgggcatccttgatcctgctaaagtaacaaggacagctcttcaagctgccggttcagtagcaggaatgatgattactactgaagcaatggttactgacgtacctaaggatgatactcctatgcctccaatgcctgatatgggcggtatgggcggtatgggcggaatgatgtaat

SEQ ID NO: 247563 - DNA, 488 bp, Unknown
  Bacterial polypeptide expressing nucleotide sequence isolated from the Sargasso Sea
gggtcaggcatacagttatataacatacaactggtttatgccgtcttatgaagactctagtcaatcaagcgttgtaggaaaaatggccttagcacctgtaccaggtaatggaagtcttaacggtgcttggggttgggctattccaacttcaagtcctaatgctgatgctgcttgggaatttattaaatgggttgagtcaccagaaattgtagctaagagagcactaatgggtggcgcaccaactagaagcgatgcgtttaataatccagaggtattagcaaagtatccacattatggtgctttaaataatatattagctacagctaaaaatttccctgtgtttacttacacacctcaatttgttgaagtaatgggcagagaactatctaaagcagttatcggtgaaaaaagtattgatgatgctttagcaactatgaatgatgaattagaagcattagccaaaaaagatggtgtttacaaaaactaaa

SEQ ID NO: 247564 - DNA, 754 bp, Unknown
  Bacterial polypeptide expressing nucleotide sequence isolated from the Sargasso Sea
aatgaaacacaaaagaatgcaagggatgctgataatatatatatatggttggaatataattcagggtcaattagtctagataaatggattaagagtccagaaaatacaaagaatgtccgtataaagataacgagtggtttatcaaatggaattcaatgtttacatcaaatgggaatagttcatcgtgatattaaaccatcaaatataattgttaataaaaataaagtaaaaataattgattttggatcatcagcaagtgtgaccttgggaacattacgtaaaattaataaaaaagaaggttatacgaaacaatatcatccaccgttatttaatgatgatgatattgatgataataatcaattatttagtataggtagtttttacgatatatggtcaattatgatcatatgtactgaaatggtacataaaagaccaagtgagttttatactattttagatccggaattaaaagaaaatttcgaagatgcttttggatactatttaacctcccaagaaataaaggataatcaatttaaggaaaattttaatagactattaggggatttaatgtattctgaaacattaaaaaaaaaatgggaacaattatttgactatgattattcagttcaatgtgatgtttcaagtttagataaaggtatacttattcctttagaaaatctaccatggtattgtagaataattgcagacttaaagaaggatgatttaattcttgcaacggtagcacataaaatga

SEQ ID NO: 247565 - DNA, 592 bp, Unknown
  Bacterial polypeptide expressing nucleotide sequence isolated from the Sargasso Sea
atgaaaggtaatattttctatgcacaatcagggggtgtaactccagttatcaatgcaactgcttatgggctaatagaacagttttttaagaataaaaaatattttgataaattttacgtcggcaaaaatggaatattgggtgccttaaacgaagatctcgtagatatatcatctgaaaaaaaatcagagcttaaattgctaaagcaaactccaggaggagcatttggatcatgtagattaaaattaaaggactatgttcagtcagaaagacaatttcagagaatatttgaagttttcaagacacacaatattagatactttttttacaacggtggtggagactctcaggatacaaccaataaaataagtaagtttttcagaacaaaaggatatgctattacgtgtattggtctacctaaaacaatagacaatgacttgccaataacctattgttgtcctggttatggatcagtggcaaaatacattgccacatccacattagaggcttcgcttgatgtaaagtcgatgtcacagacatccacgaaagtgtttattttagaagttatgggtcgacatgctggttggttggcgg

SEQ ID NO: 247566 - DNA, 289 bp, Unknown
  Bacterial polypeptide expressing nucleotide sequence isolated from the Sargasso Sea
catgaaaaacaaacaaattgaaagagttaaccttattttacctctagtgtttgaaaacaaagaaaagatggtgcttgtaatggagattgccgctggaggggaactctacgactatttgagcgaaagaaagtgtttagaagaaaatgaagctcgcagagtctttagacaaattgcttgtgccgtctactattgccataaaaacaacatatgccatcgtgatctcaagctggaaaacatcctcttagatgagaatggaaatgctaaggtacgaagaagtacatcttggtaa

SEQ ID NO: 247567 - DNA, 463 bp, Unknown
  Bacterial polypeptide expressing nucleotide sequence isolated from the Sargasso Sea
ctgctcaccgtgctcggaagaggctcctacggcaaggtaattcaggtgcgcaggcgcgacaccggcgaggtcttggcgatgaaggcgatgcggaaggccgacatcgtcaagagcaaccagatgcgccacgcgctcacggagcgcgctttgctgcaggcggtccaccatccgtttatcgtgccgctgcgcttcgccttccagtcggacacgcacctatacctcgtgctcgcgctgcagccgggcggcgagctgttcttccatctgcgcaagagcggcgcgttcaccgaatcgcgggtgcggctgtacgccggcgagatcctcctcgcgctcgaggccatccacgcggccggctacgtgtatcgagatctgaagccggagaatgtgctgctcgacgccgagggccacgtgtgcctctccgactttggcctggccaaggggccggtgacggccctcgacgcgggcg

SEQ ID NO: 247568 - DNA, 821 bp, Unknown
  Bacterial polypeptide expressing nucleotide sequence isolated from the Sargasso Sea
gatgtcctccatccgcaaggggcgactcagccaccgccatggcatttgcgtctgagcctcctccttgatgcggcgcgcgggatggaggctctccacagccacaagcccaaggcgatcctccatcgggacatcaagtcgctgaatgtgctcgtgaccaaggttcgcctcgctggttcagagcagtacatggcgaagattgccgacttcggcctggcccacgctttttccaagacgacggctgcgaggacaaaggaaaaaggcgcggggtcgtttccatggatggcgccggaggtgtacaagggcaagtacgttgagggaacggactcttgggcgttcggcatgatgatctacgagttcatgactcgaaagctgccgtacgaaggaatgagccagccgcagatcttagatgcagtcaaagctggagagcggcccgacatggcgctcgtcgaggcaggctgccccgatatcttgaaagatctgatggaatggtgcctggttgccgacccgcgggcccggctatcgttcgtcgacattgtcaagcgcctcgagggagcgataccccgcaccatgtgttcctccgcactcgcaaagtctgcgacgacgagcaggcgcggcggcggcggcagcgtggacgccagactggcggcgttggagaagaagtccgatgatcgggacaaggcaatcgaggagcttcgctccgatttcgaccgcttcgccacttccattcatggtaaggtggcgcgctgctccacaaccgaagacgtcctaaagttactcgaccaaaacactgcaaatatcaaggaattcgtcgggaaagttgt

SEQ ID NO: 247569 - DNA, 320 bp, Unknown
  Bacterial polypeptide expressing nucleotide sequence isolated from the Sargasso Sea
gtggcagaaaaacgtatggccgcaaggccttcaggcccttactagggcgcttaacgacagtggaattagtgatgttagaccggtaactcttggacatgtgcaacgaggaggtactccggtaagcaacgacaggctacttgcgacttcattaggcgaatacgcggtaagtcttgtgggtacagatacaagcaatgtcatggtaggagaagtgaacagagaacccactactgtgccgctcaccacaaccagtgatagtaagccgttaaacagtgcacaagtggccttaatgaaatcaataatgaatggaaggtatggttaat

SEQ ID NO: 247570 - DNA, 292 bp, Unknown
  Bacterial polypeptide expressing nucleotide sequence isolated from the Sargasso Sea
ggaactgatgaaaatcctggctctacaattacaaaaaatagaaaacgatacaagttctacaatagaataacatcactaaatgctccaagacatagaaaatcaaaagaaaacaatcctgttgatactgatgatgatctaaataattatattacaaaaagtataaaaacacttgttccatacaaaaattctataactaatatccttatacaaatcactaacagaatacattctaggttgaactattgtggtagccatactatacctcaaatacaaactaattctgaatttatca

SEQ ID NO: 247571 - DNA, 888 bp, Unknown
  Bacterial polypeptide expressing nucleotide sequence isolated from the Sargasso Sea
aaaaataaatatgaaatactttttgagtatggaggtagtcccataggcaatagccgtgtgaaacttactaacttagaagactgtgttaagaagggttatgtaaaggaaggcgaagatccgttacaaattgctgcagagcagctaaaaaaagataaagttgatattctacataccattggaggagatgatacaaatacaatgtcagcccaactatcagggtacttaaaggataatggatacaatttaactgtggttggattgccaaaaactgttgataatgatgtgtatccaatatctcaaaccttaggtgcatggacagcagcagagcaaggggctattttttttgaaaacattgtcaatgagaatacaactagtacaaggcaattgattatacatgaggtaatgggtagaaattgtggctggcttactgcgcaaacggcatttgattatcgaagtagaatgaaaaatagagagttcattcctgaactacttattgatcaaagtaggtgggatatagatgcagtttacatcccagagtcagattttgattttcaaactgaagtaagtcgtctgaaagcagtaatggatgcaaaagatggagtaaatgtatttttaagtgagggtgctgggttagatacaatagtgcgagaaatggaaagcataggacaagaaatcccaagagatgcttttgggcatgttcgattagatgatattaatcctgggaagtggtttgcgaaccaattttcaggtgcattaggtgcagaaaaaacattggttcaaaaaagtggatattttgctcgctcagcaaagcccaacaatagagatctccaattaatacaaagatctgcgaatttagcagtaaagcatgccgtagctcaaaaaaatggt

SEQ ID NO: 247572 - DNA, 728 bp, Unknown
  Bacterial polypeptide expressing nucleotide sequence isolated from the Sargasso Sea
gatattaactgaaattgctaagaggggtgatttaaatattgtggccataccgaaaacaattgacaatgatgttggggctactgaaagctcaattggttttaatactgccgtaaatgttgctactcaagcacttgataacttacaaacaactgctgctagtcatcaaagaacaatgattttagaagttatgggaagagatgctgggcatatagccattaatgctggtatagctggtggagctgacgtaatcctaattcctgaattaaattactccataaaaggaatagttaataaactaacagaaatgaaaaatagaggaattgtgcactctctaattgttgtagcagaggcagtaaaaacagaaaatggaaaaagctatactattgagtacgccgatggtcaaaaaagacttggtggtataggaaactatttatcagaggaaataatgaaaagcactgacatagaatgcagggttacttctttagggcatgttcaaagaggtgcgccccctactccacgtgatagaattttagcaagtgcgtttggtgtgtatgctgttgatttaattgctaaaggaaaatttggaagaatggtcgcctggaaagatagaaaagttgtcgatgttccaattagtgaaggaatttcaacttataaagttgtggatagatctgatcctctgattgaaactgctttagctcttggagtttatgttggtgatataaagtgaa

SEQ ID NO: 247573 - DNA, 854 bp, Unknown
  Bacterial polypeptide expressing nucleotide sequence isolated from the Sargasso Sea
ttagaaattattgaattagatttattgaatgatgaaggctgggaagaagcaggtaaagattgtgattatgttatgcacgttgcttctccaatttcagctagcgattcgatagacgaagaagtacttatcaggcctgccgttgacggtactcttcgctcgcttaatgctgcaaaagtaaataaagcaaagaaagtgattttaacttcatcagtcgcttcgattttttatgatgattccaaaaaaaaaaattacgatgaaaatgattggtcagatgttgattcaaataaaattactccatacgcaaagagtaaaactatggcggagaagtctgcctgggaattcattgataacttaggtgaagacgaaaaatttccattaactgttttttgtccttacatggttttgggacctgcactttcgcctgatttaggaggaacaaacgttttagtccagatgttaacgtctggaaaattaccaggaactccaaatattcatcttggtattgtagatgtaagagatgttgcgcaagctcatgtagatgctatctctaatcaagcttctaacaatgagcgttttattctttgtacttcaagtttctggttgcatgaaatttctcaaatcttgcttaaggcaggctttacaaaagcgcctaaattaagattacccaatttcattttaagatttgctgcactttttagtgttagagcacgagagagtcttaggatgcttggcgatcctcagtttctctcaaatgaaaaagtaaaaactatattgaactggcagcctaggcctgttgaagaaactttagtggatactgccaaaagcttagagggtcagaatcaaatctcaattcc

SEQ ID NO: 247574 - DNA, 395 bp, Unknown
  Bacterial polypeptide expressing nucleotide sequence isolated from the Sargasso Sea
caggaacccaccaggaacctaccaggaacctaccaggaacctaccaggcgacctaccaggcgatctaccaggaacctaccaggaacctaccaggcgacctaccaggcgacctaccaggcgacctaccagcaacgtaccaggcgcctaccaggaacctaccaggaacctaccaggaacctaccaggaacctaccaggcgcctgccaggaacctaccaggaacctaccaggaacctaccaggaacctaccaggcgacctaccaggaacctaccaggcgacctaccaggaacctaccaggaacctaccaggaacctaccaggaacctaccaggcgacctaccaggaccctaccaggcgacctaccaggaacctaccgggcgcctaccaggaacctagc

SEQ ID NO: 247575 - DNA, 569 bp, Unknown
  Bacterial polypeptide expressing nucleotide sequence isolated from the Sargasso Sea
tatgtctaaaaacgtaacattttgctttgattttggaagtccgtactcttatttagcctataataacttaagtgctctaaaagatgctggagcatcggttgaaattttgcctgttttacttggtggtattttcaaggctactggaaaccaacctcctgcttctgtaccaaaaaaaggtgagtacatgtttaaggatattactcgttggtcaaagaaattagacattacattcaaaatgaatccttacttcccaattcttactgttcctcatatgcggggtgcagtattagcccagaaagaggggcttctagaaaaatacatggaaagcatgtttgagtctatttgggtgaaagcaatgaatttaaatgatcaagaaatattaactcaagttgcaagtcaatctggaattgatgctaatgcattttctgagggcatatcaagtgatgaaacaaaaaataaattaagagaaaatactgagtttgccattggaaaaggatcatttggtgtgcctacattctattatgaaaaagaaatgttttggggcatagacagtatgaaatttctaattg

SEQ ID NO: 247576 - DNA, 693 bp, Unknown
  Bacterial polypeptide expressing nucleotide sequence isolated from the Sargasso Sea
aagctacggccttcgactgcataaggaaggaattcgatgtattggaattccaaagaccatggacaacgatgttcccggtacagattactgcattggtttcagtacctgtgtcacaaggacaattgaatttactcatcagctgcgtacctgtgcaggttcgcatgaaaggctgatggtggttgaggtgatggggcgatatgctggctatactgcattagttcctgccatggcaggtgcatcagaccgctgtgtaatacctgaacataaattcgatattgaaaagcttactgaattgctgatgaaagaccgcagggataatgacagcaattattctgttgtacttgtttcagaaggagcaatgtttgaagggggagaaatgactttttcaaaccaggatacagatgcatatggtcataaaaaactgggtggaatcggtgaccttgtatgtgccgaactgcagaaacgtgcaccaaaatatagcaatcgggaaattattagcacaattaatcagaggatgagttacatgactcgttctggacatcctgacgcaatagactccttggttccaatggtctacggaaacttagcaattgaccttataatggatggaaagagtggaagaatggtttgccttaaggatgggcgttatgatcatgtgccatttgaagtggtaacagaatatgaaaaaaagat

SEQ ID NO: 247577 - DNA, 882 bp, Unknown
  Bacterial polypeptide expressing nucleotide sequence isolated from the Sargasso Sea
ctaactaacgtagatgattgtgtaaagcgtggatatatagatgctggccaagatcctcttaaggttgccgcagatcaattagtaaatgatgaggttgatattttgcatgcaatcggaggtgatgataccaatacaatggcagctcaactttctctttatttgaaaaataataattatgatctaactgtagtaggtcttcctaaaacagtggataacgatgtttatccaattagacaaacacttggggcttggaccgccgcagagcagggtgcaattttttttgaaaatatttcaaatgagaacacaactagtcataggcaattaattattcatgaagtcatgggaagaaattgtggatggttaactgcctatactgcgaaagagtatcgagagagattaaagaaaagaacttttttacccgaattacttattaatcagcagagatgggatattgatgcgatatatataccggaaaaagattttgattttgatttagaatgtgaacgtttaaaagtaatgatggatgaaaaggattctataaatatttttttaagtgaaggagctggtacaaaaacaattattaatgaattgcaagcatctggagaatcaatcacattggatgcttttggacatgtagcgcttgatgagctaaatccaggtcagtggtttgcaaagaaattttcggaaaaactagatgcagaaaaaacattggttcaaaaaagtggttattttgcaagaagcgctgctccgaactcacgtgatatagatttaattacaaattctagcaagttagcagcagattttgcatttaaaggagaaagtggtgtccttggtatggatgagaatgcagaaggtcaactcaagctgattgacttcgaaaga

SEQ ID NO: 247578 - DNA, 799 bp, Unknown
  Bacterial polypeptide expressing nucleotide sequence isolated from the Sargasso Sea
caaagtaaaagagaatatgaaagactcattgatgtttttaaggctcatgacattggttactttttttacaatggcggaggtgattctcaagatacctcaaacaaaatcgcccaatacacaaaagatgcaggatttcccgtcacctgtattggcataccaaaaacaatagataatgacttgccctatacggataactgtcctggttttggatccgttgcaaagtatattgccacatcaactaaagaagcggctttagatgtaaagagtatgtctaagagctcaaccaaagtatttatctttgaggttatgggcaggcatgcaggttggttggctgcttctgcaggtcttgctaaatcaaaaaataactctgctcctcatattattctacttcctgaaataagctttaatgaaaaattatttctaaaaaaagtaaaagaagttgtaaaaaaagaggattattgcgtcattgtcgtttctgaaggagctaaatacaagaatggaaaatttcttgcggatgcagggacagtggattcatttggtcataaacaacttggcggggttgcacctcttattgctgaaatgataagcaataaattaggttttaaatatcattgggcagtctctgactacttacaacgttctgctagacatatttcatcccaggtagatttagatcatgcatatgcagtgggaaaagcagctgttgaatacgcatcttcgggagaaaatgcgattatgccaataatagttagaaaaaaaactaagtcatattcctgggaggttggaaaagttgcattga

SEQ ID NO: 247579 - DNA, 463 bp, Unknown
  Bacterial polypeptide expressing nucleotide sequence isolated from the Sargasso Sea
catgactgtcgcccaggcggaaacccgagtgacctataaatctgccaagagcacctcgtcttactatcagatggcggtacagattgccgaggccatgaagacgggttcgggtggaaacatcatcgttactgtagaagaaagccaggggtccgtacagaatgtcatggaggctgcggtacgcaccggcaattacgtattcactactccgccggtgctcgtgagactggctcagggtggcaaggccatgttcaaggacaaggccaacccgaagttcgatgagattcgcgccctttttcccattccgtctctcaccatgcatttcgtcatgcgttccgacagtggcgtatccacctttgcagatctcgaggggaaaaccgtacttatcgggaagggatctttcggcgcacgagagggtgcgaaatacctgaaactgttcggcctcgaaggcaaagtgactctcgcc

SEQ ID NO: 247580 - DNA, 661 bp, Unknown
  Bacterial polypeptide expressing nucleotide sequence isolated from the Sargasso Sea
attcctaaaggcgatggtaagaaagttacaattcttcctggtggaaaagttattgctttcttgggaattttaacaatcacactaacagttactggccacaatgttcttcatatgcctccaatactaggaatgatgtttggtttgggaatgcttggaacctatggttattttttaaagaccaagcatcctgaaaaaaataaatttgatatttttgtaattacgggtagagctgaatgggatactctattgtttttctatggtattttgtttgccgtagggggactagcttctctgggctacctaaaattaatatctgatgatatgtatgtaactttgggagcgacatatgctaatattttagttggaattctctcagctattattgataatattccaatcgtctatgccgtattaactgctcaccctgctatggatatgggtcaatggttgttaattacattaacagctggagttggtggatctttactatccattggttcagcggctggcgttgcattaatgggtcaggcaagaggtgtttatactttttttgcacatctcaaatggtcttgggcaatcttattaggatatgctgctagcatcgttgttcacctttggatgaatcaacatttattcaatttagtaccattagaaagatgag

SEQ ID NO: 247581 - DNA, 656 bp, Unknown
  Bacterial polypeptide expressing nucleotide sequence isolated from the Sargasso Sea
tcaactcaaggaaattggacagaagcatttagttaaaaaattgactgatttcggattagtagtaataggggcacatataggtgttcatataaaaaaagaagtagaaaactacaaaaacgaaaaaattttattaattgaaccagttcctcataatatagaagcaatcaaaaaaaacttattcgaatacaaaaatattacagttgagcaaactacgataggaagcaaaaaagagacaagagatttttattttgttaaagaaaattcaataagtaaattaaaaaaacattgggcaagtggaattggatcatttgataaaggtcatattttaaaacataaatctaaaagatttaatgttgaagagattgatattaaaaaaataagtatacaatgcttaagatttaatgatttaattgataaatattcaataaattcaattcataaaattttaattgatgttgagggtagtgaatatgaaattttaaaagatatagatctagataaaactcaaatcaaaaatataattttcgaatataagcattttgacggtttctttacacaaggaaaaaaacttgatgaaataattaaaagattggaaaataataattataagataattaagcttgatgaagaaaatattttagcagaaaaatattaat

SEQ ID NO: 247582 - DNA, 832 bp, Unknown
  Bacterial polypeptide expressing nucleotide sequence isolated from the Sargasso Sea
tgatagggataaatggaatcaatacgttcatcccaagcttttaaattcacaaccttatagttttttaacagggggaacagatctctctgtattctctagggagaccagcacttctacttttaaagcagaccttacttctcagtggaactcaaagaacaagatcaagctgggcatagaatttagacaacatcagctcaatttcaatgactacagcttgcgtcctcctgatgaaaaagcaagcttcaatgaattaagtgacgaccccttcttgggcaatccccaacgctttccagactcaaccatctactcgagcacttacaatttcaaaccatcagaattcagcgcatatgtacaagataagattgaattgaatgaattaatcataaaccttggtgttagattggattattttgatcctaaaggtaaaatgctaagtgacccgtccgacccatccatttataaccccataaaaccctcaaatatatatgaggatagcaatgaaaatggtgtttgggataatggagaaaatgctgtaagcatcaccaaaagaaagcaatattggttcaaggataccgacgctaaatggaagatcagtcctcgatttggagcttcatttccattttcctcaactggagtgatacatttttcatacggacatttctttcaaataccacggtttgagatgctttatatgaatcccgattttgacctaggacagggaactgggaatattggagtagtgggaaatgcgaacttaaggcctgaaaagaccattcaaggcgaactgggtctacagcaacagatctcctataatatggctctggatataacg

SEQ ID NO: 247583 - DNA, 1006 bp, Unknown
  Bacterial polypeptide expressing nucleotide sequence isolated from the Sargasso Sea
gacagcgtagccgcttatgcccagggtagttatcagtacacagacaagctgtctttcactttaggtggtcgttataccaaagatgataaagatgccgaagtctatcgcttcgtttatctgggttataaaaacccaagggacgctggcactcctatcgcagtgcagtctgattttacaggcagcgaaagcttcagccatttttcaccccgcctaggttttgaataccagagcaacgacaacttcatgtggtacggctcgtacaccgacggttttaaatccggtggttttgatatgcgtggtaatcaggcgattaaccccaatgccggcgacccttatcaggaagagacagttgatacttttgaacttggttttaaaagtgagtggaatgatcgcactttacgtttaaacgcagcagcttttacgtccagctatgacgatatgcaggtgactgtgcagcgtgctgtgaataatacagtggcttctcaggtgttaaacgccgccagcgctgacattcgtggttttgaagtggagatgatctctgttttgaccagtaacttagagctgacggggatcttagggtacacagatgctaagtttaacgaagtagtattttttgatgcggcttctcagactaacgtcgacgtctccgatgtctggtcttttgccaatacaccggagtggactggtactttaggtctgaaatacacccagagcgccaacataggtgaaattgtgtataacgtcatggggtcgtaccgtgctgatacgcagatttttgaagtgccgtccgtgctggactttggtggttataccctgtttaacgctggtgccacctggtactccaacgatggccattgggacttgtctgctcaggtacgtaacataggcgataaagaaacccgtattgccggttacaacttcccgctactggcgggtgagcaaaccattaccgcctaccacggcgacccaaggacgtacagcttaactttgggatatcgtttctaag

SEQ ID NO: 247584 - DNA, 1339 bp, Unknown
  Bacterial polypeptide expressing nucleotide sequence isolated from the Sargasso Sea
ttgactgaacttgttagtttgaaaaatgctgagaagccagctgctcccaaagtgccagacacttatatggctcaggagcaacacaagctgatagagtttattgcgctgacccataaaaacaaaacagagaaatttgaacagcagcaattactaactagccaaaatcaggctctggcacaacctgcggtgtatttggataaaaccaagcgtatagcttcagccagtttgtcacctaaaggcgatatgcttttggttgcgctcgcggacaaagctgaatggcgtgataaaaccgacattatgccaaactacattacggcgtcaggcaacatagcagctgaagaagtgcgtcgtcgtgtggcggatcagaaacctcaatctcatcagctgtttttagtggatgtcaaaactcaacaagccacagagctgaagtttgataccttgcctggctttgatgaagatgtattagcggcggtaaaagctgaaaatgccaaagcacaaggcaaaacctatcagtcgaagaaggcgcctcgcgctattgagctgattaatgactggagctggaaccagtccgctattcagtggcataactcaggttcacaggttgctgtcatgctcaaagcctgggacaacaaagaccgctggctggcgactgtcgattttgccaggaagagactggtgagtcagcaccgtttgcatgacgaggcctggatcaactacagctttaatgactttggctggttaagccaaaaagaaagcttgtactacctgtctgaagagtcaggctatgcgcatttgtacgttaaagctttaaatggcgaagcgaaaaaactgacggccggtacttttgaagtcagcaacccgcatctatcgaaaaacgatcagtacctgtatttcaaaggtaacgtcagccatcctggtatttacgaaatttatcgtgtggcgttaaataacggtcaactggaacagatgacggctttaaaaggctctgccgattaccagttatcgccggatgaaaacaagctgctgctgacctggtctaactctgtaacaccaccagagttgtacctgatggacaacaaacctaaagcgaaagtgactcggttaacctataccgtatctaaagaactgaccgcactaaatctggcggcaccacaagttgttgcagttccgtccagtcatggtaaacaaccggtatttgccaaactctacttgcctaaagattatcagcaaggcgaaaaacgccgtgccgtgatttttaccacggtgcagggtatctgcaaaacagtgatttggggtggtctggttatttccgtgaatatttgttccataacctgctgat

SEQ ID NO: 247585 - DNA, 763 bp, Unknown
  Bacterial polypeptide expressing nucleotide sequence isolated from the Sargasso Sea
ttgggatcaggtggtgttgcaagtgttatgttaggtgttgatagacaaactggctttccagtagcagtaaaagcgttgcatcaaagtttatttaaaaatgaactcatcaaaaaaaaatttattagagaagccaatcactacgtttatctaaaacacgacaacatagtcaaactcaaaaaccttataataaaagaagacgctatttatttagtgatggaatttattgaaggcgacactttagaacattacataaataaaattagtggcccaattccattagaaattgcagtacctatgatgaacgacatcctttctgccattgattatgcccacaaaaaaaatattgttcatttagatattaaaccatcaaacataatgatctctaaagaaggtgacattaaagtattggactttgggatttctgcagacctgaacaacgaaatgggcaatcagggaatggggacgccattttacatgagtcctgaacaaattgacggcaaatacattgatcataaatctgatattttttcacttggcattaccctatttcaaatgttaactgctaagctaccttttccaaaattagatagagcaaaattgtttgattacataaaaaataaacccttaaaaaaagttgatcagttcatcaaccttaatgatgttagattacagcaggtaatagatttagccactaagaaaaatccaaaatacaggtaccaaagttgtcaagaattttctaatgatttaaacgaattattatgaa

SEQ ID NO: 247586 - DNA, 1006 bp, Unknown
  Bacterial polypeptide expressing nucleotide sequence isolated from the Sargasso Sea
ttattatttccaggagattttttttctaaaaggacagcttctcctctacttcagcaaactgaatacagtcacactcaagatatgtcggcgaatgattgttttaaacctgtttcaaaatattgggatagaataaatagacccgagcaattaatttcatcaatgcttgaagcaatgagagtattaacatctccatctgaaacgggagcagttactatttctttaccccatgatgttcaggctgaaacatatgagtttccagatgaattttttcaaaaaagaatatggaatattcctcgtttaactccagataaattattaattagtaaagctatagagactataagaaaatcaaaacgaccaatgattatttcaggaggaggagtgatttattcagaggcagagaaagaactaaaaaaatttattgagaaaactggaattccagttgctgaaacttttgcaggcaaaggcactcttcattataaacatgaattaaatcttggcgcgatgggagcgacagggacaaaaggtgcaaatgagatttcaaaagatgctgatttagtaattggtattggaacaagatatggtgattttacctctgcatcaaagtcagcatggcaaaatcctaaagttacttttataaatatcaacattactgaactagatgttttcaaacaatctgctattccacttcagggtgatgctaaagaaacaataaaaataattagcaaagaactagatggatatagtacagatgatacatatataaataaaattaaatccttaaataaggagtgggataaaatagttgataaagtatactcacctgttgattttaataaacctgttcaagcagaaattttaggggctttaaataatttcatagatgataatgatgtggttgtttgtgctgcaggaagtgctccgggtgatcttcataaattggtggaggacgaaaagctccaaaggatttcatttagaatatggaaattcatgcatgggttatgaa

SEQ ID NO: 247587 - DNA, 1476 bp, Unknown
  Bacterial polypeptide expressing nucleotide sequence isolated from the Sargasso Sea
gatgacccatttagtgaccgcattaagttgtttattctttttgcttattgtcgccgctgtatcgtatttaaagactaagggcgataccgatacgcgggatggttattttctagcaaacagagggctaaacggtatttttattgctgggtcgatgttacttactaacttatctgctgagcaattgataggtttaaatggctctgcatatggttttaatcttagtagcatggcctgggaggtaacggcagctgcctccacaatttgtatggcgctaatttttttacctcgatatcttgctggtgcattcacaacacttcctgaatttcttagccagagatttgatgatgatgtcaggagaatgacagtcttgttgttcatggttggatatgggttggttactattccgtcagttctctattcaggatcgatagcagttctgcttttatttgatttgcctggcatattaaatgttagttacagccaggcacttgtaatgacaattgttctcattggattggttggctccttttatgcaatctttggtggattaaaggctgttgcggtttcagatactcttaatggtatcggccttttaattatcgggataacagtgcctttactaggtctttctactttaggaagcggtagcataatagagggactatcgattattacaactaacaacacccataaattaaatgcaattggatctgctagcgatccgacaccttttgggacaatctttactggaatgatctttgcaaatttattttactggtgtaccaatcagtatgttattcagcgaacgttagctgctagagatttatcagaggggcagaaaggtgttttgttttcaggattttttaaagttatgataccatttatgatgatgattccaggtgtaattgcttatcatttatatggggaaagcctagtatcaatagatcaggcgtatccacgattaattcgtgacgtgttgcctaactatgctaagggattttttctcgcggttttacttggggccgtttttagttcgtataactcattactaaacagtgcggcaactttattttgtttagatgtttatgtccctatgtgcaggggtaatgtagatgataaaaagctggttagagttgctaaatatgctagtgttagcatagcccttttctcttttttggttgcccctcttttacagtatgctccagatggtctgtggcagatcataagaatattcactggcttttataatattccagtgattgtgttggttattgttggcttatttacaaagagagtacctccaataggagccaaaatagtaattattatgcatataattttctacacactatttcagtttatatttaaagattatttagatattcactttctgcatttatatgcaattttatttgttcttgaagtaatggtaatgctggcagcaggatatttagatccacttcaaacgccgtgggt

SEQ ID NO: 247588 - DNA, 2482 bp, Unknown
  Bacterial polypeptide expressing nucleotide sequence isolated from the Sargasso Sea
aatgaacagcgtaatgcgaaatttgggtttaagtgcgttagccgttgcggtattgacgagttgcgccgccacctcaactgaaacggcgactcccgcgaccacaccacaggcatatcaagtccctttagctcagcctccccaagtttcacaaccccttacgcttaaccaaattatggcgaaccccgattggatgggaattttcgctaaggaagcctactggagcgatgacagtcagagtgttttctttgcccgccaacccagcgcgtcgccgctacggaattactatcagcagggtattaatgacagccgcgccgttgaactggccatcgataaactacacgcggcggaccaacaatttggtgtgttagacagtgctaaggccaacaaggcctatctctatcaaggcaatatttttgttaagcatttaagctcaggcaaaatcacccagcttacccgccagcgcacggcgatcagtggcctgcgttacctcaacaatggcgatatcgcctattggcaaggggataatgttttccaaatccatcaagacagtggattagtggagcagttggctgaaatcaaaatggcgaaagcgcccgagggcgtgaaagagccgagcagctacttagccaagcagcagcacagactcattcaatatgttgctctgcagcaagaaaatgccaaagccaaagaacagtttaagaacgagctgcaaaagagcgatccgaccctcgccgccaacacttggtatctcggtgatgccgaggtggtgtctgagctgagtctgtcgccagacggtcgctatctgtttgtggccttaaccgataaaaactacaccggcagcagtgaacacgacatcatgccaaactacctcggtagcgaaggctatatcgaccctgtaccagtccgcgcccgtgttgcagaagatacgcctccgggacaacgctttgtggtgctcgatctcaatgagcataaacagatcgatgtgactatcgaaggcttaacaggcttcgatgaggacgttttagctaaggtgaagactgaaaacgccaaggcaaaaggtgagtcgtatcaaagcactaaggctccccgtaaaatccagctgatgcaggattggggctggactcaaagtgcgattcaatggcatgagtctgaggacaagctggcggtgatggtcgaagcgaccgataacaaagatcgctggattgccagtgtcgatctggcaaagggcaagtttatcactgagcaccgcctccatgatgatgcttgggtgaactacgactataaccaatttggttggttacctggaacagacaccctgtattatctctctgaagaaacaggctattcccagctttatatcaaggcccgtggcgaaaagccccgcgccttgactcaaggtaagtttgtggtgagcgatattactctatcgcccgatgcaaactacatctactacaaggctaaccaaagccaccctggcatttacaatgttcatcgtgtgaatatcgcttcgggcaaaaatgagcaattaacccagtgggacggtaacttagattacagcttaagccccgatggcactaagttgctgctgaatgcgtctcgccgtacagagccgaatgagctgtatgttcagccgattggcggtgagttaaaacagctcacgtcatacaccagcgatgcctttaagcaatatccatggcaagcgcctgaagtggttgcagttccttcaaaccatggcgctggccaagtatatgcgcgggtttatttgccgcagggttatgacaaatcacgcgctgagaaataccccgccgttatctttaaccatggcgcgggctacttacagaatgccgattatggtttcagtggttacttccgtgagtttatgttccacaacctactgacccagcagggttatgtggtgatggacatggattaccgtggttctaaaggctatggccgcgactggcgcacggcgatttatcgcaacatgggccaccctgaggtcgaagacttaaaagacggtgtgacttggatggggcaaaatgccaacgtggatattaagcgtgtcggtacctatggtggttcttacggcggcttcttaacctttatgtccttatttactgagccggaattattccaagcaggcgcagcactgcgccctgtggctgattgggcgcattacaacgcgccatacacctccaacatcttaaacacaccggatgttgaccctatcgcctacgagcgtagctcgcccatcgagcacgcccaaggtctgactaagccattactgatcatgagtggcgtgatggatgacaacgtgttcttccaagatagcgtgcgtatggtgcagcaccttatcgagctggaaaagcctatgttcgaaaccgcgatttatccggtcgagccccacggcttccgtcagccatcgagctggttggacgaatatcgccgtatttataagctgtttgaacaagagcttaagtaa

SEQ ID NO: 247589 - DNA, 988 bp, Unknown
  Bacterial polypeptide expressing nucleotide sequence isolated from the Sargasso Sea
catggaagtatatggaattagagatggcacagctggattaattaaacgtccagtagatgcaatacaattaacatataaaacttttgcaggatatcttttaagacaaggtggaacctttttgggatcaacaaataaaggaaacccctttaaaattcctacagaggatggcaagcatgtcgataaatcaaaagaaataattgaagggtatcactcaatgaaacttgatggtttaattattataggaggggatggaagtatgcaaatcttaaaaaaactagcaaaagatggtgatatgaaaatagtagctataccaaaaacaattgataatgacgttggagcaacagaaagttcaattggttttcatactgcagtagatgttgcaacacaagcgctagacaatcttcaatctaccgctgctagtcacagaagatcaatgatacttgaggttatgggtcgagatacaggacatattgcacttaatgcaggaattgcaggtggagcggatattattttaattccagaaattaaatattcgatagatggaataatcaaaaaacttaattcaatgaaaaaacacgacattcaacattcattaatagtagttgcagaggctgttaaaaaagaagatgggtctcaagtagtccataaatatattgatggtgaacaaagacttggtggtataggggactacattgcaaaagaacttatgaaaaaaacagacgttgaatgtagggtaacgtcacttggccatgttcaaagaggagcaccacctatcgcaagtgataggatactagcaagtgcgtttggggtttatgctgtggatttattaaatcaaaaaaaatttgatcgtatggttgcttggaaagacagaagagttatagatgttccaattgacgaaggaattaaaacttataaaaatgtcgagagaaaagattctttagtagaaacagctctttcattaggagtctacttgggagataacatataa

SEQ ID NO: 247590 - DNA, 1258 bp, Unknown
  Bacterial polypeptide expressing nucleotide sequence isolated from the Sargasso Sea
atgaaatctcagaatgcaatctatgctcaatcaggaggggtaacttctgttattaacgcaactgcttctgcagtaatagagtcttcaagaaagtcaaaaaaaattaataaactttatgctggcaaggatggaatcattgggatactcaatgaagatctaattgataccagtctggaaaattcttccgatatcaaaaaattaatgcacactccgggaggtgcttttggttcctgtaggcataaacttaaagacatcaatcaaagcaaaagagaatatgaaagactcattgatgtctttaaagctcataatattggttactttttttacaatggtggaggtgactctcaagatacctcaaacaaaattgcccaatacacaaaagatgcaggatttcccgtcgcctgtattggcataccaaaaacaatagataatgatttgccctatacagataactgtcctggttttggatctgttgcaaagtatattgccacatcaactaaagaagcggctttagatgtaaaaagcatgtccaagagctcaactaaagtttttatctttgaggttatgggaaggcatgcaggatggttagcagcttctgcaggtcttgctcaatcaaaaaataattctgctcctcacattatcttgctcccagaagtaacctttaatgaaaaattatttataaaaagagtaaaagaagtggtaaaaaaagaggattattgcgtcattgtcgtttctgaaggagctaaatacaagaatggaaaatttcttgctgatgcagggacagtggactcatttggtcataaacaacttggtggagttgcacctcgtattgctgaaatgataaacaataaattaggttttaaatatcattgggccgtctctgactacttacaacgctccgctagacatatttcatcccaggtagatttagatcatgcatatgcagtgggtaaagcagctgttgaatacgcttcttcaggagaaaacgcaattatgccaataatagttagaaaaaaaactatgccttattcctgggagattggaaaagttgcattaagcaaagtggcgaatatagagaagaagatgcctagaaatttcatctcaaaagatggttttggtattactcagtcttgcaaaaattatcttagcccattaattcaaggtgaagcttgggcaccatttgaagatggtgtaatacaaactgcttctttgaaaaataaacttgtcagaaaaaagcttaaaaattttaaattttaag

SEQ ID NO: 247591 - DNA, 1090 bp, Unknown
  Bacterial polypeptide expressing nucleotide sequence isolated from the Sargasso Sea
aatgggtaatattaaaaaaattggaatattaacaagtggtggtgactgtggtggtttaaacgcagcaataaggtcaatttttttcagagctaaaacaaagtataacatggatgtttttggcatcagggacgggacgattggtttgagcaaaagaccagtagatgttgaaaagttaactcatgaaacttttaaaggttatttgttgagacaaggtggcacttttttgggatcaaataataaaggcaataactttaaatttccgaaaaatggaaaagttgtagatacttctaaacttataattgaaggatataaaagtttaaatttagatggattaattattattggtggtgatggaagtatgcaaattttaaaaaaattagctgacaaaggtaaaatgaacatagttgcaatacctaaaactatagataatgatgtaggagcaactgaaaattcaattggatttcatactgcggtagacgtagctacccaagcactagataatttgcaatcgacagccgctagccacagaagatctatgattttagaagtgatgggtagagacgcgggtcacatagcattaaacgcgggcatagctggaggcgctgacgtaatattgatacctgagataaaatattcaattaatggtgttattaaaaaacttaatgaaatgaaaaaaaataaaattcagcattcattaatcattgttgcagaggcggtaaaaaaagaggacggttcaaaagttatgcataaatatttagatggcgagaagagattaggtggtattggagattacatagcaagtgaaataatgaaaaaaacagaaatagaatgtagagtaactactttaggacatgttcaaagaggcgctcctccaactgcaaatgacagaattttagcaagtgcgtttggagtttatgcagttgatcttttagctaataaaaaatttaatagaatggttgcttggaataatagaagagtagtggatgttgcaattgatgaaggaattaaaacatatcgagatgtacaaagagatgatcctctagttgaaacagccttatcacttggtgcttatataggtgaaattaaataa

SEQ ID NO: 247592 - DNA, 1089 bp, Unknown
  Bacterial polypeptide expressing nucleotide sequence isolated from the Sargasso Sea
catgaaaaatgcattttatgctcagtcaggcggagttacctcagtaataaattcttcggcctatggattatttttagagcttaaaaaaactgtgcctgaggcaaatatctatgttggaaagaatggcattgttgggttaattgaagatgaggtctatgacttaaaaaaatcaaaaaaatcacttgatcttttacttgattctccaggaggaatgtttggatcttgtagatataaacttcctgaaataaatgacgaaaaattctatgaagatttattcaaaaaattagaaagatattctattaattattttttctacaatggcgggaatgactcagcagatacatgttataagatttctgaagctgccaaaaaattaaattatcctttgaatgcaatcgctatgcctaaaactattgataatgatcttgcggttacagataattgtccaggttttggttctgttgctaaatatatagctacttcagctaaagaagcttcattggatatcaaatcgatgtgtaagacatctactaaagtttttattcttgaggtaatgggaaggcatgcaggatggatagcagctgcagctgaattagcaaatgatgataataatacatatgttcatagaatattaatgcctgaagttccattcaatgaagaaacttttatttctggagtgaagagtgatgtagaaaaatttggatattcggtcatagtagcttcagaaggattgaaagataaaaatggaaagttctatacagcctcaaatacaaaagattcatttggtcataatcagctaggtgggcttgctccaaaacttgctgatttgatagataaaaaacttggatataaatatcattggtctgtttcagattatttacaacgtagtgcaagacatatttcttcacaaactgatgttgaacaagcaattgcagttggaagagctgcagcaaaattagctttgaataatgcaaatggcgtaatgccagtaattaaaagaataaataatcatggtgaaccatatgcatgggttatagaggaatctgaactaatacatatcgcaaataaagaaaaaatagttcctacaga

SEQ ID NO: 247593 - DNA, 557 bp, Unknown
  Bacterial polypeptide expressing nucleotide sequence isolated from the Sargasso Sea
tatgaaagaaaccgtacaacgcgttggcggtgctatggcaggaatggttattcctaacattggcgcattcatcgcttggggtttaattacagcactctttattccaacaggatggacaccaaacgagggtctatctgaaatggttggtccgatgatcgttagcatgttaccaatattgattggttatacaggcggtaaaatggttcacggacatagaggtggtgtaatcggtgcagttgtaactacagctattgttgtaggttcaaccaccccacaattcttaggagctatggccattggtcctctagctgcttgggtccaaaagaaactagacggagtgctacaaccagctacaccggaaggttttgagatgttggttgacaacttctcattgggtatccttggaacagttcttgctgtagtaagcaagaatgtaattggtccaattctctcaggtattactgatgcattaggaaatgcagcaggtgctttagttgatgctggactagttccactagctgatattccaatgaagttgctaaggttctattccttaa

SEQ ID NO: 247594 - DNA, 937 bp, Unknown
  Bacterial polypeptide expressing nucleotide sequence isolated from the Sargasso Sea
tttgacgatcgacccgtcgcaaatcttactcggcgagcgcgtcggcatcggatcgttcggtgaggtccaccgcgcgctctggcggggcaccgaggtggcggtgaagagatttttggatcaggacatctcgaagaatttactcgacgacgtgacgtttgaagtcgatctcatgagacgcttgcgacacccgaacgtgatcttgctcatgggcgccgtcacggtgccaggaaacctctcaatcgtcacagagttcctacacagaggatccttgttcaaacttcttcaccgagaacaaacgccagcgcttcaagcggcgttagatgagcgtcggcgaatgcgcatggcgatggatgtcattcggggcatgcattatttacactcattcgagccgatgatcgtgcacagagacctcaaatcgccgaatctcctcgtcgacaaaagtttcgtcgtcaaggtgtgcgactttggattatcgcgcgtcaagcgaaacacgtacctcagctcaaagacaaacgccgggacgccggaatggatggctcccgaagtgctcagaaacgaggacagcgacgaaaaggctgacgtgtggtccttcggcgtcatattgtgggagctcgccaccatgaaagagccgtggtcgggaatgaaccccatgcaagtcgtcggcgccgtgggcttcgccgggaaacagctcgagattccagacgacatggaccacgtcatctcaaaaatgtgtcgcgactgctggaaaacgcaaccacgcgatcgtccaagtttcgaagatctgggcaacacgatgcgctccgtgccgaaggctcctcgcgcggtgagcgcagacggcaaagattcgggtcttcctccgacaccgccgcctcaagtccctccggcgccggctgtcaagcctgcgggcgattgggaagacgagcgctcgcggggataa

SEQ ID NO: 247595 - DNA, 859 bp, Unknown
  Bacterial polypeptide expressing nucleotide sequence isolated from the Sargasso Sea
aatgagtaataaaaaaataggaattttaactagtggaggggattgcggagggcttaatgcagctattagatcaatcttttatagagcaaaaaataaatacaaaatggatgtatacggaataagagacggtactgctggcctaatcaaacgtccagtcgatgttatgcaactaactcataaaacttttggcggatacttattaagacaaggtggaacttttttaggttcaactaataaaggcaatccttttaaatttcctacaggaaccggtaaacatgtcgataaatccaaagaaattatagagggatatcattcaatgaaacttgatggtttaataattatcggtggagacggtagtatgcaaattttaaaaagattagccaaagatggtgatatgaaaatagtagcaattccaaagacaatagataacgatgtaggcgcaacagaaagctcgataggttttcataccgccgtagatgtcgcaactcaagcattggataatttacaatccacagcagctagccatagaagatctatgatacttgaggttatgggtcgtgatgcaggacacatcgcacttaatgcgggtatagcaggaggcgcagacattattttaattcctgaattaaagtattcaatagatggaataatcaataaacttaattctatgaaaaaaaatgatattcaacattcattaataatagttgctgaagcagttaaaaaagcggatggttcacgagtagttcataaatatatggatggtgaacaaagacttggtggtatcggagattacattgcccaggaactgatgaaaaaaacagatgtggaatgcagagtaacatcactggccacgtcaaag

SEQ ID NO: 247596 - DNA, 1474 bp, Unknown
  Bacterial polypeptide expressing nucleotide sequence isolated from the Sargasso Sea
ttggtcgtcaaaccttccgtgctcgggtacgggtcgtgcggtacgatcgtcttcgagggtgagatggacggtcgacgcgtcgcggtgaagcgtttgctcgcgcagtttcacgagctcgcgcgcaaagagctcaaggcactcatcgcgtcggacgaacatcctaacattttgagatgtttcgcctttgaagaggactcgaactttgtgtacatggcgctcgagctctgcgcgtcgtctctggctcgcgtcgtggatccggtggacgacgagacgaacggtcaatccggcggcgcggcgaacgcgttgaacattcaatgcgtcgatgccaagaccaaacgtccgacgcccgagtgcatgcgaattctgcacgatgtcgtctctggtctcgccgcgcttcacgatcaaggcatcgtgcatcgagacttgaagccacaaaacgtgttgatcacatccgccggcaggggcaaaatcgccgacatgggtctcgcgaaacgcttaaacatctccgacggcacgtcgttcgagacgcacgtcgtcggtggacccaacgcgaacaacgccgcggggacgtcgggttggcaagcgcccgagcgcttgacgcgcggacggcaatcgagatcggtcgacgtcttcagtctcgggtgcttgatgtactactcgctcaccggcggctcgcaccctttcggcgagcgactcgaacgggattccaacgtcgtcgcgaacaagttcgacgtgtccaagttggatttcttccccgaagccgaggctctggtgcgcgcgtgcatagacgcggatccgtccaagagaccctccgccaaggacatcttggcgcacccgatgtggtgggacgcggagaagaagattcaattcttgatcgacgcctccgatcgagtcgagctggaagaccggatgagcgataggacgatgctccgttcgttggagatgaacgcgcgtcgcgcgatcaggtgcgacgattggacggtgaagcttgacgcggcgttgctcgaaaatctcgggcgctaccgcgagtacgacggttcgtctcttcgagatttactccgcgtgattcgaaacaaggcgaatcactaccgcgaactccctcccaagctccaacgcttgctcggttcgtacccagacggtctgtggcgatacgtctccgttcgattcccgtcgctcttgctcggcgtgcgcgatttcttcgcgccgacggcgtcctccgaacccacgctcgggaaatatttcctcggtctcgaggccgccgtcaccaccttcaccccacccctcgccctcgacgtcgacgacgcggttccacagaccccgctcgtcgccccacaggtcttcccgagccgtcccggccaagccgtgtgcgaattttacatgaagacgggtcggtgtaaattcggcccgtcgtgcaagttccaccaccccgaggacgccggacactgggacctcccccccgttcgcaagaaataaa

SEQ ID NO: 247597 - DNA, 586 bp, Unknown
  Bacterial polypeptide expressing nucleotide sequence isolated from the Sargasso Sea
tatgtctaaaaacgtaacattttgctttgattttggaagtccctactcttatttggcctataataacttaagtgctcttaaagatgctggagcatcagttgaaatattgcctgttttacttggtggtattttcaaggctacaggaaaccaacctcctgcttcagtgccaaaaaaaggtgaatacatgtttaaggatattactcgttggtcaaagaagttagatattccattcaaaatgaatccttactttccaattcttactgttcctcatatgagaggcgcagtattagcacaaaaagaagggcttttagaaaaatacatggaaacgatgtttgagtctatttgggtgaaagcaatgaatttaaatgatcaagaaatattaacccaagttgcaaaccaatctggaattgatgctaatgtattttctgagggcatatcaagtgatgaaacaaaaaacaaattaagggaaaatactgagtttgctattggaaaaggatcatttggtgtgcctacattctatcttgaaaatgaaatgttttggggcatagacagtatgaaatttttaattgaagatattcagaaataa

SEQ ID NO: 247598 - DNA, 1780 bp, Unknown
  Bacterial polypeptide expressing nucleotide sequence isolated from the Sargasso Sea
tcattcacggtgacgacgaatggaagcagcaacacagttaatgcttttagtttgagtggatcaacggtgacgttgacgcttgcgacagcggtgaaccctggtgatgagacgaaggtgacgtatgcgggaacaacagcgctgacggatatcgatgaaggccagcaggcgattgcagcgatgtcggcagtggttgccacgtatgcggtggatgatcaaccgacgttgacgagttcgaaggtaactgcagcgaacacggtgacgatggtatttagtgaggagttagcgggaggagcagctaattcattcacggtgacgacgaatggaagcagcaacacagttaatgcttttagtttgagtggatcaacggtgacgttgacgcttgcgacagcggtgaaccctggtgatgagacgaaggtgacgtatgcgggaacaacagcgctgacggatatcgatgaaggccagcaggcgattgcagcgatgtcggcagtggttgccacgtatgcggtggatgatcaaccgacgttgacgagttcgaaggtaactgcagcgaacacggtgacgatggtatttagtgaggagttagcgggaggagcagctaattcattcacggtgacgacgaatggaagcagcaacacagttaatgcttttagtttgagtggatcaacggtgacgttgacgcttgcgacagcggtgaaccctggtgatgagacgaaggtgacgtatgcgggaacaacagcgctgacggatatcgatgaaggccagcaggcgattgcagcgatgtcggcagtggttgccgcgtatgtggtggacgatactcctacaattctgtcctctaatgtttcatcaaatggtcaatctattgttgttcacttttcagaggccatttcttccgtttctgctacagatctttctttcctggttagtagttccgcgattacgcctagtggcgtgacggcttcttctgacaagagaacgtatacatttgccctttcggcttctgattatattaataagggtaaaatagtgaatgttggatacacccattcatctggtgttaatgatattgcagatttgggtggaacgaatatggctgacttctccggggtctatgttaccaatggatcttctctcgatatagttcctccggagcttgtcacgactaaggttgcctctaatggccaatctattgtgcttacattctcggaggagatttctggttctaatactgttctcgcaaattcctttgatatcacggttaatggtagcgtgattaacccttctggtgtcagtggttcgggtgctatctatactttggctctcggttcttctgactatatcaatcagtttgatgaggttttgattagttatacgcttggtggtggtgctgccttgactgatgttggtggtacgcagcttggtgatatttcatcgacaacggtcataaataacacggatactgctccatatatcattaatcccaaggtaactgctgcgaacacggtgacgatggtatttagtgaggagttagcgggaggagcagctaattcattcacggtgacgacgaatggaagcagcaacacagttaatgcttttagtttgagtggatcaacggtgacgttgacgcttgcgacagcggtgaaccctggtgatgagacgaaggtgacgtatgcgggaacaacagcgctgacggatatcgatgaaggccagcaggcgattgctgcgatgtcggcagtggttgccacgtatgcggtggatgatcaaccgacgttgacgagttcga

SEQ ID NO: 247599 - DNA, 3814 bp, Unknown
  Bacterial polypeptide expressing nucleotide sequence isolated from the Sargasso Sea
aaacggacaaaagaagtacgtcggcaaaaccaagaatggtcaatttcatggacaaggagttttttacaacaaagaaggtaaagttgtttatgcgggtgatttctcagatgggaaacgtgaaggtccgggtcggcttttctgggactcggggaaattacgttatcagggaaatttcaaagcaggtctgttttccggagaaggaaatcttcaccaccaagatggaagcctcaggctaacgggggtctggtccaaaggacagccagagggattgatggtcgtctatgatccttcaggaaaagtaatttatgaaggaactttgaaaactggaaactggaattacgatggatcagggaccctcttcagtgacaaacaattggcggtttatcagggtgatttcaaaaacggacagttttccggaacgggcaaacaattcaacgagaatggtgttttgctttatgagggactattccgtgatggactttatcatggggaaggaaccttatttcgcgggaacggttcaaaatacatttccgggaaatgggtttttggaaaaccacatggtccggttcaattttattttccagataatggccttctccaatatgaaggtgggttgaaaaaattggacgatggaagctttgtctttcagggacaggggaccctttataaccagactggtcaatcggtctaccaaggtttatgggaagacggaacccgttccggaaatgggaccgcatggcttgaagatggttcgatctactctggaaattgggttgatgattacccggatggaaaggggacctacctttttcccgatgggactgaatacgagggaggattcatccgtggaaaaaaacatggccaaggaaccttcaaagaagccgacggattcgtcagttatgatggtgaatggaaggatggtcaaaggtttggaagagggcgggtcaacaaacgtgacagctcgagctacgagggagattggttggatggtaagcctcatggcaacggaatgtttacctatcccgatggacgggtttacactggaaccatgaaacaaggtcttcgacaaggattaggtgaattacggcgcagtgacggaagcatcgcctacgaaggagaatgggacaggaacctgaggcacggcaaaggaaaagcatattctgcttccggactcatcaaatttgatggggactttttcgaaggatatcaaagtggaacaggaagcgagtatcgggatgacgggacactttattatcagggaagttggaaacaaaatctgaaagatggccagggaaagatctattccaatgccggtgacatcatttttgaaggaaatttcaaagctggtcaacccgatggtgaaggccaggagttccgtgaaaatggatcacctgtttattcaggtggattcgtaaagggactgcgtgagggcagtgggaaactttatggaatgaatggggttttgatttatgaggggcaatttaaagccaaccggcgtcatggttccgggaaggcattccacgagaacgggaagattgcctttgatggaaactggaataccaatcaaaaatccggccctggggatcttttcgacgaaaatggagttctcattttccaaggaagctttgtcgaagatctccctgaaggttcgggtaaggaatttcgaaaagacggatctctgctctttgaaggttcctttcttcaggggacacgacatgattcaggaaaaatctattttcctgatggaacagtgcaatatgatggtgaatttttcgaaggtgcccagcatggaatcgggaaagagtaccgttctgatggaactctgatttataaaggaagctggttaagcggaagaagggatgggaatgggaaactgctttcccaagaaggagtgaagcgttttgaaggactttttgcaaagggtctgatcgaaggaaaagggagtgaattccgcgaagatggttctcttatgtaccagggagattttctcaaaggtcaacgtcatggaaaaggacgctacttccttccgggcaacatgctcatttatgacggagattttgctgaaaatacccgacatggtaatggaactgaattcagggaagatggttcgaaggtctaccagggaaaatttaaattcagttccagacatggcaaaggaaagatattttcggcagacgagaaagtgctttttgatggaatttttgaaaaaggaaagcctgatggcaaagggaaagaatatcgttttgacggttccttggcatttgaaggtgagtttgtcaaaggagagagaacggggcgtggattggtttttggaactgatggcagcagacttttcgatggaaattttatcaaaggaagtcgcgagggtgagggaacagaataccgcgaaaatggagacattcttttcagcggttcatttctcaaagatcaacgccatggatcaggaaccatctacggacctgatgaatccatcgtgttcaaaggaaacttcgaccagggaaagccacagggcgctggccaggaatttcgtgacgatgggacaaaggtttatgacggaaatttcgtagaaggccagagacaggggcaggggaaactgttttcgatgcgtggagaattgatctttgaaggagagttccttgccaacctcagggaaggtcaggggattgagtacaacgaagacgggatcaaactttatgaaggtgcctgggaaaaagacctccgtgaaggtcagggagaactttacgattcccagcagagactcgtttttgcaggtctctttatcaagggtgaaccgagtggacaggggaaggaatatcgtaaagatggcggagtgctttacgaaggagactacgaaaataaaaaaagacacggtcagggaacgctttattttatttccggtgagattctttatcaggggacctttgccgaaaacctcaaatccggtgaaggaaaagaatatcgcaaagacggaagtatcatctacgaggggttttggaaggaagacaaacgccacggagaaggaaaaatactcagtaaagaaggaactctggtttatcagggaggctttgagtccggtaaaccgcatggaagcggaaccgaattccgtaaagatggtcagaaattctatcagggcaattggcaggcgggcttaaagcacggtaatgggaaaacctttggtcccaaagggaatctggtttatgaaggaggattccagcagggcaaacctcatggacagggacaggaataccgtggagaaaaagtgcttttctatcagggggagtggaaaaacggaaaaaaagacggctctgggaaactgtattttcctgacgggaaagttgcctatgaggggcaatttgttagtaaccagcgagaaggaaacggcaaggaataccgaaaatccggaacagtgtattacgaaggaaactggcaaaaagggaaaaagaacgggccaggaatcctatttaacaatgatgggaagaaagctttttccggtgtgttcgtcaaagggaaacgtgatggacagggcaaggaataccgaaaagacggaagcttgtattatgccggagaatggagagaagaaatcaaacacggacagggtgcgatatacaacaagaaagaaaagttggtttatacgggacaatttcgagaaggtaaacgtcatggtaaaggaaagcaataccgtgaagatggaaccctctattataacggactctggagaaacaataaaaaacatggtgaaggctctctttttgccaaaaatggtgaacaagttttcacaggaaatttcagggaaggaaggagagttgatatctga

SEQ ID NO: 247600 - DNA, 2482 bp, Unknown
  Bacterial polypeptide expressing nucleotide sequence isolated from the Sargasso Sea
atgaacagcgtaatgcgaaatttgggtttaagtgcgttagccgttgcggtattgacgagttgcgccgccacctcaaccgaaacggcaactcccacgaccacaccacaggcttatcaagtccctttagctcagcctccccaagtttcacaaccgcttacgctgaatcaaattatggcgaaccccgattggatggggattttcgctaaggaagcctactggagcgatgacagtcagagcgttttctttgcgcgccaacccagtgcatcgccattacggaattattatcagcagggcattaatgacagccgcgccgttgaactggccatcgataagctacatgcggctgatcaacagtttggtgtgttcgatagcactaaagctaacaaggcgtatctctaccaaggcaatatttttgttaagcatttaagctctggcaaaatcacccagcttacccgccagcgcactgccatcagtggcctgcgttaccttaacaatggcgatatcgcctattggcaaggggataatgttttccaaatccatcaagacagtggattagtggagcagttggctgaaatcaaaatggcgaaagcgcctgaaggtgtgaaagaacccagcagctacttagccaagcagcagcacagactcattcaatatgtggcgttgcagcaggaaaatgccaaagccaaagaacagtttaagaacgagctgcaaaagagcgatccgaccctcgccgctaacacttggtatctaggtgatgccgaggtggtgtctgagctaagtctgtcgccagacggtcgctatctgtttgtagccctaaccgataaaaattacaccggcagcagtgaacacgacatcatgccaaactacctcggtagcgaaggctatatcgaccctgtgcccgtgcgtgcccgtgtcgcggaagataatccaccaggacagcgctttgtggtgttagacctcaatgagcataaacagatcgatgtaactatcgaaggcttaaccggcttcgatgaagacgttttagctaaggttaagagtgaaaacgctaaagcaaaaggtgagtcatatcaaagtactaaggctccacgtaaaatccagctgatgcaggattggggctggactcaaagcgcgattcaatggcatgagtctgagaacaaattggcggtgatggtcgaagcgaccgataacaaagatcgctggattgccagtgtcgatctggcaaaaggcaagtttatcaccgagcatcgcttgcatgatgatgcttgggtgaactacgactataaccaatttggctggttacccggtacggacagtctgtactatctctctgaagaaacaggttattcccagctttatatcaaggcgaacggtgaacagccccgcgctttgacccaaggtaagtttgtggtgagtgatattaccctatcgcccgatgcaaactacatctactacaaagctaaccaaagccaccctggtatttacaatgttcaccgtgtgaatatcgcctcgggcaaaaacgagcaattaactcagtgggacggtaatttagattacagcttaagccccgatggcactaagttgctgctgaatgcgtctcgccgtacagagccgaatgagctttatattcagcctattggcggtgagttaaaacagctcacgtcatacaccagcgatgcctttaagcaatatccgtggcaagcacccgaagtggttgcagttccttcaaaccatggcgctggccaagtgtatgcgcgggtttatttgccgcagggatacgacaaatcccgcgccgagaaatatcctgccgttgtctttaaccatggcgcaggttacttacaaaatgccgattatggctttagtggttacttccgtgagtttatgttccacaacctactgactcaacaaggttatgtggtgatggacatggattaccgtggttctaaaggctatggtcgcgactggcgcacggcaatttatcgcaatatggggcatcctgaagtcgaagatttaaaagatggcgtgacttggatgggccaaaatgccaacgtggatattaagcgcgtcggtacctatggcggttcttacggcggtttcttaacctttatgtccttgtttactgagccggaattattccaagcaggcgcggcactgcgccctgtggcggattgggcacattacaacgcgccatacacctccaatattttaaacacgccggatgttgaccctatcgcctatgagcgtagctcgcccattgaacatgcccaaggcttgactaagccattactgatcatgagtggcgtgatggatgataacgtgttcttccaagatagcgtgcgcatggtgcagcaccttatcgagctggaaaaaccgatgtttgaaacggctatttatccggttgagccccacggtttccgtcagccatcgagctggttagacgaatatcgccgtatttacaaactctttgaacaagagcttaagtaaa

SEQ ID NO: 247601 - DNA, 1074 bp, Unknown
  Bacterial polypeptide expressing nucleotide sequence isolated from the Sargasso Sea
gatatcgtggtttattaatcggtaatacaattgagattccatcttcaattcaaaataaaacagatattttatttcagtatggtggaagtcctatcggcaatagcagagttaagcttacaaatatagatgattgtgtaaagcgtggatatgttaatgctggtcaagatcccattaaagttgctgcagatcaattagttaaagataaggtagatattttacatacaattggaggtgacgatacaaatacaatggcagcaaaactttctgattatttaaaaaataataattatgaattaacggtggttggattaccaaaaacagtagataacgatgtttttccaatttcacaaactctaggggcatggaccgcagcagagcagggagcgatcttttttgaaaatatttcgaatgaaaatacaaccagtcatcgccaattaattattcatgaagttatgggaagaaattgcggatggttaactgcctataccgcaaaagaatatcacaaaagattaatgaaaagaacttttttacctgagttacttattgaccaatcaagatgggatgttgatgcaatatatataccagaaaaagatttagattttgaatcagagtgtgagcgattaacaaaagtcatggacgaaaaagattctgtaaacatttttttgagtgaaggcgctggaaccagtaccattgttaatgaattaaaagattctggagaatcaataacactggatgcttttggacatgtagcactagatgagcttaaccccggccaatggtttgcgaaacagtttgctaaaaaactaaatgctgataaaacattggttcaaaaaagtggttattttgcaagaagtgcagcaccaaattctcaagacctcgatctaattcaacgttctagcaaattagcagcagattatgcacttcaaggcaaaagcggtgttgttggtatggatgaagatgatcaagatcaacttactttgattggatttgaaaggatcaaaggtggtaaaccttttgattttgaaaagagctggtttaatgatctacttactgatataggtcaacctaaataaa

SEQ ID NO: 247602 - DNA, 740 bp, Unknown
  Bacterial polypeptide expressing nucleotide sequence isolated from the Sargasso Sea
aatcatcactgaacttcgaacgttgcataagagcacgtgtgagtacatcgtgcggagtcgaggggcgtatttcgatcaagggagcgtgagtctcatcatggagtacatggacggcggaacgatgagcgacgcgacgaaagtgctcggacgatgggaagaggaggatctggcggcgacgaccgccatgctcgcggatgggttacattatttgcacacgacgctcaacgtggtgcatcgagacataaagccgattaacgtgttgttgaatttgcgcggcgaagcgaaactgagcgatttcggcgtgagcggatatctcatcgacgcgagcaagtgtcactcgtgggtgggcaccgtgacgtacatgtccccggagcgcattcaaggcgattcgtacgagtacaccgcggacgtgtggagcatggctctcaccatcgtcgagtgcgccctgggaagatttccttacaatccacccgacgtctcgagacggtttagtttttgggatttgctcgacatcgtcgtcaaagatcccgtgccgcgattgcgtccggagcttcagatatcggatgaattcgataatttcgtcgccctcggcctcaacaaggatccgagcggtcgcatgctggcgagaaacatgatcgcgcacccttggattttcggccgagacagaagcgacgacaagcgtcgtctcgccgagctcaccgcccgcgtcttggcgacgaaaaacgcttcgtcgaactaat

SEQ ID NO: 247603 - DNA, 1147 bp, Unknown
  Bacterial polypeptide expressing nucleotide sequence isolated from the Sargasso Sea
catgaaaaatgcattttatgctcagtcaggcggagttacctcagtaataaattcttcagcctttggcctattttccgagcttaaagaaaaagcccctgaggcaaatatctatgttggaaaaaatgggattgttggattaattgaagatgaagtttatgacataaataaatcaaagaagccgctcgaattattacttgaatctcctggaggtatgtttggatcttgcaggtataaacttccagatatagaagatgaaaaattctatgaagatttattcaaaaaattagaaaaatattctgttggttattttttttataatggaggtaatgattcagctgatacctgttataagatttctgaggctgcaaaaaaattaaattattctctaaacgcaattgctattcctaaaactatcgataatgatcttgcggttactgataattgccctggttttggttcagttgctaaatatatagcaacttcagctaaagaagcttccttagatattagatcaatgtgcaaaacatcaactaaagtttttattcttgaagtaatgggaaggcatgctggatggattgcagctgcagcagagttagctaatgaagataataatacttatgttcataaaatattaattcctgaagttccttttaatgaagagtcttttctcaatggagtgcaaaaagatgtagagaaatttggctactcagtaatagtagcatctgaaggtttgaagaatcaggatggagaattttatgcagcatctgctgcaaaagattcatttggacataatcagcttggtggtcttgctccaaaacttgctaatctagttagtgaaaagctcaaacataaatatcattggtctgtatctgactatctacaaagaagtgcaagacatatttcatcagaaacagatattaagcaagcaatatctgttggaaaagctgcagctaatatggctctagaaaataaaagtggcattatgcctgtaatatctagagatagtaataatccatataaatggagcataaaagaatctgaactccaacacattgcaaataaagaaaaaacagttcctgcagattttatttctgaaaatggttttagaatcactcaaaaaggagttgaatatttaaggccattaaca

SEQ ID NO: 247604 - DNA, 1258 bp, Unknown
  Bacterial polypeptide expressing nucleotide sequence isolated from the Sargasso Sea
tatgaaaaaaaatattttttatgctcagtctggtggagttactccagtaataaatgcaactgctgctgggttgattgatggttataaatcaaaaaaaacaaattttgggaagttttacgttggcctaaatggaattgcaggagcattaaatgaagaactcattgatatcaaaaacgagaaggttagtgagttaaataaactcaaacatacacccggaggtgcgtttggttcttgtaggatcaaactaaaagatttgcataaaaatcaagaagaattcaatagaattgcagaagtatttaaagctcataatataggttatttcttttataatggaggaggcgactcgcaagatacaacattaaaactctcctcattttttaaaaaaaataatttagatatcaaatgtattggtttaccaaaaactattgacaatgacctgccaattacagaaaattgtcctggctttggtaccgtagctaaatatatagcaacctctacttacgaggcctctcttgatgtaaaatcaatgtccaatagttcaacgaaagtttttctgctagaggttatgggtagacatgcaggatggatagcagctgctgcaggagtactcaagagttcaactaatgcttttccacatattattttatttccggaaagggtctttaatgaaaaagcttttcttaaaaaagtttcagattctgtaaaaaaagatgcttattgtgtcgtggttacttctgagggaattaaatatagtaacaatgaatttgtatctgcaggaacatctagagatagttttggacatgcacatttaggaggtgttgcgcctaaactttctcaaatgattcaaaacaaactaaaacttaaagttcactgggcagtgtcggattatttacaaagagcatctaggcatataggttcatctgttgatgtcaaacaagcttatgaaattggtaaaaaatctattaattatgcaaaaaatggtattactgacgtaatggtaacaataaaaaaaggaaaaacaaaagcttatggttgggaaataggttatacaaatcttaaaaatgttgcaaacaaagaaaaagtgatgccaaacagttttatctcaaaagatggctttggtattacaaacccatgcaaaaaatatatcctaaatctcataaaaggagaagattatcctccttttaaaaatggagtgcctgattatgctcaactagaattaacaaccattaaaaagaaactcaaaaaatttaaagtatag

SEQ ID NO: 247605 - DNA, 676 bp, Unknown
  Bacterial polypeptide expressing nucleotide sequence isolated from the Sargasso Sea
tctgagagctcacttcgccaagctaaacttcacgtctgaccccagtcaaaatcagaaagtgagcagacacgacttcgagcaaatcaaagtgattggcagaggagccttcagtagagtagtccttgtcaggaaaaaagatacaggcagactttacgctatgaaaatcatgcgaaaggagaaactcataaaagaacagaaaatcaaaccgatcctcaacgagcgtcatattatggaaaggttagttcatcctttcattgttaggctatactggagtttccattcaaagtcagaactgtttttcgtcatggacatttgtaccggaggtgagatgtttttccacctaggaaaagtacagaagtttactgaaaaacaggctctgttttacttttcagagctgcttgaaggtcttgagtatatccatagtaaagatgttgtctacagagacattaaacccgaaaacattttaattgatgtagacggccacctcaaaattgcagattttggactcagtaaaatcattccaaaaggaaaacgcagtttttcattttgtgggtcacctgagtacatgtgcccagaaattttgaaaggatctggccatgacaaacgagcagacatttattgcatcggagcccttttgtatgagcttgttgttggctttcctccccatttcaactag

SEQ ID NO: 247606 - DNA, 1150 bp, Unknown
  Bacterial polypeptide expressing nucleotide sequence isolated from the Sargasso Sea
gtgctctcacgcttcgaatgtcttttctgaaggcattccggccgcttttcgtacggtccagcaaactcgacttcttaccgtcactgccgctgccatactcgtggccgcaccttggtatataagcgttggtattcaaactgattgggagtggacgaaaggcttcttctttgttcataacgtcgggcgattcgtcgctcctatggaacggcattcgggtggcctattgtttcatcccctgacaatgcttgttggcttttatccttggagttgctttctaccacttgctatcttcggagccacacggcaactctggaagacctggcgacagggacagagcccacacattgaaaacttacatgctcctgcattgagtctccttctgctttggatgagtgtctgggtcggtggcttttcacttgccgctaccaaacttcccaactacataatgccggcatatcctgctgccgctctcctggttgctgcacttgccatggaagcagtcaaacgctccgcctggctctacccgcgatggatgggtattggtgttggtggaattgcttttggaggaattgcaacaagtgtcacgattctggttggttcgttttatgggttaactggtagtgagcctgccgcaatcatcggactgattcccgtagctggtgctttttggcttgtctggcgttcacgacaacggccagcctacgctgtaaccaccatggttttcttagggcttctctattcttctttggcagtcggtcctgctgcggcatggattagtcgtgccaacacgcttccagccttaattcgtgaagcccatgcacacgccggcggacacgcacgaataggggcatactctcaaatcacacctaatcttgtgtattacgccaaaggccttgtcaaacgctgggctcatgattctgatcgggctgaaaaagctgccgcttttctattgaccggaccagacgcagtcctcgttatccctgagaatcaatttaatgaactgtccactttcttgccggaaactgctggagtcgtaggccgcgcccgacccttgttcaaaaaccaggactttcttctggtgggcagcatgaaagagtccgcaccagcagtcacgaaacgcaccgcctcggttcggagcataaagaaatga

SEQ ID NO: 247607 - DNA, 188 bp, Unknown
  Bacterial polypeptide expressing nucleotide sequence isolated from the Sargasso Sea
aatgaaagaatccatacaacgcgttgggggcgcgatggcaggaatggttattcctaacatcggagctttcattgcttggggtttgattacagctctctttataccaacaggatgggtacctaacgaaggtctgtctgaaatggttggtcctatgatcgtgagcttgttaccaattcttattggttata

SEQ ID NO: 247608 - DNA, 2191 bp, Unknown
  Bacterial polypeptide expressing nucleotide sequence isolated from the Sargasso Sea
aatggatacggatatttttgaatctttgaatgatcaacagaaactcgcagtaaattgttcgttaggtaacaaattagttttagcgggagcaggtagcggtaaaaccagagttttgacatgcagggtagcaaaactaatttatgactatgatattaaaccgagcaatatactggcattaacattcaccaataaagcatctaatgagatgaagcagagattacaagctattttaaaaatatctactcaaggtctttggtttggtacgtttcatggaatttgtaggagaattttaaaaatacactggaaagaagctggtattaaagattttttttctattctcgatagccaagatcaattaagaatcattaagcgaatagtcaaatcaagaaaacttgatgataacttttatgaccccaagcaactacagtcttttataaatagtcaaaaagacagaggattgagatacgacaaatgtaataacgacgacaagttatatatagatatttataaagagtatgatgaaatttgtagacagactaactctgttgatttcgcagatttaattcttttaacttatgaaatgtttatgaataatcccgagattttgaaatattattcttcgcgttttaaaaacatcatggtagatgaatttcaggatacaaatacactacaatttaatctactaaaattattaaataaagaaaattgctcgttatatgttgttggcgatgacgatcaatctatttatgggtggagaggagctagaagtgagaatataaaatattttaataaacaatttaaagacgtagaaatatttagattagagcaaaattatcgctcaacgactaatattcttgatgtagcaaataatttaatcgcgaaaaataaagatagaatgggcaagaatttatggacaaatacaaatcaaggtaatccagtttatttttatgaagcatataatgatgatgatgagtgttcttttatagtcgataaaattgaacagtttgttgaaagcgggatgaagaggtcggatattgcaattttatacaggtctaattttttatcacgaaggtttgaagaagagcttaactctaggtctgttccgtacaaaatatttggtggttttagattttttgagagagctgaaatcaaagacgttttggcatatctcagagttgctgtaaatacgtcagatgactcgtcttttgaaagaacaattaataatccccccaggggtataggtgaaaaaagtatttctatattaagagaggaagctaaaaaacataatatttctctatgggaatctatccacaatgagaatacactgtcattgatgagttctaggtgtgtagcctcgctcaacaattataaacaaatcatagattcattaactagcttgctaagtgagttaaaactcaaagaaattattgaaaagattatagatatttcaggattgactaaatattacgacacaaaaaagaatgaggaatctctgtccaaaatagaaaatttagaggagcttgtttctacagcggagagatttactcataataatttagatagcgaaaatctcatccaagattttcttgataatgcatctctagaagcaggagagtatcaatcgaaattggatagtgatcctctgcagttgatgaccatacattcagcaaaaggtttagagtttccggttgtctttttaacaggtcttgatgagggaattttccctaatccaaatcgtgatatcctgcctggatttttagaagaggagagaagactctgttacgttgctattacaagagctatggagacgctttttctgacgtgctctaatatgagatatatgcatggctcatcatcagattttattccatccagatttataggtgaaatacctaatgaacttattgagccaattaaaactgaatttaaaaagaaatttggtaatgataattataccgagagtaatcattatgacgaattttctcaagaggagatctatgacgatatttctcaggataacgtaattccttttattcgagttggtcaaagagtaaaccatcttaaatttgggcatggtgtaatactaagttatactggtaaaaaagatgatcttaaagtacaagttgattttgagaaatatggaaaaaaatggttagtactgtcgtatacacaattggaattcattaattaa

SEQ ID NO: 247609 - DNA, 988 bp, Unknown
  Bacterial polypeptide expressing nucleotide sequence isolated from the Sargasso Sea
tatgcaagcggcggttattcgcgaaccgggtgggccagaaatgttcgagattcaaacccttcctgatcctgtaccagggccggacgaagtcttggttgagattaaagccaccgcattgaatcgggctgatctcgcgcaacggcatgggaattatcctgctccggtcggaataagagatgatatcccgggtctagagatggccggaataattatcggggtaggagaacgagttgttggttgggaagaaggggatcgagtaatggctctcctcggtggtatgggttacgccacacacatcgcagtgcatgagaggatgctgatgcctgtaccggagggattgtctttcgaggaagctgctggcataccagaggtgtatctaactgcctacgacgcaatgcatctgcaatgcgaactagtaatgggtgaagtggcactgatccacgcagctggttcgggagtcggcacggcggctgtgcagctcgccgccgcccagtcatgtctcactttcggcaccgccggatcggatagcaagctcgaaaaagcgaaggaattaggcctcgatgttgggattaactataattcccagaattttcgagaagtagttatggaggtcacaggtggtaatggggcagatgtgatactcgatgtgataggtgctccatactgggatgataacgtgcggtcactcgctactttaggaagactcgtactagtcggggcaatgggtggaggcacgctagaccaagccaaacttggagcactaggtaataaacgggctattgtgagaggtactcggcttcgaagtcggacattcgaagaaaaagcaacagttgtgcaaggttttgccaaacggattctgccacttttcgcaagaggtaaattgcagtcaatagtcgaccacgtgtttccgttaaatgaagtggccgcagcgcacagctatatggaaacgaacgtgaactttggcaaaataatacttgtcaatgactag

SEQ ID NO: 247610 - DNA, 1087 bp, Unknown
  Bacterial polypeptide expressing nucleotide sequence isolated from the Sargasso Sea
aatgaataaaaaaataggaattttaactagtggaggggattgcggaggccttaatgctgcaattagatcaattttttatagagcaaaaaataaatacaaaatggatgtatatggaataagagatggtactgcaggcctaatcaaacgtccagttgatgttatgcaactaactcataaaacttttggaggatacttattaagacaaggtgggacttttttaggatcaactaataaaggcaatccttttaaaattcctacaagtaatggcaaacacgtcgataaatcaaaagaaattatagagggataccactcaatgaaacttgatggtttaataattatcggtggagatggtagtatgcaaattttaaaaaaattagccaaagatggtgatatgaaaatagttgctattccgaagacaatagataacgatgtaggggcaacagaaagctcgataggctttcatactgccgtggatgttgcaactcaagcattggataatttgcaatccacagcagctagccatagaagatctatgatacttgaggttatgggccgtgatgcaggacacatcgcacttaatgcaggtatagcaggaggtgcagacattattttaattcctgaattaaagtattcaatagatggaattattaataaacttaattctatgaaaaaaaatgatattcaacattcattaatcatagttgctgaagcggtcaagaaagaggatggttcacgagtagttcataaatatatggacggtgagcaaaggcttggcggtattggagattatatagctcaagaattgatgaagaaaacggatgttgaatgtagagtaacatcacttggtcacgttcaaagaggagctcccccaacagcgagtgacagaatattagctagtgcttttggggtttacgctgtagatttattaaaccaaaaaaaatttgatcgaatggttgcatggagagataggagagtagtagatgttcctattgatgaaggaattaaaacttacaaaaatgttgagagaaaagactctttagttgaaacagctctctcattaggaatttatttaggagacgatatttaa

SEQ ID NO: 247611 - DNA, 1559 bp, Unknown
  Bacterial polypeptide expressing nucleotide sequence isolated from the Sargasso Sea
catgaaagagtacgaagcttcaaacatccgcaatttggccctcatcggtcatggatctgcgggcaaaaccatccttgccgaatcgatgcttgcctgcggcggggcaatcacccgaatcggaagcgtagagcagggaagcacggtttcggattatcatgaagatgaacaacagcggcagatctcgattcacaccacctcgatgtatgccgaatggaagtcctgtaagttgaacatccttgattctcccggttatgcggattttgttggagaagcgctttcggctctgagggttgccgattctgcgatcatgaccgtccacggtgcccatgggatcgagctcggtacggagcagatgtgggaaaaagtctgcgatatgaaaatgccgaccctggtggcggtgaatgtgcttgatgcggaatacgtcaaatttgatcaaatcgttgaggatctcagcaatcaattcggaaaacgttttttcccgatgactttaccggtcaaccccggtccggggtttgaccagttggtcgaagtcatgggccgaaaacttcaccgttatgacttgggaggaatcggtcagttcagcacggaagacctgcccggagactggcaggatcgtgtggaagaattgcaccagcaattgatggaaaacgttgccgagtctgatgacaccttattggagaaattttttgaggagggagaactgagcgacgatgaaatcagcaccggcctcaagggggcattgagtcaacagactttcatccctgtctttgccgtttcctctgcaaccagtgtcggcgttccacagttgatggattttctagccgctcatgcgccctcaccccgggatgtctcctcggcagaggctagccgcagtgacggtgaaaccctcgaggtcggactggaggatggttccccgctgctcaacattttcaaaaccgtcagcgagccgcatgtcggggaactttcattctttcgactatacagcggcaatgtggagaccgggatggacctcatcaacaccggccggaatcatcaggagcgggtcggacagattttccagatgaatggaaaggaacgaactcaggtcaaatcgattcaggcgggggaccttgccgcttttgtcaaactcaaggatacccatacctgtgatacgttgtccgatccgaaaaccaaactgaagcttcccgggatcgattttcccgctccgaatctgagcggtgcccttaaactgaaatccaagggtgaggaagagaaaatgtcccaggggctctcgacgcttcatgaagaagatccgactttcatctacagtcctgatccagaacttcaccaaaccctgattttcggacagggggagttgcatcttcagatcattactgaacggctcaagagccggtttcaggtcgaagtcgaactcgtgcaaccgaaaattccctaccgtgaaacgatccgcaagaagggggaatcgaaataccgtcacaaaaaacaaaccggaggagcaggacagtttgccgaagtctggatgcgtctggatcccggcccacgcgacagcggcatcgatt

SEQ ID NO: 247612 - DNA, 1225 bp, Unknown
  Bacterial polypeptide expressing nucleotide sequence isolated from the Sargasso Sea
catgaaaaatgcattttatgctcagtcaggcggagttacctcagtaattaattcttcagcctttggcttattttctgagcttaaagaaaaagtccctgaggcaaatatctatgttggaaagaatggtattgttggattaattgataatgaagtttatgacttaagtaaatcacaaaaaccacttgaacttctgctagattctccaggaggtatgtttggatcttgtagatataagctcccagaaaaagaagacgaaaaattctatcaagatttgtttaaacaattagataaatattctattggccattttttttataatggaggaaatgattcagcagatacttgttataagatttctgaagctgcaaaaaagttaaattattcccttaatgcaattgccatacctaagactatagataatgatctagcaatcactgataactgtcctggttttggctcagttgctaaatatattgcgacttcagctaaagaagcatccttagacatcaaatcaatgtgtaaaacatctaccaaagttttcattcttgaagtaatgggcagacatgctggttggatagcagcagcagctgagttagctaatgataatgaaaatacttatgtgcataaaatattgattcctgaaattccattagatgaagaggcttttcttgctggagtacaaaaagatgtagaagagttcgggtattcagtaatagtagcttctgaaggtttaaaaaatcaaaatggtaaattttattcagcatcagataaaaaagattcatttggccataatcaacttggtggtcttgcgccaaaacttgctaatctaatcgataaaaagcttaattataaatatcattggtctgtttctgattatttgcaaagaagtgcgagacatatttcttctaaaactgatattgaacaagcgatctctgttggaaaagctgcagcaaatatggctttgaacaataaaaatggatttatgcctgtaatatgcagagacagtaatagtccatattcatggagtataagggaatctgagcttatccatattgcaaacaaagaaaaaactgttcctgcaaattttatttctgaggatggttttagaatttctcaagatggtgttgattacttaaaaccattaacaattggtgagagttatcctaaatatcgagatggtattccagtttatgaacaactggatttacatttagctgaaatttaa

SEQ ID NO: 247613 - DNA, 121 bp, Unknown
  Bacterial polypeptide expressing nucleotide sequence isolated from the Sargasso Sea
atgaaagaatccatacaacgcgttgggggcgcgatggcagggatggttattcctaacatcggagctttcattgcttggggtttgattacagctctctttataccaacaggatgggtaccta

SEQ ID NO: 247614 - DNA, 472 bp, Unknown
  Bacterial polypeptide expressing nucleotide sequence isolated from the Sargasso Sea
atgaaagaatccatacaacgcgttgggggcgcgatggcaggaatggttattcctaacatcggagctttcattgcttggggtttgattacagctctctttataccaacaggatgggtacctaacgaaggtctatctgaaatggttggtcctatgatcgtgagcttgttaccaattcttattggttatacaggtggaaaaatggttcatggacacagaggtggtgtaattggtgcagttgtaacaacagctattgttgttggttcaactactcctcaattcttaggagctatggccatgggtcctttggcagcatgggtacaaaagaaagtagacggagctttgcaacctgcaactcctgaaggctttgagatgttagttgataacttctcattaggtatccttggaacaattcttgcggttgtaagcaagaacgttatcggtccaattctgcaaggaataaccgattctagga

SEQ ID NO: 247615 - DNA, 784 bp, Unknown
  Bacterial polypeptide expressing nucleotide sequence isolated from the Sargasso Sea
atacaatttaactgtggtggattgccaaaaactgttgataacgatgtgtatccaatatctcaaaccttaggtgcatggacagcagcagagcaaggggctgttttttttgaaaacattgtcaatgagaatacaactagtactaggcaattgatcatccatgaggtaatgggaaggaattgtgggtggcttactgctcaaacggcttttgattatcgggatagaatgaaaaatagagagtttattcctgaactgcttatcgatcaaagtagatgggatatagatgctgtttatatcccagagtcagattttgattttcaaactgaagtaagtcgtctgaaagcagtaatggatgcaaaagatggagtgaatgtatttttaagcgagggtgctggtttagaaacaatagtgcgagaaatggaaggcagaggacaagaaattcccagagatgcttttgggcatgttcgattggatgatattaatcccgggaagtggtttgcgaagcaattctcaggtgcgttaggggcagaaaaaacattagttcaaaaaagtggatattttgctcgctcagcaaagcccaacaatagagatctccaattaatacaaaaatctgcgcacatagcagtagagtacgccgttgctcaaaaaaatggtgtagttggtaaagatattgataataataatgagattggattaattgaatttgctaggattaaagggggcaaaccttttgatccaaatacagattggttttgcagtctattgaatgaaattggtcaaaaataat

SEQ ID NO: 247616 - DNA, 1645 bp, Unknown
  Bacterial polypeptide expressing nucleotide sequence isolated from the Sargasso Sea
tatgtcagctaaagatgtaaaatttggagatagtgcaagaacacagatgcttgatggtgttaatactcttgcaaatgcggttaaagtaactcttggaccaaaaggtaggaatgtagttttagataagtcttttggagcaccaaccgtcactaaagatggtgtatcggttgctaaggaaattgaacttgaaaataagtttgaaaatatgggtgctcaaatgcttaaacaagtagcatctcaaacttctgatgaagctggtgatggaactacaacagctacagtacttgctcaatcaatagttaacgaaggtaataaatcagttgctgcaggtatgaacccaatggacttaaaacgcggcattgataaagctgtttctgctgcagttgagcatgttaaaggcttaagtgttccctgtactgacgataaggcaattgcacaagttggtacgatatcagctaatggtgatattgctgtaggtgaaattattgcagaggcaatggaaaaagttggaaaagaaggtgttattactgttgaagaaggtagtggcatcgaaaacgaactagatgttgttgaaggaatgcaatttgatagaggttatctatctccatatttcataactaatcaagataacatgacagttgaacttgattcaccttatatactcttatttgataaaaagatttcaaatattagagatttgttaccacttcttgaatcagtagctaaagctggtaaacctcttttaataattgctgaggatattgaaggagaagcgttagcaactttagttgtaaataatcttcgaggtattgtgaaagcggcagcttgtaaggcaccaggttttggtgacagaagaaaggctatgttagaagatatagcaattctaactggtggcacagttatttctgaagaagttggtttatctcttgaaggtgcttctgttgaagaccttggaacatcaaaacgtgtagttttgaacaaagataatgcaacaataattgatggtgctggtgatgaaaatgcaattgcaactagagttaatcagattagagctcaagttgaagagactacttcagattatgacaaagaaaaactccaagaaagagttgcaaaattagctggtggtgttgccgttatcaaagtaggcgctggttcagaggtcgaaatgaaagagaaaaaagcaagagttgaggacgcacttcactctacaagagcagctgtagaagaaggagtagttcctggtggaggttctgcactgataagatgtttagaagctgtcgcaaaattaaagggcgataatgatgatcaaaatgttggaatcaatatagctagaaaagcatttgaagctccattaagacaaattgtatctaacgcaggcgaagagccatctgtgattgtaaacaaggttattgatggaaaaggttcttttggctttaatgctgccacaagtgaatttggtgacatgatagagatgggtattcttgaccctgcaaaagtaacaagaactgcacttcaagctgcaggctctgttgcaggtatgatgattactactgaagcaatggttacggatgttccaaaggatgatactcctatgccaccaatgccagatatgggtggtatgggcggtatgggtggcatgatgtaa

SEQ ID NO: 247617 - DNA, 500 bp, Unknown
  Bacterial polypeptide expressing nucleotide sequence isolated from the Sargasso Sea
tggagcatcagtagaaatattgcctgttttacttggtggtattttcaaggctacaggaaatcaaccacctgcttctgtgccaaaaaaaggtgaatacatgtttaaggatatcacgcgttggtcaatgaaattagatattccattcaaaatgaatccttactttccaattcttactgttcctcatatgcggggtgcagtattagctcaaaaagaagggcttcttgaaaaatacatggaaactatgtttgagtctatttgggtgaaagcaatgaatttaaatgatcaagaaatattaactcaagttgcaaatcaatctggaattgatgctaatgcattttctgagggtatatcaagtgatgaaacaaaaaataaattaagagaaaatactgaatttgccattggaaaaggttcttttggcgttcctacgttctatcttgaaaatgaaatgttttggggcatagatagtatgaagtttttaattgaagatattaaaaaataag

SEQ ID NO: 247618 - DNA, 889 bp, Unknown
  Bacterial polypeptide expressing nucleotide sequence isolated from the Sargasso Sea
aatgaaaattggtcaatttattaaagagagatatgaaatagttgaattgctcggtgagggtggaatggcttttgtttataaagcaaaggatatgcaattagagaggatggttgcaataaaaacacttaagcctaattatgtagaacaaactacatttgttgaaagatttaaaagagaagctcaaacagcagcaaatttaaaccatccaaatattgtacaaatttttgactggggcattgaggaagagccctactttgtaatggaatatattgagggaaatactttaacatcaattatttcaaatagaaaaactataagtttaagcgatgttttatttataggtgcacaagttgcaaatggtctccaggcagcccactcacaaggtcttgttcacagagatataaaaccgggcaatataatgattactccaagcggtaaagtaaaggtaactgattttggtattgtttccattcaagatgaagaaagtgacataactaaaactggttcaatattaggaacagcaagttatatatcgcctgaacaagcgcaaggaaaagctgtatccgttggatcagatctttactccttaggtactgttctttatgagttgattacaggaagccctccttttgaagctgatactccaatagctacagcaacaaaacatttaacagaaaagccagaaaagccatctaaatacagacaagacctaccaagaggaattgaaaatgcaatattgaaactacttcataaaacacctagggacagatttaaaagtgcagaggatttaagagctgttttgctgcagcaaagaaatcaattggaaatggtacaaactcaagaaagtttggttgatcttacaaaccctaaaattaaatataaatttact

SEQ ID NO: 247619 - DNA, 628 bp, Unknown
  Bacterial polypeptide expressing nucleotide sequence isolated from the Sargasso Sea
atggacgatttttataaaaacataatcatttcattacttacttttagcgttggttgtattatttccttggtgagtccaaaaatcctaaaaaaggttttaaggagaataacctctgcgactaaaagcaaaactgatgactacatagctattcttttaattgagactattaaacctttagggtttatcttaagtttcatcgttgcatggaaagtcttactaattggtggaatagttgataagacattaattggtattagtaagtttctatgccttatttatattgtcagatttataaatagagtatttttaaaaataatacaaagatgggcaagtaaaatcaatgatcaatctatcagtgaaatgattcgttcacttagtccaatggttggggcatctgtttggagtctaggagttattttttatcttcaaaatatgggagtccaaatggcagccatttgggctcttttaagtgcaggaggtataggagctggacttgcattaaaggaaccagttcaagagttcttcgaatacataacgatcctcctagataaaccatttcaaagtggacagttcattcatattgatgggatctgggcaaaagttgagagagtaggtgttagatcaacac

SEQ ID NO: 247620 - DNA, 1192 bp, Unknown
  Bacterial polypeptide expressing nucleotide sequence isolated from the Sargasso Sea
atgaaaattgcttttttaacagctggtggtatagcaccttgcctttcatcaagtattggtgcgcttatacaaaattataatcgcgtattaccaaattctgaaatgattggctacctaaatggttataaaggtttactgctaggtaagtctattgaattccctgattctgttaaaaataaatatgaaatactttttgaatatggaggtagtcctataggcaatagccgagtgaaacttactaacttaaaagattgtgttaagaacaattatgtaaaagaaggcgaagatcctttgcaaattgctgcagagcagctaaaaaaagacaaagttgatattctgcataccattggaggagatgatacaaatacaatggcagcacaactatcaggatacttaaagaataatggatacaatttaactgtggtaggattgccaaaaactgttgataatgatgtgtatccaatatctcagaccttaggtgcatggacagcagcagagcaaggggctgttttttttgaaaacattgtcaatgagaatacaactagtacgaggcaattaatcatccatgaggtaatgggaaggaattgtggttggcttactgctcaaacggcttttgattatcgggatagaatgaaaaatagagagttcattcctgaactgcttatcgatcaaagtagatgggatatagatgctgtttacatcccagagttagattttgattttcaagctgaagtaagtcgtctgaaagcagtaatggatgcaaaagatggagtgaatatatttttaagcgagggtgctggtttagaaacaatcgtgcgagaaatggaaggtagaggacaagaagttcccagagatgcttttgggcatgttcgattggatgatattaatcctgggatgtggtttgcgaagcaattctcaggtgcgttaggggcagaaaaaacattagttcaaaaaagtggatattttgctcgctcagcaaagcccaataacagagatcgccaactaatacaaaaatctgcgaaaatagcagtagaatgcgcggttgctcaaaacaatggtgtagttggtaaagatattgataataataatgagattggattaatagaatttgctaggattaaagggggcaaaccttttgatccaaatacagattggttttgcagtctgttaaatgaaattggtcaaaaataat

SEQ ID NO: 247621 - DNA, 1258 bp, Unknown
  Bacterial polypeptide expressing nucleotide sequence isolated from the Sargasso Sea
catgaaagtaagaaatgctctatacgctcaatctggaggagtaacttcggttataaatgcaacagcgtgtgcagttatagagtcgtcaaggaagtcaaaaaaaattggaaaagtttttgctggaaaaaacggaatagtaggaatactccaagaagatctaatagacacaagcattgaagacattaaagaaattaataaattaatgcatactcctggaggtgtttttggttcttgcaggcataaactcaaagatgcaaaacagaataaaagagaatatagaagattaattgaagtctttaaagcgcacgatatcggatacttcttttataacggtggtggcgactcacaagacacatcaaacaaaatagcccaatacacaaaagaagagggatttcccgttacgtgtataggtatacccaaaactatagacaatgatttgccttttacagacaactgtcccggttttggatccgttgccaaatatattgccacttcaactaaagaagcagctttggatgtaaaaagtatgtccagtagttctacaaaagtgtttattcttgaagtcatgggtagacatgcaggttggttggcagcttcgtcaggtcttgctcaatcaaacaataactctgctccacatattattttgttaccagaagttccttttaatgaaaataaatttttaaaaaaggtaaaagattcagtaaaaaaagaaggatactgcgtagttgttgtttctgaaggcgcaaaatataagaatggaaaattccttgccgatgctgggacagtagattcttttggtcacaaacaattgggcggtgttgcgccaagaattgctgcattgataaataaaaaattaggattgaaatatcattgggcagtgtcggactacttacagcgatcagcaagacacatttcgtctcaggtagacttagatcaagcttacgctgtcggaaaagccgcagttgagtttgcagccgcaggcgaaaattcaataatgccaataattgttaggaagaaatctaaaccctattcttgggatataggaaaagttaaattatctaaagtagccaatgttgaaaggaaaatgccaaaaaatttcatctcaaaagatgggtttggaatcactcaatcatgtaagaattatcttagtcccttgattcaaggagagcctatgactccttttaaggatggagttatccataccgcttctttaaagaacaggttggtgagaaagaaactcagaagttttaaaatttaa

SEQ ID NO: 247622 - DNA, 1156 bp, Unknown
  Bacterial polypeptide expressing nucleotide sequence isolated from the Sargasso Sea
atggcgccaaagaatgtattctatgcacaatccggaggagtgacttcagttatcaatgcaagtgctgcaggagtgattgaaacagcaaggaaatatcctaagaagataggaaaaatttttgcaggaaagaatgggatcctaggagctcttgaggaaaatttaattgatacaagctatgaaacatcaagacaaattgagttattaaaatatacgcctggaggagcgtttggctctgcaagatacaaactgaaaggaataaaagaaaaccgaagagaatatgagcgattgattgaggtctttaaagcacatgacattggttatttcttttataacggtggtggcgattcgatggatactgcgcataaagtttctcagattggctctgagatgggttttccaattgcatctatcgggattccaaaaactatagacaatgatttaccgattacagatacatgcccgggctttggttcagttgccaagtacattgctgtttcaacaaatgaagcaagtcttgatgttgtttcgatggctgaaacgtcaaccaaagtttttatattggaagtcatggggagacatgcaggatggatagccgcagcgggaggcttgatatcaaagaaaagaaatgatccgccccatattattctctttccagaggttccatttgaaaagaaagactttcttaagcatgttgataaatcagtcaagcaaaatggctattgcgtcatagtagcaagtgagggagcaagatataaaaatggcaaattcctagcagatgctggaagcaaagactccttcggtcacaaacaacttggcggggttgctccagttcttgcagatatgataaaaaaatcactcggatacaaataccattatgcaatcgcagattatcttcaaagatctgcaaggcatctcgcttcagaggtcgatttaaaacaagcttacgcagtgggtgaaatggctgtcaaagcagccataaaaggtgaaaaatcaaaaatgatgacaatcgtacgaaagtcaaataaaccctataaatgggtaattgggtcaacagatatatcaaaagttgccaataatgaaaaaatgatgcctaagaaattttttacctctaatggctatggtattaccaaagcccctgtaaagaaaatatatgatg

SEQ ID NO: 247623 - DNA, 1018 bp, Unknown
  Bacterial polypeptide expressing nucleotide sequence isolated from the Sargasso Sea
attgcatcgaagaataatcgttaatctattgaatagattatatcgtcgtgctaatcctaaagaattacccgattcgattaatagtataatcatttttgcacaagaaaaattgggtgacgcaatcttattgcttccatttttaaatgctttacataaacgttttccggatgcagtaattgatttatgctgtaccagctacaataaaaaaatatttgaagggattccattcattagaaactgtataagctacagaccattcaatcttaaatttgcaaaactaattagatctgaaaaatatcaaattttatataatccaaagagcggtccttcatcaacttttcatcatttagcaaatacaatcaaagctgatgtaaaaatatgcttagataacgtatataataatccaatctataactatcatctacccaatgaagagtctaaacacattgctgagaagtattgtgaattgttatttaaatatggcttaactacaccagtagataattggctacctgattatttttatcaattcccatcttctgtcaaagaaaaaaagtatgttgcgataaacatgagcgctggacaccaagataggagttttcctatagataaatggaaaaaggtaatcacctatattttagaagatgatctagaaatgcagattgctttattttcatcagaaaaagaaaaaaatcaagcaaagctgataaaaaatatattcaaagaaaggatacattatcctttagaatcgcctaatctttattacgcctcaggtatacttaatgaggcagaaattttgatttcagttgatacatctttgattcatttggcagcagcattaaacaaaccaatcatcggcctttacaacaatgataaagtagctcatgcgcgttatcatccatataataatattagcgactcagtgatttcttctactaaatatataagagatatacagccagaatcagtaatcaaattgtataaatcttataaaaataaatccaaaccaagtagttaa

SEQ ID NO: 247624 - DNA, 541 bp, Unknown
  Bacterial polypeptide expressing nucleotide sequence isolated from the Sargasso Sea
aggtacaaatacaaaaataggctctaatgtatcaattgagtgtgctgaaataggaaaaaatgtattaatatattcaggagttaaaatagggcaaagtggttttggatttgcgccaactaaaaaagggcatattaaaattcctcaagtaggaaatgtaattattggagataatgttgaagtgggatctaatacatgtatagataggggtagtcatggatctacatctattggagaaggtacatatatagataatctagttcatattgctcataatgtttctataggtaaatattgtgctattgccgggcaagttgggattgctggaagtgcagtaatagaagattattgtatgtttggagggcaagttggcataggtggtcacataactattggtcaaggtagtcaggcaggaggtcaagctggtattacaaagagtatttcgccgggatcgaaagtaagtggtactccagcactacctttaagtcagtatcataggcaaacattaaaacttaaaaaactaattagaggtaaaggtaaataa

SEQ ID NO: 247625 - DNA, 1000 bp, Unknown
  Bacterial polypeptide expressing nucleotide sequence isolated from the Sargasso Sea
aatgaaagcagatttgaagaaaatacttcttttaattattatctggtctttaggggttatttcaaacataaaagcagaaactttagatatcaaagaaattttagaaattattcaaaaagatcttagaactttggagagagcagtttattcagagtcattttctaaatcttcaaaaagcaactccaatcaagaaatatctggccaaaatgcagaagatgtacttacaaaacatttattaaaactttcagagattgaaaaacaatttcaagaattaacgaacaaatatgaagaaataaatttcaaattggataaattatcttcaaggttgtctaaagttcaagcagataatcaattacgcttccaaaacttagaaagcaaaacaataataaataatactgaaaacagttctttaactgcagtacctaaaacagaaacagggcaacaaaaaattctaccaggttcttcacaaccccaagatcttggaactatatcttacaaagatatgactagcacaacagaaaaacaaattgttcaatcagttgacacaaccaaaactgtttctacagaaatatttcaatctgaagaacaaatattgccagaaggaactccaaaagaacaatatgaatttgctacaagttttttaaaagttggagattataatatggctgagagggcatttagagagtttgttgataataatcctgacagtgaattttcaggaaatgctcaatactggtatgctgaaacatttagaatcagacaattgtatacagatgctgcttcagcatatttagaaggttatcaaaaatatcctaaaagtgaaaaggctcctataaatttactaaaacttggagtatcattggtacagataggagaaaaagatcaaggctgtttaatgattgcgggtgttaaaaaacaatatccaaatgcaactcaatcagtgcttcaaaaagcaaaatatgaagaaaagaaatttgagtgcaaaaaagaaaattcgtaa

SEQ ID NO: 247626 - DNA, 625 bp, Unknown
  Bacterial polypeptide expressing nucleotide sequence isolated from the Sargasso Sea
ctgtccgaaacggacaagacctttgagctgcgctggcgcagcggctcgctgaagtatcaggatttcaagctgctcagcgaaggcggcattgccaagctctattcggcgttcgacgaaaacctgcggcgcacggtcgtctacaaaaccctgcacgatcacctgcgcgaggatgagatcgaaacacaacggttcctgcgcgaagcccgcgtcactgccaacatcgcccaccccggcaccgtgccgctctacgaactcggccgcgaccgcaacggcaatttgtttttcacgatgaaacacgtgcgcggccgcgacctgcgcaacatcatcgatgccctgcacgacggcgatcccgccaccaccaccgcctttccgttgcctgcgctgatcgacatcctcacgcgcgcctgtgaaaccgtcgcgcacgcgcactcgcgcggtgtgatccatcgtgacctcaaacccgccaatattttgaccggccaatttggcgtcacctacgtcattgactggggactcgccaaagtctggggcgaaccggatattgcccatcccgagatgggtcacgatgaagatcccgccctcacgcctgtggggcgccgttacggcacgcctttttacatggcgc

SEQ ID NO: 247627 - DNA, 277 bp, Unknown
  Bacterial polypeptide expressing nucleotide sequence isolated from the Sargasso Sea
ctgcacagttacggaatcgtccatagagatttaaaacttgaaaacgtcatgatgagtgataacacagaaaccagcgtccctaaactagttgattttgggctagcgaaaatgattggacccaacgagcttgctttagagcctttcggaaccctcggatacgtagcaccagaagtgctccagaaaaagccctactcgttcagctgtgacctttggagctacggctgcataatctacgcgcttctctcaggctctcttccattcgaccacgaatcataga

SEQ ID NO: 247628 - DNA, 943 bp, Unknown
  Bacterial polypeptide expressing nucleotide sequence isolated from the Sargasso Sea
gccatcaagatgatgaaacgcggtatcacctcgcgatccgcacaacgccgattcgaattcgagtcgcagctgctcgccaggctgcagcatcccgggattgcgcaggtctatgaagccggcacgcatgacgatggtgacggaggtgttccctacttcgtcatggagtacatccccaacgccaaggaactgaccgactacgccgtcgagaagaagctcaacacgcgagagaggttgaggcttttcacgcaagtctgcgaagcggtgcagcatggtcacctcaaggggatcgtccatcgcgatctgaagccgggcaacattctcgtcagcgggggaggccatccgaagatcattgatttcggtgtggctcgcaccacggacagcgacatggcgctctcgacgatgcagaccaatgtcggtcaattgatcgggacactccagtacatgagtcccgagcagtgtgcggcggattccagcgacatcgacgcgagaagtgatgtctatgcactgggtgtgattctcttcgaattgctgacaggtcagatgccctatgacgtcagtggctccgctgttcatgaggcgattcgaatggtctgcgaggttgatccagccaggatctcaaccatcaacaagaatctcaagggcgatatcgagacgatcgctctgaaggcgatggagaaggacagagaacgccggtatcagagtgcggtcgaacttcgaagggatatccagcatttcctggacaatgaaccaatcgaggcccgtccgaccagcccctggtatcgggtccgcaagttcgtcggcaggaacaagactcttgtgacgtcttccatcatcatctgtgtgcttgtcatcgcaggcctgatatggacttcgatcgctctgggcgtgatctcaagtcagcggaacaagctggccgtaaccaatgatgcgttggttgagtcca

SEQ ID NO: 247629 - DNA, 962 bp, Unknown
  Bacterial polypeptide expressing nucleotide sequence isolated from the Sargasso Sea
tcttggaagaggcggtatgggagctgtctatgaggctgaacatcaggaaacgggcgaacacgtcgctgtgaaggttcttgcgtcccatcttgctgatgatcttgggctcaaagaacgtttcgactcggagatacaaacactcaaaccacttcgttcccctgggattgtccagcttatcgcttacggggaagacgatgggcaaccatatttcgcaatggaactagttcatggccaaagcctggagcgaattattcgtggaggaagaatatttactccggaagaagttgttgacttatcgattgaaatagcccgttccctcaaagttgcacatgaccatggaatcattcatcgtgatctgaagcccgcgaatctccttgtgcccgacgacccacatcaagccaacgcaggggtgaagcttgccgacttcggaattgccaaactgtttggtgccaccagccaaacagcgcatgggagtatcgttggtactgcagaatttatggcacctgagcaggcagccggcaaacctctcgatgctcgtgcggacctttacacgcttggattagtcatgttcaccatgattgctggaaagccacctttccgaggatcacaattaacggaaatcatcacaaaacaacttcgcgaggccgcaccacgggtaagtagtttccatcataatattcctaaagaacttgacggtcttatcgatgaacttctcgccaaagatcctgccaagcggcctgcaagtgcactagctgtcggacgacggttgactgcaatacgggacatactctcgcaattgcaaaaaccaatacaagacaacatggggggtggccctccctccctcatcattcaaagtgagtcagattctgccgcgccaacaaaccatgatcggtcatcctcactcacgaaagccgcacccgaaaaaaaataccacaagcaagtggttcttcatttgatttgtt

SEQ ID NO: 247630 - DNA, 640 bp, Unknown
  Bacterial polypeptide expressing nucleotide sequence isolated from the Sargasso Sea
gatgggcaaaggctccttcggcgttacttaccagatgcataacaaggttgataaacagctgtacgcggtgaagatgatcagcatcaaggactttaaacggactggcggcagccctgagagactccaccatgaggcgatgcaactcgcacagctgaatcaccagaacattgtgcgctactttacggcattcgaaacgaagaacagccaactcggcaaggcttttgctattgtaaccgagctgcttggcggagggtcctttgccgaccgcatccgcaagaagccatccgagaagcagctcgcgcagtggatcgagcaagtggcgtcggcgctctcgtacatgcacgcgcgcaagatgcagcaccgagacctcaagccggacaacgtactattcgacaaatccgacaccgccaagatcatcgacctcggcctcgcgtgcacgctcgagtccaagtcacgcgtatcgacgagatctggaggtgccgtgggcacaaatctgtacatgagcccggagaagggcatgggcaagagttacgacgcgaaggacgatgtgtgggcgctcggttgcatggtcgtcggttgcgctcttggtacgccgatggagagcatgggcttcacacgcaaggcatctttgctctcaacc

SEQ ID NO: 247631 - DNA, 769 bp, Unknown
  Bacterial polypeptide expressing nucleotide sequence isolated from the Sargasso Sea
tttgcgcgagattcgagtgcttgatgcattaaaacactcagattacatagtgaatatgcatcttatttgtgttcagccgtttttcatttgtttggaacttcttgaaggtggtgatttgtactcatctttggatgacgatatctggcagcatgagatgtcactacacacacgaataagaatcatgagagatgttgctattggtttgagatatttgcaccataagggatacgtccatcgtgatctaaagcctcacaatattctccttcattacgacgtaagcgccaagcctttagtacacattggtactgatgatattgaactttctgatgttgaaatggaggcaaagttgcgaacgcaaagaaatatacaagataaacctattgaatggggtgaaatgaaggtagtggctaaaatttgtgattttggtatgaccgttaagcgccatcacctgcatgaaagtgatcgtactacgttcgcatggctagatgacgacgttgaagggggtggaaccagcggttatactgctccggaagttttgatggatgaagaatgttttgatttgagtacagatgtattttcatatggtgtatgcttgtgggaaactacaaccagtgatagaaataatatactcgcagggaaggagagcaaaacaacggcaaatcatattttgaatggtgtgcgtccagcatttacaagtaaccagccgatatttttacgaaagattattcagtcttgttgggctacgggaacccatagaagacctaaaatg

SEQ ID NO: 247632 - DNA, 757 bp, Unknown
  Bacterial polypeptide expressing nucleotide sequence isolated from the Sargasso Sea
ctgaccggcggtcaagctgcggttaaatccttaaaaaaagaaaaagttaaatacatttttggtttgataggctctgccacaatggaaatctttgatgctctttaccatgaaaaaaatataaaatttattggtgttagagatgaaaggacaggaacacatatggccgatggatacgctagagcatctaatcaaccaggcataattcttgctggacaaaatggtcctggtgcaacaaatttagtaactggacttgcgcaagcgaaagcagccttttctcctgttgtttctattgcaggctcatattctacaaaagataaaatggaagatgcttttcaaggtctcgatcaacaatctttatttaaaccagtaacaaaaaaaacatggacagtaaaaagtgcaaaaaaaatacctcaagtgatcagcaacgcatttaaattgtcaatgtcatcaagaagaggaccagtttgtattaatcttccaagaaatattttagctgaaaaatcaatatataagattaatgaaaagattaaatctttcaaaaatcaaagttcaataaaagcaaaagttagttcaataaaaaaagctataaaaataatttctaaatcaaaaaaagggataatagttgtgggtggtggaattaaacacaactctaaatataaagaagcgattgaattatctaaattactaagttttccaattgttactgccgcaggccatggagatgctattccttataattacaaactaaatgccgggc

SEQ ID NO: 247633 - DNA, 571 bp, Unknown
  Bacterial polypeptide expressing nucleotide sequence isolated from the Sargasso Sea
tgcctcgtcctcgagtactgcgaggcgggcgacgtgcggatgtacctcgacaagggaccgacgccgcccggcttcttctggcgcgtggccgagggcgtggcgctggggatggcgtacctccacaagcgggacatgctgcaccgcgacctcaagtgcagcaacgtgctgctctcctccgacggcggcgtcaagctcaccgacttcggcctcgcggttcagatcgaccaggagcggtcgcgcggctgggtgggcgccgccgagatcggaacgttccgatggatggcgccggaggtggcgcggcgcgaggggtaccaccgctccgccgacgtctactcgtttgcgatggtgttgttcgagctgctcacccaccaggtgcctttctccgagcgccccgcgatgcaggcggccgccgccgtcgccctccacggcgtgcgcccgccgctgccgacggggacgccgccggcgatcgcgtcgatcgtcaccgcgtgctgggcggcgaagccgtcgcagcggccgtcgttccgcaagctcgtcaccgagctcgccgcggcgaagaaggcgctcgaccccg

SEQ ID NO: 247634 - DNA, 898 bp, Unknown
  Bacterial polypeptide expressing nucleotide sequence isolated from the Sargasso Sea
catgaagtcgtcggcgatttgtaggtttacgcctcagtgggtcattcgcgccgggccgagagagaaggtgtattttgccccagaagaagtgcacgctgccattgttacttgtggtgggttgtgtccagggattaacgatgtcattcgatcgatcgtggggactttagaggaaggctatggggtctcaaagatttcaggcattcgatacgggttcagcgggttttgggaggatggtttcgaaaatatggagttatcgaagaaagtggttaaaaaagcgcacaagcaaggagggagtatcttagggacagctcggggtggtggtgacgtcgataagattgtcgatagcattttaagacaagggataaatatgttgtttgtaatcggcgggaacgggtcgcatgctggagcaaacgccatctccgccgaatgcgcgaggagaggaagtttagtctccgttgttggtgtcccaaaaacgattgataacgatattttgcttttggataaaacgttcggcttcgataccgcggttgaagaagcacaaaaagcaattcaagcagctacaattgaagctcaatcggcattgagaggagttggagtcgtgaaactcatgggcagacaatccggatttatttcaatgtacgccacgttagcttccggtgatgtggacatttgtttaatcccagaggtagactttgacgttcacggagaaaatggcgtcattgagcacgtgaaggatcttttagacgagcaaggccactgcatcctcgtcattgccgaaggcgccgggcaagaatttgtgaaagtctcaggcacggatgccggcggaaacccgcttcttggtgatattggaccttggttgtgcaaagaaatcaagaaatcaacaaaatgtgatgtgaaa

SEQ ID NO: 247635 - DNA, 663 bp, Unknown
  Bacterial polypeptide expressing nucleotide sequence isolated from the Sargasso Sea
cctgccagaggagacggtgctgaacttcgggcggcagttggcggcgggcatggcgcacgtgtggtcccgtggcttcgcccaccgcgacctcaaaccggccaacgtgctcctctcagagcggtccgagcgagccaccatcaagatctgcgactttggcttcgcgcgccgaatgaaacagaggccggggagtggcagcagcagcggcaatagtatgaacaacagtaggaataggcagtcgtcgtcgtcgtcgtcgtcgtcgtcgtcgtctccgagcaacgacaatggcggcgtcggaatggacgaggacgaggaggcggacgaggactacgaggaggcgatggcggccagcataggtggcggcggcggcggcttcggcggcatggacggatcggccatcgcgggcagccaggtggggactccgctctactcggcacccgaggtgcttgacaatatcgccacgggcggaggggcaattcacaggaggcagcagcagcagcagcagcagcagcagcagcagcagcagcacaacgctagcccccgcggtggtggcggcggcggcggcggcggcggcggcggcggcggcattgcgaacggcagcgcggtgtactcgagcaacgtggacgtgtactcgctgggagtggtgctgttcgagatgctgacggg

SEQ ID NO: 247636 - DNA, 737 bp, Unknown
  Bacterial polypeptide expressing nucleotide sequence isolated from the Sargasso Sea
atttgaacggctagaggctgctctcccacagcgctacacgctaattcgtgaactcgctcggggaggtatgtcacgcgtctacttggcccgtgagtccatgccaggccgtgacgttgtgatcaaggtgctcgaccacgagctctctgcacggatgggtcccgacaagttcgttcatgaggttgaggtcacatctcagcttcaacatccacatgtggtacctatctactcggccggggacgcggacgggacgctctactacgtaatgccatacatagatggggccacccttcgtgatcgtctcgctaaggagggaaggcttccgatcgctgagtcgttgagtatcacgcaccaaatagctagcgcccttcaacacgctcacacgaaaggggtaactcacagcgatatcaagccttccaacattctatttcagggcggactcgcggtagtcaccgacttcggtatcgcagatgccctaagagttcctgaaggaggaggtgaattcacccgaagcggtcttccgatcggcactccggattacatgagtccagagcaagccagcggtgacaaccgggttgatgagaaaactgacatctatgccctagcttgcgttctctttgaaatgctggctggccagcccccgttccacagccgcacagctcaggccaccctcgctcgccatcttacggacaccatgccgtcaatcaagtcggtccgatcctctgtacctatcgcgctcg

SEQ ID NO: 247637 - DNA, 916 bp, Unknown
  Bacterial polypeptide expressing nucleotide sequence isolated from the Sargasso Sea
ggcggtatggccacggtctacctggccgacgacctgagacatgagcgcaaagttgcagtgaaggtcttgaagcctgagctggctgctgtggttggcgcggaccgattcttggccgagatcaagacgacggcgaacctgcagcatcctcatatcctgccgttgttcgattcaggagaagcggactcgttcctgttctacgtgatgccgtatgtggaaggcgagtcgatccgtgaactgatcacgaaagaaaaacagctcggtgtgaaggacgcactgtcgattacacgcaaagtgtctgatgcgttggactatgcgcacgagcatggtgtggttcatagagacatcaagccgggcaacgttctgttgagtgaacggggtgagccgttggtggctgacttcgggatcgcactggctgtggcccaagcgggtggtggtcgtattacggagacggggctgagtctgggcacaccacactatatgagcccggaacaggctacgggtgaccgtgatgttgatgcacggtccgatgtttatgcactgggttgtgtgttgtacgagatgttatcgggtcgtccaccgttttctgcatctacagcacagggtgtgttggtacagatcctgacgacggatcctccgtcgattacgggtctacgtaggacggtaccgctacatgtcgagggtgtgttagctcgtgcgttggagaagttgccggcggatcgcttcaagagtgctgctgagttcacgagggcgttggatgacgagacgttcgtgtatgctcctcgtccgatggctacggatccggggcgtcctgctgttcaggctccggctcctgtccaagaagttacagctccgaagaagggcagggacttcagactcatcgcagccgtcgggtcgccgccgtcttcgctggtctcgc

SEQ ID NO: 247638 - DNA, 439 bp, Unknown
  Bacterial polypeptide expressing nucleotide sequence isolated from the Sargasso Sea
tagggttcaggtctacaaagcctaccaagtcaaattacggcgtaaggttgcgctcaaagtgttggctttagagcatgcggacaagaagggctttgttgagcgcttcaaccgagaggctgcaaccggcgctcgtatcacgcatcgcaatgtcgttcgcgtttacgatattttgaccgggaaatcgtatgacgatgatgatgtgagcaccgaagtccacgtcatctccatggagtacgttgatggtcctcatctcaggacgctcaacgagactcaagatttgcgtgatgataaccttagagcgctcgattactttaggcagattggcgccggtgtgtcggctgcccatgaacgtggcatcgttcatcgcgatctcaaaccagaaaacattatgctcgatcgagagacggatgttcttaaagtggctgattttgggttagcc

SEQ ID NO: 247639 - DNA, 543 bp, Unknown
  Bacterial polypeptide expressing nucleotide sequence isolated from the Sargasso Sea
catgtcggacttggaattcggtcgacaaatcggacgcggcgcgttcggcgaggtcttccgcggcagatacagaggcacggacgtcgccatcaaacgcctgtgcgtgctcgacgacgccgacggcgaccgccgcgcgttgtccgagtttaagcgagagctctcgtttctcacgcgtctacgccatcgacacgtcgtcgcatttatgggtgcgtccaccgcgccgccaaatctgtgcatcgtcatggattactgcgataaagggtcgctgtacgcgtacctgcgcaacgccgataaatcgctctcggcttttaaagcgctcaaatggatgagtgaggcggcgaaagggttggtgtatctgcacgcgcgagacgtcatccatcgagactttaagagtgggaatctcttcatcgatgacggcgggtccattaaaatcggcgactttggtctctccaaatttcactcgggtgcgtcgacgagcgccggcgccatgtcgctcgtcggcacgtatcaattcatggcacccgagctcttggaaggaaaccc

SEQ ID NO: 247640 - DNA, 814 bp, Unknown
  Bacterial polypeptide expressing nucleotide sequence isolated from the Sargasso Sea
tttatattagtatataaacaccctgtgataaaaaaaatagcaattttaacaagtggtggggattgtgctggtttaaatgcagtaatcagagctgttactcttagagcattcaataaatataaatgggaagtttatgggattaaagatggtacccttggacttttacgtgatccattagatatagttaaacttgaacctaataattttgaaggtaatttaatgagaatgggaggtacatttttaggatcaaataataaaggtaatccatttaaaaaaatttcaaaaaatggtaaacaaattgactctactgacataattattgatggctttaaaagattaggaattgatgccctaatagggataggtggcgatgggagtttaaaaatacttcaaagattaacaaaaaaagggaacataaattttgttggcatacccaaaactattgataatgatgtaaaaaataatgagttatctattggatacgatactgcagtagatgtagccacaaatgctcttgatatgttacaaccaactgctgctagccacagaagagcaatgattttggaagtaatgggaagggacgcaggacacattgctttaaatgctggaatagctggtggtgcagatataattttaattcctgaaattccttattctctaaaatctattgcaaatcacattgatagtttaagatcaaagggtaggaatcatgctttgatagtagttgctgaagcagtctcaaaagaaaatggtaaaaaagcaacagttaaatatgttgatggagaagttaggttaggtggaataggcaattaca

SEQ ID NO: 247641 - DNA, 406 bp, Unknown
  Bacterial polypeptide expressing nucleotide sequence isolated from the Sargasso Sea
cctgaagccggagaacctgctcagggacggcgcggggcgggcgaggattgccgactttggcgtggcgcggatgatgcgggcgagggagcctcaggagcaagcagagagggccgagctcagctttgagctagagaggctgcgcggcgcgctctcgtcgctcgctgcgctgcccgccgcggccgcgcctggcgccgaggcggcggtggcgggcggcgaggtggacgaggaggagagggtggagctgagccgaaggatgagccgcgcgaggcggctgctcgagcgcccctcctccctccgcctgctggagagctccgaagggtcgcccgccttccgggcacccgagaccttccgcgagggctcgcactgcgggcgggcggcggacgtgtggagcctcggtgtgacgctc

SEQ ID NO: 247642 - DNA, 598 bp, Unknown
  Bacterial polypeptide expressing nucleotide sequence isolated from the Sargasso Sea
catgcaggccttctgccacgagattgccatcctccgtgccgtgtgcgaccatgagtcgatctcgaccatgttcggcagcgcgcagcggcgcggcgagggctggatgttcctcgagatggccacgggcggcgagctcttcgaccggctcatcgacagcggcagcctcaccgagaagatgacgtggccctacttcaaggccctgatcaacgcggtctcgcactgccactccaagggcatcgtccaccgcgacctcaagctggagaacgtgatgctgatggcgcacgacccgcacgcgatccgcatcatcgacttcggcctcgccgtgcagctgcgccgcaaggagggcggcggccccgatccgaccgacacgcgcaccgactgcaccggcacccaggtgcgcgccacgcagccgccatcccctctcctcctctgtttcttttttttcctctccccgccctcacgccgccgacgacgacgtacgtgtgcctgcctgccttgcgcaacggcgctcgcgtgtcgcaggcataccgcgcgcccgagatgcagtcgggtgagccgtacgacccgtacaagtgcgacgtgtgggcgttgggggtga

SEQ ID NO: 247643 - DNA, 484 bp, Unknown
  Bacterial polypeptide expressing nucleotide sequence isolated from the Sargasso Sea
atggggctggagtacgttcgcaagctcggcgagggcaccttcggggtcgcgctgctcgtccgcacccgtcacggcaagcagtactgtctcaaggaggtcacggtgaagagcaacgacgaccgcgcacgcgctgaggtcatggacgaggtcgcctgtctgcagcgggcgcagcacaacaacgtggtcgcgttgatcgagaactggtgggccggctcgggggcgatgcggttccacattctcatggagtttgcgagcaacgggtcgctggacgacatcatcaagcagttctcgtcgtcccggcgcttctttcccgagaccaagctgctccacttcgtccaggagatcgcggaggcactgtcgtactgccacaacacgctgcgcctcatgcaccgcgacctcaagcccgccaacatcctcgtggaccagctcgggacgctcaagctcgcggatttcggtctctccaaggccctgacccccgggacca

SEQ ID NO: 247644 - DNA, 733 bp, Unknown
  Bacterial polypeptide expressing nucleotide sequence isolated from the Sargasso Sea
aaaatataaaaaactgtgtcaattactagacatattaaaggaaatacaaatgtggtctaatatccgtcatccttatttggttcaatttctaggcgttagttatgatcagcaagaaaatgatttttatatactattggaaaagatagatggtgaaaatctaggggaacatatacataataaaactagtagtaagaccaaatctataaataaatacgcaaagtatcagatatgcatacagctaataaatgtaattaaatttttgcatacttgtaagccaccaattatttatcgtgatttaaaaccagaaaatattatgatagataaatttaataatgtaaaattaactgattttggattaagcagatatatgcctgaagaatcaaaatataaactaactggaggcacaggaacaatacgatatatggctcctgaagtatatttgggacaaaaatatgatttaaaagcggatgtatatagtttaggttttatcttatattacataatcggtggaaaaaaaccttttaatgaatataacgtagatactataagaacttatatggaaaatacggatttgattcattcgttagatattataaaagacaagaagtggagagaattaataaataattgcattaaaaaaaacacagaagaaagatgggatgttaatactttatttgaaaatattacaaatattacatacgacaatgaaaataaaccttgtttaattagctag

SEQ ID NO: 247645 - DNA, 562 bp, Unknown
  Bacterial polypeptide expressing nucleotide sequence isolated from the Sargasso Sea
accctaacagcaaccagagagtcaaaaggtatttactatatacaaatatctactactagtagcatagttaataccacatatccttatttagtggacgtgtggagccttggcggaacacagttgttttcgggatcagcgttcaagccaaagacttttaagccatcacaatctcccgtaagagatgagtatgtcttgtctatgcccaacataagaaaagaatataaatcaacagaaacaataagaatgagactgtatgctagaaaaaaatcttggtctccaaacatttacaacgttgctaagtctgccccagaaaatttaacaatagtttctggctcctatagggtcctaagggcaatagatgattttgaggttgtgtcatatggaactggatcaataaaatatacagagatgtcttatgatgtttctggttcttattttgatttaaaaatgaatttgtttgagcccggatatcaatacaagttaaaatatgcattttatgatggattttcaaagtcttatgtcgagcagccttacgaatttaaatttagagtaataaaataat

SEQ ID NO: 247646 - DNA, 1981 bp, Unknown
  Bacterial polypeptide expressing nucleotide sequence isolated from the Sargasso Sea
atgggtttatctattgtgcagcggatcatcgccggatttgtgttgatgctgctgctgttgatcctgctgggtgtgatcagcaccctgaagatcaggggcatcaacgacggcttgtcacaggtctccgaccgggcgaccccgttggtgattgcggtggccggcctgaaaggcgctctgcaggacagcaaccgctgggtgctggtctaccggaccaacgaggatgcaagccagctgccgcagctggccagccagttcaaggagcagcaggcgcgtttcagtcagctgagccaggagatggagaagtttagcggggtggccgaggccggctctcgttttcagcaggtcgataccgccaccaagcagttctacggcctggctgaacaggtgctctcccagcacagccagtgggtcaatgcccaggatcagcgccacaagctggagattgccttcatccggctggaagacacctaccagtgggctgccgatctgctgctgcagcagaccgccagcaaacgttccatgcgcaacaaggctgaactgatcacttcgggcatcgcgcgcgatctgaagaacattcgccgggccgatgccaagaccgatctcaacgagctggagaaggtgctgagcaaggacatcgagatggcccgcaaacggctcgatcgggtgctggtgccggatgacgtgaagcagcgcttcgtctccaacctcgaccggatgcaggagctggcacttggccagcaggggctgctggcgaccatgcgcaatgcccagcagctggctgcctcgctgcagaccctcaatcagcaactcgacgccagcctgatcaactgcctgggcctgctcgacgagatgggacagtcggccggctcgattgccagccagagccgcaccacggcggatgatgcggtcagcagcgccagcttctggatcctggtggtagccgccatctcggccgccgccgccctcatcatcggctataccactgcgcgaagcattcagcgtccgctgcagatgatcaacaaggagctggactacatggcggccggggacatgacccgccgcatcaactatcgcagcagctgcgaattcggcgcgctctcccgctccatcgataccctggccggcaaaaccggcgagctgctctcccagatcaatgccggttcccgccatctagtggaggaggcgagccgcgccgccgagataagcgaaagggccgtgtctcgggtacaggatcagaagagccaaaccgatcaggtggctgccgccatcaccgagctggaggtgagtgccaccgaggtggcccgctccaccgatggcaccaaacgggaagtggatctggccgatgatgaagcccgcagcggtcgccagaaggtggcgaccacccgtcgcatcacggagcagctggcaggtgccatggaggaggccgttggcatcacctacaagctgggcgagttcagcaacaacatcggcagcatcctcgatgtgatccgcagcatcgccgagcagaccaacctgctggcgctgaacgccgccatcgaggcggcacgggccggcgatgccggccgtggcttcgccgtggtggcagacgaggtgcgggcattggccaaccggacccagacctcgaccgaagagatccaggcgatgatcgagaacctgcagagctcgagcaagctggtggtggaggtgatggggcgcagtcaggagcagacccacaactgtgtcgagcagacccgggagatggatgcagccctgcaatccatcgccgaccggatgagcgccatcaaggcgatggcggatcaggtggcgcacgccgcccaggagcagatctcggtcagccagggggtggcccgccatatctccggcatcgccgaggtggcctacgagactgaacgggaagcgcgggagtcggccggcagcagtgaagtgctggcggagctggtcgccaagcagcagcaattgatcgcacatttcaaggtttagg

SEQ ID NO: 247647 - DNA, 1194 bp, Unknown
  Bacterial polypeptide expressing nucleotide sequence isolated from the Sargasso Sea
aatggaatacatagaaggaaacaccttaacctcgattattgcaaaaaatagaaccattagtcttagtgatattttgtttattggagcgcaagtttctagcggattgcatgctgcacatcaaaaaggtcttgtacatagagatattaaaccaggaaatataatgataactccagatggaaaagtaaaagttacagattttggtattgtttcacttcaaaacgaagaaagtgagattacaaaaaccggctccatactcggaactgcaagctatatctcacccgaacaagcacagggaaagccggtttctattgagtcagatctttactcactaggaactgttctttatgaacttattgcaggcaaggctccctttagtggagattcgccaatttcaacagcaacaaagcacttaacagagaaaccagaaaaaccatcgatgtttagaagagatcttccaaaaggtgttgaaagtgcagttttaaaacttcttgaaaaagctacctatgacaggtttaaatctgctgaagatttaagagcaacattacttcagcaaagaaaagcactgcagtctgagcaaacaagagaaaatttagttgatcttacgaatccaaaggttaaattaagattcaccctacctgctctaataatatctattggagttgttgttggtacggtctggacgttaacgcaagtttttgatggactgcctgttgacggaggtgcacccgcactagttgaaattccagacttaactggaagtgagcaggcacaagctttagaagaccttcaaaatcttgggtttaaagtaggaattgaaaattcggctgatgcatctgtgcctgcaggttctgtaatacgtactcaacctccatcaaatactgttataaaccctgattctttggtaacaattattgtatctgttggtcctgaagcatttccaattccatacgtgctggatatagaaaccgaaagagcaatatatgttgttgaggagagtggctttattttaggtcagttgcttgaagtaaatgatgaaaatatacctagaggatttgttatttctcaaaatccagttgctggaacaaaaatgagtcctggaaccaaagtggaccttgttgtttcaaaaggtccaagccttattgagataagtgacctttcaagaaaatcacctgaagatgctatacaaatcttaga

SEQ ID NO: 247648 - DNA, 805 bp, Unknown
  Bacterial polypeptide expressing nucleotide sequence isolated from the Sargasso Sea
tgcgacttcaggtcaggatggatgcattttgattggggaaactgctgaaggctcaatcattgaaataattgagctgggtcatggttgggttgaacatctcgaatggtcaaaagatggaatgtctttagctgcatctatctctaaaaatgtatatgtttttgactgtgaaggtaaaaaaagatggaaatcagaacagcattccagcactgtaagcgcaattgcatggtcaagtaatgacgagcttgcaaccgcatgttatagcaaagtagctttctatgatgttattgaaaacaagacaaggcaaacgctccaatggaaagggtctcttatctcaatgaaactaagctctgatggggatattgttgcttgtggaagtcaagataatactgtgcacttttggcgtcgatcgactggacaagactctatgatgtcaggatatcctgggaaaccaagcaatattgcatttgattctaatggaaaacttcttgcgacaggtggatctgagattataacagtttggagttttgaaaataatggtccagagggtacaactccgggacaacttcgttatcataaattatttgtctctgacttttcatttgctccaaaaggaaatcgacttgcatcaggggcgagagatggatcaattgcagtttggggattaaagaatgatggtcatggcggatcaataggcacctcacaaatgagcgatcaagttagctctattgcatggagaagagatgcaagagctattgcagctggagatgctaaaggccaagttgtaacttggaaagttaaaacatga

SEQ ID NO: 247649 - DNA, 997 bp, Unknown
  Bacterial polypeptide expressing nucleotide sequence isolated from the Sargasso Sea
atgaagggggcgacttttagagatttcatcatccttcgcgagctcggacgggggttgtgtgggactgtgtacttggcaaagtatcgtctcaccgatcaactcgtcgcgttcaaggtgatgcgcaagcaaaagctcatcgacgtcggcgagatgcgtcacgccgtgctcgagcgacgcgtgcacgaagacatcaacgatggaccgttcatcgacaagcttttgcacgcgtatcaggatcaatgggcgttgttcttggtgttggaatacgcgccgtgcggtgatttatttcaagcgatgaattatcacggtttgccgacgctgcacgacgcgaaaatgtacacgtcgcagtgcgcgctcgccatcgattacatgcaccagtgcgggtacgtctaccgagacttgaagcccgagaacatcttgctggacacgaacggatgcgtgcgtctcgccgactttggcatgtcgaagaagttggtcggaaacgagcgcgcgtacaccgtctgcggcaccgcgcagtacatgtcgccggaggtgttcaatcacaacgggtgtcgattcgaggctgatttctgggcgctcgggattttgatttacgagctatgcagcggaggcacgcctttcggcgcggacaaagactctcggcaggagctctatcgacgtttggtgcgacatagaaacgataccatgacgtttccgacctggttcgacatagagaccgcctccatcgtccgagcgttgcttcacgaagacgagaccaagcgtctcggccacgtcggcggcctctccgccgtcttgacccatccttggttcgcccccgcctcgcacgtggacgtattatccggcattcaagtccccgcgcttcaacctcgtcgacgcaacatcgtctacgatctcaaactccgcgagtccatcgacctcggagacattccttgggagtgcggcgccgtcgtcgtcgaccccgagcacgtgcgcgcgtacgaaaccttcggcgcgtgac

SEQ ID NO: 247650 - DNA, 871 bp, Unknown
  Bacterial polypeptide expressing nucleotide sequence isolated from the Sargasso Sea
atggctcgtcctcctgaacaacttggttcccttagacttgttcgtcaacttggcgtaggtcgtaaatgtcaaatctgggaggcctcagatgagagcaaatcgaaacgcgttgcggtaaaacttgtatctccagagttcggatccgacaaaggcattcgtcaacttctcaagcacgaacttacagtgagccgatcgctagagcattcagaaattattcacatagaccgctattcgacagctggccgactaccacaccttgtcatggaattattccgtcatccaaatttaaaaatgcgtcttacttctggggcagaatcaattgcggaccaagcaccgtcaattgcacaaaaatcggctgatgcaattagtcatcttcacgcaaaccgttgggtccatcgcgacctcaagcctgaaaatattcttgttgatgactcagggaacatccggctcattgaccttgctctcgcctcacgaccaccaggaattctcgctcaattaatatcgctcaagaggaccgtccagggttcaccaagctacatgtcacccgaacagattcggggaagtcgtgttgggtacgctggagacatctactcatttggttgcctcctgtacgagttagttaccgggcatcccccgttcaccggatcgactcagcaggagcttctaagcaagcaactgtatgcaacaccaccatttgcatcagcaacaaacgcgggtgtcacaccacaactcgaccgatttattcgtgagcttctcgccaaacgacccaaggaaaggccttcttctatggcggaagttgctgcacaccttcgtaatacaccgttcctgactccaaaggctcggtctgcggcatctaagaaagccgattgac

SEQ ID NO: 247651 - DNA, 1111 bp, Unknown
  Bacterial polypeptide expressing nucleotide sequence isolated from the Sargasso Sea
atggactgtttacagggtgaagagctggacgattgggtcaacgaacgaggtgcgatacccgaagacgacgtcaagacgttgatgatgtcgatgttggacgccgtcgcgttcatgcacagtaaaggtgtcattcacagagatttaaaactggaaaactttgtctttgcggagaagggaaatttaaactctttgagcgtggtcgatttcggcttggcgaaggccttgaacgcgcgtcaaaaggcgcagcacgtgtgtggaacgttgtcatacatctctccggaagcgcttctcgccggagtgtacggacaaggagtggatgtatgggcgctgggcgtcgccatgcacgttttgctcacgaatacgtggccgttcgacgacgaagacgaagacgaactgtacgaacagatcatcgagtgcgacttggactttgaaacggaagcgtgggaaggcatcagcgaggtggcgaaggacttgatcgagggtcttctcgattcacgaccgaaacacagattgacagctgcgcaggcgctcgaacatgagtggttcaccggtcaatcttcgcacacgtcggatcgcttgcacagcatgcactcgcgtctcgactcgctcatttcgatttccaaccaacctcccgagcgacgattcaaggatggcgagtacatcacccgccaaggtgacccatctgtcgagtttttcatcatcatcgcgggcgagtgcacgctcactcgagacggcgtcgtcgtgggcgttcgtcgcgtcgggaacttcgtcggcgagcttcgaaacctcgaagagagcgtcgatgatgtcgttctcgccgcgtggacatccgcgcgagcggtcggtgatgttagagtgctcgtatttcacgacacggaattgcagtgggtgcaccagcacgactaccgtctgacgtacgaattcgagagcatgatacggatgcagcgccggtcgatcgcgaagcaggctcgagagcaaagaaaacgcgaatcagcgttgaaagccgcggaagtcgaaactggggagtcggacaaagatcactcgatgatgcgctcggcgagcgcgcaaccgcttgtctgcgaagagcgagtaaatgacaacaaagaatgac

SEQ ID NO: 247652 - DNA, 1155 bp, Unknown
  Bacterial polypeptide expressing nucleotide sequence isolated from the Sargasso Sea
tatgaaaattggacagttagtaaaagaaagatatgaaattctcgaaattttaggagagggtggaatggcttttgtttacaaagctcgtgatatgcagcttgagagatttgttgcaattaaaacattaaaaccaaattatgtaaatcaagaaacttttgtagatcgctttaaaagggaagcaaaaacagcagctaacttaaatcatccaaatattgtacagatttttgattggggaattgaagatgaaccttactttgtaatggaatatatagagggaaacacattaacctcaattatcgctaaaaatagaactattagcttaagcgacattttgtttatcggtgcgcaggtatctagtggcttgcatgctgctcatcaaaaagggcttgttcatagagatatcaagccaggaaatataatgataactccagatggaaaggttaaagttacagattttggtattgtttcattacaaaatgaagaaagtgatattacaaaaaccggctctatacttggtactgcgagttatatttcacccgaacaagcacaaggaaaaccagtttccattgagtctgatctttactctttaggaactgtactttatgaactaattacaggtaaggctccttttagcggtgattctccaatttcaacagcaactaagcatttgacggaaaagccggaaaagccatcattatttaggcgagatcttccaaagggtgttgaaagtgcaattttaaaacttcttgaaaaagctacttatgacagatttaagtctgctgaagacttaagagccacgctacttcaacaaagaaaagcactacagtctgaacaaacgagagaaaatttagttgaccttactaatcccaaagtcaaattaagatttacgttaccagctcttgttatttcaatcggagttgtctttggaacagtttggactttaacacaagtttttgatggacttcctgttgacggaggtgctccaacccttattgagatacccgacttaactggtagtgaacaggcacaagcattagaagacctacaaaatcttggatttaaggtaggaattgaaaattccgctgatgcttctgtaccagctggttctgttattcgaactcaacctccatcaaatacaatcgtaaacccagattc

SEQ ID NO: 247653 - DNA, 763 bp, Unknown
  Bacterial polypeptide expressing nucleotide sequence isolated from the Sargasso Sea
tccatcaggctttatccctggtgtgacaccacttccagcgcaattcggtgactataccctgcttgatgaaatcggacgtggtggcatggggatcgtctatcgagctattcaagaaagtctcgaccggacagtagcggtaaaaatgcttcttcggcgagaccttgcaaaccacagtgatctggcacgttttcgtagcgaagctgaagcagcagctcgacttgatcatccggggattgtttcaatttttgaagttggagaatgtgatggtactcctttctattcaatgcgttttattgaaggaacaacactggctcatcgattaaaagaaggagatattcatccccgtgaaggtgctgaactcttggcgaaagttgccgatgcgattgaggcggcacactctcggggaatacttcatcgtgatatcaagccatcaaatatcttgattgatacagctggtgagccgcatgtatctgattttggcctcgcaaaacgtcttgaagctgatcatgccgtgactcacacaggagccattcttggtacaccatgttatatgtctcctgagcaggctgccggaagtcgtggtgagtcagggccttcgagtgacgtatggagtctgggtgcaattttgtatcagatgctgacaggacgtccaccgtttcaggcttccagtccaatggatacgcttcttgcggtactggaatcagatcctccggtgccacgttcgatgaatcgtcctgtgaatagagatctcgagatgattgca

SEQ ID NO: 247654 - DNA, 625 bp, Unknown
  Bacterial polypeptide expressing nucleotide sequence isolated from the Sargasso Sea
gccggtgtgattcaccgcgacctgaaacccgccaacgtcatcgttgggaaattcggcgaagtctacgttttggattggggactcgccaaggtcctcggatctcccagcatagaccgaaaggacgtctcggaagaaccacctgatgcggagctcagcctaacccccgcgggaaggcattacggcacacccctttacatgtcacctgaaatggcggaaggttcagtcctgatcgacgaacggacggacgtcttttccttgggtatcatcctctttgaaattctcactctacgcccctttctcgaaggcgaggatattcttgagatcaaggataagattctcaaccaaccctaccccatgcccagggaactctccgggaaacacattcccaaagatctcgaggccgtgtgcatcaaggccttgaaacggaacaagcgaaagcgttacgcgaaggtaagtcttctgctcgaggatcttcaacgctaccgacacggcgaagaggtttcggtttattggtactcgggctgggaaaaattggtccgttggaacagtcggcacgcctactcgatcatagcgttactctcggctttgaccggcgcggggctttgggccttgttcggtccttaat

SEQ ID NO: 247655 - DNA, 824 bp, Unknown
  Bacterial polypeptide expressing nucleotide sequence isolated from the Sargasso Sea
gatggtgcaccgcgagtcgacgctgatgcgcaagctgtgtcatccgaacatcatcagggtcatcgaggtggtggagacggcgctggcctactgcatcgtggctgagcacgccggcggcggcgagctgctcgactacatcgtggcgcacgggcagctgaacgagtcggagacgcggaagtttgtcgggcagctcgtctcggccgtgtcgcacatgcacgagtgcggggtggtgcaccgcgacctcaaggcggagaacctgctgctcgacgacaacctgaacatcaagatcatcgacttcggcatgggcaacacgtgcgagcgcggcatgctcatgaagacgctctgcgggtcgccggcgtacaccgcgccggagctgctcgccggcgagaactacagccccgcggtcgacgtgtggagcctcggcatcaacatgtacgcgatgctgacgggcaagctgccgtactcgagctcgaacatcaccgagctgcacgcgctgatgatggagacgcggtacaaggagcccgaggccaccgagcagtgcctgcacctgctggcgcgcttcctcgacgtcgaccccgcggcgcgcatccagctcgacgaggcgatgcggcacccgtggctcacccggccgctgacgtccggcgccggcgcgccgaccggccgggttccacggcagcggccgatcgaccccgggtcgctcgacccggaggtggtggccgaggcggtcgagctggggctgagccgcgactcggtgctgtcctcggtggcgtcgcgggcgtgcgaccggcactccgccacgtaccacttcttgctggcgcggcagg

SEQ ID NO: 247656 - DNA, 881 bp, Unknown
  Bacterial polypeptide expressing nucleotide sequence isolated from the Sargasso Sea
catgaagactcagaaaccatgcattggtatcctcactagtggtggtgattgtccagggctgaatgcggtcatacgagcaactgtcctgtcttctgaaaggctgggatattcatgcattggttttttgcgtggatatgaagggcttgtagatccagttgaatacatgccgcttactccggcgaatactagtggcattctgactcagggtggaacgattcttggctcaacaaatcgtggacgattttcagcaactactggtaaagataaccgtctagccattgacccagatttgctgactggtgttgcccagacggttcgtcaactcggcgtttgcggcttgatctgtattggaggagatggctcacttgcaattgcagatcagtttcatcaattcggtattccggtagtcggggttccgaaaacaatcgataacgacctgggagctactgcatttacatttggttttgattctgctgtatcagcggcaacggatgccttagacaggttgcgaacaactgctgcgagtcacgaacgcattatggtgctcgaggtaatgggtcgtcatgccgggtggatcgccttgcatgccgggcttgctgggggagccgatgttattttactgcctgagatttcatggaactttgagagtgtctgtcgaaaaatcttggatcgtgaatcagtaggtcggcgggacacgttactcgttgttgctgagggggcgatattgccgaccggtgatatggtttgtatggcatcaacaaaagtgaatgaacaggtaaagcttggtggaatcggtcaggttgttgcaggggaaattgcacaacgattagacaggcagacacgcaccgttgttctcggacatcttcagcgtggtggaagcc

SEQ ID NO: 247657 - DNA, 844 bp, Unknown
  Bacterial polypeptide expressing nucleotide sequence isolated from the Sargasso Sea
cctgatgccgtgctgagtgtcttgatgcaggtggcggcggcgttggactgtgcggaaggtggtggtgttgttcacagagacatcaaaccagagaacctgctattaacgccacggggagaggtcaaagttgctgactttggattagcgagagtccttcatgataatttggaactgacacagaccggcatggcgctcggtacgccactgtacatgagcccagagcaatcccacggtggaaaagttgacgttcgtagtgatctctattcccttggtgcgacggcctaccatcttgtggctggtcaacctcctttccgtgggacgactggcgtcgctgtcgcactggctcatgcgaaggaaccgttggagccattggcagatgttcgcccggattttcctgttgcggttgctggtgttatcgagcgtttgcttgagaaagaccaaggcaagcgttttcagacatcgagtgcacttcttgatgcggtggagcccttgattgtggagagagcacctccgtctcgcacagttgcgatgcctcttagctggaatcctgaggcagcttttggcaaaaagttttcaaaagaccgccttgccaagtcaactttttctgcatcacagacttatacagagacaagccagtctgcaggtacggtcgcgtcggcaacggcgatgttaaaggcatcccttgaccgagaggagatcgacaaaattatttcacgtcgagtgtgggcagtaacaggcgcgcttgcagcatttggttttgcagttggtttttttattggcaggcgacgtttgcttccaccaggccggcggcctcctgctcgtcctcagcaacaagaagagtgat

SEQ ID NO: 247658 - DNA, 221 bp, Unknown
  Bacterial polypeptide expressing nucleotide sequence isolated from the Sargasso Sea
tttgtattcttatagactttgtaatggcggtgaattatttgacaaaatagctgaagaacaatacttcagcgagcaagacgctgcaaaaataatcaaacaaatactctctgcaatcaattattgtcatcagaaaaacatagtacatcgagatttgaagccagaaaacttactcatgaatagggatgtcagtgatccaaaaattaccataatagatttcggaa

SEQ ID NO: 247659 - DNA, 580 bp, Unknown
  Bacterial polypeptide expressing nucleotide sequence isolated from the Sargasso Sea
cttgtggtcacaggtctcacacccgaacatcctgcagttcgtcgggctgctctggaccgggaccacgttgcaaatgattaccgagtttgcgcccggcggaaccgtggaggcgctgctggacggagccgattggccggccccgctaacgatggaccaacgagcgcagtgcgcaatcgatgtctgccttgcgatggagtatcttcattctcgcaggattatccaccgcgacctcaagcccgagaatctgctgctctcggcgttggggtcggtgatcgttgcagactttgggctcgcgcgggtgcttgcgggcgaggtactccgggagtcgccgcggcgacagcctggggttagccatgcgctttcccgcgggaactcggctgagccatacacgacccacgaagagacaggtgcggattgggtggcagcggcagtccactcagtgccgtcgaaaatgggaacggttggcaccgtcgactacatggcaccggagctctgcaatggtgacgattacgacgagagcgtcgacgttttttcgttcggactgattctcggctgccgcctcctcacgcaggacaccgta

SEQ ID NO: 247660 - DNA, 1183 bp, Unknown
  Bacterial polypeptide expressing nucleotide sequence isolated from the Sargasso Sea
atgagcgaaagttacgccgattacgacaatcgcacgccgcttcacgtcgcggcgagtgaaggttcgtttaaagtggcggattggttggtgaagagcggcgtgcccgtgaatccggtcgatcgatgggggtcgacgccgctggagagcgccgtgtacggcaaccacggcgatttggtgaagatgctcgccaagaacggcggtaagattaaggatagggtgagcggcacgtttttacctctggaagaatcgcatctctccggggcggcgcacatgcagttgcccgtggacacgatggcttgggaaattccggatggagagtttagcaacgtcgaggaaatcggcgccggcgcgttcggcgtcgtgtacagtggcacgtggcgaggaacaaaggtgtgcttaaaacagttgcataaacatctcaacgcggatgaagtagctcaagctgaattcagactcgagctgaagattatgcaacagctgcaccacccgcacatcgtgcagtttctcggaacgacggtgtccgccgagggcctcacatccattgtcagcgaatacatggctggtggaagcttggagacgttgtttagggctgaggaattgttgccgttacgtcagtcgttgaaaatggcgctcgactgcgccaggggtatggcgtatttacacggtagaacgccgcttccagttattcacagagatttgaagccgggcaacctcatgttgacgaagatgcgaacgctcaagattggcgatttcggtctgtctaagactctctccgtgcgcaataaacttccacaggagatgtcccaggcgttcaacatgactggcgagaccggatcgtaccgatacatggcgcccgaggtgtttcggcatgagttttatgggccagccgtcgacgtctacgcggcgtccatgatttactaccaactctttagcttccagcaaccattcagcggaagaaacccggtggacgcatgccgcgcggcgagtctagaaaacctccgaccgcccattcgagggggcttcatgccggacgagctctccactcttgtcaccagaatgtgggatccgctcgtcaagaagcgtcccgactttttagaaatcatcaccatcctcgagccgctcgcggagaaatacgccgagtctcccgataaacaacccggctgcggatgtgtggtgtcgtaaa

SEQ ID NO: 247661 - DNA, 134 bp, Unknown
  Bacterial polypeptide expressing nucleotide sequence isolated from the Sargasso Sea
tatttactttgagaacacggcagaagagcgtgagttaatgggtatttccgataccatgctgcgtatttcggtaggtattgaagacactcaggatctgattgcagatttcgacacggcgctaaataccatataga

SEQ ID NO: 247662 - DNA, 406 bp, Unknown
  Bacterial polypeptide expressing nucleotide sequence isolated from the Sargasso Sea
gctgtaattttacaagaatttgatacaaatattaaaaaactaacaaaacatattaaagatcaaagaacttcaggaaaaactggttgtatattaattgtttctgagggggcttataatgcagaaggtggtgatgggcttataaaagaattaaataagatatcaaattttgatttaagaattactaaattaggccatattcaaagaggggggaaccctagtgcagtagatagagtactagcaagcagattgggtgctagtgcgattgataaattgctacaaggtagtaaaaattgtgtcatttcacaacctaaggataaaattgaattgatacattttgataagttggtagctaaacatcaattagatatgaaagattattatgaactaatttttaagctagcatgac

SEQ ID NO: 247663 - DNA, 896 bp, Unknown
  Bacterial polypeptide expressing nucleotide sequence isolated from the Sargasso Sea
agctgttctgcctgatggatcaatatttactgacttgaaatcactgagaaagaacaatactggctatgacttgaagcaactttttataggcgcagaaggcaccttgggagtcatcacgaaagtaagcttgagactttcttctagtcctaaaagagagatctcatcgatggtttctttaaagagtgttgatgatgcgattaatcttcttaaggaaacaaaaaaaagatttggtgataatgtcactgcttttgagttcatcagtcaatcatgtttagttgcaataaatgacttcctcagccacataaaactgcctttggggcatgaggattcttggcaggtcatttttgagatcatcaatcatagtgaggatgatttatcagaattccttgaaaaaaaattatcagaagaccttatcaaaaatgcattgatagctaaaaatgaaaaagaaagaaatgatttctggcttgttagacacagcatctctgaggcagaaaaattgtcaggaagaggagtgcatcatgatatttcacttcctattaagaaaattcctgaatttctacaaacaacaatcccagcgatggaaaaagttgctggaaaatctatcgtgtatacatttggtcatctaggtgatggaaaccttcattttacaaaaaaacagcctgaagatatggacggtgatcaattcatgagattttcaaaggaaatcaatgctgtcgttcatgaaaatgctgaatttcttggtggatcatttagtgctgagcatggtattggatctaagctgaaagaagatttgattaagtattctgatcccacaaaagtagatctaatgaaaaagataaaaaaaacattggatccaaaaaatatcatgaacccagacaaattgatcgatatctaaa

SEQ ID NO: 247664 - DNA, 757 bp, Unknown
  Bacterial polypeptide expressing nucleotide sequence isolated from the Sargasso Sea
catgacgcggcatagaacagtgagccagcaccagagccttcaaccgttgctggaacgtctatcgccaccactttcagggtggcgacgtctcgtcatcgtgatggggcagctgggcgacttcgattcgatggaatatgcccaggctctggtgccgcggctgtcggaactggagcaggcggggatttcgctgcaggccattgccattggtgatcagaccggagccgatcgcttctgcggttttacaggtttcccgcgccaggctctcgaggtgaatagcagctcaacgctgcacgaggccctcggtctttatgcagggctgaaactccccggcggtccctggcctggatttctgctgatgtgtgccggcattggttctcctgggacgttgcaggaagtgctgaggggctacaccggtgatcgtcgggcggcggcgatcttcggcgatgacgacatggtgaaggcctggccgttgccagcttttcctgcatctatgttcgcccgtgctgggggatgtggattccagcgaccctttgaactcgccacaaaacgtctgagcaacatgggcgaggtgctcagtaactggcgcacctatgtgcctgtagatgaccacatcgcccagcggggcggtacctttctgatcgatgcggacggatctctgctgtatgagtggcgggagacacacctactcggttttgccgacgacatggcggttccactggcgtttcttgatccttacctcagcgtcaattacagctaa

SEQ ID NO: 247665 - DNA, 487 bp, Unknown
  Bacterial polypeptide expressing nucleotide sequence isolated from the Sargasso Sea
aattttttttattgaagtgatgggtagaaattcgggacatttagccattcatgctggaaatgcaactggtgcagaattaattttgattccagaaattaacattaaaaaccttgattctttagttcaaaaaattaaaaaaataaatattaaaaaaaaatcaattattatcatatatgctgaaggatgtaatttaggaccggttgataaaataactaattatgttcaaaaaaagatgaaaaattcaaatgttagatattctattttaggtcatattcaaaggggtggaagtccatgtgaaaaagacagaattaatagttcgttattaggttattattcagtaaaagaaataattaaaaaagataaatctaaaatggttggaattatcaatgataagttgatagttcaagaccttaaattatcaattaaaagaaaaaaagagatcaataaagatctctttaaaattactgagataatcaataattattaa

SEQ ID NO: 247666 - DNA, 277 bp, Unknown
  Bacterial polypeptide expressing nucleotide sequence isolated from the Sargasso Sea
atgctggttgcgataaccgcatgtgctgtctgtttggttatagccttgattcgaacaatgcttggtccgactgcctttgaccgcgttttagcggtgaatgcaattggcaccttgatcattcttggtattgcgctgcatggctttatcatggaacgcccagaatttgtcgatatcgccctgttatatgccattttaaactttatcgggacgtttgcagtactgaagctatttagtaccgggtctttgggtgatgccccgccatcgaggaaaaaatgat

SEQ ID NO: 247667 - DNA, 178 bp, Unknown
  Bacterial polypeptide expressing nucleotide sequence isolated from the Sargasso Sea
atgagcagtaaaaaaattggagttttgacaagtggtggagactgcggaggtctaaatgcagcgattagatcaatattttatagagcaaaaaataaatacaatatggaagtatatggaattagagatggaacggctggattaattaaacgacccggtagatgcaatacaattaacatac

SEQ ID NO: 247668 - DNA, 766 bp, Unknown
  Bacterial polypeptide expressing nucleotide sequence isolated from the Sargasso Sea
attgcttactgaggggtccattaaaactccagaacaaatttctcttatgagagaagctggagacatagttgctcgtgctatgaaaaaatgtggtgaaactcttcagtctggtgttactactggtgaaattgataattttctgaggggatatattgaaaatgagggagccaaaccagcttttttgggtctttatggttttcctgctactgcttgcatatctataaatgaggaaattgtccatggtattccgggcgagcgtaaattaaacaaagatgatcttatatctattgattgtggtgcaatagttggaggcatgtatagtgatcatgcaagaacatttataattgaaaattcaggagatgaagttaggaataatattgtcaatgtagcagataaggctctacagataggaattgaaaatgccctacctggtaatcgaataggtgttatatcgaacgctattgaaaattatatctcaagtatggggtttggtactgttcgtgaatatgttggacatggtataggttctgaattacacgaacctccgagtgtcccaaattttggtcaaaaagatcagggagctttacttagagttggtatggcaatagcaattgaacccatggttactgaagggaactggcagacgaaagtgcttaatgataactggaccgtagtaactaaagatggtaagctttcatctcattttgaggatacgattctcataactgaaaatggtccagaaatattaacaaaggtaaataactga

SEQ ID NO: 247669 - DNA, 1405 bp, Unknown
  Bacterial polypeptide expressing nucleotide sequence isolated from the Sargasso Sea
atgaaaaaacatatagataaccttaagaagttagtgggtgattcaaatgcccttgatagtcaagatgatatccatccatttttagaagactggagagggcatataaagggatcaacgcctctgattctatttccaaacaatagtgatgatgttcaaaatattgtccattattgttatcagaatgacataaaaattgtcagtcaaggaggaaatacgagcttatgtggagccaatgttccaaactcttcagatcataggcttgaaattgtaatcaatacttcaaaaatgaatagagtaatagaagttgattctttcaatcaatcgatcattgtggagagtggctgtattcttcagaatattcaaaataccgctgaagatcatggtcttctatttcccttgagtttaagcgcagaaggtacatgccagataggaggaaatgtttccacaaatgctggtggagttaatgttcttaagtatggcatggccagagaccaagtgatgggtattgaagctgttctgcctgatggatcaatatttactgacttgaaatcactgagaaagaataatactggctatgacttgaaacaactttttataggcgcagagggcaccttgggagttatcacaaaagtaagcatgaagctttcttctagtcctaaaagagagatctcatcgatggtttctttaaagagtgttgatgatgcaattaatcttctcaaggaaacaaaaaaaagatttggtgacaatgtcactgcttttgaattaatcagtcaatcatgcttagttgcaataaatgatttcctcagccacataaaactgcctttggggcatgaggattcttggcaggtcatttttgagatcatcaatcatagtgaggatgatttatcagaattcctcgaaaataaattatcagaagacctcatcaaaaatgcattgatagctaaaaatgaaaaagaaagaaatgatttctggcttgttagacacagtatctctgaggcagaaaaattatcaggaagaggagtgcatcatgatatttcacttcctattaagaaaattcctgaatttctacaaacaacaatcccagcgatggaaaaagttgctggaaaatctattgtctatacatttggtcatcttggtgatggaaaccttcattttacaaaaaaacagcctgaagatatggatggcgatgaattcgtgaggttttcaaaggaaatcaatactgtcgttcatgaaaatgctgaatttcttggtggatcatttagtgccgagcatggtattggatcaaggctgaaagaggatttgattaagtattctgatcccacaaaaatagatctaatgaaaaagataaaaaaaacattggatccaaaaaatattatgaacccagacaaattgatcgatatctaaa

SEQ ID NO: 247670 - DNA, 1405 bp, Unknown
  Bacterial polypeptide expressing nucleotide sequence isolated from the Sargasso Sea
atggaaactcatataaataaacttaaaacaattgtgggtaatacaaatgctcttcatcgtgatgaagacatccaaccttttttagaagattggagagggcagatcaaaggatcaacgcctctgatactatttccaaaaaatacaaatgatgttcaaaagattgtcagttattgctatgaaaacgacataaagattgtcagtcaaggcgggaatacaagtctttgcggagctaatgttccaaactcatccgatcataaacttgaaattgtgattaatacctcaaaaatgaataaagtcatagaagtcgaccccttcaatcaatcgataattgttgaaagtggttgtatacttcagaatattcaaaacactgcggaagaccatgatcttctttttccattgagcttaagtgctgaggggacgtgtcagatcggtggtaatgtctcgaccaatgctggaggagtaaatgttctcaaatatgggatggccagagaccaggtcatgggaatcgaagccgtgctgccagatggttctttattttctgatctaaaatcacttagaaagaacaatactggatatgacttgaaacaactcttcattggtgcagaaggtactttgggagttataacaaaggtaagtttgagactttcatctagcccgcatagggagatctcatcaatggtttctgttgaaaaagtagatgatgcaatcactcttctcaaggaaacaaaaaagagattcggggaaaatgtcacagcttttgaatttattagtcaatcgtgtttggttgcaataaataattttctaaatcacataaaactacccttgggatataatgactcttggcaaattatttttgaagtcattaaccatgatgaggattcgttatcagaattcttggaggaacaagtaaataatggcgtagtcacaaatggtttaattgccaaaaatgaaaaagaaagaaatgatttttggctcgttagacatagcatttcggaagcagagaaattatcaggaagaggagtgcatcatgatatttcactccctattaagaaaatccctgagtttctagaaacaacaatacctgccatggaaaaagttgcaggaaaatctatcgtttatacctttggtcatcttggtgatgggaatcttcattttacaaaaaaacaaccggaagatatggatggagatgatttcatgaatttttccaaagaaatcaatgctgtagtttatgaaaatgctgaatctcttggcggctcatttagtgctgaacatgggattggatctaaactgaaaaatgatttggtcaaattctccgatccaatcaagctcgatttaatgaaaaaaattaaaaaaacattggatcctaaaaacattatgaaccctgataaattgatcgatacctaaa

SEQ ID NO: 247671 - DNA, 568 bp, Unknown
  Bacterial polypeptide expressing nucleotide sequence isolated from the Sargasso Sea
aatgagcagtaaaaaaattggagttttaactagcggtggtgactgcgggggtcttaatgcagcgatcagatcaatattttatagagcaaaaaataaatataacatggaagtatatggaattagagatggcacagctggattaattaaacgtccagtggatgcaatacaattaacatataaaacttttgcaggatatcttttaagacaaggtggaacttttttgggatcaacaaacaaaggaaacccctttaaaattcccaccgaggatggcaaacatgtcgataaatcaaaagaaataattgaagggtatcactcaatgaaacttgatggtttaattattataggaggagatgggagtatgcaaatcctaaaaaaacttgcaaaagatggtgatatgaaaatagtagctataccaaaaactattgataatgatgtaggagcaacagaaagctcaattggttttcatactgcagtagatgttgcaacacaagcactggacaatcttcaatctaccgctgctagtcatagaagatcaatgatactagaggttatgggtcgagatacagga

SEQ ID NO: 247672 - DNA, 493 bp, Unknown
  Bacterial polypeptide expressing nucleotide sequence isolated from the Sargasso Sea
actgtatagaccgctcagatggaaaaagtgcaaaataaatggctttaccttccaaacagtctgctctacttttcatactataagaacgaaacctactgagaaggattttattgtgtcaaaacgtgtcgcagtattaacgtcgggtggtgatgcaccgggcatgaatgcatgtattagggcaattgtgattgcctgcaaaaagcggaattacgatttaataggttatcttcatggctacaatggattaattaaacaagaatctatttctctttcgctagactctactcacaaccttattcagcaagggggtaccgtattacacagcgctcggtgtaaagccttcaccgaagaagcggggttaaagcaagcggctgctaatttatccgaggcaggcgtagatgctcttcttgttattggtggtgacggttcatttcgcggggctacgcgtctggccgaccattaccatggccaaattatcggtattccaggcacg

SEQ ID NO: 247673 - DNA, 618 bp, Unknown
  Bacterial polypeptide expressing nucleotide sequence isolated from the Sargasso Sea
ttgatgtagctacaaatgcattagatatgcttcaacccacagcggctagtcatagaagggcgatgatacttgaggttatgggaagagatgcagggcatatagctttgaacgcaggtattgcaggtggggcagatgtaattttaattccagaaattccatactcgattaaaggaattgcaaatcatattgatcaaattaggagtaacggtaggaatcatgctcttattgttgtcgcagaagcagtaaaaaaagaagacgggaaaaaggcaactgttaaatttgttgatggagaagtaaggctaggaggtattggatcttatttgggagatgagatttacaaacttactgatgcggaaacacgcgtaacagttcttggtcatgttcaaagaggagctcaacccacacatagagatagacttatcgctagtgcttttggggttaaggctgtagatttaattgctaatgctaaatataatagagtagtagtttggaaagatagaagtgtgcaagatgtgtctctagatgatattgctggaaaatcccaaacgttaagtaaaaatgatcctatgatagaagtagctaaaggcttaggtatatatataggtgaatttaattaaa

SEQ ID NO: 247674 - DNA, 585 bp, Unknown
  Bacterial polypeptide expressing nucleotide sequence isolated from the Sargasso Sea
aacctactgcagctagccatagaggggttatgattttagaagttatgggcagagatgctggacacatagcattaaatgcaggaattgctggtggtgcagatgtaatattgataccagaaataccttattctctaaaatctatagcaaagcatattgaaaatattcgttcaactggaagaaatcatgctttaattgtagttgctgaagcagttctaaaagaagatggatcaaaagccatagtcaaatatatagatggacaagttcgtttaggaggtattggatcatatttgggggataagatttataaaataacaaaatcagaaaccagagttacagtattaggacatttgcaaagaggagcccaacctactcacagagatagattaattgcaagtgcctttggtgtatacgcagttgatttagttgctcaagaaaaatttaatagaatagttgtttggcaaaatagaggagttgcggatataaatcttgatacaattgcaggtaaatctcaaaaaataaacaaagaagatcatttgataaaagtagcacaaggcttaggaatatatcttggagaaataatttaaa

SEQ ID NO: 247675 - DNA, 388 bp, Unknown
  Bacterial polypeptide expressing nucleotide sequence isolated from the Sargasso Sea
gttgcagaagcagttaaaaaagaagaatgggaaaaaagtaactgtaaagcatattgatggtcaagttagattaggtggtattggggcttatttaggtgatgaaatttataaacttactgatgcagagacacgagtaacagttcttggtcatgttcaaagaggtgctcaacccacacatagggatagacttattgcaagcgcatttggagttaaagctgttgatttaattgcaaaaaagaaatttaatagagttgttgtttggcaagatagaagtgtaaaagatgtttcactaaatgatattgctggaaaatctcaaacattaagtaataatgacccacttataaaagttgcaaaaggtttgggaatttatataggtgaatttaattaa

SEQ ID NO: 247676 - DNA, 907 bp, Unknown
  Bacterial polypeptide expressing nucleotide sequence isolated from the Sargasso Sea
ccgcagaaagtggctgcggatcagttagtggctgaccaagtggatgtgctgcatacgattgggggagatgacactaacaccgcggctgcggatttagcggcctatttggctgagaacgactacgatttacgggtgatcggcatgccaaagacaattgacaatgacgtttatccgattcggcagactttgggggcatggaccgctgcggagcaggcggctaattacttcgctaatgtggttgcggagcacaactcaagcccgcgtatgctcattatccatgagattatggggcgccattgcgggtggttagcagcggctacggcgaaagagtaccacggccgactgaagactaagccctggctgccggaaattggattgagtcgcgagcgccatgacgtgcatgctgtttatttgccggaactggagatcgatctcgacgcggaagcggcaagactgtccaagataatggacgagcatggcaatgttaatattttccttagcgaaggggctggagtagacgcgatcgtcgctgctaaggaggcggctggtgaggagattgtacgcgacgcttttgggcacgtgcagctggatttcattaatccgggccaatacttcgccaagcaatttgccgataagattaaggcggagaaagttcttgttcaaaagagtggatacttctcccgggcggctgcggctagcgtcaaagatctgaatctcatcaagagttgcgtggacaaggcggttgaatcttcactcgctgggctaagcggcgtcgtaggtcatgacgaggacaagcaagggatcatgagagcctgtgagttcgcgcgcatcaagggaggcaagcccttcgattcgaaccaagactggtttgatgaattgctttcagaactgggcaaccgaaaggcga

SEQ ID NO: 247677 - DNA, 782 bp, Unknown
  Bacterial polypeptide expressing nucleotide sequence isolated from the Sargasso Sea
tatgaaaattgcatttttgacagcaggtggcatcgctccctgtctttccgcttccattggcgcactgattcaaaggtataattatacctctcctgatgcggaattgatcggctatctcaatgggtacagaggccttcttattggagagtctttaacattttcaagcactgtcaaagaacaatattctactttatacgattttggcgggtcacccataggcaacagcagagtaaagctaaccaatgtggaggactgcataaaaagaggttatgttcaaaatggtgagaacccactaaaagttgccgctgaccaattaacaaaagatggaataaatatccttcatacgattggtggagatgacaccaataccatggcagcacagctatcattttatttaaaagaaaatggttacgatcttacggttgttggtttaccaaaaaccgttgacaatgatgtgtttccagtctctcagactcttggtgcgtggacagctgcggagcagggagctatcttctttgagaatgttgccaatgaaaatacaacgagcaataggcaattaattattcatgaggttatgggaaggcactgtggctggcttactgcccagactgctagagattaccgagcacgattggctcagaggaaatttttgcctgagataatggtgtctaaagataggtgggatgttgatgccatttttgttcctgaacaaagtatggatctggacgctgagatagaacgcttaaaaaaggtcatggataaaaaagatggtgtaaatattt

SEQ ID NO: 247678 - DNA, 274 bp, Unknown
  Bacterial polypeptide expressing nucleotide sequence isolated from the Sargasso Sea
aacaaattctgaaacaagagttactgttctgggccatgtacaaagaggtgcacagcctacacatagggataggttaattgctagtgcttttggtgtttacgcaaccgatcttattgcaaaaaagaaatttaatagagttgttgtttggaaagatagaggtgttcaagacttacctttagctcaaatagccggttattcgaaaactattcaaagaaatgatcccttaataaaagttgctaaaggtttaggagtttatataggagaatataattaa

SEQ ID NO: 247679 - DNA, 670 bp, Unknown
  Bacterial polypeptide expressing nucleotide sequence isolated from the Sargasso Sea
tatgaaaagaattggaatagtaactagtggaggcgattgcggtggtttaaatgctgcggtaaggtctattttctatagagcaaatgataagtataatttagaagtttatggtattttagaaggtactgttggtttgatgaatcgacctgtttcatacactaaacttgattacaatacattctctggaaatttactaagacaagggggtacatttttaggaacaactaataaaggaaatccatttaaatttccaatgtctgatggatcatttaaagatagaactattgaaataataagtggttatcatgaactaggtttagatggattaatagtaattggaggtgatggaagcatgaagattcttaaaaatattgctgataaaggaaatttaaatatagttgcaattcctaagacaattgataatgatgttggggctacagaaagttcaataggctttcatacagctgtaagtgtagctacaaacgcactagataatcttcagtttacagcagctagtcataatcgaacaatgattttagaagttatgggaagagatgctggccacatagctttaaatgcaggaattgcgggtggtgcagatgttatattgatacctgaaataaaatattctattgatggtattataaaaaaattaaaaaaaaatgaatag

SEQ ID NO: 247680 - DNA, 623 bp, Unknown
  Bacterial polypeptide expressing nucleotide sequence isolated from the Sargasso Sea
tgcagttgacgtagcaacaaatgcgttagatatgcttcaaccaacagcagctagccatagaagagtaatgattttagaagtaatgggtagagatgcaggccacattgctttgaatgcaggaatagctggaggagcagatgttattttgattcctgagattcaatattcaataaaatctatcgctgatcatattgagaaacttaggtctaagggaagaaatcatgcattaattgttgttgcagaagctgtaaaaaaagaaaacggtaaaaaagctacagtgaaatatgttgatggagaggttcgacttggagggattggaaattatcttggtgatgaaatctataaaataacagactctgaaacaagagttacagttctaggacatgttcaaagaggtgctcaaccaactcatagagatcgtttaattgcaagtgcctttggggtttatgctgttgatttaattgcaaagaaaaaatttaatagagtagttgtatggaaagacagaggagtacaagatttgatgcttagtcaagttgctggatattcaaaaactgttcaaaagaatgatcctttgataaaagtagctgaaggtcttggaatttatattggtgaaacaaactaaa

SEQ ID NO: 247681 - DNA, 553 bp, Unknown
  Bacterial polypeptide expressing nucleotide sequence isolated from the Sargasso Sea
gatattagaagttatgggtagagatgctggccatattgctcttaatgcgggaattgcaggaggtgctgatatcatcttaatacctgaaataaaatattcattgaaatcaattgcaaatcatattgataaattaagaaaaagtggaagaaatcatgctttgattgttgttgctgaagctgtaaaaaaagaaaatggtttaaaagcaacagttagatatattgatggtcaggttagattaggaggtattggcgcatatcttggagaaaaaatatataaaataacaaaatctgagacaagagttacagttttaggccatgttcaaaggggcgcacaaccaactcatagagatagactaatagcaagcgcttttggagtttatgcagttgacttagtagcaaaagaaaaatttaacagaattgtagtttggcaaaacagaggagtaacagatataagtttagattctatcgctggaaaatccaaaacagttaggattgatgatcctctaattaaagttgctcaagcattaggcatatatgttggggaatttaattaa

SEQ ID NO: 247682 - DNA, 586 bp, Unknown
  Bacterial polypeptide expressing nucleotide sequence isolated from the Sargasso Sea
tcaacctactgctgcaagtcatcgacgagccatgattttagaagttatgggaagagatgcagggcatattgcttaaactcaggaatagctgggggagctgatgtaatattaattcctgaaataccttattctctaaaaaaaattgctaaacatattgaaaaaattcgagctagtggaagaaatcacgcattatgtgttgttgctgaggctgtaaaaaaagaagatggaacaaaagctacagttaaatttgtagacggccaggttcgcttaggtggtattggttcttatctaggtgatgagatttacaaattaactgatgctgaaactcgtgtaactgttcttggccatgttcaaagaggtgcgcaaccaagtcacagagatagattaattgcgactgcttttggtgtttatgctgtagatcttgttgcaaaaaataaatttaatagaattgttgtttggcaaaatagaggagtaacagacatcagtctagactctgttgctggtaaagcaaaaacagtcagtgttaatgatccattaataaaagttgcaaaagctttaggaatatatgtaggtgaaattaattaaa

SEQ ID NO: 247683 - DNA, 457 bp, Unknown
  Bacterial polypeptide expressing nucleotide sequence isolated from the Sargasso Sea
ttcaattaaaggcatagcatcgcatatagaaaagttgagagctaatggaagaaatcatgctttaataatagtagctgaggcagttaaaaaagagaatggatccaaagcaactgttaaatttcttgatggcgaggtaaggttgggaggtataggttcttacttaagtgatgaaatttataaatatactaaagcagaaacccgagttactgttttaggtcatgtacaacgtggggctcaaccgagtcatagagatagattaatagcaagtgcatttggtgtttatgcagtcgatttgatagctaaggaaaaatttaatagaattgtagtatggcaaaatagaggagtaacagatattgatttagattctatagctggttattcaaaaactattaatatcaatgatccattaatcaaagttgcagaaggtttaggaatatatatcggcgattctacttaa

SEQ ID NO: 247684 - DNA, 490 bp, Unknown
  Bacterial polypeptide expressing nucleotide sequence isolated from the Sargasso Sea
agcagatgtaattttaattccagaaattccttactcgataacaggaattgcaaaccatattgataacataaggagcaaaggtagaaatcatgctcttattgttgttgcagaggcagtaaaaaaagaagatggaaaaaaggcaactgttaaatttgtagatggagaggtaagactaggtggtattggagcatatctaggagatgaaatatacaaacttactgatgctgaaacccgtgtaactgtgctcggtcatgttcaaaggggagctcaaccaacgcatagagatagacttattgcaagtgcttttggagttaaggcagtagatttaattgcaaatgataaatataatagagttgtagtttggcaagatagaagtgtgaaagatgttgccctagacaatattgcaggaaaatctcaaactttaagtaaatccgatcctttaatagaagtagccagaggtttaggtatttacataggagaatttaattaa

SEQ ID NO: 247685 - DNA, 802 bp, Unknown
  Bacterial polypeptide expressing nucleotide sequence isolated from the Sargasso Sea
tttccaattttatatgattttggtggctcacctataggaaatagcagggtcaagcttactaacataaaagactgcgtaaaaaaaggatatgtgaaagaagggggagacccattagaaatcgcggctaatcaattaacaaaagacaaggttgatattcttcatacaatagggggtgatgataccaataccatggcagctcagttatcattttacctaaaaaaaaatggatatgaattaaccgtagttggtcttccaaaaactgtcgacaatgatgttttcccggtatcacaaactcttggtgcttggaccgctgcagaacaaggatctattttttttgagaatattgttaatgaaaatactactagcactagacagttaataattcatgaagtcatgggtagacattgcggttggttaacggctaagacagctagagactaccgtgataggttgaaaaatagaaactttattcctgagctaatggttgaaaaatcaaaatgggacatagatgctatatatatacccgaacaggattttgattttcaatacgaagcagaacgcttgaagaatctcatggataaaaaagataatgttaatatttttcttagtgagggggccggtcaagaggcaattattagagaaatggaagagaaaggtgagaatgttccaagagatgcttttggtcatgtgcgtttagatgagattaatccaggacaatggttcgctaaacagttttcctctgagctcaaagctgaaaaaactcttgtccaaaagagtggttattttgcacgttccgcaaagg

SEQ ID NO: 247686 - DNA, 516 bp, Unknown
  Bacterial polypeptide expressing nucleotide sequence isolated from the Sargasso Sea
ctttaaatgcaggtatagcaggtggggcagatgtaattctaattccagaaattaaatactcaataaaaggtattgcaaaccatattgataacataagaagtaaaggaagaaatcatgctcttattgtcgttgcagaagcagtaaaaaaagaagatggaagaaaggcaactgttaaatttgtagatggagaggttaggctaggtggtattggtgcatatttgggagatgaaatatacaaacttactgatgcagaaactcgtgttactgtacttggccatgttcaaaggggagctcaaccaacacatagagatagacttattgcaagtgcttttggagttaaggcagtagatttaattgcgaatgataaatataatagagttgtagtttggcaagatagaagtgtgaaagatgttgccctagataatattgcaggaaaatcacaaactttaagtaaatctgatcctttgatagaagtagccaaaggtttaggtatttacattggtgaatttaattaaa

SEQ ID NO: 247687 - DNA, 615 bp, Unknown
  Bacterial polypeptide expressing nucleotide sequence isolated from the Sargasso Sea
atgtagcaacaaatgctttagatatgcttcaaccaacagcagcaagtcacagaagagtaatgattttagaagtaatgggtagagatgcgggtcacattgctttgaatgcgggaattgctggaggagcagatattattttaatacctgagattcgatattcaataaaatctatcgctgatcatatagaaaaaattagatctaaaggaagaaatcacgcattaattgtagttgcagaggctgtaaaaaaagaaaacggtaaaaaagctacagtgaaatatgttgatggtgaagtccgacttggagggataggaaattatctcggtgacgaaatctataaaataacagactctgaaacaagagttacagttctaggacatgttcaaagaggtgctcaaccaactcatagagatcgtttaattgcaagtgcctttggggtttatgctgttgatttaattgcaaagaaaaaatttaatagagtagttgtatggaaagacagaggggtacaagatttgatgcttagtcaagttgctggatattcaaaaactgttcaaaaaaatgatcctttaattaaagtagctgagggacttggcgtttatattggtgaaacaaactaaa

SEQ ID NO: 247688 - DNA, 541 bp, Unknown
  Bacterial polypeptide expressing nucleotide sequence isolated from the Sargasso Sea
ctggatgcgattgataaaattcgtgataccgcgtctagtcatcatcgtcattttattatagaagtcatggggcgcagcgctggatttttagcggcggaagttggtattgcgggcggtgctgaatatgttttgattccagagcggcctattgaaatcccagacttaattactttgcttaaagcgaccagccataaaaaaagcagttcgattgtcattgttgcagaggctgatcaacctgggcgtagcatggctattgcagatgaaattaaaaggatgaataatcttgaatataaggtgtgtattttgggtcatacgcagcgtggtggtagtccaacagtgaccgaccgaaaagttggctccatgatgggtgtgaaagctgtggaaggcttgctgtctcagggggttggaaaaatggttgcgattaaagacagtcagtatctctataccgattttccaaaagccgagcatgcacaacgttttttcgaaaattttgatttactcaaggtaaatgatattttatgcggggttgactctagttaac

SEQ ID NO: 247689 - DNA, 997 bp, Unknown
  Bacterial polypeptide expressing nucleotide sequence isolated from the Sargasso Sea
aattttggtgggagtccgattggaaatagtagagttaagttgacaaacgttgaagactgcgtaaagaaaggctatgtcaaagagggcgaagatcctttggagattgcagcaaatcaattggttaaagatggaattgatattttacacaccataggtggagatgatactaacacaatggcagcagccttagccaagcatcttgatgagtcaggtagaaatttgacagttgttggtttaccaaagacagttgataatgacgtaataccggtgaaacaaacacttggagcttggactgcagcagagcaaggtgctattttctttgataatattgctaatgaaaatactaccagccgtcgacaattgataattcatgaagtaatgggaagacattgtggatggctaacagcaggcacagcttatgagtataggaaattgttagaaaatagaaaatatctaccagaattattcgtttctaaagaaagatgggatgttcatgccgtttacattccagaagtagatgttgatttccagaaagagtctaaaagattgaagaaatgtatggatgaaaatgattgtgttaatatatttttgagcgaaggggctgggatggatactatagttagagagttagaatctcagggaacagaagttcctcgtgatgcttttgggcatgttcgtttagacgacattaatccaggacaatggtttgcaaagcagttcgcaaaggcattggatgcagacaaaacattaattcagaaaagtggttattttgcacgttcagcaaaaccaggagttcgagatttagaattgattaagaaatcagcttttatggcagttgattttgccttgaaaggtgaaagtggtttagttggattagatgaaaacaataatggagagttaggtttgattgatctgcaattaattgaaggcggtaaagaatttgacacttctcagaaatggtttactgaaatgttgaatgatataggtcaattatagc

SEQ ID NO: 247690 - DNA, 670 bp, Unknown
  Bacterial polypeptide expressing nucleotide sequence isolated from the Sargasso Sea
ttgagtgaacattggaatggtcaaatcatcggtatacccggcaccattgacaatgatatagctggtacagacgcaaccattggatattacactgctatagacactgcgatgagctctatagacaaggttcgagatacggcggatgctttcgagagaatttttcttgtagaagttatggggcgcaacgctgggttcttagcgcttaatgcagcgctgtcttccgcagcagactatgtggtggttccagagttcttcacgtctgctgaagctgaaatacaaaaaatagtgaagcaaataaaagcgcagagacgattaaaaggacctgtcagtttcattgtggtagtggctgaaaacgtatggccaaacggtttgttgggcttaactgaagcgctgcagcaatatgatattaatgacgtacgaccggtaaccttaggtcacgtacaacgcggtggttcaccggtagcacaagaccgcttacttgccactacactaggcgaattcgctattagtttggtaggcaaagatgtaacgaacgttatggttggtgaagtgaaccagcgccctgtaaccgtacccctgtcagacacctgggaaaacaccaagccgctcaacgaagctcgcgtagacgccatgcgtacgcttatgaatgaacgatatcgtagcgaatgaa

SEQ ID NO: 247691 - DNA, 865 bp, Unknown
  Bacterial polypeptide expressing nucleotide sequence isolated from the Sargasso Sea
acaacaagtaaaggtaatccttttaaatttcccatgccagatggtaaatacaaagatagatcccaagacattattgatggttacaaagaattaggtcttgatgggcttattgttataggcggagatggaagcatgtcgatattaactgaaattgcaaaaagaggggatttaaatattgtagccatacctaaaacaattgacaatgatgtgggagccactgaaagctccatagggtttaatacagctgtaaatgttgctacccaagcactagataacttacaaacaactgctgcaagtcatcaaagaacgatgattttagaagtaatggggagagacgcgggacacatagctattaacgcaggcattgcaggtggagcagatgtaatcctaattcctgaattaaattactctatcaaaggaattgtcaataaactcactgaaatgaaaaatagaggaatagttcattcgctgattgtagtagcagaggcagtaaaaacagaaaacggaaaaagttatactgttgaatacgctgatggtcaaaaaagattaggcggtataggtaattatctttcagaggaaataatgaaaagtactgatatagagtgtagggttacttctttggggcatgttcaacgaggtgcaccccctactccacgtgatagaattttagcaagtgcttttggagtttatgctgttgatttaatagcaaaaggaaaatatggaagaatggttgcctggagagatagaaaagttgttgatgttccaattagtgaaggaatttctacttataaagttgtagatagatccgatcctctgattgaaactgctttagcacttggggtatatgttggtgatataaagtgaa

SEQ ID NO: 247692 - DNA, 1001 bp, Unknown
  Bacterial polypeptide expressing nucleotide sequence isolated from the Sargasso Sea
gaatacataccagatggaagttatgggaattcgtgatggtacagttggattaatgcaaagacctgtagcttttgttccattagattatcaaacttttagcggttctcttcttagacaaggagggacatttctgggaacaacaagtaagggtaatccttttaaatttccaatgcctaatggtggatataaagatagatctcaagacattattgatggctacaaagagttagatcttgatggacttatcgttataggaggtgatggaagtatgtcgatattaactgaaattgccaaaaggggtgatttaaatattgtggctatacccaagacaattgacaatgatgtcggggctactgaaagctcaattggctttaatactgctgtaaatgttgctactcaagcacttgataacttacaaacaactgctgctagtcatcaaagaacaatgattttagaagttatgggaagagatgcagggcatatagctattaatgcaggtatagccggtggagctgatgtaatcctaattcctgaattaaattactctataaaaggcatagttaataaactaacagaaatgaaaaatagaggaattgtgcattctcttattgttgtagcagaagcagtgaaaaccgaaagtgggaagagttatactgttgagtacgccgacggtcaaaaaagacttggtggtataggaaactatttatcagaagaaataatgaaaagcactgacatagaatgcagggtcacttctttaggtcatgttcaaagaggtgcacctcctactccacgtgatagaattttagcaagtgcgtttggtgtatatgctgttgatttaattgctaaagggaaatttggaagaatggttgcttggagagatagaaaagttgttgacgttcccattagtgagggcatttcaacttataaagttgtagatagatctgatcctctgattgaaactgctttagcacttggagtatatgttggtgatataaagtgaa

SEQ ID NO: 247693 - DNA, 469 bp, Unknown
  Bacterial polypeptide expressing nucleotide sequence isolated from the Sargasso Sea
atgggaaaaggaacaggccatattgcgttaaatgccggtattggatctggtgctgaagaaatattaattcctgaacataatatgggaatagaaagacttcttgattctttaagtaaaagtgaaaagtcaggaaaaacctcttcaattattatagttactgaaggagaaaagattggtaaaaatgtatttgaatatgcatcatatattgaaaagaatttacctgaatatgaggtaagagttactgttcttgggcatattcaaagaggaggttctccctctagctttgatagagttctagcttctagaatgggagtttattcagtagactgtttaatcgaaggtataagcaatgtaatgataggtattaaagatgatgaaatggtatgtgttaaagttgataaagcaattaaaagtagaggtgagattaacaaaaacctgataagagtttttgatataatttcaatttaaa

SEQ ID NO: 247694 - DNA, 328 bp, Unknown
  Bacterial polypeptide expressing nucleotide sequence isolated from the Sargasso Sea
tcaagttagattaggtggaattggtgcatatttaggtgatgaaatatataaacttactgatgcagagacacgagttacagttttaggccatgttcaaagaggggctcaaccaacacatagggatagactaatcgcaagtgcatttggagttaaagctgtggatttaatcgcaaaaaagaaatttaatagggttgtggtttggcaagatagaagtgtcaaagatgtttctctaaatgatattgctggaaaatctcaaacattaaataataatgatccactgataaaagttgctaaaggattgggtatttatataggtgaatttaattaa

SEQ ID NO: 247695 - DNA, 295 bp, Unknown
  Bacterial polypeptide expressing nucleotide sequence isolated from the Sargasso Sea
ggagatcagatttataaactcacagatgcagaaacacgagttacagttctgggtcacgtgcaacgtggtgcccaaccaacacatagagatagattaattgcaagtgcttttggtgttaaggctgtcgatttgatagccaatgaaaaatataatagagtagttgtttggcaagacagaagcgttaaagatgtttctttagaagatattgcaggaaaatctaaaacattaagcagcagtgatccattaattaaagtagctaaaggattaggtatatatattggagatttaaattaaa

SEQ ID NO: 247696 - DNA, 1192 bp, Unknown
  Bacterial polypeptide expressing nucleotide sequence isolated from the Sargasso Sea
ttgaaagtagcaattctaaccgctggtggcttagcgccttgtttatctgcatctattggtgcattactagataattattcaaaagaaatgccagaagcagaattgtttggttatttatacggatatcaaggccttttaaaaggtgatttattccaattttcaaccgttgatattgatgtaagtcagttatttgaatttggtggtagtttattaggtaacagtagagtcaagcttacaaatactgaggattgtattcgaaggggattagtggctgatggagaatccccattagaagtagctgcacaacaactgcagaaagatgaaattaatattttacatacagtgggtggagatgatacaaatacaatggcagcggcattatctaattatctttcagataacaattataaccttactgttattggattaccaaagactgttgataatgacatcattccaataaaacaatcattaggtgctgataccgcggctcatcaaggatctatattttttaaaaatattgtaaatgaaaacacttcgaacccaaatacttttattattcatgaagtgatgggtcgccattgcggatggcttactgcagcaaccgcaagaaagtatcgttcatatttattagaaaaagaatttaaccgtaaggtcttattggatagaaaaaaatgggatattgatgctatttacattcctgagatcaaaattgacttgaaaaaagaagcatcaagattaaagcaggccatgcaagataaaggtaatgtaaacatttttcttagtgaaggatcatgtcaagaagaaatattaagcgatatgaagagaaataatcaacaaattgaaaaagatgcttttggtcatgtacgtcttgataagattaatcctggtgaatggttttctaatcaattttcttctaaaataggagctgaaaaaactttagttcaaaagagcggttatttttcacgatcagcggcaccaaacaactttgatctagatttgattaaacaatctgccaaatatgctgttcaatgtgctataaatagtcaatcaggtgtagtgggaatagatgatgaagataatgatgaattgagtattattaattttgatcggataaaaggtggtaaaccatttgatcatagttgtacttggttccaagaaatgctacatgacattggacaaattgattaat

SEQ ID NO: 247697 - DNA, 1129 bp, Unknown
  Bacterial polypeptide expressing nucleotide sequence isolated from the Sargasso Sea
ctttctcaatcgcatatcatgccaagagttggaatactaacaagtggaggaatcgcgccgtgtctttcagcatcaataggcggattgattgaaaaatataatgaaatctctcctgaatctgaaatcataggatatttgcacggatatagaggcctacttcttggtaacagtataaaattttcagacaaagttaaacagaatttctcagctctttacaattttggaggaactccagtaggcaatagccgagtaaaattaacaaacatagaagactgcatcaagaaaggctatgtttcagaaaatcaagatccattggaagtcgcagcacaacagttagaaaaagatggaattgatattttacacacgattgggggcgatgatactaacactatggctgcagctttagctaaacatttagaaacttcaggaaaaaagttaacagtcgtcggtcttccaaagacagtagataatgacgtaattccggtcaagcaaacgctaggggcttggactgcagcagagcaaggcgcgcgcttttttcagaatatagttaatgaaaatactacaagtcgtcgacaattaataatccatgaagtaatgggcaggcattgcggttggctcacagcaggaactgcgtatgaatatcgtaaatctttagaaaatatgacattccttccagaattaaatatgtctaaagaaaggtgggatgttcatgctgtttacattccggaaatagatgtcgattttcaaaaagaatcacaaagacttcgtaaatgtatggatgaaaatgattgcgtaaatatatttttgagcgaaggagcaggaatggacactattgtgagggaatttgaatcacaaggacaagaggtaccccgagatgcctttggacatgttcgtttagatgatataaatccaggacagtggtttgcaaaacagtttgcggatgcattagatgccgacaaaaccctcatccaaaagagcggatattttgcacgttcttcaaagccaggtggaagagatttggaattaattaaaaaatcagcattcatggcagctgaatttgctttaaatcgtaaaagtggtttagtggggctagatgagaataacaacggagaattaggtttgatagatt

SEQ ID NO: 247698 - DNA, 151 bp, Unknown
  Bacterial polypeptide expressing nucleotide sequence isolated from the Sargasso Sea
atgaaacgaattggagtgttaacctctggcggtgatgcaccgggaatgaatgcctgtgtgcgcgcactggtattgaccgcacatgccaacgaacttgaagttataggttttcagcgtggatttaatggggtgatcgagcagcagtaccaga

SEQ ID NO: 247699 - DNA, 1189 bp, Unknown
  Bacterial polypeptide expressing nucleotide sequence isolated from the Sargasso Sea
atgaaaatagcttttttaactgcgggcggtattgccccatgtttatctgcttctatcggtgccttaattgaaaaatataatgagattgcacctgaagcagaaattataggatacctgaatggatatcgtggacttcttttgggtaagtcaatttcattccctaactctataaaaaaagattttgaaattctatatgattttggtgggtctccaataggaaacagtcgggtaaaactcaccaatattgatgactgcgtaaaaaaaggatatgttaaggaagggcaagatcctcttaaggtcgctgcagaacagctaaagaatgatggagttaatatattacatacaataggtggtgacgatacgaatactatggctgctcaattatcatcatatttaaatgataatggatataacctgacggttgtaggactgccaaaaacagtagataatgatgtgtaccctattaagcagactctgggtgcctggaccgccgctgaacaaggcgctattcattttgaaaatatcgttaatgagaatacgaccagtacaagacaactcattatccatgaagttatgggcagacattgtggttggttaactgcacgtacagcatatgattatagagaaagaatgagatcccgcagatttttacctgaactattaattgatgaaaaaagatgggatctggatgctatttatattcccgaagtagattttgatatacatcatgaagtggtgcgattaaaaaagataatggatgagaaggatggagttaatatttttctaagtgaaggtgcgggccaagaaatgatcattcgtgaaatggaaaataaaggacaaaatatacctagagatgcttttggacatgtacgtttggatgaaataaacccagggcaatggtttgcagaacagctttccaatgagttaaatgcagaaaaaaccttagtacaaaaaagtggatatttttcgcggtctgcgaaagcgaatcaaagagatttggaattaataaaaagctcagcttattttggagcacaaaatgccatagaccatattagtggcgttgcgggcatagatgatatggatggagaattgaaattaattcagttttctaggataaaaggtggaaagccattcaatatcaaagaagattggtatcaaaaaatgcttgaggaaattgggcaaaaataaa

SEQ ID NO: 247700 - DNA, 844 bp, Unknown
  Bacterial polypeptide expressing nucleotide sequence isolated from the Sargasso Sea
tttgaaggaagcttaatgagaatgggtggaacttttttaggatcaaataacaaaggaaacccttttaaaaaaattattaagaatggaaaaaaaattgattcatctgatttagttatagaaggttttaaaaaattaggaatagatgcactaataggtattggcggagatggaagtttaaaaatcctacaaactattacaaaaaagggaaatataaattttgtaggcattccaaagactatagacaatgatgtaaagcataatgagctttctataggatatgatactgcagttgatgttgcaacaaatgcattagatatgcttcaaccaacagctgctagtcatagaagagtaatgatcttagaagtaatgggtagagatgcaggtcatattgctttgaatgcaggaatagctggaggagctgatgttattttgattcctgagattcaatattctataaaatctattgctgatcatattgagcaacttaggtctaaaggaagaaatcatgcattaattgttgttgcagaagctgtaaaaaaagaaaatggtaaaaaagctacagtgaaatatgtcgatggcgaggtgcgccttggagggattggaaattatattggtgatgaaatctataaaataacagactctgaaacaagagttacagttctaggacatgttcaaagaggcgcccaaccaactcatagagatcgtttaattgcaagtgcctttggggtttatgctgttgatttaattgcaaagaaaaaatttaatagagtagttgtatggaaagatagaggagtacaagatttgatgcttagtcaagttgctggatattcaaagactgttcaaa

SEQ ID NO: 247701 - DNA, 322 bp, Unknown
  Bacterial polypeptide expressing nucleotide sequence isolated from the Sargasso Sea
tatgaatacgatagctgtattaacgtcaggtggtgatgctccaggaatgaattcttccattagagcagttgttagatcttgcgctcactataataaaaaatgtattggcataataagaggatattcaggcttaattgaaaatgacactaaggttttaaatactagaagtgttaggggaattattaatagaggaggcaccttcttatattctgcaagatgcgaagaatttaaatcaatagagggaagaaaaaaagcgtatgaaaaccttaaggctatgggtgctgatggtttaattattattggaggagatggttctttcacg

SEQ ID NO: 247702 - DNA, 796 bp, Unknown
  Bacterial polypeptide expressing nucleotide sequence isolated from the Sargasso Sea
tataatcaaccaaggcggaactattctgaaatctgcccgttccaaagaatttatgaccaaagagggtcgccagaaagcttatgacaattgcgtaaaatatggaattgatgctttggtgtgtattggcggagacggaacttttaccggagcaaagatcttcaacgaagaatttggaattcgcgtaatcggggtgccgggaactattgacaatgatattttcggaacagataataccattggctatgatacggctctgaataccgcaatggatgctatagacaaaatccgtgatacggcaacttcgcacaatagggtattctttgttgaggtgatgggtcgtgatgcaggctttattgcattaaacagtggtttggcaacaggtgctttagatattttaatccctgaaagaaaagatagtatggatgagctttttgctactttcagaaatgctgaaaaaacaggaaaagcatcaagcatcgttgttgtggcagaaggcgaaaagctggctaatatttacgaattggcagagcagactaaaacagaatttccggactatgatatccgcgtagcgattttaggacacatccaaagaggaggctcgccaagctgtgcagacagagtgttggcaagcagacttggctacggtgcagtagtaggactgatggacggacaaaacaatgtaatggcaggaatgcgatctaatgatattgtatatactcctattgaagaagccatcaaaaagcataacgaaatcaataaagatcttttgctgatttcagaaattttagcaatctaa

SEQ ID NO: 247703 - DNA, 764 bp, Unknown
  Bacterial polypeptide expressing nucleotide sequence isolated from the Sargasso Sea
tagatgtttagaatttagaacaaagaaaggaagatcaaaggctaagaacactctagataaatataacattgattcactagtagttataggtgggaatggttcgttaaccggtgctcttctgcttgaggaggaacatggtataaagactataggtatcccaggaacaatcgataatgatttagtaggaacaagatgtacattaggatttgatacagcattaaatactgcagttaatgctattgataaaattagagatactgcaagttcacataataggttattttttattgaggtaatgggcaaaggatctggacatattgctcttaacgcagggattggtgcaggcgccgaagaagttctaatacctgagcaaggtatgggactggataggttactagattccctaaaaaagagtgaaaaatcaggtaaatcttcaagtataattgttgtttctgaaggtgataaaataggtgataatgtatttagtttttcatcccatattgaaaaaaatcttcctcattatgaaataagagtttcaatcctgggtcatattcaaagaggtgggtctcctactagttttgatagagtcttagcttcaagaatgggtgttcatgctgttgattgtcttatttcaaataaaagtaaagttatggttggaattatagatgataaaatggtaactgttcctatggaaaaagctattaaaggaggtcaacaattagacaaagacttagttagagtttgtgatataatttcaatttaac

SEQ ID NO: 247704 - DNA, 895 bp, Unknown
  Bacterial polypeptide expressing nucleotide sequence isolated from the Sargasso Sea
tgggacttttttgggctctaataataaaggaaatccatttggcacgattgaaaaagatggaaaaaaaattgaggtgtctaaaatcattatagatagttttaaaaaattagaactagacgctctaattggtataggaggagatggaagtttaaaaattcttaaatctttgacaaaaaaaggaaatattaagtttataggtattcctaaaactattgataacgatgttaaacataatgaactttcaatagggtatgatacagcagttgatgtagccacaaatgcattagatatgctgcaacctacagcagctagtcacagaagagcgatgatacttgaagttatgggaagagatgcaggtcatattgctttaaacgcaggtattgcgggtggggcagatgtaattctaattcctgaaattccatactcaattaagggaatagctaatcatattgatcaaattaggagcaaagggagaaatcatgctcttattgttgttgcagaagcagtaaaaaaagaagatggaaaaaaagcaacggtaaaatttcttgatggagaagtaagattaggaggtattggtgcttatttgggagatgaaatatacaaactaactgatgctgagacacgtgtaactgttcttggtcatgttcaaagaggagcacaacccacacacagagatagactaattgccagtgcttttggggttaaggcagtggatttaattgcaaagcaaaaatataatagagtagtcgtgtggaaagatagaagtgttcaagatgtggccctagatgatattgctggaaaaatcccaacattaagtaaaactgatcctttgatagaagtagcaaaagggctaggtatttatattggtgaatttattaaaaatttacctatcttt

SEQ ID NO: 247705 - DNA, 878 bp, Unknown
  Bacterial polypeptide expressing nucleotide sequence isolated from the Sargasso Sea
tgctgttcgtgcagttgttcgtactgcagcattctataaattagagtgtattgcaatttacaaaggttatcaaggtttgattgatgacaacacccaaaggatgaaccccagaagtgtcaataatatcattaataaaggcggtacaatattaaaatctgctcgttgtttagaatttcactcttcagaaggaagggaaaaagcattccaaacaattcaaagacatagaattgatgcactagttgttattggaggagacggtactttcactggagcaatgatttttcaatctgaatttaatattcctgtaataggcataccaggtacaattgataacgatattttcggaacatcacatacgataggatatgacacagcattaaatactgttattgacgcgatagataaaattagagacaccgctatatctcacaatcgtttattttttgttgaagttatggggagagatgctggtcacattgcattaaacactggtattggtgccggagcagaagaaatcttgattcctgaagaaaatatgggactagagcggttattagaatcacttagtaggagtgaaaagtcaggaaaatcttcaagtattgtagttattgcagaaggagataaaacaggcaaaaatgtttttgaaatcgcagaatatgtggagaaaaatatgcccaattatgaggtgcgtgtttctgttttaggccatatgcaacgtggaggaaggccaagctgttttgatagagtattagcttcgagaatgggtgttcaagctattgaatctttaaaagaaggaaaatcaaacgtgatggtaggacttaaagaagatgaaatgatattaactcctctagataaagcaataaagggtaaatctgaaa

SEQ ID NO: 247706 - DNA, 461 bp, Unknown
  Bacterial polypeptide expressing nucleotide sequence isolated from the Sargasso Sea
attgacaagtaagataaaaaaaataggtgtgctaacatcaggaggcgattctcctggaatgaatgctgctgttagagcagttgttaggtctgctgaattccacaaaattcattgtttcggtatttataaaggatatgaagggttaatatcagatgacattaaaaaacttaacgcaaggtcagtcaaaaatattgtcaataaaggtggtacaattttaaaatctgctagatgtcttgagtttaaaactagtgaaggtaggttaaaagcaaaacaaactctagacaaatatgaaatagattctcttgttataattggtggaaatgggtcacttgaaggaggtaaaatatttgaagaagaacacggtataaaagtagttggcattccaggtactattgataatgatctagctggtactagatgttctcttgggtatgatactgcgcttaatacagcagttgagg

SEQ ID NO: 247707 - DNA, 847 bp, Unknown
  Bacterial polypeptide expressing nucleotide sequence isolated from the Sargasso Sea
gaataaagtaaatgtttatggtattcagtacggctatcaaggactaattgaaaatattattaaaattttaacaaacacagatgttggaaatactattcatcttggagggactattttaaaaacagcaagatcagatgaatttagaactaaaaatggaagaaaaaaagcttattccaatttgattaaaaataaaattgatggattaattattcttggaggagatgggtcactaacaggagcaaaagtattttatgaagaaaataattttccaataattggtattccttgtactattgataatgatttatatggaacagattatagtattggattagcttctgctagagaaacaatagttgatgcagtagataaaattagagatacagctgcatcccatgaaagattttttattgtagaagttatgggaagagaatctggattcctagccctcgaatcaggagtagcagctggagctgagatgattttaatacctgaaaataataataataatatagatagtataataaatgatattttaaaaataaatgaggaaaaaaaatcaataataatcatttatgctgaaggttgtaatctagggtctgcaaataaattagcaaatcaaataaaagaaaaactacctgaaagtaaagttagatattcaatactcggtcatatccaaagaggtggaagagcagttccatctgatagaatactaggaactcaattaggttgcaaatccgttaattatttattgaaaggtgaaaaaaataaaatgataggaataataaataataaagataatttaataagttttgaagaaatgttaaaaaataaaaagaggaattga

SEQ ID NO: 247708 - DNA, 919 bp, Unknown
  Bacterial polypeptide expressing nucleotide sequence isolated from the Sargasso Sea
gtatataaacgggctgtgataaaaaaaatagctattttaacaagtggtggagattgtgctggattaaacgcggtaataagagcagtaactcttagagctcacaataagtataaatgggaaatctatggaataaaagatggaactcttggattgcttaaggaacctttagatatacttaaacttgaacctaataattttgaaggcaatttaatgaggatgggtggcacttttcttggttcaaataataaaggcaatccatttaaaaaatttattagaaatggtaaaaaaattgactcaacagatattattattgaaggctttaaaaaaattggaattgatgctctaattggaataggtggagatggaagtttaaaaatacttcaaactttaacaaaaaaaggaaatataaattttgtgggaattcctaaaacaattgataatgatgtaaaaaataacgaattatcaataggttatgatactgcagttgatgtagctactaatgcattagatatgcttcaacctacagctgctagtcatagaagagctatgatattagaggttatgggaagagatgctggacatatagcattaaatgcaggtattgcaggaggagctgacataattcttattccagaaataccctattcaattaaatcaattgccaaacatatagaggaattaagagcgaaaggaagaaaccatgcacttatagttgttgcagaagctgttaaaaaagaaaatggaaaaaaggcaactgtaaaatatgttgatggtgaagtaagacttggaggtattggtaattatttaggagatgaaatttataaaattactaattctgagactagagtaacagttttagggcatgtacaaagaggtgctcaaccaacacatagagatagactgattgcaagtgctttgg

SEQ ID NO: 247709 - DNA, 541 bp, Unknown
  Bacterial polypeptide expressing nucleotide sequence isolated from the Sargasso Sea
aatgccaaaagagattaaaatagtaggtgtcttaacttcaggaggagatgctcctggaatgaatgctgctgttagagctgtagttagagcgtgtgagtataatgagattggctgttatggaatatatcaaggttaccatggtcttgttaatgagaatataacaaaaatgtctgccagaagtgtaaaaaatatcattaacaaaggaggtactattcttaaatctgcaagatgtgaagaatttagatctaaagaaggaagggaaaaagcttttgctacaataaaaaagaataatattgacgctttaattgtaattggaggaaatggttctcttgaaggggctgccatatttcaaaaagagtacggagtgccatttgtaggaatcccaggaactatagataatgatttagagggaactagagctactttaggctatgatactgccttaaatactgtaagtgaggcaatagacaagattagagatacagcgatttctcataataggcttttctttgttgaagttatgggaaagggaacaggccat

SEQ ID NO: 247710 - DNA, 648 bp, Unknown
  Bacterial polypeptide expressing nucleotide sequence isolated from the Sargasso Sea
cttacatgggggcgaaacgcctgactgaaatggcttccccatgcatcggtctgccgggcactatcgacaacgatatcaagggcaccgactacaccatcggttacttcaccgctctgggtactgtagtagaagcgattgaccgtctgcgtgatacctcttcttctcaccagcgtatttccatcgttgaagtgatgggccgctactgtggcgatctgaccctggcggctgcaattgccggtggttgtgagttcgtagtggttccggaagtggaattcagtcgcgacgatttggttgctgaaatcaaagcgggcatcgcgaaaggtaaaaaacacgcaattgtagcgatcactgaacacatgtgtgacgttgacgaactggcgcattacatcgagaaggaaacgggccgcgaaacgcgttcgaccgtactgggtcacattcagcgtggtggttccccggttccttacgatcgtatcctggcatcccgtatgggcgcatatgctattgaactgctgctggcaggtcatggcggtcgctgtgtcggtattcagaacgagcaactggttcaccacgatatcatcgatgctatcgagaacatgaagcgtccattcaaaggtgactggctggactgcgcgaaaaaactgtactgat

SEQ ID NO: 247711 - DNA, 827 bp, Unknown
  Bacterial polypeptide expressing nucleotide sequence isolated from the Sargasso Sea
tttgggttcaaacaataaaggcaatcctttcaaaaaattctatagtaatggtaaaaaaattgactctacagatctaatcattgagggctttaaaaaaataggcattgatgctttaattggtattgggggtgatggaagtttaaaaatactccaaagcttaacaaaaaaaggtaacattaattttgttggaattccaaaaactatagataatgatgttaaaaataacgagttatcaattggttatgacactgctgtggatgttgcaacaaatgctcttgatatgcttcaaccaactgcagcaagtcatagaagagtaatgatacttgaagttatgggaagagatgcagggcatattgcattaaatgcaggaattgcaggaggagctgatattatattaattcctgaaataccatactcaataaaatcagtagctaagcacatagaagatttaagagtaaagggaagaaatcacgcattaatagttgtagctgaagcagttaaaaaagagaatggaaaaaaagcaactgtcaaatatgtagatggggaagttagacttggaggtataggtaattatttaggtgatgagatatataagatcacaaattctgaaacaagggtcacagttttaggtcacgtgcaaagaggagctcagccaactcatagagatagattaattgcaagtgcatttggtgtttatgctgttgatttagtggcaaagaaaaaatttaatagagttgttgtatggaaagatagaggtgtgcaagatcttccattaaatcaaatagctggatattcaaaaacaattcaaaaaaatgatcctttaataa

SEQ ID NO: 247712 - DNA, 792 bp, Unknown
  Bacterial polypeptide expressing nucleotide sequence isolated from the Sargasso Sea
atagagggtttaaaaaattaggaatagatgcactaataggtattggcggagatggaagtttaaaaatccttcaaagtattacaaaaaaaggaaatataaattttgtaggtattccaaagactatagacaatgatgtaaagcataatgagctttctataggatacgatactgcagttgacgttgcaacaaatgcattagatatgcttcagccaacagctgccagccacagaagagtaatgattttagaagttatgggtagagatgcaggtcatattgctttgaatgcaggaatagctggaggagcagatgttattttgattcctgagattcaatattctataaaatctattgctgatcatattgagaaacttaggtctaaaggaagaaatcatgcattaatcgttgttgcagaagctgtaaaaaaagaaaacggtaaaaaagctacagtgaaatatgttgatggagaggtacgccttggagggattggaaattatcttggtgatgaaatctataaaataacagactcagaaacaagagttacagttctcgggcatgttcaaagaggtgctcaaccaactcatagagatcgtttaattgcaagtgcctttggggtttatgcggttgatttaattgcgaagaaaaaatttaatagagtagttgtatggaaagacagaggagtacaagatttgatgcttagtcaagttgctggatattcaaaaactgttcaaaaaaatgatcctttgattaaagtagctcaaggacttggaatttatattggtcaaacaaactaaa

SEQ ID NO: 247713 - DNA, 145 bp, Unknown
  Bacterial polypeptide expressing nucleotide sequence isolated from the Sargasso Sea
aatgccaaaagagattaaaatagtaggcgttttaacttcaggaggagatgctcctggaatgaatgctgctgttagagctgtagttagagcatgtgagtataataagattggctgttatggaatatatcaaggttaccaaggtctt

SEQ ID NO: 247714 - DNA, 640 bp, Unknown
  Bacterial polypeptide expressing nucleotide sequence isolated from the Sargasso Sea
ggagaagagtttaattttccagttgttggaatccctggtacaattgataatgatttattcggaacttcacatacattaggttatgatactgctctcaatactgtcatggaagcaattgataaaattagagatacagctatatctcaccataggttgttttttgttgaagttatgggtgctgatgctggatatattgcccttaattctggattagcaataggtgctcaagaaattttaatcccagaggttaatatgagttttgataacctaattaactcattgaaaaaaagtaaaacagcaggtaaaacatcgagtattatcgttgtagctgagggtgataaaacaggaaaaaatgtctttgaattagcttcaaaaatagaaaaaactttacctaaatacgaaacaagagtttccgttttaggtcatatccaaagaggaggtacaccatcatgttttgacagagtgctgggaactcaattaggagttaaggcagtagaaagtttaattgaaggtaaacatggctcgatggttggaattcaaaatggaaaaatagtttttacaccacttaataaagcattaaaaggtaaaactaaaattaacaaggaattattgagaatatctcaaataatgaatacttaat

SEQ ID NO: 247715 - DNA, 757 bp, Unknown
  Bacterial polypeptide expressing nucleotide sequence isolated from the Sargasso Sea
attggcattggcggtgatggaagtttaaaaatactccaaagcttaacaaaaaaaggtaacattaattttgttggaattccaaaaactatagataatgatgttaaaaataacgagttatcaattggttatgatactgctgtggatgttgcgacaaatgctcttgatatgcttcaaccaactgcagcaagtcatagaagagtaatgatacttgaagttatgggaagagatgcagggcatattgcattaaatgcaggaattgcaggaggagctgatattatattaattcctgaaataccatactcaataaaatcagtagctaaacacatagaagatttaagagcaaagggaagaaaccatgcattaatagttgtagctgaagcagttaaaaaagaaaatggaaaaaaagcaactgtcaaatatgtagatggggaagttagacttggaggtataggtaatcatttaggtgatgagatatataagatcacaaattctgaaacaagggttacagttttaggacatgtgcaaagaggagctcagccaactcatagagatagattaattgcaagtgcatttggtgtttatgctgttgatttagtggcaaagaaaaaatttaatagagttgttgtatggaaagatagaggtgttcatgatcttccattaaatcaaatagctggatattcaaagacaattcaaaaaaatgatcctttaataaaagttgcaaaaggcttaggaatttatattggtgaattaagttaaa

SEQ ID NO: 247716 - DNA, 614 bp, Unknown
  Bacterial polypeptide expressing nucleotide sequence isolated from the Sargasso Sea
aatgccaaaagagattaaaatagtaggcgttttaacttcaggaggagatgctcctggaatgaatgctgctgttagagctgtagttagagcatgtgagtataataagattggctgttatggaatatatcaaggttaccaaggtcttgttaatgagaatataacaaaaatgtcagccagaagcgtaaaaaatataattaacaaaggagggacaattcttaaatctgcaagatgtgaagaatttagatctaaagaaggaagggaaaaagcttttgctacaataaaaaagaataatattgatgctttaattgtcattggaggaaatggttctcttgaaggagctgccttgtttcaaaaagagtactcagtgccatttgtaggaatcccaggaactatagataatgatttagagggaactagagctactttaggctatgatactgccttaaatactgtaagtgaagcaatagacaagattagagatacagcgatttctcataatagacttttctttgttgaagttatgggaaagggaacaggccatattgctttaaatgctggaattggatctggtgctgaagaaatattaattcctgaacataatatgggaatagaga

SEQ ID NO: 247717 - DNA, 340 bp, Unknown
  Bacterial polypeptide expressing nucleotide sequence isolated from the Sargasso Sea
atgaatacaataggtgtattaacatctggtggtgattccccaggaatgaattcagcaattagagccgttgtaagggcttgtgctcattatgataaaaaatgtatcggtatagtacgaggttactctggtttaattgaaaataatactaaagtattaaatactagaagtgttagaggaattataaatagaggtggtacttttttatactctgcacgatgtgaggaatttaaatctgttgagggaagaaaaaaagcatttaaaaacctcaaaggtgctggaattaatggattaattgtaattggtggagacggatccatttactggggcattgaagcttcaa

SEQ ID NO: 247718 - DNA, 853 bp, Unknown
  Bacterial polypeptide expressing nucleotide sequence isolated from the Sargasso Sea
ggaaatccatttggcacaattgtgaaaaatggaaaaaaaattgaggttttagatcttattttaaatagctttaaaagattagaacttgatgcactgattggtattggaggagatggaagtttgaaaattcttcaatcattgacaaaaaaaggaaatattaatttcataggaattcctaaaacaattgataatgatgttatgcataatgagctttcaataggatatgatactgctgttgatgttgctacaaatgcattggatatgcttcaacctactgcggctagccatagaagagcgatgatacttgaggtaatgggaagagatgcaggtcatatagctttaaacgcaggtatagcaggtggagcagatgtaattttaattccagaaattccttactctataaaagaaattgcaaaccatattgataacataagaagcaaaggaagaaatcatgctcttatcgttgttgcagaagcagtaaaaaaagaagatggaaaaaaggcaactgttaaatttgtagatggagaggtaagactaggcggtattggatcatatctgggagatgaaatatacaaacttactaatgccgaaactcgtgttactgtacttggtcatgttcaaagaggagctcaaccaacacatagagatagacttattgcaagtgcttttggcgttaaggcagtagatttaattgcgaaagataaatataatagagtcgtagtttggcaagatagaagtgtgaaagatgttgccttagatgatattgcaggaaaatcaaaaactttgagtaaatccgatcctttaatagaagtagctaaaggtttggggatttacataggtgaatttaattaaa

SEQ ID NO: 247719 - DNA, 679 bp, Unknown
  Bacterial polypeptide expressing nucleotide sequence isolated from the Sargasso Sea
atttaaaaaatttataagaaatggaaaaaaagtagattctactgatatcataatcgaaggttttaaaaaaattggaattgatgccttaattggaataggtggagatggtagtctaaaaatacttcaaagtttgacaaaaaaaggaaatattaacttcgttggtattccaaaaacaattgataatgatgtaaagaataacgaattatctattgggtatgatactgcggttgacgttgcaacaaatgcactggatatgttacaaccaactgctgccagtcatagaagagtaatgattttagaggtgatgggaagagatgctggtcatatagctttaaatgcaggtattgcaggtggtgccgatatcattctaattccagaaataccatattctttaaaatcaattgctaaacatattgaaaatttaagatccaaaggaaggaatcatgcgttaattgtagtagcagaagcagtaaaaaaagaaaatggtaaaaaggcaacagtcaaatatgtagatggtgaagtaagacttggcggtattggaaattatcttggcgatgaaatttataaaattacaaattcagaaaccagagtaactgttttaggtcatgttcaaagaggagctcaaccaacacatagagatagattaattgctagtgcttttggtgtttatgcagttgat

SEQ ID NO: 247720 - DNA, 774 bp, Unknown
  Bacterial polypeptide expressing nucleotide sequence isolated from the Sargasso Sea
atagaattagatgctctaattgtataggtggagatggaagtctaaaaatatgcaaatctttaactaaaaaaggaaatataaactttattggcatacctaaaacaattgacaatgatgtaaaacataatgagctatctataggttatgatacagctgttgatgtagctacaaatgcacttgatatgttacaaccaactgcagctagtcatagaagagcaatgattttagaagttatgggaagagatgcaggacatatagctttaaatgcaggaatagctggtggagctgatgttatacttatcccagaaataccatattcaattaaaggaatagcaaagcatattgaaaaaataagaggtgaaggaagaaaccatgctttaattgttgtagcagaagctgttaagaaagaagatggaaaaaaagcaactgtgaagtttgtagatggggaagtaaggttaggtggtattggatcttatttaggtgataaaatttataaacttactgatgccgaaacacgtgtaactgttttaggtcatgtacaaagaggtgctcaacccacccatagagatagattaatagcaagtgcttttggtgtaaaagcagtagatttaattgctaatggtaaatttaatagagttgttgtatggcaagatagaagtgttaaagatgtttcattaaatgatattgctgggaaatcacaaactttaagtaagaacgatccattaattgaagtagctacagctttaggaatatatattggagatattaattaaa

SEQ ID NO: 247721 - DNA, 763 bp, Unknown
  Bacterial polypeptide expressing nucleotide sequence isolated from the Sargasso Sea
ttgactagtaaactaaataaaattggtgttttaacatcaggtggtgattcacctggtatgaatgctgctgtaagagcagtagtaagatctgctgaatttcacaatattcattgttatggaatctataaaggatttgaagggcttatttcagatgaaattaaaaagctcaatgcacgttcagtaaaaaatattgtaaataaaggtgggacaattctaaaatctgccagatgtttagaatttagaacaaaagaaggcagacttaaagctaaaaataatttagacaagtatggcatcaattcacttgtagttatcggtggtaacggttctttactaggaggtaaaatttttgaggaagaacatggagttaaagtagttggtataccaggtacaatagataacgatcttgctggaacaagatgtaccctaggatatgatactgctctaaacacggcagttgatgctatagacaaaattagagatactgcaatttctcataatagacttttctttattgaagttatgggtaaaggttctgggcatattgctctaaatgctggtataggagcaggtgctgaggaagtgttgattccagaaaaaaatatgggaattgatagattattaaaatctcttaaacacagcgaacagtctggtaagtcttcaagtataattgtagtttctgaaggagataaaattggtgataatgtatttaagttttcttcttatatagaaaaaaactttcctcactatgaaacaagagtttcta

SEQ ID NO: 247722 - DNA, 884 bp, Unknown
  Bacterial polypeptide expressing nucleotide sequence isolated from the Sargasso Sea
cgatgtagttgaattaaagcctgatttttttgatggaaatttaatgagaatgggcggtacttttttaggatcaaatagcaaaggtaatccattcggcactattaataaagaaggaaaaaaaattgaagtctctgagcttattattaataattttaaaaaactaaatctggatgctttgataggaattggtggtgatggcagtttgaaaattttacaatcattaacaaaaaaaggaaatataaacttcataggaattccaaaaactatagataatgatgttaagcataatgaattatctataggatatgatactgctgtagatgtagcaactaatgctctagatatgttgcagccaacagcagctagccacagaagggcgatgatattagaagttatgggaagagatgctggtcatattgctctaaatgcaggtatagcaggtggtgcggatgtaattttaattcctgaaattaattattcaataaaaggtatagctaatcatattgaaaaaattcgcagcaaaggaagaaatcatgctctgattgttgttgcagaagcagtaaaaaaagaagatgggaaaaaagctacagtaaagttcgtagatggagaagtaagattaggtggtattggtgcttatttaggtgatgaaatttataaacttactgatgcagaaacaagagtaacagtgcttggtcatgtacaacgaggagcacagccaacccacagagacagattaatcgcaagtgcttttggagtaaaggcagtagatttaattgctaataataaatataatagagtagtagtatggcaaaatagaagtgtaaaagatgtttcttttaatgaaattgctggaaaatcacaaaccttaaccaaaactgacccat

SEQ ID NO: 247723 - DNA, 535 bp, Unknown
  Bacterial polypeptide expressing nucleotide sequence isolated from the Sargasso Sea
atgaatacaataggtgtattaacatctggtggtgattcaccaggaatgaattcagcaattagagctgttgtaagggcttgtgctcattatgaaaaaaaatgtattggtattgtacgtggatactctggtttaattgaaaataacactaaagtattaaataccagaagtgtcagaggaattataaatagaggtggcacttttttatactctgcacgttgtgaagaatttaaatcagttgagggcagaaaaaaagcatataaaaaccttaaagatgtaggaattgatgggttaattgtaataggtggagatggatcatttactggagcattgaaacttgaagaagagtttaattttccagttgttggaattcctggaacaattgataatgatttatatggtacttctcatactttaggttatgatactgctcttaacacggtgatggatgcaattgataaaattagagacactgcaatatctcaccatagattatgttttgttgaagttatgggtgctgatgctggatatattgctc

SEQ ID NO: 247724 - DNA, 757 bp, Unknown
  Bacterial polypeptide expressing nucleotide sequence isolated from the Sargasso Sea
attaattggaattgtggagacggtagtatgaaaatacttcaaaaattgactcaaaaaggaggtataaattttgtaggaataccaaaaactattgataacgatgtgatggataatgatctttcaattggttatgatacagcagttgatgtagctactaatgctttagatatgttacagcctacagcagctagtcatcgtagagcaatgattttggaagtaatgggaagagatgcaggacatattgctttaaattcaggtatagctggaggtgctgatgtcattttaattcctgaaataccttattcattaaaaaagattgcagatcatatagataatattcgtgctcaaggaagaaatcatgctttaatagttgttgctgaagcagtaaaaaaagaagatggtttaaaagctacagtaaaatttgtagatggacaagttcggttaggaggaataggctcttatttaggtgatgaaatttataaactaacagatgctgaaactagagttacagtattaggacatgtccaaagaggagcacaacctactcatcgggatagattaattgctagtgcttttggagtttatgcagttgatttgattgcaaaagaaaaatttaatagaatagttgtgtggaaaaatagaggtgttacggatatagatttaaactcaatagcaggacaatcaaaaacaataaatgtcagtgatcctctaatcaaagttgctcaaggtttgggaatttatgtgggagaaatataag

SEQ ID NO: 247725 - DNA, 954 bp, Unknown
  Bacterial polypeptide expressing nucleotide sequence isolated from the Sargasso Sea
cagttttaactagtggtggagatgctcccggaatgaatgcagcgatccgtgcaatagtaagaacatcattgaataatgatactcgcattataggctttaaaaatgggtatgaaggcatcattgacaatgactacgtgacttttgacaagcgttcggtaggaaatattatccagcgaggtggcagcatacttcatacttctcggtctttaagattcttaaaaaagaaacatagacaagttgctgaaaataatcttcgagaactatgtatagacggactaatcgtaattggtggggaagggtctactaaaggtgcgattgaattatcaaaaatatctaaaacaaaatgtgttgtaattcctgcaacaattgacaaagatatggcttttgtaggttctaccataggatttgacacagcaataaatacggcacttacagcaatagataaaattagagatactgctactactgctaacgttacacatatagtcgaggttatgggtagaaattgtggatggcttggaatactggctggaattggtgctggagcagaagttacaataattccggaggttaaaactaatattacaaagcttgctcagaaaatcaaacatcaattaaatacaggcaaaaaagggtgtattattatattagcagagggtggattttctaaaggaggggcttcattggctaatgcattaaaagaaaagggaaattttgacttaaggattacaacattgggtcatatgcagagaggtgggaatccatctgcagtggacagagttctggctacggagcttggggtcaatgccgttcttgctttaaaagagggtttttcagatgtgatcattgcaaaaccagtcgctactattgaaaaagttgactttgataaggttgttaatgcaaaggttaacgtagatatgtatctgcatgatcttattgaaaatactgcttgag

SEQ ID NO: 247726 - DNA, 409 bp, Unknown
  Bacterial polypeptide expressing nucleotide sequence isolated from the Sargasso Sea
atggttcagctcgaccgctatagcgtttctgacatgatcaaccgcggcggcactttcctcgggtcagcacgcttcccggagttccgcgaagagcatattcgcgccgtggcgctcgagaacatgaaaaagcgtggcctggatgcgctggtcgttatcggcggcgatggctcttacatgggggcgatgcgcctgactgagatgggcttcccgtgcatcggcctgcctggcaccatcgataacgatatcaaaggcactgactacaccatcggattctttaccgcgctgagcaccgtggtggaagctattgaccgccttcgcgatacctcttcttcccaccagcgtatttcggttgttgaagtgatgggacgttactgcggcgacctgactctggctgcggcgattgccggcg

SEQ ID NO: 247727 - DNA, 1090 bp, Unknown
  Bacterial polypeptide expressing nucleotide sequence isolated from the Sargasso Sea
cctggtggtaaaaaaaatagcaattttaactagtggtggagattgtgcgggtttaaatgcagtaattagagcagttaccttgagagcatacaacaagtacaattgggatgtttatggaattaaggatggaacattaggtttgttgaaagaaccactagacgttatcaaattagagccacaaaattttgagggtagtctaatgagaatgggcggaacttttttgggatcaaataacaaaggcaacccttttaaaaaaattataaggaatggaaaaaaaattgactcatctgatttagttatagaaggttttaaaaaattaggaatagatgcactaataggtattggtggagatggaagtttaaaaattctccaaagtattactaaaaaaggcaatataaattttgtaggtattccaaagactatagacaacgacgtaaagcataatgaactatctataggatatgatactgcagttgatgtagcaacaaatgctctagatatgcttcaaccaactgcagctagtcacagaagagtaatgattttagaagtaatgggtagagatgcaggccacattgctttgaatgcaggaattgctggaggagcagatgttattttgattcccgagattcgatattcaataaaatctatcgctgatcatattgagaaacttagatctaaaggaagaaatcatgcattaattgtagttgcagaagctgtaaaaaaagaaaatggaaaaaaagccacagtgaaatatgttgatggagaggtacgactaggaggaattggaaattatcttggtgacgaaatctataaaataacagactctgaaacaagggttacggttctaggacatgttcaaagaggtgcacaaccaactcatagagatcgtttaattgcaagtgcctttggggtttatgccgttgatttaattgcaaagaaaaaatttaatagagtagtggtatggaaagacagaggagtacaagatttgatgcttagtcaagttgctggacattcaaaaaccgttcaaaaaaatgatcctttgattagagtagctgaaggtcttggcatttatattggtgaaacaaactaa

SEQ ID NO: 247728 - DNA, 346 bp, Unknown
  Bacterial polypeptide expressing nucleotide sequence isolated from the Sargasso Sea
ttgacaagtaaaataaaaaaaataggtgtgttaacatcaggaggagattctcctggaatgaatgctgctgttagagcagttgtcaggtctgctgagttccacaaaattgattgttttggtatttataaaggatatgaagggttaatttcagatgacattaaaaaacttaacgcaaggtcagttaaaaatattgttaataaaggtggtacaattttaaaatctgctagatgtcttgagtttaaaactagtgaaggtaggctaaaagctaaacaaacccttgacaaatatgaaatagattctcttgttgtaattggtggaaatggttcacttgaaggaggaaaaatat

SEQ ID NO: 247729 - DNA, 1016 bp, Unknown
  Bacterial polypeptide expressing nucleotide sequence isolated from the Sargasso Sea
aacccttcgagcaacaaatcaatatggatggaaattttatggactgagagatggcactttgggactaatgaaggatcctatagatgtagttgaattaaaacctgacttttttgatggaaatttaatgagaatgggtggaacttttttgggctccaataacaaaggaaatccatttggcacgattatgaaaaatggaaaaaaaattgaggttttagatattattttaaatagctttaaaaaattagaactagatgcattaattggtattggaggagatggaagtttgaaaattcttcaatcattgacaaaaaaaggaaatattaaattcataggaattcctaaaacaattgataatgatgttaagcataatgagctttcaattggatatgatactgctgttgatgttgccacaaatgcattggatatgcttcaacctaccgcggctagccatagaagagcgatgatacttgaggtaatgggaagagatgcaggtcatatagctttaaatgcaggtatagcaggtggagcagatgtaattttaattccagaaattccttactctataaaaggaattgcaaaccatattgataacataagaagcaaaggaagaaatcatgctcttatcgttgttgcagaagcagtaaaaaaagaagatggaaaaaaggcaactgttaaatttgtagatggagaagtaagactaggtggtattggagcatatctgggagatgaaatatacaaacttactgatgctgaaactcgtgttactgtacttggtcatgttcaaagaggagctcaaccaacacatagagatagacttattgcaagtgcctttggcgttaaggctgtagatttaattgcgaaaaataaatataatagagtcgtagtttggcaagatagaagtgtgaaagatgttgccttagatgatattgcaggaaaatcacaaactttgagtaaatccgatcctttaatagaagtagccaaaggtttggggatttacataggtgaatttaattaaa

SEQ ID NO: 247730 - DNA, 1048 bp, Unknown
  Bacterial polypeptide expressing nucleotide sequence isolated from the Sargasso Sea
atggtaaaaaaaataggtattttgactagtggtggagattgtggtggtttaaacgcagtagttagagctgcaaccttaagagcaaaaaataagtatcagtggaaagttttaggaattagagatggaacattaggattgctaaaaaaccctttggatgttctagaattaaccactaaacattttgatggcaatctaatgagaatgggaggaacattcttgggcactaataataaaggcaacgcttctgaacaaaaagttttagaaggttttaagaaattggaacttgatgctttaattggaattggtggagatggaagtatgaaaatacttcaaaaattaactcaaaaaggaggtataaattttgtaggcataccaaaaactattgataacgatgtaaaggataatgacctttcaattgggtatgatacagcagttgatgttgctactaatgccttagatatgttacaacctaccgcagctagtcatcgtagagcaatgattttagaagtaatgggaagagacgctggacatattgctttaaattcaggtatagctggaggcgcagatgtaattttaattcctgaaataccttattcattaaaaaagattgcagatcatatagataatattcgcactcaagggagaaatcatgctctaattgttgttgctgaagcagtaaaaaaagaagatggttcaaaagctttagtaaaatttgtagacggacaagttcgtttaggtggaataggtacttatttaggtgatgaaatttataaactaacagatgctgaaactagagtgactgttttaggacatgttcagagaggagcacaacctactcatcgagatagattaatagctagtgcttttggagtttatgcagttgatttaattgcaaaagaaaaatttaatagaatagttgtatggaaaaataggggtgttacagatatagatttagattcaatagctggacaatcaaaaacaattaatgtcagtgatcctctaattaaagttgctcaaggtttaggaatttatgtgggagaaatataaa

SEQ ID NO: 247731 - DNA, 988 bp, Unknown
  Bacterial polypeptide expressing nucleotide sequence isolated from the Sargasso Sea
atgccaaaagagattaaaatagtgggtgttttaacttcaggaggagatgctcctggaatgaatgcagcagttagagctgtagttagagcatgtgagtacaataaaattggctgttatggtatatatcaaggttatcacggtcttgttaatgagaatataacaaaaatgtcagctaggagcgtaaagaatatcattaacaaaggagggactattcttaaatctgcaagatgtgaagaatttaggtctaaagaaggaagggaaaaagcttttgctacaataaaaaagaataatattgacgccttaattattattggggggaatggttctcttgaaggagctgatatatttcaaaaagagtattcagtcccatttgtaggaataccaggaacaattgataatgatctagaaggaactagagctactttaggatatgatactgccttaaacaccgttagtgaggcaatagacaagattagagatacagcaatttcgcacaatagacttttctttgttgaggttatgggaaagggaaccggtcatattgcattaaatgcaggtattggatctggtgctgaagaaatattgattcctgaacataatatgggaatagaaagacttcttgattctttaagtaaaagtgaaaagtcaggaaaaacctcttcaataattattgttacagaaggagaaaagatcggtaaaaatgtatttgaatatgcatcatatattgaaaagaacttgcctgaatatgaggtaagggttacagttcttgggcatattcaaagaggtggctctccttctagttttgatagggttctagcttctagaatgggagtttattcagtagactgtttaatcaaaggtataagcaatgtaatgattggtattaaagatgatgaaatggtagctgttgaaatagataaagcaattaaaagtagaggtgaaattaacaaaaacctgataagagtttttgatataatttcaatttaaa

SEQ ID NO: 247732 - DNA, 838 bp, Unknown
  Bacterial polypeptide expressing nucleotide sequence isolated from the Sargasso Sea
gcagtatacatttcaacccctcatacacttcatgcagaactctctataaaagctgctggtaaaggtaaacatattctttgtgaaaaacctggagctgtaaatttcatacaaggtgaaaaagttatacaagctgtacaagaagcaggtgttttttataaagaaggatttatgtataggtgtcatccacaaattccagctttattagatttattaaaaaacaaagtcataggagatttaaaaaaagtaacttcctcttttggattcgatatgacaaaaattattcctcagcatcgactattcaataaagatttagctggaggagctattttagatgttgggttatatccagtatctttttccagaatgattgctggagttaactcaggaaagaaatttattaatccaataaaaattaacgcagaagctaaaattggtagcactggtgttgatgaagtttcttcagctacaatggagtttgataatggactaattgcgcacgtttatactgcaattatgaaaaatatggataacaatgctattattgatggctcagatggaaaaattatagttgatgatccatggatgccaggaaaaaatggtggaccatatcattcaacaattagaataattaaaaataataaagaagaaataaaagaatttaaaggacctgagcatttattcttttttgaagcagaactttcaagtcagacaatattaaaagaaaaacaagaagttccttatccaggaatgacatgggaagatactttaggtaatttaaaagttttagatcaatggagacaaaagataaattataaaataaaagaagataaaatatgaa

SEQ ID NO: 247733 - DNA, 637 bp, Unknown
  Bacterial polypeptide expressing nucleotide sequence isolated from the Sargasso Sea
atgagctttgcggcgaaaaatacactggttcatttcctcgaattcagcagctgcgaccagatcgattcggaggagcgctttcagatcttggaggggattgcgcaagggctgcgaatgatccacgcgtgcgatatcctccatctcgacatcaagcccgccaacgtgctcatcgccgaagacggcaccccatggcttacggattttggcactagcgagagtctatcgacgacgacccgaaagggaggggctggcacgtgtcagtacatgtcgcccgagagatttgacgactacgaagcacccaccaaggcggcggacgtgttctcgctcggcgtactgatgtgggaggtcctcgtcggcgagacaccgtgggcagggaaggatcgagctaagatcatgaaatctgtttgcatgaaagaaggtcgcccctctctcgcttcgggtgctgactggcgcgagtcaccgcatgtcgtggctactgggatgggtggtttgatcgagctgatgtgggcgcaagagcacgaagatcgacccacaatcgaaacggcaagtgatgcacccccccctccccccttctttcgtctgcacactcgtcgcttctttgttcgactgaacgaacttataactctcgatttgtgat

SEQ ID NO: 247734 - DNA, 954 bp, Unknown
  Bacterial polypeptide expressing nucleotide sequence isolated from the Sargasso Sea
attacccgcaacttatctggaacagaacgttgagcgcaaatcggaagaggcggcgaaaagcctggccttcctggcgaaacagttgccggaggtgcgaaaccatctggacgtggcggaaaataaactcaatgccttccgtcaggataaagactccgtcgacttaccgctggaggccaaagcggtgctggactcgatggttaacatcgacgcgcagctcaacgaactgacctttaaagaagcagaaatttccaagctcttcaccaaagcacacccggcgtaccgcacgctgctggaaaaacgtcaggcgctggaagatgaaaaagcaaaactgaacggacgtgtgacggcgatgccgaaaacgcagcaggagattgtgcgtctgacgcgtgatgtagagtccggccagcaggtttacatgcagttgctgaacaaacagcaggagctgaagataaccgaggccagcaccgtgggggacgtgcggatcgttgacccggccattgctcagcccggtgtgctgaaaccgaaaaaagcgctgattattctcggcagcatcattctgggcctgatgctctccattgtcggcgtgctgctgcgttcactgctcaaccgcggtatcgaaagcccgcaggtgctggaagagaatggcatcagcgtgtacgccagcattccgctgtcggaatggcagaaagcgcgggataacgtcaagaccgtgaagggcgtcaagcgttacaaacagagtcaactgctggcggtgggcaatccgacggatctggcaattgaagcggtgcgcagcctgcgtaccagcctccatttcgccatgatgcaggcgcaaaacaatgtgctgatgctcaccggggtgagtccgtccatcgggaaaacctttgtctgcgccaacctggcggcggtgatcagccagaccaacaagcgtgtgctgctgatcgactgcgatatgcg

SEQ ID NO: 247735 - DNA, 685 bp, Unknown
  Bacterial polypeptide expressing nucleotide sequence isolated from the Sargasso Sea
ttcgcctcatattggcaccctaaacgaagggtcgcttcacgcatcgctaaaacgttacatttctcaaaccggcgataaattcgaagttccaatcaatggatttgttatagatattgtccgtgagacaaattctgaaacaacagttttgatagagatacaaacccaatcatttctagctatgaaaaagaaactggtttccctgctcgacgagtacccggtacatattgtgtatccagtcgcaaaagaaacacttcttatgaagcctgggaaaaagccaagaaagtctccgaagaaatactctgtaatttcaatttttgaagaactggtttctattccggagttaatttcacatcagaacctcagctttgaagttgtatctgtttctgttacaaagattcaacaatatgattcttcgctaagaagaggaagaggggggtaccgcacagtaaacacagaattaaccgaaatccattccgctcacttatttgaaggaatcgctgattttcttaatttgctacctaaaagccttccaagtgttttcacgacttttgacattgcttcttgtgcaaatatccctagagaaagcgcgcaacaaatggcatattgctttcgcaaagccggtgtctttcaagaattatcccaaactaaagcaggcaaacactacaaaatcagaaagaatgtgtga

SEQ ID NO: 247736 - DNA, 941 bp, Unknown
  Bacterial polypeptide expressing nucleotide sequence isolated from the Sargasso Sea
catgtgcgtgggtgctgctacaggcatgggcgtacctctgcagataacaaatttgttcaccgcgacctggcggcccgcaacattctgattgacgcaacaatggagtgcaaagtcgctgatttcggcctgtcgcggcgcaccgcagtctctgctgtccttgctggggataatggtggcagcgggcaagacgacggtgacgctgagcgagcctactatcggtcggaaaagggcacctttgcaatccgctgggccgcccccgaagccatggagacgatgcggtttgacgaggcaaccgacatctggagctttggtattgtcatggtggaggtgtttggcgacggtgcaaagccttacgcgcatcttgcaaaccaaggtgtgattgtccacgtccaggccgggaaacggcacgaagctccatccggctgccctcccgacgtctttgcggcgatgcaaagctgctggcacgctgagcctcagcagcgcccaaagtttgctgcgctgctgaccacactgaatgcgctccacctgcagtgcaagctagaaggggccataggcgaccagcccatgctagtcagagggtttacggtatcgcggaagaatggttatgtcagcgaatccaagggtccatcgccactgccggctggtcctaccggatacgcacccgacacgtttgaggcacacgacgaccacagcgtaccctcgggcaccagcttggctctcctgcagcaatccaattcccagcgcttgcagcagattgaagccgatgaggggtaccaaatgcccactggggccacgaatacgaatctgatgcagcaagcagaggagcgtcgctcattaactttgcgcaaagatggcgatggcgcggaagcaacttatgagttcccatcggcagcccagtcaaatggttcggcaaatacgcacggcaacttgtatgttcttgc

SEQ ID NO: 247737 - DNA, 796 bp, Unknown
  Bacterial polypeptide expressing nucleotide sequence isolated from the Sargasso Sea
gggtgctaacattattgaaaagaagaatggtgaaagtatatcattaaggtatcgagatagaaaatctataaaattaaacattggtgatactattcatagacacatgttagatggagatcctattttatttaataggcaacctacactacatagaatgtctatgatgtgtcatagagcacgaattatgcacgaaggttctacttttagattaaatgtagctgttacaaagccatacaatgctgactttgatggtgatgaaatgaatttgcatggtccccaagatgaagaatctcaagcagagctaattcacctggctgctgttcctaaacaaattattagtccagctaacaattcttcaattattgggatttttcaagattcattattaggaacatatagatttactagacctgatattgatttcacacatagagaagccatgaatttattaatgtattatgataaccctaagaccaaattatttgagaaaaataaaaagaaaaggattactaatttcgatttactaagtcaaattttaccacctctatcattaaagtttaaaaatggacaatttaaagattctgaaaacaagaaaaaatcaaataatattgttgaagtcaataatggaaaatatttgagaggacaaattgacaaaaaaacattagcatctggatctaaaggtattattcaacgtattttcaatgattataattataataaatcagaaaagtttattgatgatttacaagctattattactgaatatatgaaaataagttcatatagtgttggtgtt

SEQ ID NO: 247738 - DNA, 686 bp, Unknown
  Bacterial polypeptide expressing nucleotide sequence isolated from the Sargasso Sea
tatgaataaagccattggctttataggccttggaattatgggattcccaatggccggacatctttcaaagcattataaaattcgtgtatttaatcgttcacctgaaaaaacaaaaagctggaaaaagaaatattctggacatgaatgcagctctataaaagaaatatcagaagaatccgatattctttttctttgtgttggcaatgataatgatgtaagagaaattatctctaagaaagacggcgccttagagcatttaaaagcaggttctagcatagtagatcatacaaccacttcagctgatcttgctatagaaatgaataatttccttagctcaaagagtataaattatcttgatgcacctgtatcaggtggtcaggctggagctgaatccggacaactctcaataatggtaggtggtaaaaaagaggcatatgaagaattaaaagatattcttatggcttactctaagtttattaaatatatgggagaaagtggatcagggcagttaacaaaaatggtaaatcagatttgtatagctggtcttcttcaaggtcttgctgaaggaatgaatttctcagaaaaagcaggattaaattccaaagatgttttagaagttatttctaaaggagctgctcaatcatggcaaatggaaaatagatggcacactatgctcgtagataatt

SEQ ID NO: 247739 - DNA, 860 bp, Unknown
  Bacterial polypeptide expressing nucleotide sequence isolated from the Sargasso Sea
gctaatcagcatcatttgttatctttattgtacacaagatggggtctatatgagttagcactagaacagtgcagtgtagtagactcattaatgagttatttaaatggcaaagaagatgttaattatgatactagtttgattctcggtaaaaattattcaagaaaatgtgaattgtttacgatactaagagattatcaaaaggcactaactaattcacgatctgccatcgccttattaaaaaattcgcctatagaattggttaaacattataagattgactctgaaatatacatcgcacaaaatgatatttataaagcactggaatctattgatacaggtttaagcatatgcgatcttaatggaatgtccatccaggagttagatcttttggataagaaaatgaaaattttaaagtcaaataaacttgaaagaagtgcgttagatatatcccaaaagatcatcgcgaaaaaagagcagattgaaaataaaaggatagaaatattactggaaagtcttagctatcggtctgagctattaaaaaatagaaatgaaatttctgcttcagagaatagacaaaaaatgacccttgttataagttttgcaataattgttatgctcggatttattttaaagtattataggaataaaagagagtatttagaacaacaagtaaagcttaatgaacaagaaaagcaaattgtggcatctgaattaaaaaagaaggaaagtgatctaataagaatgtccacatttatagtatcaaaaaatgatcttttgtcatctattgttaaggatcttgagtatcatatatctcttatagataataagagtgatagaaaatcattagagccgctcaagaa

SEQ ID NO: 247740 - DNA, 928 bp, Unknown
  Bacterial polypeptide expressing nucleotide sequence isolated from the Sargasso Sea
tttcaattcattgcacagggatcaggatatgaaggcgaaacaatgctgattaccgatgcttggactggcactccttcgtttgattttgtttctcccgctattgcacaaaacgtagatgcaattccaggtagttacaccaatgctatcgtatgggatgatgtggtaggtgagtttggtgaggtatatgatgtatatggttctcgcgatccatttactggtaatattagacaccaaaattgggatgttattgctcttggagtaagcgaagatgttcaggaggcttaccatgatcttacggtaccattatcagatcgtccagcggactggtactatgctgtagtagtgactgatgctgcagggaataggagtctaccagctgtaatgacttctcctgttagtaatacagcaagaggcataccaactatttccctaactgcgccagcgggttttaaggctgatggtgatcttagcgaatggaagtcaagcggtataattcctctatttatgggtgtctctacaaactcttttggtacacctaaagttatcaataccgtagataatgatgatgacgcttcagtaaatgtttatttagctgctgacagcggtaggctgtacgttgctgcagatgttacagatgatgattttaatgttgaaactggcaattggtgggagcaggatgcttttgagctcttcataggtctttacgatcaaagaggaccaaagcatgcaaatgcaggtcgtggagcagaacctgattataaattcgttttcttaggcgatagtgcttttgttgaatttaccactccctcacttggactttcacatagaagcttcgttgaatatgccaatagtggagtcaatggctcgcctggcgctgcaaaagagtttagtatccgattagactctctagcggcaatgaacagtgatt

SEQ ID NO: 247741 - DNA, 965 bp, Unknown
  Bacterial polypeptide expressing nucleotide sequence isolated from the Sargasso Sea
cttgatctaaattttcctactctagcattatcgtacttcattgatgccaatgaaaaaagtataataaagggaaaaaagccgtggatattgatcaatataggaaatgtttactatcaacaggagcaatggatagaggcaaaagaaaaatatctagatgccatagatgcttttaggaaaagaaactctcaacatccgaatgcattgagcggtaaaacagttgcccttagtaatctgggcagaatagagatgaatttaaatcattatgaccaagcattggcatatttcaaagaagcattggatattaaaagaaattctgcaaggtatcaggcctttcaaaagaccagaatgaatccaaaacctgcttattctggggttgctgcaggtgttgctaaccagcattctcttttatcatctttatacattaaatggggcttatttgaactggcagcagagcagtgccaagcgattgactcattaatgagttttataactggaaaagaagacgttcgatatgaacctagtgtaattcttggtaagaattattcaaggaaatgtgagatcaatacaaagatagcaaagtattcacaggcattaactgattcacgtgctgccattgcatctttagataactggcctatagaattggtcaaacattataaaatagaatcagatatgtatatcgcacagaatgatctctatcaagcgttagcatctattgataaaggtttaaagatatgtgatataaatggaatgtccatgcaggagttagattttcttgacaaaaaaatgaatttgcttatgtcaaataacctagagagaagtgcgcttgatatttctctggttattatagaaaaaaaggaaataattgaggatgcaagagtgaatagatcgcttgaaaaccttaattatatatcagagtttcataaagatcgtgagattattggtcatgcaaaggctagagaaaa

SEQ ID NO: 247742 - DNA, 772 bp, Unknown
  Bacterial polypeptide expressing nucleotide sequence isolated from the Sargasso Sea
ggttggaatattaatccttttcatgatatgagttatgagtggatgaaagatagcgttcagtttatgtataaaactgcaaagtactctggaaataatattcgtcttcagtatgaagcgggtagtggtaaactggtgaaagaagtagatattacagcagatgataaatggcacaccgttaagatagccttaaaagactttgtctatggcgataataccacttctggttttgacactacacaagtaaaggtctttcaattcattgcacagggatcaggatatgaaggcgaaacaatgctgattaccgatgcttggactggcactccttcgtttgattttgtttctcccgctattgcacaaaacgtagatgcaattccaggtagttacaccaatgctatcgtatgggatgatgtggtaggtgagtttggtgaggtatatgatgtatatggttctcgcgatccatttactggtaatattagacaccaaaattgggatgttgttgctcttggagtaagcgaagatgttcaggaggcttaccatgatctgacgataccattatcagatcgtccagcggactggtactatgctgtagtagtgactgatgctgcagggaataggagcctaccagctgtaatgacttctcctgttagtaatacagcaagaggcataccaactatttccctaactgcgccagcgggttttaaggctgatggcgatattagcgaatggaagtcaagcggtataattcctctatttatgggtgtctctacaaact

SEQ ID NO: 247743 - DNA, 493 bp, Unknown
  Bacterial polypeptide expressing nucleotide sequence isolated from the Sargasso Sea
cctgggccaggcgggcaacgtgcttgacctgaccttcccgtaccctgtgccagagcttgtggacttcatcaagctgcttttcctcgacgtgcgcaagctcgtgatgctggactgctggaacatcggcggcttctacggcaagatcgtgaccaatatcgccgtggtgcccgcagtgctagtgggcgtgtgcctgctcatctacatcagccagaagcgaaccctcacggcggtgatcgcagccggagcggccgatacgtccggcctggagatgctgaaggtgaagctgaagcagaacctcttcctcggcatcttcctggtctacccgaccatcaccacgacgctgttccgcgtgccgcagtgccacaggtttggcgatgagtcgttccatgaggacgactacaccatcgactgcagcacgaccaagttcacggtgaccgtggcattctccgtcctcgtcatcctcctcgtcccgatcggcgtcccagcaatcttc

SEQ ID NO: 247744 - DNA, 832 bp, Unknown
  Bacterial polypeptide expressing nucleotide sequence isolated from the Sargasso Sea
catatttcaaagaaagcattggatattaaaagaaattctgcaaggtatcaggcctttcaaaagactagaatgaatccaaagcctacttatgctggggtcgctgcaggtgttgctaaccagcattctcttttatcatctttatacattaaatggggattatttgaactggcagcagagcagtgccaagcgattgactcattaatgagttttataactggaaaagaagatgttcgatataaccctagtgtaattcttggtaagaattattcaaggaaatgcgagatcaatacaaatataggtaaatatttacaggcattaactgattcacgtgctgccattgcatctttagataactggcctatagaattggtcaaacattataaaatagaatcagatttgtatatcgcacagaatgatctctatcaagcgttagcatctattgataaaggattaaagatatgtgatataaatggaatgtccatgcaggagctagatcttcttgacaaaaaaatgaatttgctcatgtcaaataatctagatagaagtgcgcttgatatttctcttgttattatagcaaaaaaggaaataatagaggatggaagagtaaatagatcactcgagaatcttaattatatatcagagtttcataaagatcgtgagattattgatcatgcaaaggctagagaaaaactttactttactatcattggattttttatgcttttttttagtatggtcattaaatactacaacagtaaaaaagtacaaataaagcaagagatcaagatcaataaacaagaaaaacaaattatagaatcgaaattaaaaaata

SEQ ID NO: 247745 - DNA, 1027 bp, Unknown
  Bacterial polypeptide expressing nucleotide sequence isolated from the Sargasso Sea
aatgggttatggaatcttgtcatatggtgcatatgtacctccgattagaatgaagcgagaatcggttttgcaggccgttggttgggccgtacctggggtccgtggtttagccgccggtgagagatcagtggctagttgggacgaggacagcgtcacgatggccgttgaggcggcgaggaactgcttggttgactgtagcgacttaccttctagcattactttagcctctactacatttccctttgccgatcgctcgaacagcgggatagtagccgatgcacttaatctccccttgaataccctcacagaagacactttcggaagtaggaggtctggaactagtgctcttgttaagaactttctaggttctaccagcactctccttttggccagtgaatgcagggaagctaagccgggtagtactcaagaaatgacctatgggcatggggctgccgccttgttgttgggagagggaaatacaatagcggacattttatctgtcgagtctgtccacgaggatttgatagatcaatacagaacagttgatgccaaatatgattattccctcgaagaaaggtgggttcgtgaggaaggctggttaaagatagtaccagacgcaataaacctggctttatcgaaagctgaaatacaaattactgatgtggataaggtgatagttcaaggttctgctggtgccgccagatcgctctcgaaaaaagttgggatcgatgggggtaagctagctgattccctccaagcgactgtcggtgattgtggggccgcccatcctttgcttatgcttagtcatgtattagccgaatcaaatccaaatgagattgtaatgattgtaggttttggacaaggtactgacattatcttattgaaaacaaataataaaatatcgcaaaaaaataccaaaaatggccttcaaatacatcttgataataagcgtcagatagataactatacgttatatttgtctttacgaggccatatcgatatagactttggactaagatctgagcga

SEQ ID NO: 247746 - DNA, 2044 bp, Unknown
  Bacterial polypeptide expressing nucleotide sequence isolated from the Sargasso Sea
aatgtgtgctgtcgttttttcagtgaatgcacaggaaacagacgatggtaatgatgtagaagaagtggttgttactggtacgcaaattaaaggcgccagaattaatgaagctttaccggttacggttattactaaagatgatatcgatgatagaggtgtcaactctggtgatgagcttttagcaactattacagaacaaggtgttaaccagtttaacgacgtcggttcaaacggcggaggtgttaacgcttcaagaggtgacgtaggagcttttgatatcagatctttaggtacaggtaatacacttgttctattgaatggtagaagaatgatctctacaccttcataccagacggaagaagtaggtggaagttatgttccagtcgccacagttaactcaaacaatataccagtatctctagtagatagagttgaaatacttagagatggtgcaggagctgtttatggttctgatgctgttgctggtgttgtaaacaatgttcttgaaacagactttgtcggtttcgagatgagaggaagattccagaattggcaacactttaatcgtgatgaccataaattctcaatgaaatggggtcaagactttaatggtggaaaaactaatatttcaatgttttttagtttttatgacagagatagagttgcagctgctgaagatgaaattatgggtagatgtgactatgacgatctagttccagatcagtttaatagtgctttctatagatgctcatctaactcagcatggggacaatttgatatgagtggtactgctgcttatacagatagttcaggtgagttcttaatttaccctgctggagatcctgattgtgtattaaatttaggtaatggtgtttgtgctgctaaagatacagcaggcaaccttatccataactggaacggacaaagagatgttcttggtgatgtccaaagacataatactttcattttcattaatcatgacttaggtgatggacgtgaagcatttgcagaatttggtcagtatagaagtgaatataatggtaatagacactcctcaagttctttctcctctgtaaaacatgtggttccagcaacaaacccttataactttactggtaaagcattattaatggataactatagattcgtagatgctggaccaagaattgtcgataacgacaaagagaccaatagaatgttaatgggccttagaggtgttactgacacaggatgggattgggaatcagcaatatcatattcaactgctgaagccgaagatgttactcacaatagggtttcaaatactctaatggaccaactattacaagccactggaccaaacgcttataaccccttcaatggtggtggtgtatatattagtccgagagtatcacataaccctgtggacttaactccaggcggaataggacctgcagttgtagacgtatttagaaacaacgaaagaactatgacaacttttgatatgagattttcaaatcctaatgtttgggaaactaaagcaggttggataggtgtcgctgttggttatgagtttagaagtgattccttcaaggacgacagagacccaagacttgatggaactattgtctttactgaaagaaaaactagcggtagtctttcaacaagtccaggagatacatacccttatgtttcagatgttgttaacagtagcccaacacctgatggcagtggtaacagaacagttaactcttactatttagaattagatgttcctgttgtaagtcctgaacaaaacgttcctttcgttcaacaacttgatttacaggttgcttatagagctgaagcatattcagactttgaaggtacagaagttccaagattagcttttggttggagagtagctgattggctaaaattcagagggtcatcacaagatacctttagagctcctaacttaattacaatcaacgagagtctagttgtcagaaacaataccagaaatgatgctgctaataagtatgcaatcgctcttggtgctgacactgatgattctgatggcaga

SEQ ID NO: 247747 - DNA, 1795 bp, Unknown
  Bacterial polypeptide expressing nucleotide sequence isolated from the Sargasso Sea
catgttcttgaacgactttgtcggtttcgagatgagaggaagattccagaattggcaacactttaatcgtgatgaccataaattctcaatgaaatggggtcaagactttaatggtggaaaaactaatatttcaatgtttttcagtttttatgacagagacagagttgcagctgctgaagatgaaatcatgggtagatgtgactatgacgatctagttccagatcagtttaatagcgctttctatagatgttcatctaactcagcatggggacaatttgatatgagtggtactgctgcttatacagatagttcaggtgaattcttaatttacccagctggagatcctgattgtgtattaaatttaggtaatggtgtttgtgctgctaaagatacagcaggcaaccttatccataactggaacggacaaagagatgttcttggtgatgtccaaagacacaatacttttattttcattaatcatgacttaggtgatggacgtgaagcatttgcagaaattggtcagtatagaagtgaatataatggtaatagacactcctcaagttctttctcctctgtaaagcatgtagttccagcaacaaacccttacaactttactggtaaagcattattaatggataactatagatttgttgatgctggaccaagaattgtcgataacgataaagagaccaatagaatgttaatgggtcttagaggtgttactgacacaggatgggattgggaatcagcagtatcatattcaactgctgaagccgaagatgttactcacaacagagtttcaaatactctaatagaccaattattacaagccactggaccaaacgcttataaccccttcaatggtggtggtgtatatattagtccgagagtatcacataaccctgtggacttaactccaggcggaatagaacctgcagttgtagacgtatttagaaacaacgaaagaactatgacaacttttgatatgagattttcaaatcctaatgtttgggaaactaaagcaggttggataggtatggcagttggctatgaattcagaagtgattccttcagggacgacagagacccaagacttgatggaacaattgttttcgtagaaagaaaaactagcggtagtctttcaacaagtccaggagatacatacccttatgtttcagatgttgttaacagtagtccaacacctgatggcagtggtaacagaacagttaactcttactatttagaattagatgttcctgttgtaagtcctgaacaaaacgttcctttcgttcaacaacttgatttacagcttgcttatagagctgaagcatattcagattttgaaggtacagaagttccaagattagcttttggttggagagtagctgattggctaaaatttagagggtcaacacaagacacctttagagctcctaacttaattacaatcaatgaaagtctagttgttagaaacaataccagaaatgatgctgctactaagtatgcaatcgctcttggtgctgacactgacgattctgatggtagatattctgtccaaagagctgctacaggtagtaacctgcttaaagctgaagaatcagaaaacactacaatgggaatggttctagaatttaataatctaacattgacttatgacgtgtggagtattgaatcagaaaatacaattggattatttggtgaagagaaccatatgttgtatgaccttctattaaggttacaacaaaatgatctttcaaattgtgcttctgtagttggtaacccagctgtagtaaga

SEQ ID NO: 247748 - DNA, 634 bp, Unknown
  Bacterial polypeptide expressing nucleotide sequence isolated from the Sargasso Sea
atggaggtgacacgtctttcggatgcgttgggggcaaaaatttctggcgttgacctgagtaatgtcgacgccggaactgctgaagagattagagaatcctttcataaacatcaggtgctcctgtttcgtaatcaggatatctctatggaacaacatatctcctttagtaaaaatttcggtcccttggaggtccatatttctaaggatagccttcatgaagatcatgaggagattctgctagtctcaaatatgaagaaagacggtgagtatgttggtgtagaaaatgctggagacgcttggcactcggatctttcctatatgcccgaacctagccttggttcattgctttatgcgcttgaagtatcagaaataggtggcgataccgagtggctcaacatgtatgacgcatatgatactttgtcgacgaagactaagaaaaggatcgatggagtaaaggcccgtcacagtttcaatcgttttaaaaacaagcggatcggtgttccaaaacagcgtcaaaatggtggtaaggagcggtatgaaaaactcagtccacccgatgtatttcatcctgttgcgcgaacgcacccagagaccggccgaaaggccctgtatatttcaccccgatttacactcg

SEQ ID NO: 247749 - DNA, 1759 bp, Unknown
  Bacterial polypeptide expressing nucleotide sequence isolated from the Sargasso Sea
atgatactatgttttattctacctattacattcatttttgggaatggcaagagtagtgatatcaaatttgaaaaagtaatagactcattaaagacgttaagaaatagatcgcctgaaagagctatacgatatgcaagagagatattagatgatcatggttcaaatgatctaggccataatgaatcaaggatcctaaataccgtaggagagatctaccttgagcttagccttcctgctcttgcgctatcttattttatagacgcaaatgaaaagagtgcagtaaaaggtaagaaaccttggatttcgatcaatataggtaatgtatacttccaggaagaggattggctcagtgcaaaagaaaaatattttgatgctctagatgcttttagaaggaggaatgtaagtcatcctaatacattaagtgggaaagcggttgcgttaagtaaccttggtaggatcgagatgaatttgaataatcacgaccaagcgctctcttacttcaaggaggcgctagacattaagaggaattctgcaaggtaccaagctttccaaaaaactaaattggatgcgaaacctgcttatgctggtttaggggcgggtgttgctaatcagcatcatttgttatccttattgtacacaagatggggtctatatgagttagcactagaacagtgcagtgtagtagactcattaatgagttatttaaatggcaaagaagatgttaattatgatactagtttgattctcggtaaaaattattcaaaaagatgtgaattgtttacgatactaagagaatatcaaaaggcattaactaattcacgatctgcaatcgccttattaaaaaattcgcctatagaattggttaaacattataagattgactctgaaatgtacattgcacaaaatgatatttataaagccctggaatctattgatacaggtctaagcatatgtgatcttaatggaatgtccatccaagagttagatcttttggataagaaaatgaaaattttaaagtcaaataagcttgaaagaagtgcgttaggtatatcccaaaagatcatcgtgaaaaaagagcaggttgaaaataaaaggatagaaatattactggaaagtcttagttatcggtctgagctattaaagaataggaaagaaatttctgcttcagagaatagacaaaaaatgacccttgttataagttttgcaataattgttatgctcggatttattttaaagtattataggaataaaagagaatatttagaacaacaagtaaagcttaatgaacaagaaaagcaaattgtggcatctgaattaaaaaagaaggaaaatgatctaataaaaatgtccacatttatagtatcaaaaaatgatcttttgtcatctattgttaaggaccttgagtatcatatatctctcatagataataagagtgatagaaaatcattagagccgctcaagaagaggatctcaaataaaatagatgattcagcagactgggaccagtttctaacgcagttttctacggcctatccagattttatagactgcttgacagagaaatatccaaaattgcgttcaggagatatcaagctttgttgttacctcaaaatgaatatgaatacaaaagaaatagcaaaggtatctggactatctgttagggctgttgagaataaacgttatagacttagaaagaaactagaactggaaactgatgtcagtttagactcttatattcattcaatgcgaaataagtaga

SEQ ID NO: 247750 - DNA, 1204 bp, Unknown
  Bacterial polypeptide expressing nucleotide sequence isolated from the Sargasso Sea
gatgcatgtaagctttacctccgaagaaaacgacttccaaaaagaagtaaactctttttttaatgagaaatacccagccgatataaaagaaaaacagaataaatctgtaccgcttgaaaaagaggattttattaggtggcaaaagaccttgtatgagcaaggttgggcggccccaaactggccggtcgaatatggcggcacaggctggacaccagtacaaaaatatatctttgcaaatgaaaatgccaaggctaatgcacctgcgatagtgccatttggtctggggatggtcggtcctgtaatttatacctatggtaatgaagctcaaaaaaagaaatttctgcctggaatactggccagtgacgtatggtggtgtcaaggatactcagagcctggctctggttcagatttagcctctcttaaaatgaaggcagaacgagttggcaatgaatatgttctcaatggaacaaaaacatggaccacattaggtcatatggcagactggattttctgtcttgtgagaacaagcagtgatgtagcccgacgacaagaaggtataagctttatcctcgtggatatggcaactgagggagtcagtgtaaaacctataattacaattgaaggagatagagaggtaaatgaggttcattttgaaaatgtaaaagtacctgccgaaaaccttatcggtgaggaaggtaaaggatggacttacggcaaagttttacttcaacacgaaagaacaagtattgccggagttgccagatctcagtaccgtctctctcgactaaaagaaaaaattagaaattctgacaatactcagccctctttgacaggggataacgactttttgaaaaaaattggacaacttgaaattgaactcaaagctcttgagtttactgagctgagaacgttagcagcagtatctgtaggaaaagctcctggtccagaatcctcattgttaaaaatacgcggaactgaaattcagcaaaaacttgatgaattattcatggaagcggccggctatttttctcttccttatgtgcctcagcaatataatctcaacagcgaccctgaggagcatgtgggattcggtgcggacagtgtgagctcgctggtgtatttcaataatcgtaaagcttcaatatatggtgggtcgaatgaaattcaaaagaatatcattgccaaacacgtacttgggctttaa

SEQ ID NO: 247751 - DNA, 1526 bp, Unknown
  Bacterial polypeptide expressing nucleotide sequence isolated from the Sargasso Sea
catgggcgagatatatcttgatctaaattttcctactctagcattatcgtacttcattgatgccaatcaaaaaagcatgataaagggaaaaaagccgtggatattgatcaatataggaaatgtttactatcaacaggagcaatggatagaggcaaaagaaaaatatctagatgccatagatgcttttaggaaaagaaactctcaacatccgaatgcattgagcggtaaaacagttgcccttagtaatctgggcagaatagagatgaatttaaatcattatgaccaagcattggcatatttcaaagaagcattggatattaaaagaaattctgcaaggtatcaggcctttcaaaagaccagaatgaatccaaagcctacttatgctggggtcgctgcaggtgttgctaaccagcattctcttttatcatctttatacattaaatggggcttatttgaactggcagcagagcagtgccaagcgattgactcattaatgagttttataactggaaaagaagatgttcgatatgaccctagtgtaattcttggtaagaattattcaaggaaatgcgagatcaatacaaatataggtaaatatttacaggcattaactgattcacgtgctgccattgcatctttagaaaactggcctatagaattggtcaaacattataaaatagaatcagatttgtatatcgcacagaatgatctctatcaagcgttagcatctattgataaaggattaaagatatgtgatataaatggaatgtccatgcaggagctagatcttcttgacaaaaaaatgaatttgcttatgtcaaataatctagatagaagtgcgcttgatatttctcttgttattatagcaaaaaaggaaataatagaggatgcaagagtaaatagatcactcgagaatcttaattatatatcagagtttcataaagatcgtgagatcattggtcatgcaaagactagagaaaaactttactttattatcattggatttttcatacttttttttggtttagccattaactattacaacagtaaaaaagtacaaataaagcaagagatcaagatcaataaacaagaaaaacaaattatagagtcaaaattaaaaaataaagaagatgaattgatcaaaatgtcgacgaacattgtaacaaagaataatctattgagctctattgtaaaagacctcgaataccatatgtcactcattgatagtaaaagtgatcgaaaatcattagaaccatttaaaaaaagaataattgaaaaaatagatgattctgctgactgggatcaattccaaatacagttttcattagcctatcctgattttattgaatccttgaaaagaaactatccaaagcttcgatctggcgatgtgaagctatgttgttatctaaaaatgaatatgaatacaaaagagatagcaaagatcactactttatcagttcgagcagttgaaaataaacgatatagacttagaaaaaaattagaccttcacacagatacaagcctag

SEQ ID NO: 247752 - DNA, 1260 bp, Unknown
  Bacterial polypeptide expressing nucleotide sequence isolated from the Sargasso Sea
agttttattaagcatttattttttattatttaaaattaagaaaaattttaaaaaaataattattagttattggataataagttttattgctctttggttatggtttctaataattagtttttttgcttataatcaaataacttcattttctgatggaataatttttttaagattcataatttttactgttgcgatttattttattttttctgaaatagattttaaatttctaaaaattttattttatatttctttattaattttttcatttgtaacactagacacactttttcagttctacaattatgattcagctctgggttttaaaggagatatatttggaatcaaacctgaagggttagagggtagattaagtgggccatttaaagatttaattccaggggcatacttatcaagattttattttttaatattattaatcttttttattgatcacagcttaaataaaaaaactaataataaaattattttattttttatattatttttaagtcttgctactatatattttacaggtgaaagaatggctatatccatagctttgttttcttttggaattgttgttttatttattaagaatcataaaatatatttttttaatctgatactaattagttttgtttttatctttataaatactatttttcattcacattataataattatacaattatagattctactgcaaaacatgaaggtctgttaattcaaaaagaatttccgtgcccagaaaatacaaatgaggtttgttacaaagaagtaagtaggcaaccaaaatttacagatgttttatttaattttaaagactctgcatatggaagcatatatctcacttcttttaaaatgtgggttgattatcccataactggtattggccttaataattttaatttagtctgcaaaaatgaaaataaatatttaaaatattctaaagactttggatgcaccacacatccgcataatttatatatacaagcactagtcgaaacaggtatcataggattattattatttataaatttagtttgtgcaattttttataaaatacttttaacaaaaaattataatattaagatattgggttttgtaattatcttaactatattttggcctataatgtctactggaagttttttaaaaaattggaatatgatttttatatcatttcttattggctttaccatagccttgagtgaattttcttcaactaaaaaatctgaatttaaaaataccaatta

SEQ ID NO: 247753 - DNA, 1438 bp, Unknown
  Bacterial polypeptide expressing nucleotide sequence isolated from the Sargasso Sea
aatgaaaaaagcaagcttacttttctcattacttttatttatatcttgctctgatagttctgaatcaaataatgttataactgaagtcacagaaagcgaaaaacaatcagaagaacaaatccaagaaaataccgagacacaagaagaaagtaataaaaataataaacaatcagtcgaggagagtaattcaagaactgtaaatgaagaaactataactctaaataacttgcctgatgtaaaagagtttataaacaacaaaagcgatagatttattgttgattttgaagacatagttgctgctcatccttatgttggatcaagatctccaaaaccacataatgatttacaagtctatttttcaaattctgatccaagatgggtaaatgctactaaaccatctgactacccgcctatctatgctgttgcagatggagttattcagatggctcagggaaatttttctttatacaatgtagtcgatcactccgattcagacccaccatggtggcattctgcgtatttatttaaacttcagtttgcacaaaatgatggaaatattgttagttttttataccaaatggaaggctatgttatcaaagaagataggaatttttttgctgattacttactagtaaaagatggacaatcggtcaaaaaaggagacattttaggatatatgtacgttccgacatttgatgaaatggttggatccatgcagggctctagccatattgcttttgcaatcatggagaagatgggacctcaagaagagcaagagaaagtaccctcaatgtttacttctgaaattattgacaaattctcaaacctttcaagaaacccaacagaagggtgggaaagcacgagctatggaaacgattggtcaagagggcgaggattacctaatttaatcggctggatgatagggccagaagaacatatgtttggaggagagtatttagatgctgtttattatggagatgaaagagatgcaagcctagattcagataaggtaatcgattcaacgaaactaggttttcaaaccgatacctatatatttaattcacatggaaaaggtgacgcagaacttgatatgacattttctagaaacgaaaaagtagactttgttgttgtaacaaatggctcacctgtgacaatgaaatttatttttaaacaagacaacggagaagaaagagaatcgcaatttatgaataaaaggaaaggacaaggtcatcaatttcagtattatcaaagctttggtttcaataaaaatacaactttaatcattgaggaccctgaagaatggggttggtcagtagctttcgtacctgagggtactcctgctttaatcccaggagagtctagagacatccaaccttactgtcctccaggatgccctccatcaccaaatccttataaacttcaacaaggaaataaataa

SEQ ID NO: 247754 - DNA, 770 bp, Unknown
  Bacterial polypeptide expressing nucleotide sequence isolated from the Sargasso Sea
catggtggcggtcaagcagctccgaccggattcggcactcactcgggccgagcttgcactcgaagccagtatgacggcattatttgatcatcggaatgttgtgcagttggttggggtcgtgtcagcccctcagtcgatgcctctgctgcttctactgcaattttgcgagaatggccaactggatctgtacatgcggaatagaaccggcgacaatgaggttgaggtagccctccggctttctttctgtgctgatgtcgcttgtgggatgcagtacttgtcatcgcgacgggtagtgcatcgcgatctggcggctcgaaatgtgcttctcgacgcttcactggtgtgcaaggttgccgactttggaatgtcagcaatgctcgccggacacgacgaggcgacgatcgagtatcaaaaagactatgtccgcaaagttggaggtcaagtgccgatccggtggtgcgcagtggaagtgttggccgatgataagtattcggcggcttcggacgtgtgggcatacggtgtaatggtatgggaggtaatggcggatggagcgataccatatagcgacgaagctaacttgaatgtggtcgccgagatgattaaaaatggccagttactgccaagacctgcacgatgcgcgagtgagatctatgcaaagttgatgacgccgtgctggcgggtcgatcgtagcgagcgcccgacgtttgccgagttgcaaacagcggcgctaaatctcgggggatccgtgaatcgggtgcaagatttgaacg

SEQ ID NO: 247755 - DNA, 826 bp, Unknown
  Bacterial polypeptide expressing nucleotide sequence isolated from the Sargasso Sea
ggccgactttgggctctcgcgggccaccgttctggggtcgggcgatgagggcgccgagtattaccggagccagaaaggcactttcccggtccggtggacggccccggaggcgatggccgagctcaagttttcgacggcgtccgacgtctggagcttcgcgatcactgtggttgagatcttcaccgacggctgcaagccgtaccccgatatccagagcaactcgcaggtaatcaccgcagtcaccggtgggcatcgatgccagcggccaccagactgcagcccgcggctctttgcgctgctggtgcggtgctggtccgaagcacccgaggcccggccggggttcgccgacatcatccgggagctcgaggtagtccaggtcgaacacaacgaggcgacccggccgcccggctggtcgtcagcggatcagaccggcccttctggcacgggcggcgaggcagggcgagccccaagaccgcagctgggttctgccccgaattcccatgcggggttgcaccaagacgggctgggccgccgggcgcctgttggatcggacggttacgtgttcgggcacggcgcgcttcccggggtcgatgcggctgtagctcgtgatagtacacagggagccccgctcgggccagacggctacgtatttggggacggcggcttggctatggccggcgcggttgctcggagtggggtacaaggagcccctctggggtcggacggatacgtgctcgggcatgccgccttggctgtcgccgacgagctccagcagtcgcagcaaagccctcccgctgctgccggcgcccccttgcgcgaaagtgca

SEQ ID NO: 247756 - DNA, 820 bp, Unknown
  Bacterial polypeptide expressing nucleotide sequence isolated from the Sargasso Sea
catccaaacatcgtgcgtatgaggggggtcgtcgtcgacgctgaagactatgtctgcctgctaatggagctttcggaagtcggatcgctgcgcagtatgcttgacaaaggtccagtccctcagaccgcacaggtgaagattgtcaaaggcatcgccgaaggcatggcattcctccatgcccgacttcctaccccaatcttgcaccatgacctcaagagcgccaacgtgctcgtgttccctgacgatgtcgccaagatcagcgatttcggtatggcgacgggcgcacagcgagggagccaatcgactatgacaaacgtccactcgacacagttcggtgctgggacgcccgcatacatggcgcccgagacgattcgcgagactgatgtgaagtttgtcaaggcaagcgatgtgtatgcttttgccatcgtcgtgtgggaagtggccacatgcaaggttccgtgggacaaaatgaacttccctgctatcctcagggcgattgacgcagagaaacggccaggcagccccccaccagacagtccccttggacagctggtcgagcgctgttgggctcagaagcctgaggagcgtccgacctttaaagaggtattgagcgagccgcccctgtcaccagagccggacggcggaggtcgcagcggaggggacgacacggcgcatttagagttgaacaaggggatcgccgcggagtcttacagtgtcgacgcttctttcgcgcttttcgtagggcgaggacgaacacgatcaagttcatctgagcgttcttcgtcacggggtctcaatgagctggggatgctgaagcaga

SEQ ID NO: 247757 - DNA, 706 bp, Unknown
  Bacterial polypeptide expressing nucleotide sequence isolated from the Sargasso Sea
tctggcaattcacccaactgcccgttgggtatggagaacaccaggaccatacgccatgttctgtgtggctggatgtgtcgtagctccccaccttgcctggctaccaggtgccgacaacccaaccctttcctatctttcatcacggcttcctgaacaaggctcatggacagaccatattcttcacccactggagtttctggcctctcaaactggagccgtcataggtatcccgttactcatcagttctgtttttggttggaaatggcacagaaaacctgccgatgattcacgtgccgttgcacgagactatctcctttgcgtcgtgtttggtccacctcttttggcgatctctgtttcaatcttcactggattatatctcgttgccctttggggctcagccatgtggacctttttcggtgtactgctgatggtactgttcgagcctactggaaccgttggtcaataccgccaactggctcggcgttgtattgcgtggggagcaatcttccttgctgcttttggcattgcaaaggcttttcatggagaactgaagggcgtgccaagacgggttcagtacccaggcagggcacttgcaaatgaggttgaacggcgttggagcctggccgtgaatgatcagccccttcaactcattggaggagactggtggctggcgggattggcttcattttatgatcctcaacgtcct

SEQ ID NO: 247758 - DNA, 394 bp, Unknown
  Bacterial polypeptide expressing nucleotide sequence isolated from the Sargasso Sea
aaatatttagcaaagaaatctgaatataagatggaatatatatataatgatttggtttcacttaataatccaaaagataaaatgcccatatcagatttagattcaaagaaaatacacgtagtttctggaatttctaaccctcagtctttttactcgtacctacgttctcaaaattatgaattactaattcatgaatatccagatcatcatatatacaatgagaacgaccttgagttcgatgatgattttccagtagtaatgacagagaaagatgctgtaaaatgtttcaaatattctaatgagaggtattggtatcttccaatctcagcaaaattatcagaacgttttacgctagatttaaatgaacttttagaaagaaataaatatggataaa

SEQ ID NO: 247759 - DNA, 775 bp, Unknown
  Bacterial polypeptide expressing nucleotide sequence isolated from the Sargasso Sea
aatgaaagtaaaaagacccattttttgggatagtttcaatttcatatcattattactcttaccatttagtttgataacaattatttttaatttttttaaatctttaagtcttaaaaaatatttcaaaataaaaacaatctgtgttggaaatatttacttaggtggaactggaaaaacacctttagttttaaaaataaatgatatgttaaaatacaattttaaaactgtatttattaaaaaaaaatatattgatcaaatcgatgagcaaaatattttatcaaaatatggaaatctaatttgtttaagttttagagatatcgcgcttagaattgctgagaaaaaaaattaccagttagctatattagatgatggtttgcaagataaaagtttaaattatgatatttctattgtttgttttaatagttcagagctagtcggaaatggcctagttttacctgctggaccattaagggaaaaaatttcaaatattgcaaactatgatgttgtatttctaaacggcgagagaaatagtaaaagatttgaaaaaaaactaaaaagattaaattcaaatttaaaaatatttagagccaaatatagtgcaaaaaatcttaagtcttttaaatttaaaagtaactttttgatgttttcaggtattggtaatcctttggaatttcaacaaacattaaaaaaatataattttaagataaaaaaaataatgacttttccagaccattataaatataaaaattctgatataaataatataaaaaatata

SEQ ID NO: 247760 - DNA, 312 bp, Unknown
  Bacterial polypeptide expressing nucleotide sequence isolated from the Sargasso Sea
cctgctcaatcacatctggtacggcaacagcctcttgtcttggtgcctgattcccctaacctggcctgtcaggtgggtgatccatcgccgtcgccagcaagcatcccccaagggcagtacccccgagggcgttaccgtcatcgtggtcggcggtttgaccgcgggcggcaccggtaagactcccgtgttgattggcctcggaaaatggctggcagagcagggctatcgcgtgggtgtggtcagccgaggctatggcggtacgtacggccctgagcctcacagcgtgacagaggttgataccgcggcggttgt

SEQ ID NO: 247761 - DNA, 760 bp, Unknown
  Bacterial polypeptide expressing nucleotide sequence isolated from the Sargasso Sea
ctgaattttctttgctggatttacggaattctggtctggatgcgactgatcttctatcggaaaaaattactgagatcgtcacatcccggaattcctgtcatttccgttggcaacctgacggtaggggggaccggaaaaaccccaatggttggtttcctcacagaatctgctaaacaggcaggatggaagcctgccatcatcagcagaggctaccggaatcgttctcaagcaaaaatccaacgggttcgttattgtgaaaattctaatctcgatgtggatgcttttggtgacgaaccgtcgatgctggccctagaaaaccctgaagttccggtttatgtttctgcgtcaagagtggacgcggcggaggtggccaaagaaagagataaccctggaatattgattctggatgatgcctatcagcatctgaaaataaaacgcgacttgaatttgcttttggtcgacgcggaacggggttttggcaacagtcaattacttcccttgggaccgcttcgtgaacctctcgaatcagcagagcgagcggacgcggtgatcgtcaccaaatccaatttagggaactttgatgaagtgttccaaatagtactgaaattcaaacgtgatggttgtccggtttttcggtttgattaccggattgaaaaaattacaagcctggatggtcaggaagaaaaagaaacttccgaattaaaggggaagcgtctgctattgagcagtggaattgcgaatccaccaaagctttccaaaa

SEQ ID NO: 247762 - DNA, 817 bp, Unknown
  Bacterial polypeptide expressing nucleotide sequence isolated from the Sargasso Sea
tcttacatataatattttaaagttatttctaaagtccaaatacgaatttaagactccaattatttgcgtgggtaatatatttgttggaggaactggcaaaaccccgttaagcatgtatgtctataatttgcttaaaagaaaaaaatttagaccggcaataataagaaaatattattcttcccatttagatgaaatcaaattaactaaaaaaaaggtaagacattttttttctgaaaaaaatagagcgaaagcaattcaaaaagccgaacaaaataaaaataatattattgtgatggatgatggcttgcaagacgtatcgataaaaaaagatttaaatattgtatgttttaacagcacggatttagctggaaatggatttttattacctgcaggcccgctgagagaaagtttaaaaaatttaaatagatatcaaattgtagttattaatggaaagaaaaatgttaaatttgaaaaaaaattaaaaaaattgtcaaacaatattaaaatttaccaatcattttataagataaaaaatacaaaaaaattaaaaaatttaaaaattctcgcttttgcaggtattggaaatcctgaagggttttttagtttattaaaaaattatggattaaaacttgaagaaacgatttcctttcctgaccatcataattactctaaaaatgagataaaagatctaatcgttaaagcaaaaaaaaatagtttaaaattattaacaacagaaaaggattttttcagaataaaacaattaggtttaaaaaagatagactatgtttctgtagagttggaaatcataaaacataaa

SEQ ID NO: 247763 - DNA, 628 bp, Unknown
  Bacterial polypeptide expressing nucleotide sequence isolated from the Sargasso Sea
acctttctatattgataagaatagagttagagcagttaaaacaatcataaagaatcataactgtgatgtaataatctcggatgatggattgcaacattatgcaatgggaagagatatcgaaatcgcagttattgatggaaaaagaagatttggtaatagtttgacttttcccgctgggcctttaagggagtctaaaaaaagacttcaatctgttgattttattgtaaacaatagtggtccaactgaagaaaatgagtatttgatgagtataagcccatcaaaatttgtacatttaaaatccggcaaatcatattcagttgaaaactggccaatgcacaaacaaatacatgcagttgcaggactcgggaatcctggtaggttctttgatttacttgaaaaattaggatttgatataaacaggcatccatttcctgatcatcacaactttctttcaagtgatatttattatttagaccacctgcccattgttatgactgaaaaggatgcatctaaatgcaaagactttgataataataagatttggtatttaacaatagatgcagatgtaaataataaatttattgagaatatagataaaagattaaaatctatcttaaataatgaataa

SEQ ID NO: 247764 - DNA, 334 bp, Unknown
  Bacterial polypeptide expressing nucleotide sequence isolated from the Sargasso Sea
atgaactggtgggagaaaggctggtaccgacagcacccttttacattgctattttggccgctgagtctgctgtaccggctggtcgctgtgatccgtcgttttggctatcagcgtggctggttttcatcttttgctgtggaaaagccagttgttattgtcggcaatatttcagtaggtggtacaggcaaaacgccttttaccttgtggctctgtaagtttttaacagagcaaggctttaccccaggtattgtcagccggggttatggtgcccgtatcacagaacctgtgcgggtgacctctttgcatttggccgcagatgttggggatgaacctt

SEQ ID NO: 247765 - DNA, 538 bp, Unknown
  Bacterial polypeptide expressing nucleotide sequence isolated from the Sargasso Sea
ttggagagtatttggtatcaagataagaaacctccgttcttattgatacttttatcaaagctctatggttttctcttaaatgcaagaaaggcattatttgaccttggccttttatcaggcaacaagcccgatattcctgtgatcataattggtaacctcaatatcggtggaaccggcaagactccattcactttatatttggcaaatatgttgtccagatctggcaaaaaagtagggattgtatcaagaggctataaaggaaagaaatcgagctcaaaaccatatctcctcggtaagaacagcaatgcaagagattttggtgacgaagcggtctatctatccaggcatgcagatgcaatggtttgtgtttgcaagaaaagatcgctggctgcacattttttatccgaccaaggtgtcgacattattctttctgacgatggacttcaacactatggactcaagagagatatagaatttgctgtggtttcatccaacagaggtttggaaacaggtatttgcttccggcaggacctctaag

SEQ ID NO: 247766 - DNA, 679 bp, Unknown
  Bacterial polypeptide expressing nucleotide sequence isolated from the Sargasso Sea
atgaaaatttataaaccaaaattttgggataaaaaaaacttaacttttttttcgtcaattttattacctatttcttatatctatagtttaatactaattattaaaaaatctttcaaaagagaaaaaaaatactctattccgattatttgtgttggaaatatttatatcggtggaactggaaaaacacctatgtgtatcaaattgaaaaatttgctagatgacaaaagagtgccagtaataattaaaaaaaattataaaaatcaaaaagacgagattgaacttttaaaaaaatattcaaaattaataatttgtaaaaaaaggaatgagggaattatctctgcaattgaaaagaatttcgatacagttatattagatgatggttttcaagatttaagtataaaaaaagatttaaatatactttgttttaataataatcaggaaattggtaatggccaagtattgcccgctggtcctctccgtgaaggattatccgcacttaaaattgcaaatataataatgattaatggaggaaaaaatactgaactcgaaaataaattgaaaaaatataacatagaccttaaatttttttacttcaattatattttaaaaaaatttgatgaatttaaaaatagaaagcttattgcttttgcgggtataggaaattcaataaactttttta

SEQ ID NO: 247767 - DNA, 814 bp, Unknown
  Bacterial polypeptide expressing nucleotide sequence isolated from the Sargasso Sea
atgaaattaattaaaccaaaattttgggataaaaaaaatttggggtttttctcattaacattgcttccattttcttttatttatattgtcatagcaaacatttacaaattttttcaaaaggaaaaaaaatactctattcccgtcatatgtgttggcaatatttatattggaggaactgggaaaacgccaatatgtattaaattaaaaaatttgttggatgaaaaaagagtgccaataattataaagaaagaatataaaaaccaaaaagatgaaattgaacttttgaaaaaatattcaaaattattagtttgtgaaaaaagagccaaagggattgagactgcaattgaaaaaaaatttgatacgattattttagatgatggcttccaagacaagagtataaaaaaagacttaaatattctatgttttaataataaccaacaaattggtaatggccaagttttacctgcagggcctctgcgtgaaacattatctgctctgaaaactgcaaatataattatggtgaatggagaaaaaaacattgaatttgaattaaaattaaaaaagtataacaatgaactaaagtttttttactttaactataatttaaagaaatttgaagaatttaaaaatagaaagttaattgcttttgcgggaataggtaattctattaatttttttaatacacttaaggataatcgattaaatgtgataaaggaaattacatttccagatcattatgactattctgataatgatttagaaaatttgttgaaaacagagactcagaataaagccaaactgataccacagaaaa

SEQ ID NO: 247768 - DNA, 637 bp, Unknown
  Bacterial polypeptide expressing nucleotide sequence isolated from the Sargasso Sea
atgttatttaaaaaaccttttttctgggactatgaaaagccaaattatctagcatatcttttattacctctaacatctgtcattgcaataagaaattttttatcaaaatttaaaaaaaaaagaagtgtgaatataaagacaatttgtgtaggaaacatttatgttggtggtactggaaaaacacctttggttattaaaactaaaaatatcctcaacaatttaaactttaaaacagcttttataaaaaaattttacaaagatcatattgatgaacaaaaattattagaaaaaaatggtgatctattttgctcaaaaaaaaggtctgcagctcttgataatgctattaaagaaggatttgatgcagttttatttgatgacggtctacaagataactcaattaattatgatctaaaatttgtttgtttcaattctgataaatggattggcaatggtttgttattacctgctggccctttaagagaaaaaattaattctatatcaaaatataatgccgttttcttaaatggaaactctaaaaataatcagaatataaaaaatcaaattaaaaagtataatgacaaagcaaaaatttttgaaacttattacaaaatttcaaatctaaatgaaattaattgaa

SEQ ID NO: 247769 - DNA, 538 bp, Unknown
  Bacterial polypeptide expressing nucleotide sequence isolated from the Sargasso Sea
tgatgatggcatgcagcattacaaaatggcacgcagcatagaatgttgtattgttgatagcgaaagaaaatttggtaatggtttgctaatgcccgcagggccactgcgcgaaaccgtctctcgattaaagagcgtagacgtagtaattgaaaatggctctgaggatgagtttagttatcgcttgcagccatcggttattaaacgcgttgccgataacacggatatagcgacgcctttaaaggctgcgcatgcggtgagtgctattggtaacccaggtcgttttgaggcttcactgcaagcacagggtattaaattactgtctacacatcattttcgcgatcattatgcttatagcgctgatgatttcgctcaatttggcgatgactgtgtattaatgacagaaaaagatgcggttaaatgccgtgattttgcaaaacctaattggtattacctgcctgttgatgctcaaccaacagcggcggtaataagtacattaaatttactattaaaagaaaaagggatccatcatggcctttga

SEQ ID NO: 247770 - DNA, 533 bp, Unknown
  Bacterial polypeptide expressing nucleotide sequence isolated from the Sargasso Sea
tctgacactactcggctatcctatagcgtcttcctacagtgccgtgatggctctgcggaactcccactatgaccgtgtcggtgggcagaagattccgggagtgaaggtggtttcagttggtaatcttgtggtaggcgggactgggaaaactccattctcagcttgggttgccaaagaactgaaggttagagacttaagcccggcaatcgtaagtcgaggttatgggagagacgagcttattctgcacaataaatggaatccagatacacctgtagtagcggactcagaccgtttaaaagcagcaagccttgccggtctagaaggcgctgatatagtggttttagacgacggatttcagcatcggagaatagctcgagacttcgacatcgtcctattgtcggccgaagatgattttcctggttatttactacctactgggccatatcgagagccagtccaatcactaaggcgagcggatgtagttctagtcacacgtcgaacagcgccttgtctagttgctgagaagattctcg

SEQ ID NO: 247771 - DNA, 709 bp, Unknown
  Bacterial polypeptide expressing nucleotide sequence isolated from the Sargasso Sea
atgcaattaaaaaaacccttgttttgggattttaaaaaaccaaatttatatgccaattttttaagaattttttctatatttccaatagtttataacaagctatttataaacaaagttgttattaataatttaaaaacaatttgcgtgggcaatatatatttaggtggaacaggtaaaacaccaacttgtatatacatcaaccaaaaaattaaaaattcaaataataaaactgctttcataaaaaaattttacaaagatcaaatagatgaacaaaatcttcttaagaaaaatggtaacttgatttgtagctcaagcagaattaaagcagcaaatattgcaaaatcaaaaagagttgatttagcaatttttgatgatggccttcaggataaaaacattgattatgatattaaaatagcctgcttcaactcaaaatcattaattggaaacggattggttcttcctgctggtcctcttagagagcaaataaaaaatataaaaaattatgatgctgcgataataaatggcaatggtgagaatatatcaaaatttaaaaaatatttaaaaaatatagataaaaatctaagaatatttgaaggaagatatctccctgataagaatgttaaaaaacttcaaaaagaaaaatttatagctttctcaggtattggaaatcatatttcattcctagatactttaaataataataatatta

SEQ ID NO: 247772 - DNA, 445 bp, Unknown
  Bacterial polypeptide expressing nucleotide sequence isolated from the Sargasso Sea
tttaaacagtgtggattttgtgattaataatggtggcccagtccatcatggtgaggtgttaatgagtttaactcccgcgcccttgatgcccgtgaccaattcactcgttgagcctttgactgaggggcaaccgcttgttgccatggctgccattggtaatccacaacgtttttttaatacactaacccaattaggttatcaattagctcgcacggttgagtttaacgaccatcatgttttttctgcatctgagctacatgctttatcacatgataatccactggtaatgactgaaaaagatgcggttaaatgtcgcgattttgctcaaagtcactggtggtatttaccggtaaatgcgaagcttaccccagaatttgatcacgcattcttgagccaattaaagcaagtggctcaaactaaaaaaggactgtctcatggcatttga

SEQ ID NO: 247773 - DNA, 502 bp, Unknown
  Bacterial polypeptide expressing nucleotide sequence isolated from the Sargasso Sea
ttggagagtatttggtatcaagataagaaacctccgttcttattgatacttttatcaaagctctatggttttctcttaaatgcaagaaaggcattatttgaccttggccttttatcaggcaacaagcccgatattcctgtgatcataattggtaacctcaatatcggtggaaccggcaagactccattcactttatatttggcaaatatgttgtccagatctggcaaaaaagtagggattgtatcaagaggctataaaggaaagaaatcgagctcaaaaccatatctcctcggtaagaacagcaatgcaagagattttggtgacgaagcggtctatctatccaggcatgcagatgcaatggtttgtgtttgcaagaaaagatcgctggctgcacattttttatccgaccaaggtgtcgacattattctttctgacgatggacttcaacactatggactcaagagagatatagaatttgctgtggtttcatccaaccagaggt

SEQ ID NO: 247774 - DNA, 700 bp, Unknown
  Bacterial polypeptide expressing nucleotide sequence isolated from the Sargasso Sea
gctgaattttctttgctggatttatggaattctggtccggatgcgactggttttctatcagaaaaaattgctgagatcgtcacatcctggaattcctgtcatctctgttggcaacctgacggtggggggaaccggaaaaaccccaatggttggtttcctcacagaattttctcaacaggcaggaaggaagcctgccatcatcagtagaggctaccggaatcgttctcatgcaaaaatccaacgggttcgtttttgtgaaaattcaaatcttgatgtagatgcttttggtgacgagccgtcgatgctggccctagaaaaccctgaaattccggtttatgtttctgcctcaagagtggacgcggctgaggtggccaaagaaagggataatcctgaaatattgattctggatgatgcctatcaacatctgaaaataaaacgcgacttgaatctgcttttgatcgacgctgaacgggggtttggcaacagtcaattactacccttggggccgcttcgtgaacctctggaatcagcagagcgagcggacgcagtgatcgtcaccaaatccaatttagggaactttgatgaagtgatccaaacactcctgaaattcaaacgtgatgattgtccggtttttcggtttgattaccggatcgaaaaaattactagcctggatggtcaggaagaaaaagaaatttccgaa

SEQ ID NO: 247775 - DNA, 560 bp, Unknown
  Bacterial polypeptide expressing nucleotide sequence isolated from the Sargasso Sea
attggagagtatttggtatcaagataagaaacctccgttcttattgatacttttatcaaagctctatggttttctcttaaatgcaagaagggcattatttgaccttggccttttatcaggcaacaagcccgatattcctgtgatcataattggtaacctcaatatcggtggaaccggcaagactccattcactttatatttggcaaatatgttgtccagatctggcaaaaaagtagggattgtatcaagaggctataaaggaaagaaatcgagctcaaaaccatatctcctcggtaagaacagcaatgcaagagattttggtgacgaagcggtctatctatccaggcatgcagatgcaatggtttgtgtttgcaagaaaagatcgctggctgcacattttttatccgaccaaggtgtcgacattattctttctgacgatggacttcaacactatggactcaagagagatatagaatttgctgtggtttcatccaacagaggttttgggaacaggtatttgcttcgggcaggacctctaagagaaggattggaacgccttg

SEQ ID NO: 247776 - DNA, 775 bp, Unknown
  Bacterial polypeptide expressing nucleotide sequence isolated from the Sargasso Sea
tctgcggttttgtgaaaaaaagcatgcagaccctgatctttttggggatgagccctacatgcttgccatgcgtaacccagaggttcctgtatatgtcgacagctcgcgaatagcagcagcagattccgcaaaaaataatgataatcctgatgtgctggtgttggatgacgcattccaacacttagctattcaccgtgacttgaatctgctgttgattgacgcagagcgcggattaggaaacggtaatttaattccttatggaatcttacgtgaaccggcaagtcaatggaaacgtgcagacgcactaattgttacaaaagccaatatttcttccacagatgctgtttcagaaatacttaataaagagttgaaagtcacctgtcctgttttcaatttcattttcgaggcacggagtttttacagactggatggaaaagaccggcagcaaatacagcatttggcaggcaagaatttactaaccgtatcgggaattgcacagcctgatggtttcagaaaaatgctggaaagccttgaagggaatctgaccggcagtcttgaatttgctgatcatcatgattacagcataaatgatgtgcataagattttgaagaagcaggatgaattaaagcctgattttattgtaaccacagaaaaagatgcagtgaaacttagacagttctcagaactgtcgaatagtgtttggattttggaaattggagtacatcctgaagaatcctggaatgctttttttgaaaattttattgacactttatga

SEQ ID NO: 247777 - DNA, 283 bp, Unknown
  Bacterial polypeptide expressing nucleotide sequence isolated from the Sargasso Sea
gctgagttggctttgctggatatacggaattctggtccagatgcgactgatcttctatcggaataaattattgagatcgtcacatcccggaattcctgtcatttccgttggcaacctgacggtggggggaaccggaaaaaccccaatggttggtttcctcacagaatcttctcaacaggcaggaaggaagcctgccatcatcagcagaggctaccggaatcgttctcaagaaaaaatccaacgggttcgtttttgtgaaaattcaaatcttgatgtggatgct

SEQ ID NO: 247778 - DNA, 871 bp, Unknown
  Bacterial polypeptide expressing nucleotide sequence isolated from the Sargasso Sea
ttgttacccttctcatacttatatagattattagtcactattaataaattatttaaaaaagaagaaagtttttcaattccagttatatgtgtcggaaatatttacatcggaggtacaggtaaaacaccaataagcataaaattaaaaaatttattagatgataatagaaaaacaataataataaaaaaaaattataaagatcaaaaagacgagattgaacttttaaagaaatactcaaaattaatagtttgtgaaaaaagaaatattggaattaattctgcaataaaaaaaaaatttgacactgtaattcttgatgatggttttcaggatacaagtataaaaaaagatttaagtatactttgttttaatagtaatcagcaaattggaaatggtcaagttttgcccgctggacctcttcgtgaaactttgtcctcacttgaaagcgcaaatattataatgatcaatggtgaaaaaaatattgaatttgaattaaaattaaaaaaatataatagcaatttaaaatttttttattttaattacaacttaaaaaaatttgatgaatttaaaaatagaaaactgatagcatttgcgggaataggtaattctataaatttttttaacacacttaagaataatcgactaaatgtaattagggaaatttcatttccggaccattatgatttcactgataaagacttggagagattgagtattatggaagatcaaaataaagctaaattaattacaacagaaaaagattatttaagaattaatcccttaaaaagaagacgttttggatttgtatcaattaacgtggatataaaaaatgaaaatgatttaattgctgaggttaataaaatattcaaatgaa

SEQ ID NO: 247779 - DNA, 538 bp, Unknown
  Bacterial polypeptide expressing nucleotide sequence isolated from the Sargasso Sea
ttggagagtatttggtatcaagataagaaacctccgttcttattgatacttttatcaaagctctatggttttctaatgaatgcaagaaggacattatttgaccttggccttttatcaagcaacaagcccgatattcctgtgatcataattggtaacctcaatatcggtggaaccggcaagactccattcactttatatttggcaaatatgttgtccagatctggcaaaaaagtagggattgtatcaagaggctataaaggaaagaaatcgagctcaaaaccatttctcctcggtaagaacagcaatgcaagagattttggtgacgaagcggtctatctatccaggcatgcagatgcaatggtttgtgtttgcaggaaaagatcgctggctgcacattttttatccgacaaaggtgtcgacatcattctttctgacgatggacttcaacactatggactcaagagagatatagaatttgctgtggtttcatccaacaggggtttggaaacaggtatttgcttccggcaggacctctaag

SEQ ID NO: 247780 - DNA, 586 bp, Unknown
  Bacterial polypeptide expressing nucleotide sequence isolated from the Sargasso Sea
tgatcgaggtgtcgatgttattctttccgatgatggtctgcaacactatgcattggggagggatatagaatttgctgtagtttcttctaatcgcggatttggtaatcgatatttgcttccagctggacctttgagagagagaatagaaaggcttgattcattcgatttactcttagtcaatggtaaacagatcgaccaagatctaaatatgaagaatataatcagctttgaaatcctgaatagagaagtcaaaaatatccatgatggggaagtacgacccatggaggattttgcaaacagagatatattactgatcgcaggtattggtgatccagatgccttgcaagagaaattgattaatcttgatatcaaagttgaatccatcgatgttgctgaccacgagaccgctgatctaagcttaatagatgacattaaaagcagaacaatatttttaacaccaaaagacttggtaaaatactcaaaagatgacttgcctcgagagacatgggaattgattccagaaatgtctattgatcattcagaagagcaaattctgatcaggcagattcaaggtatcatggaatga

SEQ ID NO: 247781 - DNA, 653 bp, Unknown
  Bacterial polypeptide expressing nucleotide sequence isolated from the Sargasso Sea
agatgaggctcaaatattagctaaattaaatatacccttttatatagataaaaatagagtaagagccgttaagaaattaatagataaccatgattgtgatgtaataatttctgatgacgggcttcagcattataaaatgggaagagatattgaaattaatgtaattgatggaaaaagaagattgggaaacaatttaactttcccggctggtcctttgagagaatctaaatcaagattaaaaacagttgattttgttgttaacaatagtggaccaactaaagatgatgaatatttaatgaatataattccttctaaatttgttcatttaaaatcaggcaaatcatacagtgtcgaagattggccaatgcataaacaagttcatgctgttgctggattgggtaatccaggaagattttttgatttattggataagctgggatttgatattattagacatccatatccagatcaccataatttctcatcaaatgatattttttatttagatcacctcccaattgttatgactgaaaaagatgcatctaagtgcaaagattttgataataataaaatttggtatttaacaattgatgcagatgttaataataaatttatagatgatcttgaagataaattaaaatcaatttcttaat

SEQ ID NO: 247782 - DNA, 508 bp, Unknown
  Bacterial polypeptide expressing nucleotide sequence isolated from the Sargasso Sea
tggaatcgaggtataggaaatggactttgtttgcctgccgggcctttaagagagcctttagaaagagtagagaatgtagatttcattattaactcctcgaaaataatagacttgcaaaccaagcataaaaattacttgatgaattatcaccctatagagtgggcaaggatttcagacaacaaaagatttaatgctgattcctggcctttatcaaagaatgtccatgcagtggctggaattgggaatcctgctaaattttacaaaaccttgtctagcttaggtctcaacccaatacatcatagttttccagatcactatcagttttccgaagaagatttagacttcggcgactctttacctgtcataatgacagaaaaagatgcagttagatgtttagagatgaaaaataaaaacctttggtatctatctatagaagctaaatttgaagatgaaaatttggctgacgaaattttaactaaacttaaactatctaaaattaatgaataaa

SEQ ID NO: 247783 - DNA, 979 bp, Unknown
  Bacterial polypeptide expressing nucleotide sequence isolated from the Sargasso Sea
catgagcaaatacacagaaaattattttttttcgttcaataaaataaaaattcttaatattattttattaccattatccctaatttattatgtgttttttattctaagaaaaaattatcttttaacaaatagttataagacttcaaaatatttaatagttatagggaatattacagttggtggaactggcaagacatcttttactatatggctggcaaattatattgaaaatactctaaataaaaaagtagcaatcatttcacatggttatggtagtaaatttccaaagaaactaagtgaagttactaataattcttctttattagacgtaggtgacgaatcattaataattaggagaaacactaacgctaaaatatataaatgcaaagataggttgaaagcttataaatatatagaagataagctaaatattgattacgttattatggatgatgggttgcagcattacaaattaaaaccaaatttatctatttgtcttgctaaggaaaaaaattcatttggaaatggattactattacctgcggggccattaagagaaccaattaaaagcataaaaaaatttgatattcttctttacaaaaaagttagaaatagtaaagaagattatggttttacatataaggccgataagctcattaatctaaaaaatggtaaatctcaaaacataaaagattatagtggaaaagtatttcatttaatattaaccattgctgattcatattttgttgaggaagttttaaaagataataatataaaatatatatctcatttttatccagatcattttaatattaatgataaaatgctagaatttgatgataactatgatattttattaactgaaaaagaattagtaaaaattacaaatatggaaaatactaaaattttttatatacctactgagatttcagttgatgaaaaaattcaaaacgatattaatttgaaactcaactattga

SEQ ID NO: 247784 - DNA, 3142 bp, Unknown
  Bacterial polypeptide expressing nucleotide sequence isolated from the Sargasso Sea
catgaaacgcatgctgttcaatgcgacgcagcaggaggagctgcgcgtcgccatcgttgatgggcaaaagctcatcgacatcgacatcgagacagccgggcgcgaacagcgcaaaggcaatatctacaaaggtgtcatcacccgtatcgagccgtcgctcgaagcgtgcttcgtcaactacggcgaagaccgccacggcttcctgccgttcaaggaagtcgcccgccagtacttcaaggaaggcatcgacatgcgctccgcgcgcatccaggatgccctgcgcgaaggccaggaactgatcgtccaggtcgagaaggaagagcgcggcaacaagggcgccgccctcaccacgttcatctcgctcgccggccgctatctggttctgatgccgaacaatccgcgcggcggcggcgtgtcgcgccggatcgaaggcgacgagcgtcaggaactgcgcgaaacgatggcgcaactgcagatcccggacggcatgagcatgatcgcccgtaccgcgggcatcggccgcagcgccgaggaactgcagtgggacctgaactacctgctgcaactgtggcgcgcgatcgaagcggcgtcgcaaagcggcaacgccggccagccgatgctgatctacctggaatcgagcctcgtgatccgcgcgatccgggactatttccagcccgacatcggcgaaatcctgatcgatacgaacgaaatccacgatcaggcccgcgcattcatggacatcgtgatgccggacaacgtcgcgaaggtgaagcgctaccacgacgacgtgccgctgttctcccgcttccagatcgagcaccagatcgagaccgcgtactcgcgcacggtgccgctgccgtcgggcggcgcgatcgtgatcgaccacaccgaagcgctcgtcgcgatcgacgtgaactcggcgcgcgcgaccaagggcgcggacatcgaggaaaccgccacccgcacgaacctcgaagcagccgacgaagtcgcccgccagctccgcctgcgcgacctcggcggcctgatcgtgatcgatttcatcgacatggaatcggcgaagagccagcgcgaagtcgagcagcgcctgaaagacgcgctcaagcatgaccgcgcgcgcgtccagatgggcaagatctcccgtttcggcctgatggaactgtcgcgccagcgcctgcgtccggccctgtcggaaggcagccatgtgacctgcccgcgctgtaacggcaccggtcacatccgcgataccgaatcgtccgcgctgcaggtcctgcggatcattcaggaagaagcgatgaaggaaaacaccgcggcgatccactgccaggtgccggtcgaggtgaccgccttcctgctcaacgaaaagcgtcaggaaatcaacaagatcgagtcgcgcttcaaggtcggcatcgtgctgatcccgaacaagcacctcgatacgccgcactacaagctcgagcgcctgcgccacgacgacgcacgtctcgacgacccgcgcgcgtcctggaagatggccgaggaagcagcccgcgaactcgagtcggaaaccggctacagcaagcgcgcggcggaagtgaagccgaagcaggaagccgcggtcaagggcatcacgcccgagcgtccggccccgagcccggcaccgcagcgcccggtcgaacccgttgcagcgcccgcgcctgtcgcgccggcaaccggcggcttcatcggctggctgaagggtctgttcggcgtatcgccggcgcccgcacccgcaccggttgctccggccccggcgaaggagcaggcagcccgtccggctcgcggcgaacgcgccgagaagtccgagcaacgcggcgaacgcggcggcgatcgcaaccgcaaccgtcgcggcggcgcccagcaggcgcaaggcggccgcgaccaggtcgcggcaggccgtggccagtcgcaacgccaggagcgtgaaggcaaggaagtgcgcgaaccgcgtgaggctcgtgagccgcgtgaaggccgcgaaccgcgcgagggtcgtgaaccccgtgaaggccgcgagaaccgcgaaggtcgcgagggccgtagcccgcgcgaaggccgcgagccgcgtgaaagccgtgagccgcgcgaaccgcgtgagaatcgcgaaccgcgtgaaccgcgcgagcgtgtcgagcagccggaaggcgtcgaagcagccggtcgtggcgagcgccaggaacgtcgcgagcgccgcaagccgactcagcatgcggcaacgctggaaaccgtcacccgtggcgaaacccatccggaaccggaagccgacaaggccgtcgcagaagccctgcccggcgccgaactggcagccgacgcggaagccggcgcgcgtgatggcgaggaacgtcgccgtcgccgtcgcggccgccgcggcggtcgtcgcgagcgcgaggaagacggcgcagccgtcgaccacgccgagcaaggcgcagagggcgaagtgacggtgcaagccgtgacgccggaagcaccggctgctgccgaaccggcccacacggccgcaccggcagtcgtcgtggcagccgccgcggcaagcgccgtcgtcgccgaagccgtggtcgagcaccatgccgaaccggcagcaccggccgctgtcgagccgcagccggcaccggtacacgtcgaagcagcgccggtcgaagcagcagtggtcgcccaggcagcagaaccggcaccggtcgcaccggccgtcgatacggaagccggtccggctccggtcgcggtttcgccgaccgacgcgttcgaagtgccggccgcgcctgtcgccgtcgaggcgcctcagccggcccccgtcgagcaagctgcaccggccgtgacgaccgaagccgctccggtggttgcggagccggcccacgtcgaagcggcgccggtcgaggccgttgccgcaccggcacccgcaccggctccggcccccgcccaaccggcagccgcgcccgcttcggcgagcctggataccgtgctggagcaggccggtctcgtctgggtgaacacggacgccgacaagtttgccgctgcgcaggaagccgcgtcgcgcctcccgcgtccggctcgcgtgccgcgcgaacgcaaggcactgccgccggtcgatacggcaccgatgcagcaggtcgaaacgacgcatcactga

SEQ ID NO: 247785 - DNA, 922 bp, Unknown
  Bacterial polypeptide expressing nucleotide sequence isolated from the Sargasso Sea
attggtctcgtacgtacttattccaatatctttactatatttattaattttttacttaatcagaatattcaaaactgaatacaaaattgatattccaatcatatgtataggtaatataaacttaggcggcacaggaaagacctcaacgcttttagaaattattaatcatttcaaaattaataacaaaaatatttgtgtattgttaaaaggatatggtggtaaaaaaactatttttaaaaaagtatcaccagacgagtcagcggtccaagtgggtgatgaggcaattctctattcaaatcatgtacctacttatatttcaacgaaccggaggttagctgtgaaaaaaattttagatgatgttaatcctgattttattttacttgatgatggtttccaagataagtctctttttaaagataaaaacattttgatggtaaatggggcacgtggttttggaaacggattatgtttgccagctggaccattaagagaactaattaagcctgcgttaaaaaaagcccaatttttaattattgttggcgatgataaaacaaaaataaaaagtatgtataaaaatataaatattgatacccttaccgcttcgataaaaccattatatgtcgacaaaaataaaaaatacttagcttttagcggtattggaaacaatcaaagcttctttgatactcttatcgataataattgcactgtacttaaaacagttgaatttccagatcatcattttttttcagaaaatgatcttaacaaacttaaaaaaatagcgtcagataataatctttcacttattacaactgaaaaagattttgttagaattccaaaagaaaaaagggatggaattgaatgtttaaaagtgaagataaaattacacaacatggacaaatttatgcataaactggttaactaa

SEQ ID NO: 247786 - DNA, 869 bp, Unknown
  Bacterial polypeptide expressing nucleotide sequence isolated from the Sargasso Sea
tatgaaagctccaaaattttggtatgagcccaattcttggagggcaacatttttacttccactaggatacctttataaccttttaacctatctgcgtggaaaaactggtaagccactaaaatataactgcttaacgatatgcgttggcaatttaaatgtgggtggcacaggcaaaacacccacaacgatagcattagcagaccacttcctaaaaaaaggactaaatgtacacatcgtatcacgtggatacaaaggtaaattccagggaacttttttagtaaatcctagaaatcataaagctgacgaagtgggagatgaaccacttttaatgtccgaattcacctccgtatgggtttcaaaaagaagaaaaaatggaatagcagccgctgaaaaagcaggtgcccaagtagtcttattggatgatggatttcaggatcccagttttcacaaagatttttcaattttggtggttgatggaacgagaggcttcggaaataaaaaatgccttcccgcagggccactgcgagaaaatatcttccaaggttttaaacgagctgacgcgctagttattgtgggttccagcctatatggctttgatacttttccaagtcacctgaaagttattcgctcaacattaaagccagttgagactggcatgaattggaaagaagggaagtatatagctttcgctgggatagctcaccctgacaaattttttaatatgcttcgatcaataggtgctaatttaattgattgcgtggcattaagtgatcatcaaaggttgagtgcacaaattttgaaaagattagagcataaagcgttaactgctcacgcgcaattagtaactacggaaaaggatgccgtacggc

SEQ ID NO: 247787 - DNA, 1021 bp, Unknown
  Bacterial polypeptide expressing nucleotide sequence isolated from the Sargasso Sea
atgattctaaagtttattgaaaatatttggtataaaagtttttggtcattaactggagtcattgtgattttgatgtcaccattatcaatactctatctttttgcaattaaacttcatgatttattatataagatgaaaatcttaagagttttaatattaaaaacacctgtattgattgttggaaatttaaccgtaggtggaactggaaagacgcccttttgtatatggctcagtaactatctcgaaaaattacaaatcaaagttggtatagtagcatccggctataagtctaatgggagctcaccaaaagttgtagataagagctcttctcctttagacgtaggtgatgaagcaatagaattggcatcaatgactaatgcaattgttgttagtagcaataatagagcaaaatcatctttatttttagaaaataactttgatttggatttaattattcatgatgatggtctacaaaataagaagataggcagagatgtagaaattcttctaattaatgataatttgaaatatggtaatggatttttattgcctgcaggtccgttaagagagttccctgacaaacgtatacaaaaatctaatttgattgtttatagtaaatgcagggaacatcaatataatatttataattcaaaaaacatccctgcatttatggttgagaataagttagttacaaactcaatctcaaaagaatctcgacaaatagattcatttgaaaggatacatctagtttgtggtatttctagtactaaaattatcgaagaaaatataagaacactgaatgtggaatacattctccataaatacagtgatcattattcgtttaagggaaatgaaatattattcgacgataatttaccagtctttgtaacaatgaaagattatgttaaattagaaccttataagattaataatttatggattataaagaataatttgattcttaatcaatctatagaaaatgctataaaaaaaataactactgatattaaaaaactatgaa

SEQ ID NO: 247788 - DNA, 652 bp, Unknown
  Bacterial polypeptide expressing nucleotide sequence isolated from the Sargasso Sea
atgaaagtaaaaagacccactttttgggatagtttcaatttcatatcattattactcttaccatttagtttgataacaattatttttaatttttttaaatctttaagtcttaaaaaatatttcaaaataaaaacaatctgtgttggaaatatttacttaggtggaactggaaaaacacctttagttttaaaaataaatgatatgttaaaatataaatttaaaactgtatttattaaaaaaaaatatattgatcaaattgatgagcaaaatatcttatcaaaatatggaaatctaatttgtttaagttttagagatatcgcactgagaattgctgagaaaaaaaattaccagctagctatattagatgatggtttacaagataaaagtttaaattatgatatttctattgcttgttttaatagttctgagctagttggaaatgggctagttttgcctgctgggccattaagggaaagaattacaaatattttaaattatgatcttgcatttcttaatggtgaaaaaaataataaaaccttcgagaaaactctaaggagattaaatccaaatttaaaaatatttagagctaaatacactcctagaaatctcgagtcattcaattttaaaaataactttctagttttttcaggta

SEQ ID NO: 247789 - DNA, 925 bp, Unknown
  Bacterial polypeptide expressing nucleotide sequence isolated from the Sargasso Sea
caaggaaaacattcagatttacttgaagaagagggcatatacgcttcactatataaaaatgtcccatttgaaagtaagaaatcatcatctacatccttacaaaaagtttcatatttacagccaattgacgatgttgaaaataattccagttttgtaataaatgcttggtatcaaaaacatttatggctgtatctactcttaccattctcatggatttttacttttctaactaatagacgaagaagaaaatatcttaaaaaccaaatttcgtcatttaaaacagatactccagttgttgttgttggaaatataaatatcggtggaacaggtaaaacacctctagttaagcatattgcttcaaaactaaaagagaggggtttgaaggttggaattgtctcaagaggctatggcggtaacttctcaggaacacttagagttgatgataatacagaatataaaaaatcaggtgatgaagcgcaaatgcttgctaatttaaatgttcctttatatttagataaaaatagaccaagagcaattcaaaatctaataaatgaaaatgattgtgacgtaattttatctgatgatggtcttcaacattataaaatgtatcgtgatattgaaattatcgtcatagatggatctagaagacttggaaatggtttaacattcccagctggacctctaagagaatcatcaaaaagattaaaaacaggaaactacattatcaataatggcggaccaactgaggatggtgaaattctaatgacccttcagccaagtaaatttgtgcatttaaatacaggtaaatcatatgatattgataaatggcctatgcataatcagatacatgcagttgctggtttaggtaatcctggtagattttttgataccttatctcaactaaattttgatatcgaaagacatc

SEQ ID NO: 247790 - DNA, 643 bp, Unknown
  Bacterial polypeptide expressing nucleotide sequence isolated from the Sargasso Sea
gatgttagaaaataattccagttttgtaataaatgcttggtatcaaaaacatttatggctgtatctactcttaccattctcatggatttttacttttctaactaatagacgaagaagaaaatatcttaaaaaccaaatttcgtcatttaaaacagatactccagttgttgttgttggaaatataaatatcggtggaacaggtaaaacacctctagttaagcatattgcttcaaaactaaaagagaggggtttaaaggttggaattgtctcaagaggttatggcggtaacttttcaggaacacttagagttgatgataatacagaatataaaaaatcaggtgatgaagcgcaaatgcttgctaatttaaatgttcctttatatttagataaaaatagaccaagagcaattcaaaatctaataaatgaaaatgattgtgacgtaattttatctgatgatggtcttcaacattataaaatgtatcgtgatattgaaattatcgtcatagatggatctagaagacttggaaatggtttaacattcccagctggacctctaagagaatcatcaaaaagattaaaaacaggaaactacattatcaataatggcggaccaactgaggatggtgaaattctaatgaccctt

SEQ ID NO: 247791 - DNA, 649 bp, Unknown
  Bacterial polypeptide expressing nucleotide sequence isolated from the Sargasso Sea
aatgattagaattgtcaaaattttagaaaacatttggtatcgagataaaaagccacccaattttttgattggtctctcagtggtctatggaattttattaaaagtaagaagatcactttatgatcttggtattttttcaaccagtaaacctgaaattcccgtgatcataattggcaatattaacgttggggggacaggtaaaactcctttcaccttatatttagcaaatacactttcccatttgggtaagaaagtagggattatatcgagaggttatagaggaaaaaaatcaagttcaaaaccattcattctcgataaaaaaagcaaggccgaagattttggtgatgaggctgtttacctatcaaaacatacagattcaatggtttgcgtttgtaaaaaaaaattgcttgcagcaaatttactctttgatcgaggtgtcgatgttattctttctgatgatggtctgcaacactatgaattggggagagatatagaatttgctgtagtttcttctaatcgcggatttggcaatcgatatctgcttccagctggacctttgagagagagaatagaaaggcttgattcactcgatttactcttaatcaatggtaaacagatcgaccaagatctaaatatgaagaatataatc

SEQ ID NO: 247792 - DNA, 895 bp, Unknown
  Bacterial polypeptide expressing nucleotide sequence isolated from the Sargasso Sea
gctgatcaaatagtagtattggataatggtcttatatcgcaacaaggaaaacattcagatttacttgaagaagagggcatatatgcttcactatataaaaatgatccaattgaaagtaagaaatcatcttctacatccttacaaaaagtttcatatttacagccaattgacgatgttgaaaataattccagttttgtaataaatgcttggtatcaaaaacatttatggctttatcttctcttaccattttcatggatttttacttttctaactaatagacgaagaagaaaatatcttaaaaaccaaatttcttcatttaaaacagatattccagtagttgttgttggaaatataaatattggtggaacaggtaaaacacctctagttaagtatattgcttcaaaactaaaagagaggggtttaaaggttggaattgtctcaagaggctatggaggtaacttttcaggaacacttagagttgatgataatactgaatataaaaaatcaggtgatgaagcgcaaatgcttgctaatttaaatgttcctttatatttagataaaaatagaccaagagcaattcaaaatcttataaatgaaaatgattgtgatgtaattttatctgatgatggtcttcaacattataaaatgtatcgagatattgaaattatcgttatagatggatctagaagacttggcaatggtttaacattcccagctggacctttaagagaatcatcaaaaagattaaaaacaggaaactatgttatcaataatggtggaccaactgaggatggtgaaattctaatgaccctacagccaagtaaatttgtgcatttaaatacgggtaaatcatatgatattgataaatggcctatgcataatcaactacatgcag

SEQ ID NO: 247793 - DNA, 736 bp, Unknown
  Bacterial polypeptide expressing nucleotide sequence isolated from the Sargasso Sea
atgtttcaattttttcttcagaaaatatggtatcgagaaaatttttataagtacttgtttatgccttttagctgggcatttcatgtttgcttgattttaaggaaaaaagcttaccagataggtatcttcaagatatataaggcgaactgtcctgtcgtagtgatagggaatattactgttggtggaactggaaaaacaccgataacaatatggcttgcagattattttatatcaaaagggtataaaattttaatattatcaagaggttacggaagcaaaataggtgatcacccaattgaagtatcaagaaacatggatgtaagtatggttggagatgagccattacttatggcgtctaaactaaaatgtccaatcattgttcatccatcaagagctcagtccttaatacacatagatggtagaaaatttgatttgattttatgtgatgacggcctgcaacactatcaattagatagagattttgagattgctgtagttgatggtgagagagagttcggtaataaatgcctgcttccagctgggccactaagggagccaatttcgagattattggaggttgatatctccttgattaataattcaaaccaagaatcagcaaagggcgattcatttaaattagtaggaaaaaaagtcattaatgtgcacaccaatgaagtaagatcaattgaagattttgaggggcatgaagttcatggtgttgccggcattggtaacc

SEQ ID NO: 247794 - DNA, 739 bp, Unknown
  Bacterial polypeptide expressing nucleotide sequence isolated from the Sargasso Sea
ttggatcatgggaagattgtagaagtaggtgaccacgcatctcttatagaaaaggatagccattatgcagagttacatagaaatcaatttaaagatgaccttcaggtaataaccaaaacagatgaagttacagatttaactattcctgaagatgctgaaatagatcaagtcagctttattgaagatagttggtacaaaaaaaggctttggttatgggccctatggccattctctagactaattagatctttagtcacaagaagaagaaataaatttttacttaattcagaactttcttggaagcctaacattccagtaatagttgtaggaaatataactgtagggggttctgggaaaacaccttttgttatttggctttctaaagttcttgaggagcaaggatataaacctggaatagtaagtagaggttatggtagtaaatcaaatcaattccctctagttattaacaaagattctagaatagaggattcaggagatgagccacttataatatatagaaacactaacagacctgtttgtatttctcctaacagaactcaggccgttaagaaattattagaagatacagacacagatatagttataagcgatgatggattgcaacattataaattaggcagagatatggaaattgttgtatttgatggtattagaggaataggaaatagtctttgcttaccagctggtccattaagggagcctatagagcgctccaaag

SEQ ID NO: 247795 - DNA, 760 bp, Unknown
  Bacterial polypeptide expressing nucleotide sequence isolated from the Sargasso Sea
agatgaggttcctgttattgttgtgggaaatgtatctgcaggaggaaatggaaaaacacctttagttagtcaaattgctaaagacttaagaacagttggatataggcccactattgttctaaggggctataaaggaaactttaatggaacagttgagctgaatgatgattcggatgcaaaacatgtaggggatgaagctatatttcactacaacaggggctttcctgttgtagtggacagagatagagcaagagctgtctcatatgctcaaagaaatataaatacagacatagttatctctgatgatggccttcaacatcatggcttaagaagggactttgaaataattgttgaagactcaaaaagggattttggaaatggctttttcattcctgctggccctttaagggataaaaaagagagaattaacaagactgatttgtttttatacagcggaagaaataaagataatgttgatttttttgaattagagcctgcaagttgggtaaacatcaagacaggagatgaatttgaaatagaagattatccgtttggaacaagtgcaaatttaatatcaggaattgcaaaacctgaaagatttttaaatagtgtttcaaatctaggtattgcttgtgaacataaatttttccctgatcatcactatttctctggaaatgacattaaatttgatttcaaaagagctattcttatgactgaaaaagatgcagtaagaatggataagaaacttatacaaaaaaat

SEQ ID NO: 247796 - DNA, 778 bp, Unknown
  Bacterial polypeptide expressing nucleotide sequence isolated from the Sargasso Sea
ctggagcagcggctgctgcgcgcctggtacagccgggctggctggctgaagctgctgcgtccgctgtctgcgctgtatcgccgcgttgtggtgcggcgtcgccagcagtatctggatgggcagcgtgcccagtggcagccgccggtgccgctgattgtggtgggcaacatcaccgtcggcgggacaggcaagacgccgatggtggtctggctggtcgagtttttgcggcgtcagggttaccggcccggcgtggtcagccgcggttacggagccgcgccgccttcattcccctggtttgtctccccaactgatgcgccggctattgccggtgacgagccgctgctgattgtgcagcggtgccaggtgccgctggtcattgacccggaccggccggcggccgcccgtcggctgctggaagaaggggtagacctgattatcagtgacgatggtctgcagcattacgccctgggtcgcagcgttgagctggttttgctcgatcagcagcgtgacctgggtaaccggcgctgtctgcccgaagggccgctgcgtgagccggctgagcgcctgcaatcggttgatctggtagtgcgtaacggcgctaccgctgacggccccaagggctatgcgatgcaactggcgcctggcgtgctggtcaaccttgttagcggtgagcgggttgccgctaaccgctggtcaggctctcgtcaggtggcggcgatggcgggcattggcaatcccgagcgtttttttgccaccctgcagacgctggctttgaatg

SEQ ID NO: 247797 - DNA, 727 bp, Unknown
  Bacterial polypeptide expressing nucleotide sequence isolated from the Sargasso Sea
agcattcccgcgcggaaacgttggcgacgaaccgttgctcatcgcccgcgccaccgatctgccggtgtgggtcttccccgaccgcgtgctgtgtgcgcagacgctgctggcctcgcacccgggctgcaacgtgatcgtgtgcgacgatggcctgcagcactaccgcctgcgccgcgacatcgagatcatcgtgttcgacgcgcgcatgggtggcaacggcttcctgctgcctgccggccccctgcgcgaaccgatgacgcgcaagcgcgacgccacgctcatcaacgacccgcactaccgcgccacgccggatcgcccgaacatcttcggcatgcacctcgcgctgcaggacgcctataacctggccgacccagcgctgcgccgcccgctcgcgcagttcgcccgcgtggaaggcgagcaactgctggccgccgccggcatcggcaacccggagcgtttcttcgcctcgctgcgcgccgagggccttaagcccagcaccctgccgctgcccgatcactacgacttcgcgaacaacccgttcgccgacagccacgccgaggtgatcctgatcaccgaaaaggatgccgtaaaatgcggccatctcgacgacccgcgcatctgggtggtgccgaccacaccggtggtcgacgcggcgctggtcgaacaggtctgccagcgcgtgcgcgccctggccgatcgcgcgaccgccaaagccggcgcacaataa

SEQ ID NO: 247798 - DNA, 637 bp, Unknown
  Bacterial polypeptide expressing nucleotide sequence isolated from the Sargasso Sea
atggcgccaatatttttttcaaaaacatttgtagatagagtttggtatagtaaaaatatccttagtttacttctattgccaattagttggatatatataattattattaaaattagatcagcactttatcaagttggtgtaattcctgttagtaaaattaatgttccgatcattgtcgttggaaatataacagcaggtggtacaggtaagacaccattagtcatttggttagcgaattattttaaaaataagggatttttaccaggcatcattagtagaggctatggcggtaaatatttatcggatattgaatttgttcattctgatagtgatccattgttagtcggtgatgagccattaataattgcaaaaaaatgtaattgtcctgtcgcagtagcaaagaaacgtgtaagggcagcaaaagaattagtcagcaagtataattgtaatataatcattagcgatgacgggatgcaacattattcactaggcagggatatcgaaatagctgtcattgatgggcaacgccgtttaggaaatggttattgtttaccagccggccccctacgagaacccaaaaataaattattaaatattgatttaattgttagtaaatatacatctcaaatcttctgaa

SEQ ID NO: 247799 - DNA, 604 bp, Unknown
  Bacterial polypeptide expressing nucleotide sequence isolated from the Sargasso Sea
catgccagaatatgaggatgaggactcaacaagttttgttgtagatagttggtataaaaaaagtttatggctttatctactttatcctttctctctaattttttcttatttaacttctcgaagaagaaaaagatatcttaataataaaattgcttcttataaatctgaaattccaattatagttgttggaaatttaacaattggtggtaccggaaagactccacttgtgaaatatattgtcactgaattaaaaaagagaggatataggcctggaattgtaagtagaggttatggtggaaaatttaaagaaactcttaaggtatcaaatgatactcctgtaaaagaaaccggagacgaagctcaaattttagctaagttagatgttccattttatatagacaaaaatagagtaagagctgtaaaaaaacttactaaaaatcatgaatgtgatgtgataatttccgatgatggacttcaacattataaaatgggtagacatattgaaattgcagttatagatggcaaaaggcgttttggaaacaacttaacttttcctgccggaccactaagagaagcatctaaaagaataaatacagttgatttt

SEQ ID NO: 247800 - DNA, 684 bp, Unknown
  Bacterial polypeptide expressing nucleotide sequence isolated from the Sargasso Sea
tttgcctgaatatgaagatgagatttcaacaagttttgttgtagatagttggtataagaaaagtatgtggctgtatctgctatatccattttcattattattttcatatttaactaatagaagaagaagaaaatatattaaaaataaagttaagtcatttaagccaaatataccggtaatagttgttggcaatttaactattggtggtaccggaaaaactccattggttaaatatattgcaacaaaattaatagataaaggatatcgacctggaatagtaagtagaggctatggcggagattttaaagaaaccttgcgagtaaatgaaaatacatctgttaaagaaacaggagatgaggctcaaatattagctaaattaaatatacccttttatatagataaaaatagagtaagggctgtaaagaagttaatagataaccatgattgtgatgtaataatttctgatgacgggcttcagcattataaaatgggacgagatattgaaattaatgtaattgatggaaaaagaagattgggaaacagtttaaccttcccggctggacctttgagagaatctaaatcaaggttaaaaacagttgattttattgttaacaatagtgggccaaccaaagatgatgaatatttaatgaatataattccttctaaatttgttcatttaaaatc

SEQ ID NO: 247801 - DNA, 703 bp, Unknown
  Bacterial polypeptide expressing nucleotide sequence isolated from the Sargasso Sea
tatgccagaatatgaggatgaagactcatcaagttttgttatagatagttggtataaaaaaagtttatggctttatttactttatcctttttctcttattttttcatacttaacttcaagaagacgaaaaagatatcttaataataaaattgcttcatataaatccaaaatcccaattatagttgttggaaatttaacgattggaggtactggaaagactccacttgtaaaatacattgttactgaattaaaaaataaaggatataggacaggaattgtaagtagaggttatgggggaaaatttaaagaaactcttaaggtatcaaccgatactccggtaaaagaaaccggagatgaggctcaaattttagctaagttagatgttccattttatatagataagaatagagtaagggctttaaaaaaacttactaaaaatcatgagtgtgatgtaataatttctgatgacggacttcaacattataaaatgggaagacatattgaaattgcagttatagatggcaaaaggcgatttgggaataacttaacttttcctgccggaccactaagagaagcctctaaaagaataaatacagttgattttattgttaataatagcggccctacaaatgaggatgaatatttgatgaatattagcccaacaaagtttgtgcatcttaaatcaggaaaatcatattcaatt

SEQ ID NO: 247802 - DNA, 750 bp, Unknown
  Bacterial polypeptide expressing nucleotide sequence isolated from the Sargasso Sea
tgaaagttgcaattgtttcaagaggctacggcggtaatttcacaggaactctgagagttgatgataatactgaatataaaaaatcaggtgatgaagcgcaaatgcttgctaatttaaatgtgcctctttatttagataaaaatagatctagagcaattaaaaatctaattaatgaaaatgattgtgacgtaattttatctgacgatggtctgcaacattataagatgcatcgtgatattgaaattatcgtcatagatggatctagaagacttgggaatggtttaacattcccagctggaccactaagagaatcatcaaaacgattaaagacaggaaactacattatcaacaatggcggaccaactgaggatggtgaaatccttatgactctacagccaagtaaatttgtacatttaaatacaggtaaatcatatgatattgataaatggcctatgcataatcagatacatgctgttgctggtttaggaaatcctggtagattttttgataccttgtctcaactaaattttgacatcgaaagacatccctttcctgatcatcatcaatttgaggaaagcgattttggatttcttgatcatcatccaataataatgactgaaaaagatgcagcacgttgtaagaattttggaaatcctaggatttggtatttaactgttgagccaaaaatagaagaatcatttattaatgacctagaatcaagaatacgttctttaccaaacgatgaatgag

SEQ ID NO: 247803 - DNA, 631 bp, Unknown
  Bacterial polypeptide expressing nucleotide sequence isolated from the Sargasso Sea
atgccagagtacaatgacgaagttacaacaagtttcgtagtcgatagttggtacaacaaaagcatttggttatatctactttatccattttcattagttttctcatttttaacttcaagacgaagaagaagatatataaaaaataagattaaatcatttacttctaagattccgttgattgttataggcaatctaacaataggcggtactggaaaaacacctttagtaaaatatattgctaaagaactaatggctaaaggctataaaccaggaattgtgagtaggggttatggagggcaatttaaaaaaactttaaaagtaacagttgaaacatctgtaaaagaaactggtgatgaggcacagatattatcaaagctaggaataccattttatatagataaaaatagggtgagagcagttaaagagctattaaaaaataatgattgcgatgtaattttgtcagatgatggcctgcaacattataaaatgggtcgaaatattgaaatagcagtaatagatggaaaaagacgttttggaaataatcttacatttcctgctggaccattaagagagtcaaaaaatagacttaaaacagttgattttattgtaaacaatagtgggccctactgat

SEQ ID NO: 247804 - DNA, 880 bp, Unknown
  Bacterial polypeptide expressing nucleotide sequence isolated from the Sargasso Sea
tcaaagactggctattgctagagcattttataaagattcgccaataattattttagatgaagctacatcttctcttgatacagaatctgaattaattgttcaagaagcccttgaaaagcttataactaacagaacgacgattgttatagcacacaggctttcaaccattgaaaatgcttctaaaattattgttttagatgatggtgttttatcagaaacaggtacgcataaagaattacttttaaatgatggaatttaccaatccttatataaaaataaatttgaagattctccatcagaaaagataacaatatctgaatctaaacaattatatgtgcctgaatatgatgaagaagataacgcaagttttgttgttgatagttggtataagaaaagtttatggttatatcttctgacgccattttcacttttatttaaatatttaacaaaaagaagaagaagaaaatatattcaaggtaagcttgaatcctttaaatctgatattccaattattattgttgggaatttaacgattggtggaactggaaaaacaccattagtagcatatatagcacaagaattaagcaagttaggttataagccgggattggttagtagagggtatggaggtaaatttaaagaaaccttagaagttacaagggatacacctgtaaagcaaacaggtgatgaagctcaaatactgtctaagttaaatctccctttttatattgataaaaatagggttagagctgtaaaaactttagcaaataaccatgattgtgatgtcattatctctgacgatgggcttcaacactacaatatgaatagggatatagaaatagttgtcatagatggtaaaagaagatttggtaataacctt

SEQ ID NO: 247805 - DNA, 723 bp, Unknown
  Bacterial polypeptide expressing nucleotide sequence isolated from the Sargasso Sea
atcaatacccgttaattattgatgataactcgagagtagatgattcaggagatgagccacttattatccatagaaatactaatagaccaatttgtatttctcctaacaggactcaagctgttaagaaattgttagaagaaacagatacagacatagttataagtgatgatggattacagcactataagttagatagagatatggaaattgttgtttttgatggaataagaggaataggaaataatctttgtttgcctgctggccctttaagagaacctattgaacgtctaaaggatgttgattttatcgttagttcctctaaaagattagatttagatgagatacaagaagattgtttaatgacctacaaaccactggaatgggttcggttaagtgacaatagaaggtttcctgcaaatgattggcctttatcgagaaacgtacatgctgttgctggaataggaaacccttctaagttttataatacattaaatgctttaggtcttaatcttatagagcatagttttccggatcactatcaattcaaagaagaggatttaaacttccaagataatcatccaatcttaatgactgaaaaagatgcagtcaggtgtatggatatgaagaataaaaatctttggtatttatcaattgaagctgatattaataataatggctttaaacaagaattactttcaaaattaaaagaaattggaggttaga

SEQ ID NO: 247806 - DNA, 871 bp, Unknown
  Bacterial polypeptide expressing nucleotide sequence isolated from the Sargasso Sea
ttatattcaagaggcactaatcgaattatctaaaaataagaccactttagttatagctcaccgtctttctacaattgaatctgcagataagattgttgtgttagatcatggaaaaattgtggaaataggtgaccacgcaacacttatacaaaaggacagccactatgccgagttacatagaaatcaatttaaagacgaccctcaggtagcaaccaaagaagatgaagtcagagacttaattattcctgaagagactgaaatagaccaagttagttttattgaagaaagttggtataagaaaagactttggttgtgggtcctatggccactctctagattgattaaatccttagttacaagaagaagaaataaatttttacttaattcagaactttcgtggaagcctgacattcctgtaatagttgttggaaacattatcgtaggaggttctggaaaaacaccttttgttatttggctttctaaagttcttgaagagcaaggatatcgtccaggaatagtaagtagaggttatggcagtaaatcaaatcaatatcctttaatcattaacgatgattctagagtagaggattcaggagatgagccacttataattcatagaaatacaaacaggccagtttgtatttctcctaacagaactcaggccgttaagaagttattggaagaaactgatgcagacataattataagtgatgatggattgcaacattacaagttaggtagggatatagaaataatagtatttgatggactaagaggaatagggaataacctctgcttgccagccggaccattaagggaaccaattgaacgctctaaagacgctgattttattgttagctcaacaaaaaga

SEQ ID NO: 247807 - DNA, 549 bp, Unknown
  Bacterial polypeptide expressing nucleotide sequence isolated from the Sargasso Sea
tttgccaaaaccaagtttaatttcttatttattaattccatttacactgccaattattttaagaaatcttttgtttaaatttcttaaaaaagaaaaaccttcaaatattaaaactatttgcgtcggaaatatttatttaggtggcacaggaaaaacacctctatctatcaaaatatatgaaattttaaaaaactttaataataaagtggcaactgtgaaaaaaaatcattctaatcaaaatgatgagcagcttttattaaaacaaaaaacatcattaatcatttcaaattcaagaaaaaatgcgattaatgaaggcttgaatcaaaattacgagattttaatatttgatgatgggttacaagatacagaaattgattttgatattaaattagtatgttttaaatcaaaaaattggattggaaacggtcaacttattccagcagggccaatgagagaaaaaatttcaagtttaaaaagatttgatgcagtgatcttaaatgggaattcaagtaattttgagaaaattgaaaaatcaaataaaaattataa

SEQ ID NO: 247808 - DNA, 575 bp, Unknown
  Bacterial polypeptide expressing nucleotide sequence isolated from the Sargasso Sea
taccaacacagatacaaatatcataattagtgatgatggccttcagcattattctatgcctagagatgtagaaatcgcagttttcgatggtgcaagaggtttaggaaatggtttatgtttacctgctggacctttaagagaaccaaaatcaagattaaatgatgttgatttcatattaagttcaaatgaatatttaaaagaagacattaaaagtgaaatattttcttatgaggcagtggatttcgttagaagtttagatggttcttcgataaaagtttcagactggcctttatctagaaagattaatgcattagcagggattggaaatcctaataaattcttcgataccttaagatttttgggtatggatccaattgaacattcttttccagatcattatgactttatggaagaagatcttaattttgaagaaaaccttccaatagttatgactgaaaaagatgcaataagatcagaagatctaaaccatcttgatttttggtatttaagaataaaagttagtccgccagagaatttactagatagaattttagataaaataaaggataaataat

SEQ ID NO: 247809 - DNA, 608 bp, Unknown
  Bacterial polypeptide expressing nucleotide sequence isolated from the Sargasso Sea
agccgcaataaagaaattacttgcagatacagatactgatatcgtgatcagtgatgatggtttacaacattataagatggatagagatatagaaattgtagtttttgatggtaacagaggaattggaaatggactttatttgcctgccggtccactacgtgaatcgttaaaaagaacagatgaagctgactttatagttagttcatcaaaacttaccaggttgaagacaaaacataataattacctgatgaattatcagccgattgaatgggcgagaattaaagacaataaaaggttcaatgcaaattcttggccattatccaaaaatgtacatgcagtagcaggaatagggaatccagctaagttttttaatacattaataagcttaggccttaatcctattagacatagttttccagatcattatcaatttaaagaggaggatcttgattttggagatacattgccaattataatgacggaaaaagatgctgtaagatgcctcgaaatgaactctaataatctttggtatttatctgtagaagctaaattcgaaaacgaagatttggccgaaaatattttgaataaacttacaataaacaaatgac

SEQ ID NO: 247810 - DNA, 791 bp, Unknown
  Bacterial polypeptide expressing nucleotide sequence isolated from the Sargasso Sea
aatgcgaagcatctggtttggaacgaatcctgtacggtatgctcttctcccattagcttggctatttcgcttgattgtttgggctagacgaaaggcctatttgctgagcttgttggacagctataggtctccggttccagtaattattgttgggaacattactgtgggcggtactgggaagacccctttggtaatttggttggtgggcttccttagcgcgctcgggttcaggcccggaattgtggctagagggtaccgtggtaaggccgggtcgtggccacagcaggtccggagagatagtgaccctgtggttgtgggcgacgaggctataatccttgctcggcgaactgatcgtcccgtggcggttggcccttccagaggggatgctatacaggcgctgttaacacattctgatacgaatattgtagtgagcgacgacgggcttcaacactatgcggttacccgagatatagaagtcgctgttttagatggtaaagagaggttggggaatggtctttttctccctgccggccctctgcgagaaccggtttctcgtttaaaggaagtagattttgttgtagcaaagggagttgcctctcgtggagaatttgcaatgaaatatcgggcggatatgctccataatgtagcaggagggagcaaaagcatgcaggcgggtgagttcaggtacaaaaaagttcatgcggtggccgggttaggtcaaccagaaggtttttttaacatcctcaagcgtctcgactttgattgcgtcaagcatgtttttcccgaccact

SEQ ID NO: 247811 - DNA, 623 bp, Unknown
  Bacterial polypeptide expressing nucleotide sequence isolated from the Sargasso Sea
aagtcattgtcctgtagtggtctgtccggacagagtggcagctgcgcagtatctgctggagactacagactgcgatatagtgattagcgacgatggtctgcagcattataggttacagcgcgatttagaactggtgctgatcgacggtcaacgaggtttgggcaatcagcagctattgcccgcagggcctttgcgcgaacctgtatcgcgtttacaaagtgtcgatgcggttattgtgaatagcggtaactttgaatcggcgcagtataaaatgctgttaaagcctgttaagcctctggcattagatggtcaaagccaatggccagaacaagcacaagctgtgactttagtggcagccataggcaatccacaacgttttgttgatacggtaaagaactttggtattgaggtgaaagccagcgtctttttccgtgatcattttgcttttgatgaacagagtctggctaatatcgaaggcccggtattaatgacagaaaaagatgcggtcaaatgccgtgcttttgctaaacccaattggtattacctgccggtcgaggccgacctgtcggacgaatttaaattctggctgcagcaccaactgcgtcaatggagagaagactaat

SEQ ID NO: 247812 - DNA, 592 bp, Unknown
  Bacterial polypeptide expressing nucleotide sequence isolated from the Sargasso Sea
ttgcagccaattgacgatgttgaaaataattctagttttgtaataaatgcttggtatcaaaaacatttatggctgtatctactcttaccattctcatggatttttacttttctaactaatagacgaagaagaaaatatcttaaaaaccaaatttcgtcatataaaacagatactccagttgttgttgttggaaatataaatatcggtggaacaggtaaaacacctctagttaagtatattgcttcaaaactaaaagagaggggtttaaatgttggaattgtttcaagaggctatggcggtaacttctcaggaacactgagagttgatgataatactgaatataaaaaatcaggtgatgaagcgcaaatgcttgctaatttaaatgctcctttatatttagataaaaatagaccaagagcaattcaaaatctaataaatgaaaatgattgtgacgtaattttatctgatgatggtcttcaacattataagatgtatcgtgatattgaaattatcgtcatagatggatctagaagacttggaaatggtttaacattcccagctggttcctctaagagaatcatcaaaaagataa

SEQ ID NO: 247813 - DNA, 814 bp, Unknown
  Bacterial polypeptide expressing nucleotide sequence isolated from the Sargasso Sea
cttgaaaagttaatatctgatagaactacgatagttatagcccatagattatcaaccattgaaaatgctgatcaaatagtagtactggataatggtcttatatcacaacaagggaaacattcagatttacttgaagaagagggcatatacgcttcactatataaaaatgttccaattgaaagtaagaaatcatcatctacatccatacaaaaagtttcatatttgcagccaattgacgatgttgaaaataattctagttttgtaataaatgcttggtatcaaaaacatttatggctgtatctactcttaccattctcatggatttttacttttctaactaatagacgaagaagaaaatatcttaaaaaccaaatttcgtcatataaaacagatactccagttgttgttgttggaaatataaatatcggtggaacaggtaaaacacctctagttaagtatattgcttcaaaactaaaagagaggggtttaaatgttggaattgtttcaagaggctatggcggtaacttctcaggaacactgagagttgatgataatactgaatataaaaaatcaggtgatgaagcgcaaatgcttgctaatttaaatgctcctttatatttagataaaaatagaccaagagcaattcaaaatctaataaatgaaaatgattgtgacgtaattttatctgatgatggtcttcaacattataagatgtatcgtgatattgaaattatcgtcatagatggatctagaagacttggaaatggtttaacattcccagctggttcctctaagagaatcatcaaaaagataa

SEQ ID NO: 247814 - DNA, 763 bp, Unknown
  Bacterial polypeptide expressing nucleotide sequence isolated from the Sargasso Sea
ttggataggttagatagctctacggtaaaaagtggcttaatagattcgaattatacggtagaagaagaaaggtattcagaacggaatctttggtataacggctctagaattccgtttgtgttaatgccactggaatacatttttaagcagctaatatttttccggagactttgttatcgtttcaagatcaaatctagttggcggtctccggttccggttattgtagtaggcaatattaccgtcggagggaccggtaaaaccccgtttgtaatttggctagctaactatttatcgaatcttggtttgcgaccagggatagtactaaggggggttggcggacgagcaaatggtgtttcggttagagttggagaaaagactcatgtggatgaagtaggagaagaggcacttattttagccagaaaaactggttgtccgacggtagttgctaaaaaacgcgtaaacgcggcaaaaaagcttctttcagaagagtcggtagatctaataatctctgacgacgggcttcagcactatagtttagagcgtgatatggaggtagtgattgtagacggccaaagggaattcggtaatgagcacttattgcctgttggtccacttagggagccaatatctaggctagagggggtggattgggtgatagctaacgaaaaagttagttatcgagtccctcaaaagcagactttaatagaagttgcgcctgtctatttcgtggccttggggactggagagaaattatctataaaga

SEQ ID NO: 247815 - DNA, 470 bp, Unknown
  Bacterial polypeptide expressing nucleotide sequence isolated from the Sargasso Sea
tttaggcaatgcccggttattacccgcagggccgctacgcgagggtgcctggcggttaaagcaggctgatatcgtggtcgccaacagtcaagctgtagccggtgctgacggtgttatgcaattaaaagccgcgcccgcgcgctcgttgatatcggattctgagctcgatagccgtgatgtaacactggttgccggtataggcaacccgcaacggttcgagcgcactgctgttgcggcgggttttaatattacggcaaggcattattttgctgatcatcataagtttactgccgcagattttactgctattgatggcccggttctgatgacagagaaagatgccgtaaaatgccaacagtttgctaaagcggactggttcagccttggcgttgatgctgaactggatgcacaattaaaaacaaaactcactcttttattgactgaactgcggagcaaatatggcacttaaa

SEQ ID NO: 247816 - DNA, 604 bp, Unknown
  Bacterial polypeptide expressing nucleotide sequence isolated from the Sargasso Sea
ctcactatttttatttccattttctttgatattttttattataataaaaatacgacgaactctttataaatacagaatattagcaaaatataaatcatcaatcccgctgataataattggaaatataactattggcggtacgggtaaaaccccctttgttatatggcttgctaaccatttagcaaacaaaggcttaaaggtaggagtaatttcttctggctataagtctacttccaaaactcctgaaatagttaataaaaactcaaactcaaaccaagtaggagatgaagcagtattaattgctaaacatactgatagcattgttgtaagtggaggaagtagagttgatgcgacaaaacttttaacgtcaataagtacaaacgatatcattctccatgacgatggtttacaacattataaattagagagagactacgaaataatacttgttaatagcaaaaatccatttggtaatggtttgctattaccagccggtcctctcagagagcctaaatcacgactagaggatacagatattgtggcctttacgaacagcagcaatgaatcaagttattcaatagcttcaataagtgattccgttgtc

SEQ ID NO: 247817 - DNA, 845 bp, Unknown
  Bacterial polypeptide expressing nucleotide sequence isolated from the Sargasso Sea
tttacctgaatatcaagatgaaatttcaacaagttttgtggttgatagttggtataaaaaaagcttatggttataccttctttatccattttctttaatcttttcttatttaacaaacaggagaagaaggaaatatataaaaaataaagttagttcttataaatcaagcataccaataatagttgttggtaatttgactattgggggtactggtaagacacccttggttaaatatattgctactcaattaatatcaaaaggatataaacctggaatagttagtagaggttatggcggaaaatttaaagagacattacaagttacaaaagatacttctgtaaaagaaacaggtgatgaagctcaaatattagcaaaattaaatataccattttacattgataaaaatagattaagggccgttaaaactattactgataatcatgattgtgacgtaataatatctgatgatggtctccaacattataaaatggctagagatatcgaaataattgtaattgatggaaaaagaagatttggaaataatctaacttttcctgcaggcccattaagagaaacaaagtctagattgaagacagtcgattttattgttaataatagtggtcctaccgaagataatgaatatttaatgaatataagtccatcaaaatttgttcatctcaaatctggaaaatcatatagcgttgaagattggcctatgcataaacaagttcatgctgttgctggattaggaaatccaggaagattttttgatttacttgataaactgggttttgatattattaaacacccgtatcctgatcatcatattttttcttcgagtgacg

SEQ ID NO: 247818 - DNA, 862 bp, Unknown
  Bacterial polypeptide expressing nucleotide sequence isolated from the Sargasso Sea
cttgcctgaatatgaagatgaagtctcaacaagttttgttgtagatagttggtataagaaaagtatgtggttatacctactttatcctttttctttaatattttcatatctaaccaatagaagaaggagaaaatatattaaaaataggcttgattcatttaagccaaatataccaataatagttgttggtaacttaactattggcggaactggaaaaacaccattagttaaatacatagctacagagctaatggatagaggatataagcctggaatagtaagtagaggttatggcggtaactttaaagaaaccttacaagtaaataaagatacgtctgttaaggaaacaggcgacgaagcccaaatattagcaaaattaaatatacctttttatatagataaaaatagagtaagggctgtaaagaagttaataagtaatcatgattgcgatgtaataatttctgatgatggactccagcattataaaatgggaagagatattgaaattaatgtaattgatggaaaaagaagattgggaaacaatttaaccttcccggctggaccattaagagagtctaaagcaagattaaaaacagttgattttattattaacaatagtggaccaactgaagatggtgaatacttaatgaatattactccttctaaatttgtacatttaaaatcaggcaaatcatacagtgttgaagattggccaatgcataaacaagttcatgctgttgctggattgggtaatccaggaagattttttgatttattgggtaaactaggatttgatattattagacatccatatccagatcaccataatttctcatcaaatgatattttttatttagatcat

SEQ ID NO: 247819 - DNA, 424 bp, Unknown
  Bacterial polypeptide expressing nucleotide sequence isolated from the Sargasso Sea
ttacgtagcgtcgacgccatcattgttaacggcggcgtcgcgcaggcgggggagatccccatgcagctgcgacccggactggcggtgaatttacgcagcggcgaacggcgtgacgtggcttctttcgagaatgtcgttgccatggccgggatcggccatcccccgcgctttttcgccacgctggaaagctgcggcgtcctgccggtaaaaaccgtcgcgcttgccgatcaccaggcattgactcaggcgagcgtttccgcccttgtgaacccacagcaaacgctgctgatgaccgagaaagatgcggtgaaatgtcgcgggtttgccgaatcaaactggtggtatttacctgtcgacgccataatgacggatgaacgcgcacagcagctgctgacggaactggtgacgctggcgcaacgttagt

SEQ ID NO: 247820 - DNA, 772 bp, Unknown
  Bacterial polypeptide expressing nucleotide sequence isolated from the Sargasso Sea
tgccaattacttaaaaaagaaggtctcaaaccaggaataatttcaagaggttatctgagtaaatcaaagacctatccactgctacttaactcagagactccaattgaagaatctggagatgagccggctattatgtttaaaaattctcaatgtccagtggtcatcggtcccaataggatacaagcagctaaacatcttatggaaaatacagatagtaatgtcattttaagcgatgatggtttgcagcacttttctcttggaagagatatagaaatactaatgattgatggaaataggaagtttggaaacgagttactgcttccagcaggacctcttagagagccaaaatctagaattaaaacagttgattatacaatcagctcaaatagaaaatggccctcagttgcgaaatatgaaatgaaatatcgtccttttaagtgggttcatatgaaaagccaaaaggaatacgatattttcgactggcccttaaaaaaagaagtaaatgcggttgcaggaattggaaatccatctaattttttcaatttattaaaacaaatgggctttgacatatcagaatacactttccctgatcatcatgattttcatagtgtagattttgaaattatggacaatcaacctactgtaatgacagaaaaagatgcaataaaatgttcatttctagaccatacgaattattggtatttaaagatagaagctgaagtttcagataactttgaacaagatttcttaaacgaaataaaatctaaatgaa

SEQ ID NO: 247821 - DNA, 577 bp, Unknown
  Bacterial polypeptide expressing nucleotide sequence isolated from the Sargasso Sea
tctgaacgacttatcatcagtaagctttattgaacaaagctggtatcaaaagaaattatggctatggctactttggcctctatcattattaactaaatttgctgccaaacgcagaagagaaaaatttataaatcaaccccagttatcttggaaacccgatgtgcctgtaattgtggtgggcaatattgttgttggcggaactggaaaaaccccgatggtaatttggttagttaaaaatctagagaggaaaggttttaagccaggaatagtgagtagaggttatggtggctcttcgccaagtattcctcagattgtcgatgacgcaacgcccgttaaaattagtggtgatgaaccgcttattatttataaaaataccttaagaccagtttgtatatcttcaaatcgaacctctgcaataagcaagctgcttgaagaaaccgatacagacataatcataagtgatgatggccttcagcactataagatggatagagacattgagattgtaatttttgatggaaatcgaggtataggaaatggactttgtttgcctgccgggcctttaagagacctttag

SEQ ID NO: 247822 - DNA, 865 bp, Unknown
  Bacterial polypeptide expressing nucleotide sequence isolated from the Sargasso Sea
gatgaagctaccatcggctttagattctgagtcagaaaattatatacaagatgcattgcaagaattaacaaagaatagaactacgcttgtcatagctcatagattatcaactatagaaagttcggacaaaattgtggtgctagagtcaggaaatatagtagaaatggggagtcatcaaaatttgatctctaatgatggccattatgcagaattgcataaaaatcagtttaaagacgacccttctgaattaaagaaaaaatctttacctatagaatatttagaagaagatctgaacgacttatcatcagtaagctttattgaacaaagctggtatcaaaagaaattatggctatggctactttggcctctatcattattaactaaatttgctgccaaacgcagaagagaaaaatttataaatcaaccccagttatcttggaaacccgatgtgcctgtaattgtggtgggcaatattgttgttggcggaactggaaaaaccccgatggtaatttggttagttaaaaatctagagaggaaaggttttaagccaggaatagtgagtagaggttatggtggctcttcgccaagtattcctcagattgtcgatgacgcaacgcccgttaaaattagtggtgatgaaccgcttattatttataaaaataccttaagaccagtttgtatatcttcaaatcgaacctctgcaataagcaagctgcttgaagaaaccgatacagacataatcataagtgatgatggccttcagcactataagatggatagagacattgagattgtaatttttgatggaaatcgaggtataggaaatggactttgtttgcctgccgggcctttaagagacctttag

SEQ ID NO: 247823 - DNA, 432 bp, Unknown
  Bacterial polypeptide expressing nucleotide sequence isolated from the Sargasso Sea
attttgtgatggtcaatggtgggcacgctcaggccaaccaatatgagatgcagctgagtccaagtgctgtgttgccggttaatcctaaagctgaggcagtatttgactcgacgcaacctgtggtggcgatggcgggcattggtcatccggcgcgcttttttgagacgttaacgcagcaaggtattcaacttgcgttatcccatggttttgatgaccaccaagcctacgataaacacgtgttatgcgagcttgcggcatctcggccgctgatgatgacagaaaaagatgcggttaaatgtcgcgattttgcacaagaaaactggtggtatttggctgtggatgccaagctatcgccacaatttgatcaacagctgctgagccgtgtgcgctctgtggctgccgctaaacaaggaaaatcccatggcgtttgat

SEQ ID NO: 247824 - DNA, 919 bp, Unknown
  Bacterial polypeptide expressing nucleotide sequence isolated from the Sargasso Sea
atgtcagctttattttggctaatttcgattaccagaaagcagatgtatcgttttggaatatttaagcaatttaaaagcgacatacctattattgttgttggtaacattagtgtgggtggaaatggtaaaacaccgtttgtattatggctttatgactttttaacaaaacaagggttgtcagttggaatcattagccgaggttatggtggtaaggcgagtaattatcctttaattgttaaagacaatacgccagctgctgaggcgggtgatgagcctaaacttctgtttcatcgtctaaaatgcccaattgcgatagggccaaaccgacaacgcaatattgagttactagcccttgattataatttagatatcattatctctgacgatggtatgcagcattacaaaatggcacgcactattgaatgctgtatcgtcgatagtgaacgccaatttggaaatgggttgctaatgcctgcagggccattacgagaaacacctgcacgtttgaagtcggttgatttgattgttgaaaacggagggcagaatagtaataactacacattagagcctgcagcgctcaggtcagtaaaaagttcttttcctattagtgaatcgattaaaaatggccatgcagtaagcgcaataggtaatcctaagcgttttgaaaataccttaaaaaaacaggggataactttattatcttcaaatcattttagggatcatcatccatacacagccgaagattttacccgatttggtaacgacaatattctaatgaccgaaaaagacgccgtaaaatgcagcgagtttgccaaagataattggtattatttaccagtaaatgcaaggccaacacaggctgtaataaataaattaactttaatattaaaagaaaaagggatcctaaatggcctttgat

SEQ ID NO: 247825 - DNA, 864 bp, Unknown
  Bacterial polypeptide expressing nucleotide sequence isolated from the Sargasso Sea
aatgactagaattgtcaaaattttagaaaacatttggtatcgagataaaaagccaaccaattttttgattgttctctcaatggtctatggaattttaataaaaataagaagattactttatgatcttggtattttttcaaccagtaagcctgaaattcccgtgatcataattggcaatattaatgttggaggaacaggtaaaactcctttcaccttatatttagcaaatagactttcccatttaggtaagaaagtagggattgtatcgagaggttataggggaaaaaaatcaagttcaaaaccattcattcttgataaaaatagcaaggccgaagattttggtgatgaggctgtttacctattaaaaaatacagattcaatggtttgcgtttgtaagaaaagattgattgcagcaaatttactctttgatcgaggtgtcgatattattctttctgatgacggtctgcaacactatgcattggggagagacatagaatttgctgtagtttcttctaatcgtggatttggcaatcgatatctgcttccagctggacctttgagagagagaatagaaaggcttgattcacttgatttactcttaatcaatggcaaacagatcgaaaaagatctaaatattaagaatataatcagttttgaaatcctgaatagagaagtcaaaaatatacacgatggggaagtgcgacccatggaggattttgtaaatagagacatattactgatcgcagggattggtgatccaggtgccttgcaagagaaattgattaatcttgacatcaacgttgactccatcgatgttattgaccacgagactgccgatctaagtttaatagatgacattaaaaa

SEQ ID NO: 247826 - DNA, 988 bp, Unknown
  Bacterial polypeptide expressing nucleotide sequence isolated from the Sargasso Sea
ttggagagtatttggtatcaagataagaaacctccgttcttattgatacttttatcaaagctctatggttttctcttgaatgcaagaagggcattatttgaccttggccttttatcaagcaacaagcccgatattcctgtgatcataattggtaacctcaatatcggtggaaccggcaagactccattcactttatatttggcaaatatgttgtccagatctggcaaaaaagtagggattgtatcaagaggctataaaggaaagaaatcgagctcaaaaccatatctcctcggtaagaacagcaatgcaagagattttggtgacgaagcggtctatctatccaggcatgcagatgcaatggtttgtgtttgcaagaaaagatcgctggctgcacattttttatccgacaaaggtgtcgacattattctttctgacgatggacttcaacactatggactcaagagagatatagaatttgctgtggtttcatccaacaggggttttggaaacaggtatttgcttccggcaggacctctaagagaaggattggaacgccttgaaacactggatcatcttttagtcaatggtaaaaaattagatcaggacttgcgtgttgataatttgattggatttgagatcgttaatcgagaagttaaaaatattcacgacggagatattcggccaatagatgagtttttgaatagagatgtctcattgattgcagggataggcgatcctgaatttttagcagagtctttgaagaataaagggattaatatccactcaattgatgttaaagatcatgaaaaaattgatctgaatactataaatgagattgaaaatagaacattgtttttaacgcctaaagacttggtaaaatactcgaaagatgattttccaaaagacacatgggaattgattccggatctattgatcgatcaagcagatcaggaaattatactgaataaggtaatgaagattgtttaaa

SEQ ID NO: 247827 - DNA, 1012 bp, Unknown
  Bacterial polypeptide expressing nucleotide sequence isolated from the Sargasso Sea
aatgattagaattgtcaaaattttagaaaacatttggtatcgagataaaaagccacccaattttttgattggtctctcagtggtctatggaattttattaaaaataagaagatcactttatgatcttggtattttttcaaccagtaaacctgaaattcccgtgatcataattggcaatattaacgttggggggacaggtaaaactcctttcaccttatatttagcaaatacactttcccatttgggtaagaaagtagggattatatcgagaggttatagaggaaaaaaatcaagttcaaaaccattcattctcgataaaaaaagcaaggccgaagattttggtgatgaggctgtttacctatcaaaacatacagattcaatggtttgcgtttgtaaaaaaaaattggtcgcagcaaatatactctttgatcgaggtgtcgatgttattctttctgatgatggtctgcaacactatgcattggggagagatatagaatttgcagtagtttcttctaatcgcggatttggcaatcgatatctgcttccagctggacctttgagagagagaatagaaaggcttgattcactcgatttactcttagtcaatggtaaacagatcgaccaagatctaaatatgaagaatataatcagctttgaaatcctgaatagagaagtcaaaaatatccacgatggggaagtgcgacccatggaggattttgtaaatagagatatattactgatcgcaggtattggtgatccagatgccttgcgagagaaattgattaatcttgatattaaagttgaatccatcgatgttgttgaccatgatactgctgatctaagcttaatagatgagattgaaaagagaacaatatttttaacaccaaaagacttggtaaaatactcaaaagatgacttgcctcgagagacatgggaattgattccagaaatgtctattgatcattcagaagagcaaattctgatcaggcagattcaaggtatcatggaatga

SEQ ID NO: 247828 - DNA, 577 bp, Unknown
  Bacterial polypeptide expressing nucleotide sequence isolated from the Sargasso Sea
atgttagaaaataattccagttttgtaataaatgcttggtatcaaaaacatttatggctgtacctactcttaccattctcatggatttttacttttctaactaatagacgaagaagaaaatatcttaaaaaccaaatttcgtcatttaaaacagatactccagttgttgttgttggaaatataaatatcggtggaacaggtaaaacacctctagttaagcatattgcttcaaaactgaaagagagaggtttaaaagttggaattgtctcaagaggctatggcggtaacttttcaggaacacttagagttgatgataatacagaatataaaaaatcaggtgatgaagcgcaaatgcttgttaatttaaatgttcctttatatttagataaaaatagaccaagagcaattcaaaatctaataaatgaaaatgattgtgacgtaattttatctgatgatggtcttcaacattataaaatgtatcgtgatattgaaattatcgtcatagatggatctagaagacttggaaatggtttaacattcccagctggacctcttagagaatcatcaaaaagataaa

SEQ ID NO: 247829 - DNA, 985 bp, Unknown
  Bacterial polypeptide expressing nucleotide sequence isolated from the Sargasso Sea
atgaataaattttttgaacagatatggtactcaaattttaatgtttactcactaattttatttccattttctttgatatttctcatcataataaaaatacggataattctttacagatacggaatattagtaaaatataagtcaccaattccactaataataattggaaatataactattggaggtactggtaaaactcctttcactatatggcttgctaaccatttaacaaaaaaaggtctaaaggtaggagtaatttcttctggctataaatcaacttccaaaactcctaaaatagttaaggaaaactcaaatgcaaatcaagtaggagatgaagcagtattaattgctaaatatactgatagcattgttgtaagtggaggaagtagagttgatgctacaaaacttttaacgaaaataagtataaatgatatcattctccatgatgatggtttacaacattataaattagagagagactacgaaataatacttattaatagcaaaaatccatttggcaatggtttagtattgccagctggtcctctgagagagcctaaatctagattagataatacagatatagtggcttatacgaataataataatgattcaacttattcaatagctacaataagtaattctgtagtcaattcagtttctgaggaatcaaaaaatattaaagattttgctttaaagaaaattcacttagttactggaattgcatcaatggaaatgattattgaaaatctcaagagttataaaatacaatgtatactccatgaatatgatgatcactatatattcgacggttctgaagtaatctttgatgataactatcctgtctttataacacagaaagattatgttaaattgtctggtatcaataataaaaatatatggattatagatcataaggttaagcctaataacttacttataacaaagcttaattcagatctgagccatttattaaatatatgaa

SEQ ID NO: 247830 - DNA, 633 bp, Unknown
  Bacterial polypeptide expressing nucleotide sequence isolated from the Sargasso Sea
gcgcgcgcggagccgcgtacttaagtgacgaattacactgcgatttaattatttgtgatgacggccttcaacattacgcacttcatcgcgacgttgaaattgtggtgatggacgatagaaaagtaggcagtggttatttgctaccaatggggccccttcgcgaaggacaatggcgccttggtaccgttgatgcgctagtacataatagccgttcaatgccgacatttagccatgctgtagcgcctcaatatctaatgaccttagtaccaggggacttcacctctgtttcaaacagagtaagaaccagtccccttgaagagatacaaaaagtgccgtgcagcgcaattgctggaataggttcacctcagcgatttttctctcagcttaaagaaatgggtatccagctttcttcggctacaccgctggcggatcaccatgcgatcacacggtcagacataccgaatggcagagtgttaatgacagaaaaagacgccgttaaagctgcaccttttgctcataacgactgctggtttttacctgttaccgcgcatttagcgccagacttttttaatttagtaaatgtgaaacttgccaaggcaggtttgaagatcaaccaagacggacaggaataat

SEQ ID NO: 247831 - DNA, 1006 bp, Unknown
  Bacterial polypeptide expressing nucleotide sequence isolated from the Sargasso Sea
aatgctagctccaaagttttggtatccagaaaacaatgaaaaaagtttttctagcctagcacttgttcctttcgggcatatctattcacttctttcaaaattaagaatgtcaaaagctgtaaagaagcaatttgatattcctattgtttgcataggcaatctaaatgctggcggcacaggaaaaactccaacaaccatttcagcagctgagtttttaaaagacagaaagtacaatgttcatatagtttcccgtggatatgggggtactgccatggggcctctatctgtcaatgacaaagagcactcagcagatgaagtaggcgatgaggccttgatgctatcagcctttgcacccacatgggtagccaccaaacggtcagatggagtacaaagcgcaattaaagaaggtgctgacataattttgttagacgacggttttcaagatccaagtgtttacaaggatctgtctattttgaccgtaaatgcaaaaaaaggcttcggaaacaaccgatgtattcctgctggaccattgagagaaaaactgagcagtggcttggagcgggcagatgttttaatttcaatcgggaccgaaacatctcagataacattcaaatccatatataaaaactacattaatatgccattaggaatagcaaatcttgaggttttaaatacggggttatctctagaaaatatgaaagttttggcatttgcaggaattgctcatccagaaaacttcttcgatacgctccgagctcaaggcgcagagatagttgactatcaggctcttgcggatcaccagaaactttcttcaaaaattatgaagcgcttgatcgtaagcgctcgagcagaaaatgctcaacttattaccacggaaaaggattatgtgcgattaccaaaggagtttagaggcgaggtaatgaccttgccagttagaattaaattaaatgaaaatttgagctgggagaaaattttcaaacctattttatgttgtcagggaaaataa

SEQ ID NO: 247832 - DNA, 817 bp, Unknown
  Bacterial polypeptide expressing nucleotide sequence isolated from the Sargasso Sea
ctgacagttggtggcacaggaaaaactcctattattatttaccttgccaaattacttaaaaaacaaggtcttaaaccaggaataatttcaagaggttacttgagtaaatcaaaaacctatccattgctacttaactcagagaccccaattgaagaatctggagatgagccggctattatgtttaagaattctcagtgtccagtggtcatcggacccaataggatacaagctgctaaacatcttatggaaaatacagatagcaatgtcattttaagcgatgatggtttgcagcacttttctcttggaagagatatagaaatattaatgattgatggaaataggaagtttggaaacgagctactgcttcctgctggaccacttagagagccaaaatctagaactgaaacagttgattttacaatcagctcaaatagaaaatggccttctgttgcaaaatatgaaatgaaatatcgtccttataagtgggttcatatgaaaagccaaaaggaatacgatattttcgactggcccttaaaaaaagaagtaaacgcagttgcaggaattggaaatccatctaatttttttaatttattaaaacaacttggttttgatatatctgaatacgctttccctgatcatcatgactttcacagcgtagattttgaaattatggataatcaacctactgtaatgacagaaaaagatgcaataaaatgctcatttctagaccatacgaattattggtatttaaagatagaagctgaagtttcagataactttgaacaagatttcttagccgaaattaaatctaaatgaa

SEQ ID NO: 247833 - DNA, 811 bp, Unknown
  Bacterial polypeptide expressing nucleotide sequence isolated from the Sargasso Sea
agtggtctggctggtggagcagttgcaggcccgcggctatcgtcccggggtggtgagccgcggctatggcggcaaggcgccccattacccgtaccggctcgatgccgccagtaccacggtgcaggcgggggatgaaccggtactaattgcccggcgctgtggctgcccggtagtggtggcgcccaagcgggccgatgcggtgcgtctgctggagcagagcggcgaagtggacatcatcatcaccgacgatggcctgcagcactatgcgctggcccgcgacatcgagctggtggtggtggatggcgcgcgccgtttcggcaacgcttgcctgctgcccatggggccgctgcgcgaaccggtcacccggctcaagcgggtggacgccatcatctgcaacggcggcgagccggggcggggcgagtatcccatgaggctggtggccgacgcaccgcgtcgggtgtgcgacgaggccccgctggccacgccgctggtcggtccggtcgacgcgctggcggggattggtcatccgccccgcttcttcgccaccctcgaggggctcggttaccagctggatcagcgggtggcttacggggatcaccaccccttcgatcgggacgagctggtgagccgttttgccggcaagccgctgctgatgaccgagaaggatgcggtcaagtgccgctcctttgccctcgacaactggtggtatctgccggtcagcgccgagttgcccgcctccctgctcgataccctgctgcacaagctgggggcgagcgggaaggggcaaggcgcaaccaaggcacaaggctaa

SEQ ID NO: 247834 - DNA, 626 bp, Unknown
  Bacterial polypeptide expressing nucleotide sequence isolated from the Sargasso Sea
cgtgccggtagcggtatccccggtaagatcggatgcggtaaaagccattttggcccaacatgacgtgcagattattgtgaccgacgatgggctacagcactatcgtctggcgcgagatgttgaaatcgtggttattgacggcgaacgtcggtttggcaacggctggtggcttcccgctggtccaatgcgggaacgcgcaggtcgcctaaaatcggtggatgcgactattgttaacggtggcgttgcgcaaccaggggaaatccctatgcgacttgaaccggggctggccgttaatttacgtacaggtgaacgccgtaatgtagcgcaattgcccaatattgtcgccatggcgggcattggtcacccaccgcgtttttttgccacgctgaaagcatgcggtgccagcgtgcaaaaaagcattgcgctggcagaccatcagtctctgacctacagtgacgtcagtgcgtttgtaaacgccgggcaaacgctggtgatgacggaaaaagatgcggttaagtgccgggcatttgccgatgaaaactggtggtatttacctgttgacgcacatttgtcaggcgatcggcctgacatgttgctggatagcttaatctcgctgactcgctaac

SEQ ID NO: 247835 - DNA, 640 bp, Unknown
  Bacterial polypeptide expressing nucleotide sequence isolated from the Sargasso Sea
tggtgggagccaaaacgtgtcgataccgccaaggcgttgctggcagagtttgccgtggatgtgattatctgtgacgatggtttgcagcattacgccctcggccgtgacattgagctggtggtgattgatggaaagcgcggtttagggaatcagcatttgttgcccgcaggaccgctacgggaaggggcttggcgccttaatcaagtggattttgtggtggtcaatggtggacctgctcaggccaatcaatatgagatgcagctgagtccgagtgcggtgttaccagtaaatcctaaagctgaggccatgtttgacccgacgcaacctgtggtggcgatggcgggcattggtcatccggcgcgcttttttgagacgttaacgcagcaaggtattcaacttgcgttatgccatggttttgatgaccaccaagcctatgataaacacgtgttatgcgagcttgcggcatctcggccgctgatgatgacagaaaaagatgcggttaaatgtcgcgattttgcacaagaaaactggtggtatttggctgtggatgccaagctatcgccacaatttgatcaacagctgctgagccgtgtgcgctctgtggctgcagctaaacaaggaaaatcccatggcgtttgat

SEQ ID NO: 247836 - DNA, 1030 bp, Unknown
  Bacterial polypeptide expressing nucleotide sequence isolated from the Sargasso Sea
atgagcgcgcccgatggcccgctcgcccggctcgaagcccgcctgacgcgcgaatggcagcgccgcggcgcgctcgcgtgggcgctcacgccgtttgcatgcgtgttcggcctgtgcgcggcgttacggcgcaccgcctacgcgcagggctggaagaagccggtcgacgtcggcgtgcccgtcgtcgtggtcggcaacgtgaccgtcggcggcaccggcaagacgccgaccgtgatcgccctcgtcgacgcgttgcgcgcggccggcttcacgcccggcatcgtgtcgcgcggctacggtgcgaacgtgaaggcgccgaccgccgtcacgcccgcgtcgcgcgccagcgcgggcggcgacgaaccgctcctgatcgcacgccgcaccggcgcgcccgtctgggtctgcccggatcgcgtcgcggccgcgcaggcgctgcgggccgcgcatccggacgtcgacgtgatcgtcagcgacgacggcctgcagcattaccgcctcgcgcgcacggtcgagctcgtcgtgttcgaccaccggctcggcggcaacggcttcctgctgccggccggaccgttgcgcgagccgctgtcgcggcatcgcgacgccacgctcgtcaacgatccgtacagcggcgcgctgccgccgtggcccgacacctattcgctcgcgctcacgccgggcgccgcgtggcacctcgaccagcccgcgctgcgccgcccgctgtcgcaattcgcgaacgagcgcgtgctcgccgcggccggcatcggcgcgccggaacgcttcttcgcgacgctgcgcgcggccggtctcgcgcccgcgacgcgcgcgcttcccgaccactacgcgttcgccgaaaatccgttcgtcgacgacgccgtcgatgcgatcctgatcaccgagaaggatgcagtaaaattgggcgcttcctggcgcgacgcccgactgtgggtggtccccgtcgaagccgcgctcgaccctcgcctcattgccctcgttgtggagaaactccgtggacgctcgcctgcttgaa

SEQ ID NO: 247837 - DNA, 1084 bp, Unknown
  Bacterial polypeptide expressing nucleotide sequence isolated from the Sargasso Sea
aagaatcagtttaaagaagatgaagaagatggtctaagaagggaacctcaaataaatttctttgaagaaagtgctgatgacctctcttcggctagttttatagagcaaagctggtatgagaaaaaattatggttatggctactttggcctctttcactcttaacgcagtttgtttctagaagaagaaggtataaatttttagatcaaccgaaactgtcctggaaacctgaggtcccagttgttgtggttggtaatattgttgtgggcggaaccggaaaaacaccattagttatttggttgacaaaattatttgaaaagaacggatataaacccggcatcgtaagccgaggttatggcggatcatctactaaacctattctcattgatgatgaaacctctgtaagcgtcagtggagatgaaccattgattatttataaaaatactctaagaccagtttgtatatcgacaaacagaatagctgcaataaagaaattacttgcagatacagataccgatatcgtaatcagtgatgatggtttacaacactataagatggatagagatatagaaattgtagtttttgatggtaatagaggaattggaaatggactttatttacctgctggtccattacgagaatcgttaaaaagaacagatgaagctgattttgtagttagttcatcaaaacttactaggttgaagacaaaacatactaattacctgatgaattatcagccgattgaatgggcgagaattaaagacaataaaaggttcaatgcaaattcttggccattatccaaaaatgtacatgcagtagcaggaatagggaatcctgctaagttttttaatacattaataagcttaggcctcaatcccataaaacatagttttcctgatcattatcaattcaaagaggaggatcttgattttggagatgctttgccaattataatgacggaaaaagatgctgtaagatgtctcgaaatgaactctaataatctttggtacttatctgtagaagctaaatttgaaaacgaagatttggccgaaaatattttgaataaacttaaaacaaacaaatgac

SEQ ID NO: 247838 - DNA, 1018 bp, Unknown
  Bacterial polypeptide expressing nucleotide sequence isolated from the Sargasso Sea
aatgagcggcccgaacgaccgtctcgaggcacgccttgcgcgcgaatggcagcagcgcggcccgcttgcgtgggcgctgacgcccctcgcgtgtgtgttcggcgcgattgccgccgcgcgccgcgccgccttctcgttcggctggctgaaatccgtgcgcattggcgtgccggtggtggtggtcggcaacgtgaccgtcggcggcaccggcaagacgccgaccgtcatcgcgctggtcgaagccttgcgcgccgccggtttcaagcccggcgtggtgtcgcgcggctatggcgcacgcgtcaaagaaccgacgccggttctcgcgacctcggcggcaaacgtcggcggcgacgaaccgttgctgatcgcgcgccgcaccggcgcaccggtgtgggtctgcccggatcgcgtcgcggccgcgcaggcattgtgcgccgcgcatcgcgaagtcgacctgattgtcagcgacgacggcttgcagcactaccgcctcgagcgcgatgccgaactggtggtcttcgatcaccggctgggcggcaatggttttctgctgccggccggtccgctgcgcgagccgctgtcgcgccgccgcgacgcgacgctggtcaacgatccttacgcgcgcacactgcctccctggccgaacacgttcgcgctgcaacttgcgcccgccgacgcctggcatctcgacaaccccggtctgcgccgcccgctcgcccaattcagcggcgagcgcgtgttggcggcggccggcatcggcgcgccggaacgttttttcgcgacgctgcgcgcggccggtctcacgccgaccacccgcgctttgccggatcactacgcgttcgagcgcaatccttttacggacgtcgacgcggacaccatcctgataaccgaaaaggatgcggtaaaattagggtcctggcgcgacgcgcgcatctgggttgttcctgtcgaagccgcgctcgatcatcgcctcattgcattagttgtggagaaagtccgtggacgctcgcctgcttga

SEQ ID NO: 247839 - DNA, 772 bp, Unknown
  Bacterial polypeptide expressing nucleotide sequence isolated from the Sargasso Sea
gccgcgctcgtggcctcaggtcggcgtggtcagtcgtggctatggcgccacgccgacgagcctgccgtggcgcgtgcgagccgatcaaccggccgcacaggccggtgacgaaccgctgctgatcgtccagcgtacgggcgtgcccttgatgatcgacccggaccgcagtcgcgcggtgcgtgcgctgttggccgaagaaccactggatttgatcctctgcgacgatggcctgcagcactaccgtctggcgcgtgacctggagctggtgctgatcgatgctgcccgtggcctgggtaatcgccgctgcctgccggccgggccactgcgtgagccggtcgagcgtctggctgaggtggatgctgtgctgttcaacggcgccgaggcggattgcgccgatggctatgcctttcgcctgcaaccgaccgcactggtcaatctggtcagtggtgagcgcgttggcctcgagcacttcccgcccggtcaggccgtgcatgcggtggccggcatcggtaatccgcaacgtttcttcaataccctcgaagcgctaaactggcggccggttccgcatcccttcgccgaccatgcccagtacgatgccacgcagctcagcttcgagccgtcgctgcccctgctgatgacggaaaaggatgcggtgaaatgccgggccttcgccgccgccgactggtggtacctggccgtcgatgccgcgcccacgccggctttcgtcgactggctggatggagagctggcccgcctcataccggggtcctga

SEQ ID NO: 247840 - DNA, 973 bp, Unknown
  Bacterial polypeptide expressing nucleotide sequence isolated from the Sargasso Sea
atgaactggtgggagaaaggctggtaccaacagcacccttttacactgatcttctggccgctgagcctgctgtaccgtctggttgctgtaattcgtcgtttcggctatcagcgtggctggtttcagtcttttgcggtggaaaagcccgttgttattgttggtaatatttcggtaggtggtacaggtaaaacaccttttactttgtggctttgtaagtttttagcagagcagggctttacccctggtattgtcagtcggggttatggtgcccgaattacagagcctgtgcgggtgacctctctgcatttggcttgtgatgtaggcgatgagcctttgcttttagccagcaaaagtcattgccctgtggtggtttgtccggacagagtggcagcagcacagtatctgcttgataccacagactgcgatatagtgatcagcgacgatggtttacagcactatagattacaacgcgatctggaactggtattgattgacggtcaacgcgggctgggtaatcagcaattattaccagccgggccattgcgtgagccggtatcacgtttgcaaaaagttgatgcggtgattgtgaatagtggtgactttgcactggcaaagcacaagatgtcgttaaaagctgtgataccacaggctttggatgggcaaagccaatggccagaacaagctcagcctgtgactttagtcgcagccataggcaatccgcaacgttttgtcgatacggtaaaaagtgtgggcattgagattaaagccacagcctttttccgtgatcattttgcttttgatgaacacagtctggccgatattgaaggcccagtgctgatgacagaaaaagatgcggtgaaatgccgtgcttttgccaaacccaattggtattacctgccggtcgaagccgatctgtcggacgaatttaaattctggctgcagcaacagctgcgccaatggagagatgaataat

SEQ ID NO: 247841 - DNA, 1009 bp, Unknown
  Bacterial polypeptide expressing nucleotide sequence isolated from the Sargasso Sea
atgcaggcgctggtgaataaaatctggtacgagggccacccgttgcgatggctcttgctgccgttttcagtgctatttgccttaattacagccattcgacgcagtctgtttcgcttagggctcaaatctcaaaccgcattacccgtgcccgttatcgtcgtcggtaacattaccgttggtggcagtggtaaaacgcccacagtcatctatttgattgaactgctacgccaacaggggtttaacccaggtgtgatcagccgtggttatggagtggatatccaaggagtcaaagtcgttaccacggcggatagcgccgctgcggtgggtgatgagcccgccatgatagtagcgcgtaccgatgtgcctatggtggtgggagccaaacgtgtcgataccgccaaggcgttgctggcagagtttgccgtggatgtgattatctgtgacgatggtttgcagcattacgccctcggccgtgacattgagctggtggtgattgatggaaagcgcggtttagggaatcagcatttgttgcccgcaggaccgctacgggaaggggcttggcgccttaatcaagtggattttgtggtggtcaatggtggacctgctcaggccaatcaatatgagatgcagctgagtccgagtgcggtgttaccagtaaatcctaaagctgaggccatgtttgacccgacgcaacctgtggtggcgatggcgggcattggtcatccggcgcgcttttttgagacgttaacgcagcaaggtattcaacttgcgttatgccatggttttgatgaccaccaagcctatgataaacacgtgttatgcgagcttgcggcatctcggccgctgatgatgacagaaaaagatgcggttaaatgtcgcgattttgcacaagaaaactggtggtatttggctgtggatgccaagctatcgccacaatttgatcaacagctgctgagccgtgtgcgctctgtggctgcagctaaacaaggaaaatcccatggcgtttgat

SEQ ID NO: 247842 - DNA, 1009 bp, Unknown
  Bacterial polypeptide expressing nucleotide sequence isolated from the Sargasso Sea
aatgcaggcgttagtgaataaaatttggtatcaaggccacccattacggtggctcttactgcctttttctgcgttgtttgcgcttattaccgcaattcgccgtggtttatttcgcttagggattaaatcacaaaccacactgccagtccccgtgatcgtggtgggcaatattaccgttggcggtagtggtaaaacccccacagtcatctatttgattgaactgctgcgtcaacaggggtttaatccgggtgtgatcagccgtggttatggcgcgcatatccaaggggtaaaagtcgttagcgtaaaggatgctgcaactgatgtgggcgatgagccagctatgattgtggcgcgtactggtgtgcctatggtggtgggccctaaacgtgttgataccgcaaaaaccttgctggcgcagtttgccgtggatgtcattatctgtgacgatggcttgcaacattacgccctcggccgtgatattgagctggtggtgattgatggaaagcgcggtttagggaatcgtcatttgcttccagcaggcccactacgggaaggtgcttggcgtcttaatcaagtggattttgtggtggtcaatagtggacccgcgcaggcgaatcaatatgagatgcagctgagcccaagtgcggtgttgccggtaaatcctaaggctgaggccgtgtttgatccgacccagcccgtggtggcaatggcgggtattggtcatccggcgcgtttttttgaaaccttaacgcagcaaggttttcaactcgcgttatcccatggttttgatgaccaccaagcctacgataaacacgtgttatgcgagcttgcagcatctcgccccttgatgatgactgaaaaagatgcggttaaatgtcgcgattttgcacaagaaaactggtggtatttggctgtcgatgccaagctatcgccacaatttgatcaacagttgctgagccgattacgctctgtggctgcagctaaaaaaggaaaatcccatggcgtttga

SEQ ID NO: 247843 - DNA, 618 bp, Unknown
  Bacterial polypeptide expressing nucleotide sequence isolated from the Sargasso Sea
aaaatattccaattgggtccggtttagggggaggttcggcagatgccgcagcaaccttagtacttctacgaacactttttaacaaagataagaatcattataaaatgcctatatctaaaatattacaaattggtagtgaattaggatctgacgtaccttcgtgtattatgagtaaagatttaaggttaagtggttatggcaaagaaataaaaagaaaaaaatttccaagtaattattatttcctaattatttacccaaatatcgaactttcaactaaatctgtattccaacattactctgattttaaaaattttaatcataaatcaaaaaaaatactttttgaaaacataaaaattcataattctcttttactttcagcaactagtctagcgccgaagattagagatgttttagttattttgagaaaaattcctaacattgttgcttatggtatgacaggaagtgggtccacctgctttggtatagtaaaaagtttaaaagatatacctaatttagttaagttttttaataatgagtattttatttggtttggacaaaaagctaatttcaacttgaacagggtaagtttctctaaagttcttgaaaataaattttaaa

SEQ ID NO: 247844 - DNA, 439 bp, Unknown
  Bacterial polypeptide expressing nucleotide sequence isolated from the Sargasso Sea
atggaatataaatatagatcttacgcaaaaataaatagctatttgaatgtaatgtcaaaactcgataatggctatcatgagattcttactcattttcaaattattgacctatatgatgaagttctatttaaagaaagtgatgtccttctgatagattcaaatgagaaaacaataaaagataacaattccataactaaaactattaaatggtttaatgaaaaatatggagtaaatcaaaaatttgaagcaaagattaagaaatcaataccaataggagcaggattgggtggcggcagttcaaatgcagcaattgctctacgatttcttgcagaatttcataatatccaaattaaagatattgataatactgaaatagctttagctttaggtgcagatgtgcctgtctttgtgcataaaaaaagttgttatgcttcaggaa

SEQ ID NO: 247845 - DNA, 511 bp, Unknown
  Bacterial polypeptide expressing nucleotide sequence isolated from the Sargasso Sea
atgaataaattattattaaagtctccagcaaagattaacttagatttaacaatcttaaacaaactcaaaaatggataccacgagattaatacatcatttcaacttattgatttgtttgacgagattgaatttgagagctctaaaaataatatttctttatcttcaaaccttaaagaattaaattcagatgacaatatcatcactactgttgctagaaaacttaaaaattcaaatagcaaattgggagttaaaattaagcttaaaaagttaatccctattggtgctggtcttggtggtggaagttctaatgcagcatcaactatagtggctttaaataaattatgggatcttaagatgtctaaaagtgaaatgcataattttgctagaaatattggagcagacgtaccattttttctatttggtcaaaatgcgcaaggaaatggcataggggatattctcaaatataaagattcaattactgataacattcttattattgatcctatgatat

SEQ ID NO: 247846 - DNA, 556 bp, Unknown
  Bacterial polypeptide expressing nucleotide sequence isolated from the Sargasso Sea
aatgatcttaaaatcatttgctaaaataaacttatctttgttggtcaataaaaaattgactagtggacttcatgatcttcaatctatctactgtttaataaatctattcgacacaatatcaataaaaaagattaaaaataaaaaaaaagataagatttcaattaaaggcccgtattctaaatatgtaagtcaatccaataactcaataactaaaactttaaatttaatgaggaaatcaaaacttatttccgatttttattcgataacgataaataaaaaaattcctgtatttgctggcttgggaggagggagcagtaatgcggcaacagtaattaaatttttgattaaacaaaatttaagaaaaaaaatacttaaccttttaacaaagcaagtaagttctgaccttattcttttttttcatgaccaaggatatcttaaaaatctccatacagtttataaaattaaaaaaaaatataatctcaattttttgttaatttatcctaatattaaaagctccacaaaaaaagtttattcaagtctaaaaaatattcaaaaa

SEQ ID NO: 247847 - DNA, 517 bp, Unknown
  Bacterial polypeptide expressing nucleotide sequence isolated from the Sargasso Sea
atggaatataaatacagatcttacgcaaaaataaatagctatttgaatgtgatgtcaaaactcgataatggctatcatgagattcttactcattttcaaattattgacctatatgatgaagttctatttaaagaaagtgatgtcctccgaatagattcaaatgagaaaacaataaaagataacaattccataactaaagctattaaatggtttaatgaaaaatatggagtaaatcaaaaatttgaagcaaagattaagaaatcaatcccaataggagcaggattgggtggcggcagttcaaatgcaggaattgctctacgatttcttgcagaatttcataatatccaaattaaagatattgataatactgaaatagctttagctttaggtgcagatgtacctgtctttgtgcataaaaaaagttgttatgcttcaggaattggagacatattaggcaaaaaatcatttaatgcatctgaatatctactaatttgtcctcaaatattgttccacccag

SEQ ID NO: 247848 - DNA, 703 bp, Unknown
  Bacterial polypeptide expressing nucleotide sequence isolated from the Sargasso Sea
atgcaagatttagctaaaacgaaaattaatataaaatctcctgccaaaataaatttgcaccttgaagttattggtaaaagagaagatggatttcatgagttagcaatgattatgcaaaatatcgatctttctgattatttagaatttgaaattaataatgaaggtttaattaaacttgagtctgattgtaatgatttaagcttatctgatgataacttaatcgttaaatcggcaaatctattaaggaaaaaatcaaatatagattacggtgcgaatatatttttaagaaaaaatattccaattggcgcaggattagctggtggatccagtaatgcagcagcaacattaattggtcttaataagttatgggatttgaacttaaatcaagaaacattatgttcattagcatcaactttaggatctgatattccattctttataaatggtggtattcaattatgttttgggagaggagaaattttagagaaattagattcaaattttgattatggagtaattcttttaaaaaatccaaatgtatcagtatctacagctgaaacttataaaaaatatagtaatagattttgtgatcgatatcttacaaatagagaaatgattgagaacataagaaaagatttaagagataatggtttaaataacttaaaaaacgtaaattttgataatcaacatttaactataaaaa

SEQ ID NO: 247849 - DNA, 504 bp, Unknown
  Bacterial polypeptide expressing nucleotide sequence isolated from the Sargasso Sea
tttgaaaaatacagtgatattatcacccgcaaaaataaatttaactttacaaataaaagagcgattaaaaaatggttaccatgtaatttcttcgcacatgatcttccttgatttatttgatagaatttttattcaaaataaaacaagtgattttctaaaaattgttggcccttttaaaaaaaaaatgaattccagtgatagaaataatttaatattcaaaacccttaaattttgtagaaaaaataaattaaccaatgatagttttaaaatcacattagaaaaaaacataccgatatcggcaggtctgggggggggctcttcaaatagcgctagtataattagatactttttaaagcataataaaaatgaaaaagtaagtaaaattgtaaatttgtcacaaaagcttggggcagatattccagcttgtttatattctcaaccacttttagcagaaggtattggagaaagaatttcactcataaattttaacaaaaaccttgatat

SEQ ID NO: 247850 - DNA, 667 bp, Unknown
  Bacterial polypeptide expressing nucleotide sequence isolated from the Sargasso Sea
tgagaaaaacatacctattggggcaggattggcagggggatctacagatgcagctgcaacattacttggattaaataaactctggaagttaaatcttaagactgatgaattagagaacctatcaaaagaaataggatcagatatccctttttgcatatcaggagggaggcaaatatgttttggtagaggtgagattttagaaaaattgaaatttgatcaaattcagttaggtcttgttttggttaaagacccttcaatacaagtatctactccagttgcatacaaaaaatataaagagcagtttggtgaaagctatcttgaagatgatagggattttgaaatcaaaagaaactctattagatctattgactggtctgatcagtcgctttttgatcatcgtaaagaaatacaaaatgatttacaaaaaagcgttcgccctatgacaccagaggttgagaagtcattgaatttattgtctagtttgccagattcacgtcttgtttcaatgagtggttctggtccaagttgttttgccttgtttcaaaattatgaccaagcaaataaagtactcaaagaacatgttaacgaatttgaaagggctggtttatcagcttgggcatgttcaatgatgtctaatggagttgaattaagaaatgaattcacctag

SEQ ID NO: 247851 - DNA, 532 bp, Unknown
  Bacterial polypeptide expressing nucleotide sequence isolated from the Sargasso Sea
atggaatataaatataaatcttacgcaaaaataaatagctatttgaatgtgatgtcaaaactcgataatggctatcatgagattcttactcattttcaaattattgacctatatgatgaagtttcatttaaagaaagtgatagccttctaatagcttcaaatgaggagacaataaaagataacaattccataactaaaactattaaatggtttaatgaaaaatatggggtgaatcaaaaatttgaagcaaagattaagaaatcaattccaataggagcaggattgggtggcggcagttcaaatgcagcaattgctctaagatttcttgcagaatttcataatattcaaattaaagatattgataatactgaaatagctttagctttaggtgcagatgtacctgtctttgtgcataaaaaaagttgttatgcttcaggaattggagacatattaggcaaaagttcatttaattcgtctgaatatctgctaatttgtcctcaaaatatttgtttccactcagaacctttataaa

SEQ ID NO: 247852 - DNA, 664 bp, Unknown
  Bacterial polypeptide expressing nucleotide sequence isolated from the Sargasso Sea
gttgtcaccagcaaaaataaatctttatctagaggttttagaaaaaacatcaagcgggtttcataatattgaaagcctaatgaccttttgtgattttggagatatcattaatattaaaaaagaaaaatcttttaggttgacaattgatggtccattttcaaaaaaactcccattgaatgataatattatttataagtcagtttcatttattgagagactaataaataaaaatttaaccgttcatataaatctaacaaaaaatttaccaattgcatcaggtatgggtggaggttcatcaaatgcagcaacagtgattttatgtctgattgaaatgtttaatatagattgtaaaaaagactttcataaatctctcttttcactaggtgcagatatacctttttgtttttgcagaaagtcagcaatagtgaccggaaaaggtgaaaatattttaaaaatagataataactatgaaaatttttttgttctattagttaacccaatgattcaaatttcaacgaaaaaaatatttgaaaaactaactattccaaaaagaaaagattgtactatttttgatgaaaaatttcttagtaattcccaaatagttgattttttaaattcaagaaataacgaccttgaaaagccggcaattttacagtgcgaagaa

SEQ ID NO: 247853 - DNA, 696 bp, Unknown
  Bacterial polypeptide expressing nucleotide sequence isolated from the Sargasso Sea
gatgaaagtccttgttcctgccaaaatcaacactctcctctaccttcttcacaagcgtgaggacggataccacgaattatacagtcatttctttccgatcagtctttatgattcccttgaaataattcctcagaaccagagtggtattactttggaggttgatggaatggatttcgaggagggacttcagaataatttagtgtatcgtgcggccgaactttttcaggaaaattcgagcaatccttttggaatgagcatcattcttaaaaaaaacattccagtaggtgccggtttgggtggaggcagtgcggatgcggcagcgactctgcatgttttaaatcaacttcaccaaaaccccttctctagaaaaaaactccaagatttagctttaaaccttggcgcagatgttccttttttcatctatcctgaaccttcagaagtaaggggtattgggaatgtcatttgtccattaaatcactatcctttactcccgcttcttatactcaaacctcctttttcgatttcaactgctgaggcttttcaggaatgcatccctaggaggatgaaagtcccagtgaaaatcgtcaatgatgaggaactggtcaggaatctggagaaccgtttcgaatacacgctctttaaaaaatacccggagttgaaagagctcaaaaaccaatgtttggagcatggcgcaat

SEQ ID NO: 247854 - DNA, 406 bp, Unknown
  Bacterial polypeptide expressing nucleotide sequence isolated from the Sargasso Sea
atgcttacttctaaatcatatgcaaaaattaatctttcattggaattgttaaataaacgtaaagacgggtttcacaatatctcatctatcatgcaaacgatctcattaagcgatctaatttcagtatctttatctgatcaaatgataatagattcgaatactgattcaatacctttgggaagtaacttagtttatatagctgcacaaaaagtgaaggaaaaatttaatattaagcaaaatgctcatattaaattaacaaaaaatattcctatgtcttctggtttaggtggaggtagcagtaacgcagcaacagttattaatttattaaaagaattatgggatattaaatgctcacatcaagacttattagatttggcatcccagtattgggtcagaatgtaccatt

SEQ ID NO: 247855 - DNA, 766 bp, Unknown
  Bacterial polypeptide expressing nucleotide sequence isolated from the Sargasso Sea
atgataatgcagaacattgatctttctgactatatagaatttgagaataatcaaattggagaaattaatttaaagtctgatagcaaagatctatctctagatgaagataatttaataataaaagcggcgacttatataaaggacatgtcaaaaaataaagaattaggggctaatatatttttaaaaaagaacattcctattggtgctggtttagctggtggttctagtaatgcagctgcaacattagttggacttaataaattatgggatttggaccttgattacgaaactatttttatactttcggcaaaacttggttcagatgtacctttttttatagaaggaggatgccaattttgttttggaaggggagaaattcttgagaaatacagttctaattttgactttggcgtaattcttttaaaaaacccaaatatttcaatttcaactgtagatacttataaaaaatatagtcaagaattttgtccaaaatattttactgaaactgagaaaacaaacaaaatcagaaatgatttaagagtaaacggattcaatgatttcaaactatcagaacaaaggataaatgtaagaaatgatttgcaagttattgttgagagagaaaataattctgtaaagaaagcattatatctactttcaaatttgcaaaattgtttatcattctcaatgagtggatctggtccaacatgttttgctctttttaaaaaaataaatatagctaatgaagtttttgaacaaaaattataaa

SEQ ID NO: 247856 - DNA, 766 bp, Unknown
  Bacterial polypeptide expressing nucleotide sequence isolated from the Sargasso Sea
aatgatagaaatagatactaaatctccagctaagataaatctttatttaagaattttaaacaaaagaaatgatggatatcataatatcgagacatcttttcaatatattgatttgtatgattttttaaattttaaagaatcaaaacatgatatatcgatagactcagatagccctgtctttaaaaatactaacaatacggtctttcaggctgcaagcaaaatgaaagaatattcaaataattcttcaggagtaagtataaaaatagaaaaaaaaataccgattggatcaggtttgggtggagcgagttcaaatgcagcatcaacaattttagctttaaataaattatggggccttaatttaagtgatgcagagctgttcagtattgggaaagggattggtgcggatgttcccttttttatatttggtaaaaacgcattaggagaaggaattggagatatattaaaaaatacagaatcaattgaaaacaatatatttataattgacccaaaaattcataattcatccaaagaaatgtttaccttatatgattcatggataaaaaataataaagatgcaaatgattattcacagaattctttttggaatatctttattaaagaaaatcatataattcaaaaattttatgatgaaaatattaataattataaattaaagcttagcgggagcggatcttgtatgtatgtagaatataaagaaagacaagaaattgatcaaatacttaaaaaaataccaagtaattggaga

SEQ ID NO: 247857 - DNA, 918 bp, Unknown
  Bacterial polypeptide expressing nucleotide sequence isolated from the Sargasso Sea
cagggattcattccgtctttcaaacatcagacgatagaactcaatccggaaaccgttcaaaacatccacaacatcggaggaagtatcctttcgagctctcggggcccccaggacattggtgaaatcgttgactgccttgaacgccaggacatccgtcaacttttttgtatcggaggagacggaacactccggggcgcccatgagattgctatggaggtggaaaaacgcggactgaatatcgggatcctcggaattcccaaaacgattgataacgacatcccgttttgcatcaaaaccttcggctttgaaaccgctttttcaaaggcggtagaagctgtgcaggcagctcattcggaagccttcggaaacaattatggcatcgtcatcatcaagctgatgggaagggattccggtttcattgccgccaatacctcccttgccagtcccgatgtgaattttgtattgatccctgaggtccctttctcgatggaaggtgaaaacggcctactgcactgccttgaacaagcactccacaaaaaacttcaggaaggaaggcatccgcactcggtcatcgtggtcgcggagggggtcggacaggaactgatgggcaatacaggagaagaaaaagatgcatcagggaacatccgctacaaggacatcagtcatttcctgaaaaataaaatcatcgagcattttcaaaacagataccccgtcaatgtgaaattgatcgaaccgagttacatgatacggtcactgcccgccaatcctcatgatgccattttctgctaccatctcgcagacaatgccgtccacgcaatgatgagcggaaagaccgatttaatgatcggttactggaacggccatttcacccatgttccactgcaggctgtcgttcaggaacagaaacgtattgatcct

SEQ ID NO: 247858 - DNA, 769 bp, Unknown
  Bacterial polypeptide expressing nucleotide sequence isolated from the Sargasso Sea
ttagagattttgggtaaacggcctgatcagtttcatgacttaacatcaattattgtctcggtaaatctatgtgatgaaatcaaaatagaagaatcctctgaattagagatattttgctcgaacatgctaatcaaaaaggagtccaatctagcatacttggtcgctaacgctttgcggaatcagtacaaaatatcaacaggagcaaaaattactctgtctaaaaatataccagttgcagctgggcttggaggtggtagtagcgacgcagccactactttgattggcttaaataaattatggggattgggattgaaaattgatcagttaagccctatcgcaagatctttcggctctgatataacatttttcttgcataatggcactgcaatggtacaagggaaaggggatattatacgaaagctaccacaggcaaacataaaatatgctgtgatcctatcgcctgatataccaattaataacaagactaggcttatgtttagcaaagtgacatctagtcattacacaaaaggggctttgactcggaaacttgaatcgagaataagaagcaggggtgacattccccctgaattactgttcaatgtttttgatccgatttcaagtgaattgtttcctgaattaaaatcaacgctccaaatattttcagagatttggagtgaagaaattcatatatgtggggctgggccatcattattcactcttgttgaatccagagaaatagctactgccctttcgttgttactaaataaaa

SEQ ID NO: 247859 - DNA, 658 bp, Unknown
  Bacterial polypeptide expressing nucleotide sequence isolated from the Sargasso Sea
gctgcaggaagtaattcccataaaagataacattattttaaaagctgctgaaattttaaaggaaaaaactaattgttctaaaggagtgcaaatctctatagaaaaaaatataccgctccaaaaaggacttggtgggggcagttcaaatgctgctgcaaccttattggctttaaacgtattgtgggatacggggctaactaaatcagaattattaaaattgtctttggaattaggttcggatgttcccttttttgtatttgggcacagtgcatgggctgaaggaagaggtgaaaagctttctaaaataaattgtaaggaagaatggcatttactatttatgccaaaagcagaaataagcactaaagaagcttttgagcaattgcctcttctgacttccaactcctattcatatgaagattattgttctaaaggtggatttaatacttttgagaaatgggcaagggaatcgtatgaagaaattgataaaatttttattaaattagaaaatataggtaaagcccacctatcgggaacaggctcttcagtatttatatcttttaagaaaaaagaaatagcagaagaagttaagaaagaattttctaattgcattttagtaaaaagtttagaacgttcacctttaatgcaaataatagaataa

SEQ ID NO: 247860 - DNA, 660 bp, Unknown
  Bacterial polypeptide expressing nucleotide sequence isolated from the Sargasso Sea
tttcaagaaattgacttatatgatgagataatactagaaaagttagaatcaggatgtgaattctcttcaaatgtggattggttaaaaaatgatagttctaatttatgtgttaatgcttgggatcagttatctaaattctgctcaattggaggggtctcaatatctttattgaaaaacatacctcctggaagtggattaggaggcgggtcttccaatgctgcaacaatccttaagggattgtgtgtgttatatgattttcatagcccatatgaaaagctaattaatgctgcaattaatcttggagctgatgttccattttttcttgatggaggattgcagcaggtttcaggtatcggtgaggttctaaccccattagatggctgtgtaaatggaacgtatttattggtcatgccagatataaaaatcaatactacatgggcttataattcctttaaaaaatttttggaggaatcaaaagaaaaagttaattttagtaacttattgacaaaaggaactgttcctttcgagttttttgagaatgattttgaatcaattgttattccagcatatccagagattgcaaatataaaagaaatgctttgggctacaggccctaagtttgtaagtctgtcgggttctggctcgactgtgtatggaatt

SEQ ID NO: 247861 - DNA, 644 bp, Unknown
  Bacterial polypeptide expressing nucleotide sequence isolated from the Sargasso Sea
acatattcttgatagaaggaaagatggttatcataatttagaaagtatcttttgtattattgatttctatgacaggttatcttttcaaaaaaataattcaactaaaatcaattttaaaactaactctaatgaaattgactctacatataatttagttactaaagcatatgatttaatttctagtttatatgatattgaaggtatagatatatttttagataagaaaatacctataggttctggtttgggcggaggtagttcgaatgctgcagttaccttattggcattaaatgaaattttcaaattaaatatgtcaaaagataacttgttgaaaatatctaaggagattggatcagacgtacctttcttcataaatggtggagcagcctatataagtggaaaaggagaaattatcaatagcatttctattgataagaaatacttcgtgcttatcttgccaaatttaaatatatcaacaaaagatatttatgaatctttatcttcaaaagactttatgactcaatacagtcttgatgagctaatggcatcaaatattaattcctttgaggaaatagttatgtctaaatatccttcattaaaagagacaaaatattggctttccgcctttggtagcgttagaatgt

SEQ ID NO: 247862 - DNA, 724 bp, Unknown
  Bacterial polypeptide expressing nucleotide sequence isolated from the Sargasso Sea
aatgaataacaatattgttttaaaatctcctgccaaattgaatttaactttagaaattctggataaatacaaagataattttcatgaaattaattcagtggttttaaatgtgaatttattcgatgaaataaaaattgaaaaatcaaaccgttttgaaatttatactaatgctgaaattgatgctaaagaaaacttgatttataaagcttaccaattattatttgagcaatacggaaaattaccaacgaaagtaaatttaactaaaaatattcctttggactcaggactaggtggaggaagcagcaatgcagctaattttttacaaggcatgaataaactttggagtcttgatttaaataaaaatgatttaaaattaattggaaatcaattgggcatggatgttaatttattttatgacccaggagttaattttttaaagggaaaaggaaatttaattgatcccattgtaaccactcccaagggtggattgataatattttatgatgattacaggatacctaaaaaaacatttagagcttataatatgatacggaattctgatttctctaatggtaaaatatcggaacagctaattgattgtattaaaggtcgttcttttaatttgggttcaattacatgttttaatgtttttgacaaatatattaatgacttatatcctttaacctcggaattcaaagaatatttaaagttcgcaaatagataa

SEQ ID NO: 247863 - DNA, 741 bp, Unknown
  Bacterial polypeptide expressing nucleotide sequence isolated from the Sargasso Sea
cctgctcgccgatcgcgcccccgccaaggtcaacctgacgctccacgtcctcggccgacgcgtcggtgacggctaccacgtgctcgagagcctcgtcgccttcgcgggcagcgccgaccgcctcaccctggatcccgacggcccgctgggcctgaccgtcagcggccccaccgccggccctgccggcccgacggacgacaacctcgtcctgcgggccgcccggggtctcgccgcacgggtgccgggcttgcgcgcgggtgccttccatctggtgaagcgcctgccggtcgcggcggggatcggcggcggctcctccgacgccgccgcggccctgcgcctgctggcgcgcctcaaccggctgcccctcgaccacgcggccgtcggcgcggtggcgcgggagaccggcgccgacgtaccggtctgcctcgacccgcgggcccggatgatgcgcggcgcgggcgaggagatcggggcggccctcgggctcgaaccgctgcccgcggtgctgatcaatcccggcgtgccggtgcccaccgccccggtcttcagggctctgggcctgagcgtcggccaggatctcgcgggcgcaccgcatccgacgatcccgcaggccacggcgaccgacacgctgctccaggccctggccggggcccgcaacgatctggaagcgccggccctgaccgtggcgccggtgatcggcgacgcgctggcagccctccgcgcccagggctgccgcctcgc

SEQ ID NO: 247864 - DNA, 597 bp, Unknown
  Bacterial polypeptide expressing nucleotide sequence isolated from the Sargasso Sea
ataaatataatctcaagataggcttggatataacattggaaaaaaagataccccttggttcaggtttaggtggtgggagttcaaacgctgcagtcactctgcacgctatcaatagattatataatattcaactggcaaaagatgagttgcttactctcgcggatcaattaggttcagatgtgccattcttcattaatggcggcacagcctgtgtctcgggcaaaggaaatatagttaataaagtctcatcaaaccctaaattttatgtactaattttccccggtattagcatctctacaaaacatatttttggaataatttctgataggcacttttgtaaaccaaatgatctgaatagtttgcttgagtcagaacataactcatttgaagaagtggtgcttaagaattatccagaactaatacaaacaaaatattggctttcctcctttggtaaggttagaatgtccggtacgggaagcacgctatatattgagtttgacagttacgaaagtgctattgaagccaataaggaaattggaaataggtacagatctaaaatggtgagtagtctggaatcatatgatattttttcttgat

SEQ ID NO: 247865 - DNA, 401 bp, Unknown
  Bacterial polypeptide expressing nucleotide sequence isolated from the Sargasso Sea
aatgaaattgagaacatctgcaaaaataaatttaaatttggaaatttttcctgaaaaacaagacaattttcataaactatcttctctgatgatacctattgatatatatgacgatatagaaattgaagaatcagtaagtgaaaaaatcaaatttaatgatgagcaccttaacacaactgaaactacgattcacaaagctttaaatttattaaggaaagttaacccatcttttgataaaacctttgacgtttacatcgataaaaaaattccatataaaagtggactaggtggtggaagttctaatgcaggagcagtgattcgctatctttgtgataattatgaattagatttaccttcaaatcttgaaatagttcgtgaagtaggtagcgatgttccatttt

SEQ ID NO: 247866 - DNA, 817 bp, Unknown
  Bacterial polypeptide expressing nucleotide sequence isolated from the Sargasso Sea
tatgaaagatagttttacagaattagcaccagcaaagataaatttgtttttgaaaatattaaataaaagaaatgatagttatcataatataagaagtgggataactttaattaatttagtggatgaaatttttatagaaaaaagctctttttttaatattaattacataggaaaatttgctccaaaaaataataaatatactgattgtattataaacaaattatttaatacatttaagatttcaaaaccaaaatacaattttactattaaaaaaaatataccaacaggttctggattaggatctgcatcaacaaatgctgcagctgtatttagaattttaaataaaattaatttgtataaattaaataaatttgaagatgcaaaaattcttggttctgatatcccattatttttgaatgataatgattgtttaattagaggtgttggggaaaaaattactaataaaactttccctaaatattactttctcttagttaagcctaaattaaaacttcaaacaaaaaaaatgtatagtttaatcaatataaataaattaaattacaaaattgaacttgataatgaagaaataaatgaatttgataaaggtaatgattttgaagaaattgcaaaaactcaaaacaaagatattatttctatttttaaatttttaaaaaatttgaataatttagttttttatagcttaaccggcagtggctcttgttgttatgctgctttcaaaaaaaaacaacacgcaatagatgctcaaataaaatttaaaacaaaatttccctatctgtggtcatttatggctgaaaat

SEQ ID NO: 247867 - DNA, 817 bp, Unknown
  Bacterial polypeptide expressing nucleotide sequence isolated from the Sargasso Sea
aatgaataaattattattaaagtctccagcaaagattaacttagatttaacaatcttaaacaaactcaaaaatggataccacgagattaatacatcatttcaacttattgatttgtttgacgagattgaatttgagagctctaaaaataatatttctttatcttcaaaccttaaagaattaaattcagatgacaatatcatcactactgttgctagaaaacttaaaaattcaaatagcaaattgggagttaaaattaagcttaaaaagttaatccctattggtgctggtcttggtggtggaagttctaatgcagcatcaactatagtggctttaaataaattatgggatcttaagatgtctaaaagtgaaatgcataattttgctagaaatattggagcagacgtaccattttttctatttggtcaaaatgcgcaaggaaatggcataggggatattctcaaatataaagattcaattactgataacattcttattattgatcctatgatatttagctcaacggaagaaatgtatcgtgaatatgatttgatcaacaacaaaaataaaattatcaaagacaatcctaataacaatgattttttggatatttttttagaaaaaaataatcaagtaaaagaattttttgaaaataatgcacaagaatttgaaattagactttcaggaagtggttcatgtatgtttgtaatctataatgatgagaaaaatatacaaaaatttattaagaaaattccttctaattggagattcttttcttgtaaaccattacaatattcgccgatatgttatatcaagtag

SEQ ID NO: 247868 - DNA, 190 bp, Unknown
  Bacterial polypeptide expressing nucleotide sequence isolated from the Sargasso Sea
atgaatggggcatatactgaagtgaaaagctttaaatggccatcaccagccaagcttaacttgtttcttcatatagttggtcgaagacctgatggttatcacttactacagtcaatatttcgattcaccaatctttgtgattttataaactatgaaatattagaatcggaaattattaagcgaagttcag

SEQ ID NO: 247869 - DNA, 787 bp, Unknown
  Bacterial polypeptide expressing nucleotide sequence isolated from the Sargasso Sea
ctgtgcttacatgttattaaccgacgtgatgacggctatcatgatattcagggcatttttcatgttatagatctgcatgacactataatattcaagatgaatgagggtaatagtgtaaatatacacagcactgataaaaatttaataaataacgacaatctaatttacaaagcgtgtaggatgctctcacaaaaatataatctcaagataggtatggatataacattggataaaaaaatacctctaggttcgggtttaggtggtggcagttctaatgcagcagttactctacacgcgatcaatagattatataacattcaactagcaaaagatgagttgctaactcttgcggatcaattaggctcagatgtgccattctttattaatggcggaacggcctatgtctcgggtaaaggaaatattgtaaaaaaaatctcatcaaaccctaaattttatgtactaattttccctggctttagtatctctacaaaacatatttttggaatcatttctgataggcattactgcaaaccacatgacctgaatggtttgctaatgtcagaacacaactcatttgaggaagtggtgatgaagaattatccagagctaatacaaacaaaatattggctttcctcctttggtaaggttagaatgtccggtacgggaagcacgctatatattgagtttgacagttacgaaagtgctattgaagccaataaggaaattggaaataggtacagatctaaaatggtgagtagtctggaatcatatgatattttttcttgat

SEQ ID NO: 247870 - DNA, 908 bp, Unknown
  Bacterial polypeptide expressing nucleotide sequence isolated from the Sargasso Sea
tatgcaagatttagctaaaacgaaaattaatataaaatcacctgccaaaataaatttgcaccttgaagttattggtaaaagagaggatggatttcatgagttagcaatgattatgcaaaatatcgatctttctgattatttagaatttgaaattaataatgaaggtttaattaaacttgagtctgattgtaatgatttaagcttatctgatgataatttaattgttaaatcggcaaatctattaaggaagaagtcaaatatagattacggtgcgaatatatttttaagaaaaaatattcccattggcgcaggattagctggtggatccagtaatgcagcagcaacattaattggtcttaataagttatgggatttgaatttagatcaaaaaacattatgttcattagcatcaactttaggatctgatattcccttttttataaatggaggtattcaattatgttttggaagaggagaaattttggagaaattagattcaaactttgaatatggagtaattcttttaaaaaatcgaaatgtatcagtatctacagctgaaacttataataaatatggtaaaagattttgtgatcaatatcttactgatagagaaatgattgagaacataagaaaaaatttaagagataatggtttaaataacttaaattttgataatcaacatttatttattaaaaatgatttgcaggtagttgttgaaaatgaaaatgattctgtaaagcaggcattatctttactttctaaattagaaaattctctcacattttcaatgagtggatcaggccctacatgctttgcactctttaaagatatagagactgctaaaaaagaattaactgcaaattctaaattatttaaagataaaggctatgattcatgggtttgcactt

SEQ ID NO: 247871 - DNA, 568 bp, Unknown
  Bacterial polypeptide expressing nucleotide sequence isolated from the Sargasso Sea
atgaataaattattattaaagtctccagcaaagattaacttagatttaacaatcttaaaaaaactcaaaaatggataccacgagattaatacgtcttttcagcttattgatttgtttgacgagattgaatttgagagctctaaaaataatatttcattatcttcaaaccttaaagaattaaactcagatgacaatatcatcatcactgttgctagaaaacttaaaaatgcaaatagcaaattgggagttaaaattaagcttaaaaagttaatcccgattggtgctggtcttggtggtggaagttctaatgcagcatcaactattgtggctttaaataaattatgggatcttaagatgtctgaaaatgaaatgcataattttgctagaaatattggagcagatgtgccattttttctatttggtcaaaatgcgcaaggaaacggcattggagatattctcaaatataaagattcaatcactgataacattcttattattgatcctatgatatttagctcaacggaagaaatgtatcgtgaatatgatttaatcaacaaaaaaaataaaa

SEQ ID NO: 247872 - DNA, 563 bp, Unknown
  Bacterial polypeptide expressing nucleotide sequence isolated from the Sargasso Sea
ggcatcaggtattggcggcggttctgcagatgccgctgcaacagttcggctgatttctaaagtttatgatgagccaaaacctccgataaacaaactaatctcattgggtgctgacgtgccagtttgtatgcataaaggaattgttcgaatgatgggtgtcggcgaaaagattataaatttatctcctgctccaaacgttggaattctattagttaatcctcgtaaagccctttcgacatctaaggtattcaatgctgtcaaaaagaaaaacaactctggagttaagtcgcatactttcatggaagataagctcaatttatggtttgattggattaactcaatgcgaaatgatctcacgtcttctgcgataaatctcgttccagaaattagattcattctggataaacttgttacttgcgatggcgcaaaggtcgttagaatgtctggttcaggggctacatgttttgccttgttcgaaaattttgacctattgcaggatgcaaaagataaaattggaaaagattgtccatctttctggtgtgaaaaaggtcaacttatttgac

SEQ ID NO: 247873 - DNA, 853 bp, Unknown
  Bacterial polypeptide expressing nucleotide sequence isolated from the Sargasso Sea
atggtcttaaaatcatttgcaaaaataaatttatcattatcaataaatagtaaacttgctaatggtcttcataatatccagtcaattttctgtttagtaaacatttttgataaaattcaaattacaaaaattaaaaaaaaaaatatcaatataaataaagataaaatttctttttatgggccttattcaagcgatgtagaaaataaaaacaattcaatagaaaaaactttaaatattttaagagatcaaaaaattatttcagacttttattcgattaagatatttaaaaatattcctgtatttgctggtcttggaggcggcagcagtaatgctgcaaccgttttaaattttttcgtcaagaaaaaaaatgaacgtaaaatcattaataaggtaattaatcaagtaggctctgatattagattatttttttatacccaaggatttttaagaaatttagataaagtggataagttaaaaaataattttaaattgcattttttgataatttatccaaaaattagatgctctacgaagaatatttttttgaaggtaaaaaaattttctaaaagagtgtcattttctaatagatatctaaaagataaaactatttttttaaaacgccttaagcttgcaaataatgacttacaatcaattgttgagaaaaaacatccaattataagcaaattattagaggcaattagtaatgaaaagggttgccttttttcaagattaactggctctggttcagtttgttacgggttatttattaacgaatacagttcaaaagtcgcacttaaaagtttgagaaaaagatacccaaatttttggatttcaattgcaaaaactatttaaa

SEQ ID NO: 247874 - DNA, 796 bp, Unknown
  Bacterial polypeptide expressing nucleotide sequence isolated from the Sargasso Sea
atggaatataaatacaggtcttacgcaaaaataaatagctatttgaatgtaatgtcaaaactcgatagtggctatcatgagattcttactcattttcaaattattgatctgtatgatgaagtttcatttaaagaaagtgataaccttctaataaattcaaatgagaagacaataaaaaataataattccataacaaaaacaattaaatggtttaatgaaaaatatggagtaaatcaaaaatttgaaacaaagattaagaaaactattccagtaggggcaggattgggtggcggtagttcaaatgcagcaattgcattacgatttcttgcaaaatttcataatatccaaattaaagatattgataatactgaaatagctttagctttaggtgcagatgtgcctgtctttgtgcataaaaaaagttgttatgcttcaggaattggagacatactaggcaaaagttcatttaattcgtctgaatatctactaatttgtcctcaaatatttgtttccacccagaacctttatcaatctacctatcttgaatttcagaatatcgaaaataaggaaattaatagcttcttgcctgtgttaattaaagaaaatgaagaatttaaagatttttatggccttcttaggagtcaattaccaaataaaacctttgaaaagcttaaattaagtggcactggatcaacattatttttacaaaatccttcagaaagcgagaaagagattattaatgaaaaaattggtaagaattttagaatttttctcgctaaaggattagaatactaag

SEQ ID NO: 247875 - DNA, 862 bp, Unknown
  Bacterial polypeptide expressing nucleotide sequence isolated from the Sargasso Sea
aatgaagaaatttgttttgaattcatatgctaagattaacttatttttaaaagttggtaagaaaataaataaaaaaaaacttcacaatattcaatctttagttttcttgatcaatttatccgataaagtaagtataaaaaaaataaattacccaaaagattcaattaaatttaccggtaaatttaataataatataaaaaaaagtgataactcaattaagaaatctttatatttattaaggaaaaaaaaaattataaaaaaaaatattagctaccaaataaacgttaagaaaaatattcctgtattttcagggctagggggtggttcaagtaatgcagcaactattattaggtattttttaagaggaaaaaaaatacttaaaaataatatcgagtatttttctgaaaaacttggttcagatttaggtcttttttttaaatcaaaaaaagtatttcaaaaaaatttatcaacaattatagattttaagcaaagttataatttttatatattacttgtttatccctattttaaatgttctacaaaagaaatttattctaaactgaaaacttttgataaaattcaggctcaaaataattattttaaaggtaataaatataaatttattaatacacttaaatcgacaacaaattctttacaaaaggttgtaatttcaaaatttcctaaagttgcaaatattttggaggaaatgaaaactattaaaaaatgtcaattttcaagaatgactggatcaggatctgcatgttttgccttatttttgaacaaaagagatggaactttggcattaagacaaataaaaaaaaagttcccaaaattctggtgtgttctttgtaaaactatttaa

SEQ ID NO: 247876 - DNA, 796 bp, Unknown
  Bacterial polypeptide expressing nucleotide sequence isolated from the Sargasso Sea
aattttcagatttttgatcaggttgaacctaatccatctatagaaacaactgaaaaaataatttctgaatttaaaaatgaaaatttttcaacggttataggattaggaggaggaagttcgttagatgttgcaaaatatgtaggatataagcttgaaaagaaaaaaattatgattccaactacttttggttcaggtagtgaagttacaaaaatatcagtgttaaatgtagatgggaaaaaaactagtttccatgatacaaaaattattagcgatgttgcaataattgattcaaattttatcaaaggaacaccaaaaaatgtaataaaaaattcagcaattgattcctgtgcacaatgttccgaagcatatgatagcaaaatagcaaatccttacacaaaatttctttgtgaaaaagcgttcgatatacttgaatctgctcttctcaaaaataattatgaaaaattagctttgggctcattgattacgggattaggatttggaaatagttcgacaacattgggacatgcattatcttatgtatattcaaatgaaggtataatgcacggtcatgcattggcacatacaacttctgttgcacatggatttaataattcaaaattctacgaaagattcaaaaaaattgtaaaatatttggatttttcagagatcaatctttcccaaaatctagatgatgcagcagaattaattctgaaagatagaaaacacttagacaataatcctaagactgtatcaaaaaccgatttgatctcattattaaaagaaattaattcctgaa

SEQ ID NO: 247877 - DNA, 871 bp, Unknown
  Bacterial polypeptide expressing nucleotide sequence isolated from the Sargasso Sea
atggaaaaaattagtatcttatcaccagctaaactaaatttaactcttaaagtggcagaaaagattgataatggttatcataaaattgattctgttgttcagattataaatttttttgatgaaattcaattatcaaaatcatcgaaagatgaagaaataatatttaatttttccgattcctctgtaaaaaaaaatgaaaatttagcttttatagcaattgaaagttttattaactttttccaaataaaagaaggtatcaaagtagatattaagaaaaatatacctatgggggctgggcttggcggtggtagcagcaatgctgctgcagttttaataggtctacacaagctttttaagcttaataattttgatcaattggttaagttgggtgctaaaataggttcagatgtcccactttttttatatggaaggtctgcaaatcttagtggaagaggggaaattgtcgaaactattaaaaatccttttaatttaaattatttgcttataatacctcaaatacattcatcgacagaagaactttattcagaatgggataaaaatcaggcggccgttagtcagtattttcaaaataaagacactaaattaaatatcaaagaccacataatagaattaagaaatgattttttacctttattgataaaaaaatttgtaatttatgatgaaattttttctactttaaaagattttggtttatcaaatatttctatatcaggaacaggttcctctatttttgctattattaacaattcatatgattgtgaaccaataatagattattttaaatcatcaaatcaattaaaaattttacaagctcaatcaatagaaggctggcaattgcaaatcgattgaa

SEQ ID NO: 247878 - DNA, 835 bp, Unknown
  Bacterial polypeptide expressing nucleotide sequence isolated from the Sargasso Sea
aatggaacttctgaaatcacccgcaaagataaatctttttctggatgtcttatctaaagataatgatggctttcataatataaaatctatccttacacttattgatctgcatgatgaaataataattaaagattctgaatctttagacataaatttttcaggtgaattttctaatgaaataaatcaaaataatattcaaatattatttgattttttgattaaaaaaaattttataaaatcaggtaagtattctattaatattagaaaaaatattcctgtaggtgctggactaggaggaggttcaagtaacatagctgtaatattgaattctctatgttccaaaaagataatcaaatataatgaggctataaatattgctagagaattagggtctgatatcgagtttttttttgatacagctccagcaataatcataggaaaaggaaatgtgcttcgtaggataaatacttttaaagaattttatctagtattagtttatccaaattttattttatcaactgagaaagtttacaaaaacaatagtcagtttgacaatgaaaaccagatagcatttgataaagaaaattatgactttgatgaaattatgcagttatcatctaattcattgcaagcggcagctatcggactttgcccagatataaaatacattattgataagcttacatcgatgaaaggttcattatattcaagaatgacaggaagcggatcttgttgttttgctgtttttgatgaaaaagatttagctcaagaggcgacaaatactctaaaaaggcattatccagattggtgggtttatcaatctaaaataatataa

SEQ ID NO: 247879 - DNA, 393 bp, Unknown
  Bacterial polypeptide expressing nucleotide sequence isolated from the Sargasso Sea
aatgaagattatcaaaactaaatgtcctgctaaaattaatttataccttaaagttggaaatttaagaaaagatgggctacataatattagatcaagatttcaattagttgatttatatgatgatcttatgattaaaaagacaaactgtgatttcctgattaagtcaaatcttaacaaaaaaaaatttttacaaaataatattttaaatctagcgcattatcatttaactcaagaaactggtgataacctgagatgtgaggtttctctaaagaagaatattccaattggtgctggacttggtggtggtagctcaaatgcggcatcttttcttgttgctacaaataaattatttaaacttggcctgagtttagggaagctaaataaaattgcagc

SEQ ID NO: 247880 - DNA, 736 bp, Unknown
  Bacterial polypeptide expressing nucleotide sequence isolated from the Sargasso Sea
tatcatgatcttgatactgagttcagattagtatctttgtatgattatcttgaaataaaagaaagtaaaaatttccaacttaatataaataatgatgagattaaaactgaagataatctaattacaaaagcttattttttgatgaaaagcttatgccatgaaaaatctgatttctcatttaaagtacagaaaaatataccaattggtgcaggcttagggggtggaagttcaaattgtgcctctacattgatcgttctaaataaactttttaaattaaatttaccagatagtaagttattaaaaattggacttagtctaggaagcgatgttccttttttcataaaaggaaaaaattctgttgctaaaggaagaggcgaattacttgaaactattgaaatagattcaaactattatttaattatctatccagatataaaaatatccacggctgatgcattcaagttttatgaagaaaataagatagattttccaaaacatttaaaaaatgattttgagtactttgcaagaaaagtatatccagaaataaatgaaatttttaacctcatgtctcaatatggaactgtagaattatctggaactggctcttcaatgtatttaaattttaattcttcagaagaggcgtatacaattgcaacgaaagttccgacaaactgtaagttttttgtaacaagaagtttagacaagtctccgatatatgatgaacttaataaataat

SEQ ID NO: 247881 - DNA, 1050 bp, Unknown
  Bacterial polypeptide expressing nucleotide sequence isolated from the Sargasso Sea
ctgaaaagcaagtcaaaatgagagcagctcaactttggcaatggatttatcaaaaaggagaaagaaatttttcccaaatgtcaaacctgtcaaaaaattatcgagaactactgagcgaaaatttcatacttgatgtccctaaagtgatctcaaaacaatgttcaaaagatggaacacggaaatacctgctccaactggctgggggacatgaggttgaggctgtatatatccctgaagaaggtcgtggaactctttgcgtaagttcacaggtcggatgcacgctcacctgttcattttgtcacactggcacacaaaaactggtgagaaaccttactcctggggaaatcgtgggccaagtattaattgcacgcgatgacttaggcgaatggaaaaatttaaacggtacaaataatgaaaccagattactctcgaatgtcgtcctcatgggaatgggcgagccactatataattttgaaaatgtgagagacgcactcaaaattgttatggaccctgaaggtatatgtttatcaagaaaaaggatcacactgtctacttcgggggtcgtcccggagatatcgaggacagccgacgaaattggatgtcttttagcagtttcttttcatggcacaactgacgaaattagagacaagttagtgcctattaataagaaatggaatattgaaactctaattaaggcacttaaggattacccaagattgtctaactccgaacgcatcacatttgaatatgttatgatcaagggcgtcaacgatagcgaactagatgcctatcgcttggtcaaactaatcgctggtattcccgctaaaataaatttaattccattcaatgaatggccgggttcaccatatagaagaagtgaatggccccaaataaagaaatttgcagacataattcaccgtgcaggttatgcaagtccggtacgaactccaagaggagaagatattatggctgcttgtgggcaattaaagtctgagacagaacgacaacgaaaatcaaaaaaagaaatcactatggaagctggaatttagg

SEQ ID NO: 247882 - DNA, 832 bp, Unknown
  Bacterial polypeptide expressing nucleotide sequence isolated from the Sargasso Sea
aatgtctctctctaactcaactttttcacctgcaaaaattaatcttttccttagagttgataaaaaaaggtctgatggctttcataatatagaatcaagatttcagctaataaacctatttgatgaaatcactataaaaaaaacaaacaataaaaatatttctctaagttcaaacattaaagataaaagctttttgaataaaaatattattctagatgcattttttaagcttcaagaagcagttgatgaagacttgggttgtgaggttactgttataaaaaacattcccatgggcgcaggattaggtggtggtagctcaaatgctgcttcaactttggtaggcttaaatgatttatttaaattaaacttatcccgtactgaattaacccagcttggtgcagaactaggtgctgatattccattcttcatcaatggcaagaatgctgatgtgtctgggtttggagaaatattgtccccatgtgattcaattaattcaaaaatacttctgatatacccaaatattgatgtttcaacaaaagagatgtttgatgagctccaagcacagagaagaattcaaggtcataaaaaaatttctgacaaacataatgatttccaggatatttttaataaaaaattccctgtgataagtaatttttttagtcagtcagaaaaagagtttaatttagaattcgctattactggaacaggttcttcgcacttctgtttctacaaaaaagagcttgaaattagtgaatttgtaaaaaaaattccaaataattggagattctttaatgttgaaccattacaatactcacctattaatgataattaa

SEQ ID NO: 247883 - DNA, 937 bp, Unknown
  Bacterial polypeptide expressing nucleotide sequence isolated from the Sargasso Sea
tatgcaagatttagctaaaacgaaaattaatataaaatctcctgccaaaataaatttgcaccttgaagttattggtaaaagagaggatggatttcatgagttagcaatgattatgcaaaatatcgatctttctgattatttagaatttgaaattaataatgaaggtttaattaaacttgagtctgattgtaatgatttaagcttatctgatgataacttaattgttaaatcggcaaatctattaaggaaaaaatcaaatatagattacggtgcgaatatatttttaagaaaaaatattccaattggcgcaggattagctggtggatccagtaatgcagcagcaacattaattggtcttaataagttatgggatttgaacttagatcaagaaactttatgttcattagcatcaactttaggatctgatattcccttttttataaatggtggtattcaattatgttttggaagaggagaaattttggagaaattagattcaaactttgaatatggagtaattcttttaaaaaatccgaatgtatcagtatctacagctgaaacttataaaaaatatagtaatagattttgtgatcaatatcttactgatagagaaatgattgagaacataagaaaaaatttaagagataatggtttaaataacttaaattttgataatcaacatttatctattaaaaatgatttgcagttagttgttgaaaatgaaaatgattctgtaaagcaggcattatatttactttctaaattagaaaattgtctcacattttcaatgagtggatcaggccctacatgctttgcactctttaaagatatagagactgctaaaaaagaattaactgcaaattataaattgtttagaaataaaggttacgattcatgggtttgcactttccttgaaaagggaataacattcatttaa

SEQ ID NO: 247884 - DNA, 1336 bp, Unknown
  Bacterial polypeptide expressing nucleotide sequence isolated from the Sargasso Sea
atgaccggatccacagatttcaatattaaatctctaggaccctgcaggattccttctccactgaagctggaattgaaagatggcaccccctatttcaattttgtttctgatgagacaaaaatcctttacgaggttgaaaaaaccaatggatccggttcagatatcgccttcgaaaaagcaggacccagggaaaacatatattacgatccatcgaaaatccgcacaggaattgtcacctgcggtgggttatgtccgggaatcaacaatgtgatccggactttggtgatgcagctttatcacaattacggggttcggcacatccaagggttccgctacggattccagggattcatcccgtctttcaaacatcagacgatggaactgaatccggaaacggttcagaacatccacaacatcggaggaagtatcctttcgagttcccggggtccccaagatattggtgaaatcgttgactgcttagaacgccaggacatacgtcaacttttttgtatcggaggagacggaacactccggggcgcccatgaaattgtcatggaagtggaaaaacgcggactgaatatcggaatcctcggaattcccaaaacgattgataacgatatcccgttttgcatcaaaaccttcggtttcgaaaccgctttttcaaaggcggtagaagctgtacaggcagctcattcggaagccttcggaaacaattatggcatcgtcatcatcaagctgatgggaagggattccggtttcatcgccgccaatacatcccttgcctgtcccgatgtgaattttgttttgatccctgaggtccctttctcgatggaaggtgaaaacggcctgctgaactgccttgaacaagcactccacaaaaaatttcaggaaggaagtcatccgcactcggtcattgtggtcgctgagggggtcggtcaggagctaatgggtaatacaggagaagaaaaagatgcatcagggaacatccgctacaaggacattagtcatttcctgaaaaataaaatcatcgagcattttcaaagcagttacccggtcaatgtgaaattgatcgaaccgagttacttgatacggtcactgcctgccaatcctcatgatgccattttctgctaccatctcgcagacaatgccgtccatgcaatgatgagcggaaagaccgatttaatgatcggttactggaacggccacttcacccatgttccccttcaggctgtagttcaggaacagaaacgtattgatcccaggggcgatttctggaggcaggttttgttttccaccggccagcccctgaatatgttcatgaattcaaaagcttgaa

SEQ ID NO: 247885 - DNA, 829 bp, Unknown
  Bacterial polypeptide expressing nucleotide sequence isolated from the Sargasso Sea
atgagtgaagtattaacaacaaagtctcctgcaaaaattaatctatatcttcacatactagataaaagagatgatggatatcacaatataaaaactcatctacaactaattgatatttacgatcatattaaatttaaaacaagcaaaaatagaaatatatatattaaatctaaagagtcgtatcttaataataaggataacactatttataatgctgcaaaaaaattacaaaattatcagaaaagaaacagttttaaaggagttgaaatcgaggttgataaaaatattccaattggttctggtcttggtggagcgagttcaaatgcagcctcaacattaatagtcttaaataaattatggaatttaaatttgagcgaagataaattaatgagaattgccgctactattggagcagatgtaccattttttgtttatggcaagaatgcttttggagaaggtattggagaaaagcttaaagaagtcgatgtgatatctgacaagatattgatttttaatccaaatatacactgctcaacaaaaaaaatgtttagtcttcatgacaaatttttaaaaaataataaaaatatttctttatctaatcaaaatcatttttggaacatttatcttgataaaaatccaaatataaaaaatttcataacaaataatcagttagaagagaaaataaatttgagtggaagcggatcttgtatgtttatcaagtataaaaataaaaaggatattgataaaattattgaaaaaatgccaagtaattggagactctttttctctaaaccattacaatattcgccgatatgttatatcaaatgac

SEQ ID NO: 247886 - DNA, 700 bp, Unknown
  Bacterial polypeptide expressing nucleotide sequence isolated from the Sargasso Sea
ttcaattattgacctatatgatgaagttctatttaaagaaagtgatgtcctccgaatagattcaaatgagaaaacaataaaagataacaattccataactaaagctattaaatggtttaatgaaaaatatggagtaaatcaaaaatttgaagcaaagattaagaaatcaatcccaataggagcaggattgggtggcggcagttcaaatgcaggaattgctctacgatttcttgcagaatttcataatatccaaattaaagatattgataatactgaaatagctttagctttaggtgcagatgtgcctgtctttgtgcataaaaaaagttgttatgcttcaggaattggagacatattaggcaaaaaatcatttaatgcatctgaatatctgctaatttgtcctcaaatatttgtttccacccagaacctttataaatctaactatcttgaatttcagaatatcgaaaataaggaaattaatagcttcttgtctgtgttaattaaagaaaataaagaatttaaagatttttatggtcttcttaggaaccaattaccaaataaaacctttgaaaaacttaaattaagtggcactggatcaacattatttttacaaaatccttcagaaagcgagaaagatattattaatgaaaaaattggtaagaattttagaatttttctcgctaaaggattagaatactaa

SEQ ID NO: 247887 - DNA, 796 bp, Unknown
  Bacterial polypeptide expressing nucleotide sequence isolated from the Sargasso Sea
atggaatataaatatagatcttacgcaaaaataaatagctatttgaatgtaatgtcaaaactcgataatggctatcatgagattcttactcattttcaaattattgacctatatgatgaagttctatttaaagaaagtgatgtccttctaatagattcaaatgagaaaacaataaaagataacaattccataactaaaactattaaatggtttaatgaaaaatatggagtaaatcaaaaatttgaagcaaagattaagaaatcaatcccaataggagcaggattgggtggcggcagttcaaatgcagcaattgctctacgatttcttgcagaatttcataatatccaaattaaagatattgataatactgaaatagctttagctttaggtgcagatgtgcctgtctttgtgcataaaaaaagttgttatgcttcaggaattggagacatattaggcaaaaaatcatttaatgcatctgaatatctactaatttgtcctcaaatatttgtttccacccagaacctttataaatctaactatcttgaatttcagaatatcgaaaataaggaaattaatagcttcttgtctgtgttaattaaagaaaataaagaatttaaagatttttatggccttcttaggaaccaattaccaaataaaacgtttgaaaaacttaaattaagtggcactggatcaacattatttttacaaaatccttcagaaagcgagaaagatattattaatgaaaaaattggtaagaattttagaatttttctcgctaaaggattagaatactaag

SEQ ID NO: 247888 - DNA, 698 bp, Unknown
  Bacterial polypeptide expressing nucleotide sequence isolated from the Sargasso Sea
cgaccgtaacctcgcttctcaagccgtctgtgcgtggcgtgaggccaccggcgacgatcaaggagtaagcattacgatcaaaaagagaattcctattatggccggactggggggaggcagttccgatgcctcggccactcttggggctctcaacaatatgcacgggaataagttaagcccgagggaattgtccgaggttgcagctcggttgggttccgattgtccggcttttctcgttcagggtggatgcgttgcaggaggaagaggggagaaggttcgacctcttgagcaaaaggccggcgatcgtttggcgggccgaaggatctttcttttaaagccccccattggattttccacgagggaagtttatgcgcggtttgccgatgccggggataatgattcatggtctggtaaagacatgatgaagatcgttagagactgggaggactcggatctggaaattggcgagctaacccgtaacgaccttcagacagtcgtcttcgagaagtatcccttcatgcctgcgatgttcgaaattctaaatcttcaatttggttctaatcctctaatgtcagggagtggatcttgttgtttcgtggccgtgagcgaggcggcttcctttgatcagtttgccttgctggttagggaatcatggggagaagaggcctttgtcttcgaggccagaatcaggccctgac

SEQ ID NO: 247889 - DNA, 817 bp, Unknown
  Bacterial polypeptide expressing nucleotide sequence isolated from the Sargasso Sea
atgaaaaaaatagaaataaattcaccagcaaaattaaatttatttttaaaagtaaaggaaaaaaatcaagatgggtatcataatattgatacatcttttcaactaattgatttatttgattatatgagttttgagatatctaataaaaatattgtaataaaatcaaatgaatcatttttagaaaatgaaaataacaccatttatcaatctgctaaattacttcttaatttcatggatcgtcaaatgggggtaaacattaaaattgaaaaaaaaattccaactggatctggtctgggtggaggaagttcaaacgctgcatcaacattaattgccttgaataaattatggaatttaaatttatcaaaagaggagctaatgaatattgctataaaaattggagctgatgtgcctttttttgtgcatggagaaaatgcttatggatctggcattggtgataagcttaaatcaaaagatgcaattaaagataaagtgcttttaatatgtccaaaaataaataatgcatctggagaaatgtataagttgctagatatttatagaaaaaatgggggaaacaactctaatcatttacaaaatgacttttgggatatttttttaaataagaataatgaaattaaagaattttatgaggcaacttttgatagcaatagtttaaacctcagcggaagtggttcctctatgtatgttttgtataaaacagaaaatgatataaaagaaattcttaaaaaaattccaagtaattggagattctttttctgtaaaccattacaatattcgccgatatgttatatcaaataaa

SEQ ID NO: 247890 - DNA, 673 bp, Unknown
  Bacterial polypeptide expressing nucleotide sequence isolated from the Sargasso Sea
aatgatagaaatagatactaaatctccagctaaaataaatctttatttaagaattttaaacaaaagaaatgatggatatcataatatcgagacatcttttcaatatattgatttgtatgattttttaagttttaaagaatcaaagcatgatatatcgatagactcagatagccctgtctttaaaaatactaacaatacggtctttcaggctgcaagcaaaatgaaagaatattcaaataattctccaggagtaagtataaaaatagaaaaaaaaataccgattggatcaggtttgggtggagcaagttcaaatgccgcatcaacaattttagctttaaataaattatggggccttaatttaagtgatgaagagctgttcaatattgggaaagggattggtgcggatgttcccttctttatatttggtaaaaatgcattgggagaaggaattggagatatattaaaaaatacagaatcaattgaaaataatatatttataattgatccaaaaattcataattcatccaaagaaatgtttaccttatatgattcatggataaaaaataataaagatgtaaatgattattcacagaattctttttggaatatctttattaaagaaaatcatataattcaaaaattttatgatgaaaatattaataactataaataa

SEQ ID NO: 247891 - DNA, 807 bp, Unknown
  Bacterial polypeptide expressing nucleotide sequence isolated from the Sargasso Sea
tcggaaaaaaaaataaaaaaaacaagcttcacaatgtacagtcattagtttgtttaatgaatttatttgatgaaatagcaataaaaagaattaatgcgaagaaagacaaggtaaaatttaatggtaaattttgttcgtacatcgatcgaaattataacacagtaagttcatgcctttcattattgagaaaaaaaaaagtaataaaaaaaaattataattataatatttctataaagaagaatattcctgtcttttcagggttaggtggcggctcaagtaatgcagcgactatagtaaaatattttgttaaaaggaaactaactaagaaagaaaagatttttttttctcaaaaaataggatcagatctgagattattttttgactctaaacaggtatttcaaaaaaacctgagccagatttttaatttaaaaaagaaaattaaattttattttattcttgtttatccatttcttaaatcatctactaaagaagtatattcaaaagtcactgaatacaaaaaattagataattataatttttatgataaaagttcaaattttagaattatagaatatttgaagcaccaagaaaattctttagaaaaaatagtaatctcaagatttcctataatacaaaagattttatttgaactgatgattactaaaaactgtgaattttctagattaacaggttcgggttcagcatgttttggtgtatttttaacaaaaaagagtgctgttttaggattaaaaaaaattaaaaaaaaatttcctaaattttggtgtgttgttggtaaaactatttaaa

SEQ ID NO: 247892 - DNA, 850 bp, Unknown
  Bacterial polypeptide expressing nucleotide sequence isolated from the Sargasso Sea
atgaaagtccttgttcctgccaaaatcaacaccctcctctacctgcttcacaaacgtgaggacggataccacgagttatacagtcatttcgttccgatcagtctttatgattcccttgaaataattcctcagaaccagagtggtattactttggaggttgacgggatggatttcgaggagggacttcagaataatttagtgtttcgtgcagcagaactttttcaggaacattcgagcaagccttttggagtgagcatcattcttaaaaagaacattccagtgggtgcgggtttaggtggaggcagtgcggatgcggccgcgaccctgcatgttttgaatcaacttcatcaaaaccctttctctagaaaagaactccaagatttagctttaaaccttggagcagatgttccttttttcatcgatccagaaccttcagaagtcagcggtattggggatgtcattcgtcatttaaaacactatcctttactcccgcttctcatactcaaaccttgtttttcgatttcgactgcagaggcttttgaggagtgcattcctaggaggatgaaagtcccgatgaaaatcgtcaatgatgaggaactggtcaggaatctggagaaccgcttcgaatacacgctctttaaaaaatacccggagttgaaagagctcaaaaaccaatgtttggagcatggcgcgttaggtgcatcagtaagtggaagtgggtctgctttattcgccctgttcagaacggaatctgaacagatggaagccgcccgaaaactcaaaaggatttcactaaccaagatatttccatgcaagatgctcaaaaaacatatttacggtggtctttaaa

SEQ ID NO: 247893 - DNA, 572 bp, Unknown
  Bacterial polypeptide expressing nucleotide sequence isolated from the Sargasso Sea
agtgcctatggggggcggtttggggggcggctcgtcggatgcagccactaccctattggcactgaatcagttatggcaattaaagttatcaaacgcacagctttgtgaactgggcttaaagttaggtgcagacgttcctgtatttgtattcggaaaaacagcctttgcacagggagttggagaaaaattacaacccgttagtttgccgcaaaaatattacctgattgtgacgccagaggtgcatgtcagcacggctgaagtcttcggcaaccctgatttaatccgcaatacgcccgtcatgtccgtcaaagatctactagactgtgactggaaaaatgactgtgaaactctggtgaaacggctctaccccgaggttgcaatggtactgaactggttgatagaatacgcgccgtcccgaatgacaggtaccggcgccagtgtgtttgccgagttccaggatgaattaagtgcccgtcaaacccttgcaaaactaccgccaccgtggcgtggttttgttgctaaaggggtcaatcagtctgctgttttgactgaattggaacaagccgtatgac

SEQ ID NO: 247894 - DNA, 479 bp, Unknown
  Bacterial polypeptide expressing nucleotide sequence isolated from the Sargasso Sea
aatgaagtttttatctcctgcaaagttaaatcttaacttgagagttatttcaaaaagaattgatggttatcatgatctagaaaccaccttccagcttatagacctattcgatgagattactttcgagaaaagtaatgaatctttcaatattgactgtgatggtctagagatagagcctgaaaataatttaatttttaaatcattcaacgcaatcaaagaatattgtgaagcagatgaaggtattcagattcatttaaaaaagaatattccagttggggctgggcttggaggtggaagctctaatgcagcaacaactctaattgcattaaacaaaatttggggtcttgatttgtctagggaagagttagctaagattggtaagcctttaggagcagatattcctatatttatatatggtaaaaatgctattgcaacaggaattggtgacgtttttttagatgttgaatttagaaaaaata

SEQ ID NO: 247895 - DNA, 814 bp, Unknown
  Bacterial polypeptide expressing nucleotide sequence isolated from the Sargasso Sea
aatgaaagaaattagaattaaggctccagctaaattaaatttacatcttcaggttctaaacaaaagatcagatggatatcataatatttcatcactttttactattattgatttctgcgactcgattacccttaaaaaaaatgaaaaaacaatagaattggaggaatcatcacccattaaagataatattgttttaaaagcagcaaatttattaaaagagcaattttctgtagatgaaggcgtatcaataaccctaaccaaaaatattcctgatcagaaaggtcttggagggggaagctctgatgcagcatctgttttgattgggcttaataaaatttgggaattaggtttatctaaaaatgaactgtctgttttggctcttgaattaggctcagatgttcctttttttattcatggtaaaacaagctgggctgaaggaagaggtgagattttaagcaactatccatacaaagaaagattctttttattatcatttccggatttgaaaatgagtactaaacaggcttttgaaagcctgccattaaaaaaagtaaaagcactaaaacaatcagattacacagacaataagtctttcaatagctttgaaagctggattagagaaaccagtgctgaaatggaaaaacaatttagaaaactttcaactataggcacacctaaattatcaggaacaggctcaacaatcttcatagaatttaatgaagagaattcagctaaggaggttttagaaaaatttccacatttagtttttacaaaaagcttagaacgttcccctttaatgcaaataatagaatag

SEQ ID NO: 247896 - DNA, 526 bp, Unknown
  Bacterial polypeptide expressing nucleotide sequence isolated from the Sargasso Sea
atgcaagatttagctaaaaagaaaattaatataaaatctcctgccaaaataaatttacaccttgaagttattggtaaaagagaggatggatttcatgagttagcaatgattatgcaaaatatcgatcttgctgattatttagaatttgaaattaataatgaaggtttaattaaacttgagtctgattgtaatgatttaagcctatctaatgataacttaattgttaaatcggcaaacctattaaggaaaaaatcaaatatagattacggtgcgaatatatttttaagaaaaaatatcccaattggcgcaggattagctggtggttctagtaatgcagcagcaacattaattggtcttaataatttatgggatttgaaattagatcaagaaactttatgttcattagcatcaactttaggatctgatgttcccttttttataaatggtggtattcaattatgttttggaagaggcgaaattttggagaaattagattcaaaccttgaatatggagcaattctttaaa

SEQ ID NO: 247897 - DNA, 850 bp, Unknown
  Bacterial polypeptide expressing nucleotide sequence isolated from the Sargasso Sea
catgaccagaagtgatacgccaatattagaattggccccagctaaaattaatttatatttgcacatagaggcaaagcttaataatggaatgcattcaatcgatagtctaataatgtttgctgattgtgcagatcaggtctttgttacccctcaaaaaaacatcacgttggatagatatggtcccatgagcgctaatctacctgctgtcccagatgaccatgtttacaaagctgctcaaaagctggctgttttgacgaataacaaagcaggggcaaaaataatagttaaaaaaaacttacctattgcaggtggattgggaggaggaacagctgatgctgctgctgtgatccgggccttggggaagttatggcgagtggatatttctgatgatctaaagcgaaaccttgctaaggaattgggggctgattttcacgtttgtttggaaaacaagtcttcccgggtaaaaggaataggggatgagttgttgcccctgaaagtgcctcatgacttaagcgcagttttggttaatcctctaaagacattaatgacagttgaagttttctcagtttttaggaaagaggttcatataaaccaaactctcgatatcccgagctcctggtcagatgattcacgtgaattcatcagacaaattaaagaattaagaaacgatctaacagatcctgcaatctcattatgcccgataatatctgaagttttattaaaactcggatcctctgatgggtgcatgcttcaaagaatgtctggtagtggggctacctgttttggattattcgttgaccatgaaagagcagtaaatgctgctgaaaagatcagaagtaataatcttgat

SEQ ID NO: 247898 - DNA, 706 bp, Unknown
  Bacterial polypeptide expressing nucleotide sequence isolated from the Sargasso Sea
aatgaagtttttatctcctgcaaagttaaatctagacttgagagttatttcaaaaagaattgatggttatcataatttagaaactaccttccagtttatagacctattcgatgagattacattcgataaaagtaatgaatctttcaatattagctgtgatggtttagaaatagagcctaaaaataatttaatttttaaatcattcaatgcaatcaaagaatattgtaaagtagatgaaggtattcggattcatttaaaaaagaatattccagttggggctgggcttggaggtggaagctcaaatgcagcaacaactctaattgcattgaacaaaatttggaatcttgatttgtctagggaagagttagctaagattgggaagcctttaggggcagatattcctatatttatttatggtaaaaatgctatagcaacaggaattggtgacgtttttttagatgttgaattaagaaaaaataaattcttacttatttgcccaaatattgaagtttcaactagtgaaatgttcagaaaacttaaaatagataaattaagtcccaaacatcaaaattcattcctagatactcttcttagagaaaataaaagcattgaagaattttatgttagcaaatataatgattatgatttgaagctatctggaactgggttcacgctccttatagagtatgacaaaaagatgatttaa

SEQ ID NO: 247899 - DNA, 763 bp, Unknown
  Bacterial polypeptide expressing nucleotide sequence isolated from the Sargasso Sea
ctccatcttgaagtcataggcaaaagagaagatggatatcatgaattggcaatgataatgcaaaatatagatctttttgattatgttgaatttgagaataatcagttaggggagattaaattaaattctgatagtaaagatctcagtcttaatagtgacaatttaatagttaaagcagcagattatttaaaggagctatcaaacaataggaaattaggagctaatatatatttaaaaaaaaatattcctatcggcgcaggattagcaggtggttctagcaatgcagcggcgactttgattggacttaataaattatgggatttgaattttgattatgaaactattttttcaatatcagctaaattaggatcagatgtgcctttttttatagatggaggttgccaattctgttttggaaggggagaaatccttgaaaaatacaactcaaaatttaactatggtttaatacttctaaaaaatcctaaaatatcagtttcaactgcagaaacttataaaaaatatagtaacaaatatttatcagaatattttactgaaaacaaagaaataaattcaatcaggaataacttaagaataaaacgattcaacgatgaaaataatcaagatcaattaatgaaaattaaaaatgatttacaagttattgttgaacaagaaaatgaatcagttaggaaggcattatatttactctcaaatttaaaaaattgtttttcattttcaatgagtggttctggtccaacatgctttg

SEQ ID NO: 247900 - DNA, 703 bp, Unknown
  Bacterial polypeptide expressing nucleotide sequence isolated from the Sargasso Sea
atgttggaagaaaaagctagtgcaaaggtcaacttgtgtttgcagattgttgggcaaaagtcgaacggttttcatttgttagactcgattgttggcttcacagaatttggcgatcacttatctttcaaaaaaagtgacgagcttaaacttacaataaaaggtgctttctctgatcaaataccagtagataaatctaatttaattttgaaggcggcagaattattaagaacaataaataacattaaagctggtgctcacataactttaacaaaaaatttacctccaagtgctggcttaggtgggggatccagtgatgctgcagctactatccgtggattatcgcgcctgtgggatacagatctgccagaaatagatgacctgatgaaacttgggtccgacttaccagtttgcattaagcagaaaactcagcatatgaaaggttttggtgaagttttagaagaaataaatacatttccaaaccttcctatcctactggtaaaccctttgaaaaaggtctcaacacaaacagtttttcgtatgcttaaaaataagaaaaacccacctttatcaaaatatgaaaaattatttcaggcaaaaaaagattggataaaatggttacttttacagcgaaacgatttgatggagccagctgtcaaagttgagccagttatatctgaagttttgcgactttttcaaaacaaat

SEQ ID NO: 247901 - DNA, 453 bp, Unknown
  Bacterial polypeptide expressing nucleotide sequence isolated from the Sargasso Sea
aatgaagtttttatctcctgcaaagttaaatcttaacttgagagttatttcaaaaagaattgatggttatcataatttagaaactaccttccagtttatagatctattcgatgagattacattccataaaagcaatgaatctttcaatattagctgtgatggtttaaagatagagcctgaaaacaatttaatttttaaatcattcaacgcaatcaaagaatattgcgaagtagatgaagatattcagattcatttaaaaaagaatattccagttggggctgggcttggaggtggaagctctaatgcagcaacaactctaattgcattaaacaaaatttgggatcttgatttgtctaggaaagagttagctaagattgggaagcctttaggggcagatattcctatatttatatatggtaaaaatgctattgcaaaaggaattggtgacgtttt

SEQ ID NO: 247902 - DNA, 774 bp, Unknown
  Bacterial polypeptide expressing nucleotide sequence isolated from the Sargasso Sea
atttattacaaacagtatttcaatttatacaattatgtgactttatagatttcaccgttttagaatcaggattaataaaacgaagttcgaacaattttgggattgatgaagaaaatgatttagtaattagggctgcgcaaaaaattaaagaaaaaaccggatcaaaacttggagtagatatcaaagttgaaaaaaatatacctgtgggcggcggtctgggcggcggcagttcgaatgccgcaactaccttagttgctctaaatgaattatggcaaacaggactgtctatgcaagaattaggcgaaattggcttatcgcttggagcagatataccgttctttattaatggtaaaacagcatgggctgaaggagtgggagaaaaactggtttccattgagttggatgagggtttttatttagttatttcccctggttgtagtgtctcgacgaaagctgtttttcaagcaagtgatttgacacggaatacacctcgaatcacaatacgcgacttctatgatggctacggaaaaaatgattgtgaaacatatgtgagagaccactatgttgacgtcgcagaagcactagattggttagaaggttatgcgccttcgagattaacgggcaccggagcgtgtttgtttgccaaattttccgaggaaaaggaaatttacgaggtaaaaagcaagttacctcaaaagtggcaaggttttgttgttaagggtataaataaatcgcccttactggataggttgaagaatgagcaaaaaagttaat

SEQ ID NO: 247903 - DNA, 496 bp, Unknown
  Bacterial polypeptide expressing nucleotide sequence isolated from the Sargasso Sea
ctttggagtaccggactgaatgaagacgaattggcgcaattaggcttagcccttggtgcagatgtacccatatttgtacgaggcaaaacagcatttgcgggcggtgttggcgaagacatcatgccagctcctcaagacgaaaagtggtatttggtggcaaaccccaatgtacacgtgagcactggcgcggtgtttacccaccctgacctgcctagaaatacgccgccaattcagtggaaagactataaatttgaagaaactcgaaatgattgtcagcaattagtcgcgaattgccatccggaagttgcaaatttattacagtggttgttacactacgcaccgtcgagaatgacgggcacaggtgcatgcgtatttgctactttttccgacaaaacttcagcagagaaggttatggcaaaattgcctaacgcttggcaagggtttgttgcaaagggcgtaaatagctcaccactattgaataaaatagaacaataat

SEQ ID NO: 247904 - DNA, 787 bp, Unknown
  Bacterial polypeptide expressing nucleotide sequence isolated from the Sargasso Sea
tctgcatcgccgtaacgacggctatcatgagttacagactttatttcagttactaaattatggagacgagctaacattcaaacccaacaatagcggtatatttgaattccatcaaacaacagaaagtcaagctcttgcacttcccgctagccagaacctaatcgttgaagctgctcaacttatccagaaaacaactaaaagaaaaaacataggagccaaaatagacctatataaacgtattccaataggcgcaggattgggaggtggaagcagtaatgccgcaactacattgaaggctctcaataagttgtgggggtgtaatctatccgaccaagaactaacaactttagccttagaacttggggctgatgtgcctttctttttaaagggcgaatcggcctggggtgaaggtattggagaaaagctaaaacctattaaactgaagaaggcctggtttgctattattacacctaattgctcggtgtcgacagcgcgtattttttcacatgaaaatttgacacggaacactcaagctatcaaaatggccgactttctggcgggcagcactgaaaacactaaaaatgactgcgaaccggtggtacggaaactttacccgcaggtagatgaggcgttccgctggctcgagagccatgcagaacctcgaatgacaggcacaggttcatcagtttttgcaaaattttcgagcgaagaacaggccaaagcgttattaacgcggttaccagataatatgcgaggtttcgtagctgaagggataaatacattatag

SEQ ID NO: 247905 - DNA, 445 bp, Unknown
  Bacterial polypeptide expressing nucleotide sequence isolated from the Sargasso Sea
atggaagaattaaaattaagagcacccgcaaaacttaacttacatcttgaggtagtaaaaaaaagaagtgatggattccatgacttatcctcattatttactctaattgatttatttgatgacataacccttaaaaagaattcaaattcaattgaattaattgaatccattcctataaaacaaaatattgtgttaaaagcggcaaatctcctaaaggatttattctctgtaaaggaaggcgttaaaattgaactcgtaaagtctattcctgatcaaaagggtttagggggtggtagttccgatgcagcttcaacactattaggcttaagaaaattctggaatttagacatatcagaccaagatcttgcaaagattgctctaaagttaggttcagatgttcctttctttctatatggtaagactgcctgggtagaaggaaggggga

SEQ ID NO: 247906 - DNA, 656 bp, Unknown
  Bacterial polypeptide expressing nucleotide sequence isolated from the Sargasso Sea
aatgaagtttttatctcctgcaaagttaaatctagacttgagagttatttcaaaaagaattgatggttatcataatttagaaactaccttccagtttatagacctattcgatgagattacattcgataaaagtaatgaatctttcaatattagctgtgatggtttagaaatagagcctaaaaataatttaatttttaaatcattcaatgcaatcaaagaatattgtaaagtagatgaaggtattcggattcatttaaaaaagaatattccagttggggctgggcttggaggtggaagctcaaatgcagcaacaactctaattgcattgaacaaaatttggaatcttgatttgtctagggaagagttagctaagattgggaagcctttaggggcagatattcctatatttatttatggtaaaaatgctatagcaacaggaattggtgacgtttttttagatgttgaattaagaaaaaataaattcttacttatttgcccaaatattgaagtttcaactagtgaaatgttcagaaaacttaaaatagataaattaagtcccaaacatcaaaattcattcctagatactcttcttagagaaaataaaagcattgaagaattttatgttagcaatataaatgattatgatttgaagctat

SEQ ID NO: 247907 - DNA, 667 bp, Unknown
  Bacterial polypeptide expressing nucleotide sequence isolated from the Sargasso Sea
gatgcggcctccgctgatgggcacgatcacggtgacggctccggccaaggtgaatcttcacctggaggtgctcgggatcagacctgacggttttcatgagctggcaatggtgatgcagagcatcgatctcgccgatcgcctcagctttcaacccacggccgatgccgcactgacgctcagctgtgacgatccgtccctcagccttggtgaggacaacctggtgatcagggccgctcagttgctgcgcagccgctccggtttcagcgaattgggtgctgccattcacctggagaaacgcattcccatcggcgccggcttagccggaggatccagtgatggcgccgccgccctggtgggtctgaatgcgctctggggtctgggccacagcagcacagacctggagcggtttgcggctgaactcggttccgatatgcccttctgtgtggcggggggcagtcagctctgtttcggtcggggcgagctgctggagccgttgccggctgtgcaggagtccctggcggtgctgctggtgaaggatccacgcgtgagtgtgtcgactccctgggcctatcgccgctgccgggagttgcagggtgatcgctacctgcagggagaggatgccttcgagcaacgccgacaggtcttgcgagacacggcctggacccaa

SEQ ID NO: 247908 - DNA, 382 bp, Unknown
  Bacterial polypeptide expressing nucleotide sequence isolated from the Sargasso Sea
ttgcttttgagggtaaccggtcgtcggaaggacggctaccatctgttggatagtctcgtaacattctgcgagctaggcgatagcttagaactctctttaaatgatcgctacgacgaattagttgttgaaggtaccttttataacgagattggcgaagacaatatagtaagaagaaccttaaaaaagtttcgagaagcaactggctggtgccaacctgtaaaaataagattaaagaaagaaatacctgttggggcggggctaggaggggggtcttcagatgcagcaactaccctgaaattattaacacaaatacctgagacacctcctctaagccgagcagaaatttttaaaatagccttagatctgggcgcagacgttccag

SEQ ID NO: 247909 - DNA, 523 bp, Unknown
  Bacterial polypeptide expressing nucleotide sequence isolated from the Sargasso Sea
atgaagtttttatctcctgcaaagttaaatcttaacttaagggttatttcgaaaagaaatgacggctatcataatttagagactaccttccagttgataaacctgtttgatgagatttcgtttgaggagagtaataaatcttttggtttcagctgtgatggtttagacatagagcctgagaataatttaatctttaaatcattaaatgctattacaaagtactgtaacgtagataaaggcattaaaattcatttaaaaaagattataccggctggagctggacttggcggcgggagctctaatgcagcaactactttaattgcattgaacaaaatttgggatcttaatttgtctactcaagagttagtaagtattgggaaaggcttaggggcagatgttcctatatttatttatggtaaaaatgctgttgcaagaggaattggagacgtttttttagatattgaatttaaaaaaaataaatacttactaatttgtccagatattgaagtttcaactagatgaa

SEQ ID NO: 247910 - DNA, 412 bp, Unknown
  Bacterial polypeptide expressing nucleotide sequence isolated from the Sargasso Sea
tatggaagaattaaaattaaaagcacccgcaaaacttaacttacatcttgaggtagtaaaaaaaagaaatgatggattccatgacttatcctcattatttactctaattgaattatttgacgatataacgcttaaaaagaattcaaattctattgaattaattgaatctattcctataaaacaaaatattgttttaaaagcagcaagcctcctaaaggatttattctctgtaaaagaaggagttaaaattgaactcgtaaagtctattcctgatcaaaagggtttaggtggcgggagttccgatgcagcatcaacactactaggcttaagaaaattttggaatttggatatatcagaccaagatcttgcagagattgctctaaagttaggttcagatgttcctttcttttta

SEQ ID NO: 247911 - DNA, 311 bp, Unknown
  Bacterial polypeptide expressing nucleotide sequence isolated from the Sargasso Sea
gcaagcgacaggttatcctggcggcgccgaaatctggctcgaaaaacgtttacccatgggcggcggtttaggcggcggctcctccgatgcggccaccacactcgtggccttaaatcagttgtggaacacccaattatctaacgataaattaacggcgattggtttaaaactcggtgccgatatccctgtttttattcgcggtttcgcggcatttgccgaaagcgttggcgaacgtttacaggcggtgacgcccactgaattttggtatttagtgatcgcgcccgatgcccatgtttccaccgctgcagagt

SEQ ID NO: 247912 - DNA, 604 bp, Unknown
  Bacterial polypeptide expressing nucleotide sequence isolated from the Sargasso Sea
cctgcgtgccccggcgaagatcaaccttcacctggaggtgcttggtctcagggacgacgggtttcatgagctggccatggtcatgcagaccctggatttggctgatgaattggcggtggattcggcccctgccggggagttgagcttgtgttgcagcgatccccaattgcccgtcgatggcagcaatttgatcgtcaaggccgccgaggcgctacgccgccattgcggtaggccagagctctcagcgcagttgtcgttaaccaaacgcattcccatcggtgctggcttggccggtggatccagtgatggagcaacggcgttgttgctgctcaaccgctattgggatctgcagctcagcgctgcagagctgcacaacttggcggcacaacttggctctgacgtggcgttttgcctgcagggaggcacgcaactctgctttggccgtggtgagcggcttgaagcgattgctgtggctgccaagccggctgtgctgctgattaaaaatccaaacgtcagcgtcagcacgccttgggcctacggcctctgcaaagagcgcctgggctcgggctacctcagctcggaagctgactttgagcgccagcgt

SEQ ID NO: 247913 - DNA, 730 bp, Unknown
  Bacterial polypeptide expressing nucleotide sequence isolated from the Sargasso Sea
gatgggttatcataatttagaaactaccttccagtttatagatctattcgatgagattacattccataaaagcaatgaatctttcaatattagctgtgatggtttaaagatagagcctgaaaacaatttaatttttaaatcattcaacgcaatcaaagaatattgcgaagtagatgaagatattcagattcatttaaaaaagaatattccagttggggctgggcttggaggtggaagctctaatgcagcaacaactctaattgcattaaacaaaatttgggatcttgatttgtctaggaaagagttagctaagattgggaagcctttaggggcagatattcctatatttatatatggtaaaaatgctattgcaaaaggaattggtgacgtttttttagatgttgaatttagaaaaaataaattcttacttatttgtccaaatattgaggtttcaactagtgaaatgttcagaaaactcaaaattgataaattaagttccaagcatcaaaattcattcctagatattctactaagagaaaataaaagcattgaagaattttatgctagcaatataaatgattatgatttgaagctatctggaactggttcaacgctctttatagagtatgacaaaaaagatgatttaaaaaaaatattacaaaaaattccaaaaaattggagattctttttctgtgaaggattacaatactcaccattgacaggagtttaa

SEQ ID NO: 247914 - DNA, 604 bp, Unknown
  Bacterial polypeptide expressing nucleotide sequence isolated from the Sargasso Sea
ggtgccgatatctggctgaacaagcgcctgtccatgggcggcggcatcggcggtggcagctcggatgccgccaccaccctgctcggtctcgaccacctgtggcaaacccaactgggcgaagatcgcctggccgaactgggcctgaccctgggcgccgacgtaccggtattcgtgcgcggccgcgcggccttcgccgaaggcgttggcgagcgcctgaccccagtcgaactggacgagccctggttcctcgtcgcagtaccgcaagtctttgtcagcacagcagaagttttcggctcgcccgagttgacacgcgatacgccgcccattaaagttcgcagccttcttgcggggggtggtcgaaacgactgccagccggttgtagagaagcgttaccctgaagttcgtaacgctttgatcttgttgaacaaatttgtttcagctagattgaccggcactggagcttgcatatttgggagcttcccaaatagggacgatgctgataaagtcgcccgccaacttccaggcactctgccgagctttgtcgctcaaggtcgcaacatttcgatgctgcaccgcaggctccaagcattggccaagaagtgaa

SEQ ID NO: 247915 - DNA, 598 bp, Unknown
  Bacterial polypeptide expressing nucleotide sequence isolated from the Sargasso Sea
aatgaagtttttatctcctgcaaagttaaatcttaagttgagagttatttcaaaaagaattgatggttatcataatttagaaaccacctttcagtttatagacctattcgacgagattactttcgagaaaagcaatgaatctttcaatattagctgtgatggtttagagatagagcctgaaaataatttaatttttaaatcattcaacgcaattaaagaatattatgaagtagatgaaggtattcagattcatttaaaaaagaatatcccagttggggctgggcttggaggtggaagctctaatgcagcaacaactctaattgcattaaacaaaatttgggatcttgatttgtctatggaagagttagctgagattggaaagcctctaggggcagatattcctatatttatatatggtaaaaatgctattgcaacaggaattggtgacgtttttttagatgttgtatttagaaaaaataaattcttacttatttgtccaaatatcgaagtttcaactggtgaaatgttcaacaaacttaaaattgataaattaagtcccaaacatcaaaattcattcctagatactctcctaagagaa

SEQ ID NO: 247916 - DNA, 559 bp, Unknown
  Bacterial polypeptide expressing nucleotide sequence isolated from the Sargasso Sea
cgtaaagtctattcctgatcaaaagggtttagggggcggaagttctgatgcagcatcaacactactaggattaagaaaattttggaatttggatatatcagaccaagatcttgcagagattgctctaaagttaggttcagatgttcctttctttctatacggtaagactgcctgggcagaaggaaggggtgaaattctggctgaatatccatatcaaaagaaatattacttgttatttttgcccgcattaaagataagtactaaaaatgcttttgagcaagctagttttgtacctaggcctaaaatcagtaaaaagaactacactagtgaccagtcatttaatagttttgaagtatggataagaaggacttattcggaaatggatgaagcttttaataacctgagattgattggtgaacctaaattatcagggactggctctactatttttctggagtttgacaataaatctgctgctgagtcagcacagaaaaattttcctgagttagttttaacaaaaagcttagaacgttcacccttaatgcaaataatagaataa

SEQ ID NO: 247917 - DNA, 151 bp, Unknown
  Bacterial polypeptide expressing nucleotide sequence isolated from the Sargasso Sea
aatgataaatgaatttgctccagcaaaaattaatttatcactgcaccttgtagggcaaaaaagtgatggctaccatttgctcgatagtatcgtttcttttgtaaatgttggtgatactttacgcatgacaccaggaggatcaagcgggtta

SEQ ID NO: 247918 - DNA, 777 bp, Unknown
  Bacterial polypeptide expressing nucleotide sequence isolated from the Sargasso Sea
ttaatgttttaaaaaaaaggtctgatggttttcatgatattgaaactaatttccaatttttagaatggggagatgaaatagctttcaattttgatacgagcacttcgcaggttacttgcccaaaagtaaaggaaaaaaacaatcttgcttataaagcaatccatcttttaaaaaaaacttacaaaattaataaggaggtttctctaaaaataaagaaaaatattccaattggctcaggccttggaggcggaagttctaatgctgcgactgtgctacttgtattgaataaatactggaaattaaatttaaataatgaagttttaaaggatcttggttcttcattaggctctgatgttccaatttttattgagggagttgcaagaaaagcaaacggtaaaggggaaatattttccaaagcttttttaaaggaagaaataatttttttagttatgcctaaatgtaacatttcaactgcaaaggcttttcaagaaatagagataagtgattttaaaaattcaaaaaatagtaaagattttaatttttttgaaaaatgggccagaaaaaattataaagaagttgatgattcttttatttggttagaatctataaaaaaaggaaacttaaccggaacagggtctgccctgtatgcaatatttaattcttttgaagaggcaagtaaaataatagataatgctccaaaaaataataattattttgtaacaaggagtttaaacgaatcgcctttattaaaagaattaaataaaaatggggtgtagc

SEQ ID NO: 247919 - DNA, 622 bp, Unknown
  Bacterial polypeptide expressing nucleotide sequence isolated from the Sargasso Sea
tatggaagaattaagattacaggcccctgcaaaactcaatctacatctacaagtgctaagaccaagagatgatggctttcatgatatttcgtccttattttccttgatcgatataagtgatttgcttatttttaagaaaaatggaaaaagtataaatcttattgaatcatcacctattgaagacaatatagtctttaaagcagctaagcttttaaaagattattctggtactaataagggtgtcagtattgaactcgttaaatccattcctgatcaaaagggattgggaggaggaagctcagatgcggcaacaactctattaggtttaaatagattgtgggaattagaaatctcaaataaaaaattattagatttagctctaaggttaggttcagatgttcctttctttatgtttggaaagactgcctgggcggaaggtagaggagaaattttaagagaatatccttatacagaaaaatactttctattatcttttcctaagctaaaaattagcaccaaagaggcttttaatagtatatctattgataacaaagcgcagttaacagcagaaagctacaataaagataaagccttcaatagctttgaagcttggataagagat

SEQ ID NO: 247920 - DNA, 580 bp, Unknown
  Bacterial polypeptide expressing nucleotide sequence isolated from the Sargasso Sea
aatcaaagaatattgcgaagtagatgaagatattcatattcatttaaaaaagaatattccagttggggctgggcttggaggtggaagctctaatgcagcaacaactctaattgcattaaacaaaatttgggatcttgatttgtctaggaaagagttagctaagattgggaagcctttaggggcagatattcctatatttatatatggtaaaaatgctattgcaaaaggaattggtgacgtttttttagatgttgaatttagaaaaaataaattcttacttatttgtccaaatattgaggtttcaactagtgaaatgttcagaaaactcaaaattgataaattaagttccaagcatcaaaattcattcctagatattctactaagagaaaataaaagcattgaagaattttatgctagcaatataaatgattatgatttgaagctatctggaactggttcaacgctctttatagagtatgacaaaaaagatgatttaaaaaaaatattacaaaaaattccaaaaaattggagattctttttctgtgaaggattacaatactcaccattgacaggagtttaa

SEQ ID NO: 247921 - DNA, 481 bp, Unknown
  Bacterial polypeptide expressing nucleotide sequence isolated from the Sargasso Sea
atggaagaattaaaattaagagcacccgcaaaacttaacttacatcttgaggtagtaaaaaaaagaaatgatggattccacgacttatcctcattatttactctaattgaattatttgacgatataacgcttaaaaagaattccaattctattgaattaattgaatccattcctataaaacaaaatattgttttaaaagcggcaaacctcctaaaggatttattctctgtaaaagaaggcgtcaaaattgaactcgtaaagtctattcctgatcaaaagggtttagggggcgggagttccgatgcagcatcaacactactaggcttaagaaaattttggaatttggatatatcagaccaagatcttgcagagattgctctaaaattaggttcagatgttcctttctttctatacggtaagactgcctgggcagaaggaaggggtgaaattctggatgaatttccatatcaaaagaaatatt

SEQ ID NO: 247922 - DNA, 715 bp, Unknown
  Bacterial polypeptide expressing nucleotide sequence isolated from the Sargasso Sea
gaacaagccggcacccggcggggacaggctcactgtcaccggaccgttcagtgctgcaatgccatctgtcgaggctgacaatatctgccttcgcgcggtgcaggcctttcgcgatgcggggggtgcctgcgtcccgctcgatatccatctcgacaaacagataccggctggcgccggtcttggcgggggatcgagcgatgccgccgccatcctgcggcacctcaatctggccagcgctgtgcccctgtcagcggaaaggctggccaccgtcgcgcttggccttggcgctgatgtgccggtctgtcttgccggcggggcgcagcatatgaccggcattggcgagtcattggtggcgatcgatccggcaccgacaggccatgtggtgctggcaaagcccgatatagccctgtcgacgcccgacgtgtttgcaagattttcccgttcggatttttctcagccctccgaacccggtgacggaactgacgccttgacccttgttgcgcttggcaatgatctgaccgcggcggcggtagagcttgtgcccgccatcgccgcgcttctggccgccatcgccgcctgtgacggccatcaggccgcgcagatctcaggaagcgggtctgcctgttttggtctgttccatgacctggccagtgcacaggccgcagcacaatctcttgaaactgccggttactggacggtcgcaacagaattctga

SEQ ID NO: 247923 - DNA, 784 bp, Unknown
  Bacterial polypeptide expressing nucleotide sequence isolated from the Sargasso Sea
gatgcgaaactatagatcaccggccaaaattaatcttttcttgaagatcgttgataaaagatctgatgggtatcatgacattcagagtatttttcaacttatagatttacatgatgaaatttctatcaatctaagaaaagaccgtcaaatcaatctgaattctaataaaaaaaaaataataaaagataacttgatatttactgccataaaaaaatttttggaatatacaaaacttaagagaataggaatggatatttttctgaataagaatatccctataggttccggacttggaggtgggagctcaaatgctgcaattatactcttggctatgaacaagatttataattctaatttgagagcgtcacaattaaaaactattgcaaatagtataggaagtgatgttacattttttttacatgggaaaaatgcatgggttgaaggcacaggaaatgttataactccaatatatttgaagccagcctggtttattctaatacatggtaaacataaggtctcaacctcaaatatattttctagatatagaataaatgggtattcaaaaaattttagttatgatgattatttaaataacaatacaagaaatgatcttgaagatgttgtatttgaactatatccatctatctaccaatcatataaaaacttatcaaagtatggcaacgctagaatgtcaggctctgggggaacagttttcctcccattatcgtcttataacgaagccagaaaagtaatttctcgcttaccaaaacagataacccgttaa

SEQ ID NO: 247924 - DNA, 763 bp, Unknown
  Bacterial polypeptide expressing nucleotide sequence isolated from the Sargasso Sea
gctgattgccccagccaagcttaatttatttttacacattaatggccgccgtgatgatggctaccatgaattagaaactttatttacgtttttaaattatggtgacgagctccattttaaactaagcacggatactcttataagtattagcggcgacaccaatggcattgcgctaaccgacaatttgatttacaaagcggcgttattattacaaacccactgtaaagtggatatgggtgcaaaaataaatttaactaaacgcttacccatggggggaggtgttggaggcggttcatccgatgctgcatcaacgcttttagctcttaatacgctttggaatacagccctatctttagatgaactggctgatttaggcctgaaactcggtgctgatgtgcctgtgttcattaaaggtaaaagtgccatagcacatggcattggcgagcaattagagtacctagaactgccgccgaagtggtattgtgttgtcttcccaaatcaacatgtcagcacagcacaaatatttactcacccagatttaaaacgtgatacaccaaaactttctggcgactggcaacagcaaattttaaccaacgattgtgagcctttagtgaaaaagctgtgccccgaggttgaaaaaaccctgcagtggttgctaaaatacgctccatcaaagatgaccggaacaggttcatgttgttttgttgaatttgctagccaagttcaagcacaagatgtacttgctaacctcccccatactggc

SEQ ID NO: 247925 - DNA, 807 bp, Unknown
  Bacterial polypeptide expressing nucleotide sequence isolated from the Sargasso Sea
tggcactggtggttctcctccatcttgttcaagaggaggtaatggagaagattcaatcttatgtacaacaacagctacaggtggtggcggaggtggcggaacatcttgcgctgcaaaaccaggattagctggtggatctggaggtggagctggaagaaattgtggaacaggtggtgcaggaacacctggtcaaggtaatcccggtggagatacaaatgcacctcctggaaaaggaggagcaggtggcggtggagccggagcggcaggtggaacaggtggagattcaggaggagccgcaggtggagcaggaagttctgcgtcaccattatcatcttgtacattcgcaggtggtggaggtggaggtgcagattgtaatccaagttcaggtggtgctggtggccctggtggtggtggagcaggatcaggaagacctggaggtggccctggtggatcgggtactgcaggaacaggcaacactggcggtggcggtggcggcggtcctggttgtggtggaacaggtggtgcaggtggttcaggtagagttattataaaagaattaaacagagcaagtggtatgtggtcaatgcaaagtcaatattctgctcaaagagaaggaacatggccagtttttttacctattacaggcgcaactgttttagtggttgcaggtgctggtggtggcggatttgataatggagcaggcggtggtggcggtggtatgatattagctacaggagtatcttttgcaaaaggttgcgttgcagccgtgatcggagcacgcggtgtcggaggagctggaaacccaac

SEQ ID NO: 247926 - DNA, 790 bp, Unknown
  Bacterial polypeptide expressing nucleotide sequence isolated from the Sargasso Sea
aatgaagttgttatctcctgctaagttaaatcttaacttgaaagttatttcaaaaagaattgatggttatcataatttagaaactaccttccagtttatagacctattcgatgagattactttcgagaaaagtaatgaatctttcaatattagctgtcatggtttagagatagagcctgaaaataatttaatttttaaatcattcaacgcaatcaaagaatattgtgaagtagatgaaggtattcagattcatttaaaaaagaatattccagttggagctgggcttggaggtgggagctctaatgcagcaacaactctaattgcattaaacaaaatttgggatcttgatttatccagggaagagttagctaaaattgggaagcctttaggggcagatattcctatatttatatatggcaaaaatgctattgcagaaggaattggtgacgtttttttagatgttgaatttagaaaaaataaattcttacttatttgtccaaatattgaagtttcaactggtgaaatgttcagaaaactcaaaattgataaattaagtcccaatcatcaaaattcattcctagatactctactaagagaaaataaaagcattgaggaattttatgctaacaatataaatgattatgatttgaagctatctggaactggctcaacactctttatagagtatgacaaaaaggatggtttaaaaaaaatattacaaaaaattccaaaaaattggagattctttttctgtgaaggattacaatactcaccattgacaggagtttaa

SEQ ID NO: 247927 - DNA, 883 bp, Unknown
  Bacterial polypeptide expressing nucleotide sequence isolated from the Sargasso Sea
catgattgaaacgaccgattcgctgcgcgattgcctcgcgccagcgaaactcaacctcttcctgcacatcaccggccgccgcccggatggctatcacacactgcaaaccgtcttccagttactcgactggggcgacacgctgcacttcaagcggcgcgacgacggccttatcacgcgcagcaccgaaatcgccgatgttccgcccgagcacgaccttactgtgcgcgcggcgacgcttctgaaagcgcataccggctcgcccgaaggtgtcgatatcgaaatcgagaaacgcctgccgatgggcgcaggccttggcggtggcagctccgatgcggcgaccacgctgctcgcgctgaaccgtctctggaaactcgatttgccgcgactggagttgcaggcgctagcgttgaaactcggcgcggacgtgccattctttgtttttgggaaaaatgcgttcgcacagggtgtcggagaggctttagacgttgtacaattgccgccgcgtcatttcctggttgtgacgccgagggttcatgttccgactgcagcgattttttccgaaaaagcgttgacaagagattcgaaacccctcataattacggactttcctgcagaacttagctgcaacactgattggccagaaagttttggccgcaatgacatgcagcaggttgtcgtgggaaaatacgcggaagtagcgcaagtgctgcgatggtttgaaaacatcgcaccagcgcggatgtctgggtcaggtgcaagtgtatttgcagcgttccgtagtaaagctgaagcagaagcggcgcaagccaaagtgcccagcgaatggaacagcgcagtgactgcaggtctcgatcagcatccactctttgctttcgcgtcataa

SEQ ID NO: 247928 - DNA, 883 bp, Unknown
  Bacterial polypeptide expressing nucleotide sequence isolated from the Sargasso Sea
atgaccgattcgacccgctcgctgcgcaactgccttgcgcccgcgaaactcaacctgttcctgcacatcaccggccgccgcccgaacggctatcacgatctgcagagcgtgttccagttgctgaactggggcgacaccctgcacttcacgctgcgcgacgacggtcgcgtcgcgcgcgtcaccgacgtgcacggcgtgcccgaggaaagcgatctggtcgtgcgcgcggccaacctgctgaaagcgcatacgggcaccgcgcacggtgtcgacatcgagatcgacaagtgcctgcccatgggggccggcctcggcggcggcagctccgacgcggcgacgacgctgctcgcgctgaatcgcctgtggcaactcgacctgccgcgcgccgagcttcaatcgctcgcggtaaaactcggcgctgacgtcccgttttttatttttggaaaaaatgcgttcgcagagggtatcggagaagaattagctgaggtacaattgccgactcgctggttcttggttgtaacgccccgcgttcatgtcccaaccgctgaaatattttcagatgagttgttgacaagagattcgaagcgcgtcacaattacggactttcttgcacggcaaagcagcgacgcgggatggccagatagtttcggtcggaacgatatgcagcaagttgtgacaagtaagtacgcggaagttgcgcaggtggtcaaatggttgtatgatgtgacccccgcgaggatgaccggttccggagcaagcgtgtttgcagcgtttcgcagcaagcacgaggcagaagcggcgaaagccaagctgcccgccagttggaatggcgcagttgccgagagcctgaatgagcatccgctcttcgctttcgcgtcatgaa

SEQ ID NO: 247929 - DNA, 466 bp, Unknown
  Bacterial polypeptide expressing nucleotide sequence isolated from the Sargasso Sea
atgaaaactcattttttaaaatcacctgctaaaataaatctatttttaaaagttggtaaaagaattaagagaaaaaaacatcataatattcagtctttaatttttttaacaagtcttcatgatgaaattttaattaaaaaaataaagaaaaataaagatatcgtaaaattcacgggcagatttagtaataatattatgagagtcaacaatacagtaagtaagtctatgtatttgttgagaaaaaagaaattaatagataataaaacaaaatatcaaataactataaaaaaaaatattcctgttttttcaggtttgggaggaggatcaagtaatgctgcaacaatcataaaacacttcttaaaaaaaaggaaaatttcaaaatataataccaattttttttcaaaatatttaggatcagattttagaatatttttaaaatcaaaaaaaatttttcaagaaaatcttt

SEQ ID NO: 247930 - DNA, 910 bp, Unknown
  Bacterial polypeptide expressing nucleotide sequence isolated from the Sargasso Sea
ctgcgtgccccggcgaagatcaatctgcaccttgaggttttaggcctccgggatgacggcttccatgagctcgccatggtcatgcagaccctggatctagccgatgacttgaccgttgatgccgccccggcaggtcagttgagcttgtcgtgtacggaccctgaactgcctgtcgatggcagcaatttgatcctcaaagctgctgagttgctccgccaacattgccggcggccggaactgtcagctcagttggagctgaccaaacgcattcccatcggtgccggtctagctggtggatctagtgatggagctacagcgttgttgttactcaatcgcttttgggagctgcagctcactgcagccgaattgcacgggctggctgcagaacttggatctgatgtggctttttgtctgcagggcggaacgcaattgtgttttggccgtggcgaatgcttagagccgatcaaggccgctagtcacccggctgtgctgctgatcaagaatccaagtgtcagcgtcagcacgccctgggcttacggccgctgcaaggaactcatgggtgcgacgtatctcacaggcgagtcagccttcgagcggcagcgtcaggctctgcgcgaatccccgttgttgtgctggctggaggggaatcagtcaacagttccacctttgcgcaatgacttgcagcaggtggtggctcctgagaacgaaagcgttcagaagggtcttcagctgctcgcctcagcggctgaacctttgcaagtagcgatgagtggctctggaccgagcttgtttgccctttaccgcgatcaagcagcagctgctgctgcagcccgagctttggcaccggctctggcggagaatggctttcagcactggatctgccagttcactgaggcgcgacatggctgaa

SEQ ID NO: 247931 - DNA, 814 bp, Unknown
  Bacterial polypeptide expressing nucleotide sequence isolated from the Sargasso Sea
atggaagaactaaaaataagagcacccgcaaagcttaacttacatcttgaggtagtaaaaaaaagaagtgatggattccatgacttatgctcattatttactttaattgaattatttgacgatataacgtttaaaaagaattcaaattctattgaattaatagaatccattcctataaaacaaaatattgttttaaaagcggcaaacctcctaaaggatttattctctgttaaggaaggtgtcaaaattgaactcgtaaagtctattcccgatcaaaagggtttagggggtggtagttctgatgcagcatctacactactaggcttaagaaaattttggaatttggatatatcagaccaagatcttgcagagattgctctaacgttaggttcagatgttcctttctttatatatggtaagaccgcctgggcagaaggaaggggtgaaattctggctgaatatccatttaaaaagaaatattacttgttatttttgcccgcattaaagataagtactaaaaatgcttttgagcaagctagtttcgtatctaggcctaaaattagtaaaaagaactttactagtgacaagtcatttaatagttttgaagtatggataagaaggacttattcggaaatggacgaagcatttaagaacctaagattgattggagaacctaaattatccgggactggctctactatttttgtggagtttgacagtaaatctgctgctgagtcagcacagaaacattttcctgagttagttttaacaaaaagcttagaacgttcacccttaatgcaaataatagaataaa

SEQ ID NO: 247932 - DNA, 1015 bp, Unknown
  Bacterial polypeptide expressing nucleotide sequence isolated from the Sargasso Sea
gctggcaggtggacctcagccgctatgcgcaaggtcgcatcacggcgcagcgcctgagcccgccacccacggccaccttgcaactgctgctgcaagcacccgaataagccaagaggcaggccctctttcgcgacacttttctgcgccactctccatgcacactttttatgacgtgccggcccccgccaaactgaacctgttcctgcacatcacgggacgcagggccgatggctaccacctgctgcagtcggtgttcatgctcatcgactggcaagatcgtttgcatttcgagcgcacgcacagtgcccagatctcccgccaggacctgaaccccgaggccccgccgcttccagccgacgacctgtgcacccgcgccgcccaggcgctgcaagccgccacaggctgcacccagggtgtacggattgcgatcgacaagcacatcccggcccaggcggggatgggcgggggatcatcggatgcagccagcaccttggtggccctcaatcgcctgtggaaccttcagctctcgcgcaccgaactggcacggattggtgaacgcttgggcgccgatgtcccatttttcatccatggacagaatgcctgggtggaaggcattggcgaacacatcgcaccgctcaccggtgccgcacaactgcccgccagcgatttcatcgtggtcaagccccaagccggtttggatacgcaaggcatcttcaccgcacccaatctgacgcgcgatacaaagcgtgctagaatcgaagactttgctgcagatcactacggttttggccataacgacttgcagcccgtcgctgaagccttgtgccccgacgtgagaaaagcacgacagctgctggaatcactgggattgcatgctacaatgactggctcaggaagtgcagtgtttgcacaaattagcaaagccattgaattgcaagacgcaccgtgcggatggcaaatcaaactttgcaagaatctggaaaaacatcctttgttgcactggataccagagtag

SEQ ID NO: 247933 - DNA, 701 bp, Unknown
  Bacterial polypeptide expressing nucleotide sequence isolated from the Sargasso Sea
agtgaggggtgctttttctgatcaaataccagtagataagtccaatttgattttgaaggcagcagaattaataaaaacacgaaataacattaaaaccggtgctcacataactttgaccaaaaatttgcccccaagtgctggtttaggaggaggatccagtgatgctgcagctgctatccgtggactgtcccgtctgtggggtgcagatctaccagaaatacacgacttgatgaaaattgggtcagacttgccagtttgtattaatcagaaaactcagcatatgcgaggttttggtgaagttttaaatgtaataaacacgttcccaaaccttcctatcctactggtaaatcctttgaaaaggatctcaactcaaaaagtttttcgcatgcttaaaaataagaaaaattcacctctatcaaaatatgaaaagttgtttcaaactaaaaaagattggataaattggttacttttacagcgaaacgacttgatggagccagctgttagaattgagccagtcatatcagaagttatacgacttatttctaaccaaatttctgttgagaaggtttcgatgtcggggtctggttccacctgctttggagtttttgaaaacaagcacgactgcgatttagctatggaaaaggttcggcaagaacggccagagtggtggagtgtttctactgaaataatatctatttaga

SEQ ID NO: 247934 - DNA, 535 bp, Unknown
  Bacterial polypeptide expressing nucleotide sequence isolated from the Sargasso Sea
tgtgaagtagatgaaggtattcagattcatttaaaaaagaatattccagttggggctgggcttggaggtggaagctctaatgcagcaacaactctaattgcactaaacaaaatttgggatcttgatttgtctagggaagagttagctaagattgggaagcctttaggggcagatattcctatatttatatatggtaaaaatgctattgcaaaaggtattggtgacatttttttagatgttgaatttaaaaaaaataaattcttacttatttgtccaaatattgaagtttcaactggtgaaatgttcagaaaacttaaaattgataaattaagtttcaaacatcaaaattcattcctggatactctgcttagagaacataaaagtattgaagaattttatgttaccaatataaagggttatgatttgaagctttctgggactggttcaacgctttttatagagtatgacaaaaaagatgatttaaaaaaaatattacaaaaaattccaaaaaaattggagattctttttctgtgaa

SEQ ID NO: 247935 - DNA, 1006 bp, Unknown
  Bacterial polypeptide expressing nucleotide sequence isolated from the Sargasso Sea
agcaaagaatacctataacatggaagtgcttggaatacgcgacggtactgtaggtttaatgcaaagacctgtggcttacttaccactcgattatcaaacctttagcggatctctactaagacaaggtggtacttttttaggcacaacgagtaagggcaacccctttaaatttccaatgccagatggaaaatttaaagaccgctcccaagaaataatcgatggatatcatgagttgggtcttgaaggattgattgtaattggtggagacggaagtatgtccattcttacagaaatagcaaaacgaggaaatttaaatattgttgcaataccaaaaacaatcgacaacgatgttggtgcaacagaaagttcaattggatttaatacagctgtaaatgttgctactcaggcacttgacaaccttcaaacgactgctgccagtcatcaacgaacaatgattttagaggttatgggaagagatgcagggcacattgcaattaatgcgggtattgctggtggtgctgatgctattttaatccctgaaattaaatattctatcaaagggatcgttaataaacttactgaaatgaaaaatagagggattgttcactctttaattgttgttgctgaggctgttaaaacggaagaaggtagaagctatactgtggaatttgcagacggacaaaaaagacttggcggtataggaaattacttgtctgaagagattatgaaaatgacagatatagagtgcagagtaacatctcttggtcatgtacaaaggggtgctcctcctactccaagagatagaattcttgctagtgcttttggtgtgtacgcagttgatttgatagcacaaggtaaaatgggaagaatggttgcttggagagataggaaggttgttgatgttccaattagtgagggcatatcaacttataaagtagttgatagatcagatccacttattgaaactgcacttgctttaggagtttatgtcggcgatatagactaa

SEQ ID NO: 247936 - DNA, 805 bp, Unknown
  Bacterial polypeptide expressing nucleotide sequence isolated from the Sargasso Sea
ttaagattaagagcacccgcaaaacttaacttacatctcgaggtagtaaaaaaaagacgtgatggatttcatgacttatcctcattatttactctaattgaattatttgacgatataacgcttagaaagaattcaaattctattgaattaactgaatccattcctataaaacaaaatattgttttaaaagctgcaaacctcctaaagaatttattttctgtaaaggaaggcgtcaaaattgaactcgtaaagtctatacctgatcaaaagggtttagggggcggaagttccgacgcagcatcaacacttctaggcttaagaaaattttggaatttggatatttcagatcaagatcttgcaaagattgctctaaagttaggttcagatgttcctttctttatatacggtaagactgcttgggcagaaggaagaggtgaaattctggctgaatatccatataaaaagaaatattacttgttatttttgccctcattaaagataagtactaaagatgcttttgagcaagctagttttgtatctaggcctaaaatcagtaaaaggaactttactagtgaccagtcatttaatagttttgaagactggataagaaagacttattcagaaatggatgaagcttttaataaccttagattgattggagaacctaaattatctggaactggctcaactatttttttggagtttgacagtaaatctgctgctgagtcagcacagaaacattttcctgagttagttttaacaaaaagcttagaacgttcacccttaatgcaaataatagaataaa

SEQ ID NO: 247937 - DNA, 814 bp, Unknown
  Bacterial polypeptide expressing nucleotide sequence isolated from the Sargasso Sea
atgaatgagatttatatcaaagctccagctaagttaaatttacatcttcaagtagtttctaaaagagatgatgggtttcataatctgcgaactcttttcacttatattaatctctacgattatctctcttttaaggaaacaaagaataaaattgagctgcaggaagtaatgcctataaaagataacattattttaaaagctgctgaaattttaaaggataaaactaaatgttctaaaggagtgcaaatctctatagaaaaaaatataccgcttcaaaaaggacttggtgggggcagttcaaatgctgctgcaaccttattagctttaaacgtattgtgggaaacggggctaaccaaatcagaattattaaaattgtctttggaattaggatcggatgttcccttttttgtatttgggcacagtgcatgggctgaaggaagaggtgaaaagctttctaaaataaattgtaaagaagaatggcatttactatttatgcctaaagcagaaataagcactaaagaagcttttgaacaattgcctctactgacttccaactcctattcatatgaagattattgttctaaaggtggatttaatacttttgagaaatgggcaagagagtcgtatgaagaaattgataaaatttttattaaattagaaaatattggtaaagcccacctatcgggaacaggctcttcagtatttatatcttttaagaaaaaagaaatagcagaagaagttaagaaagaattttctaattgcattttagtaaaaagtttagaacgttcacctttaatgcaaataatagaataaa

SEQ ID NO: 247938 - DNA, 594 bp, Unknown
  Bacterial polypeptide expressing nucleotide sequence isolated from the Sargasso Sea
tcaaacgtctgcccatgggcggcggcatcggcggcggcagctccgacgcagcgaccaccctgctcggcctcgaccacctgtggcaactgcacctgggcgaagaccgactggccgcgctggggctgaccttgggcgccgacgtaccggtgttcgtacgcggccgggcggcatttgccgagggggttggagagcgcctgcaaccggtcgatttgcccgagccatggttcctcgtaatcgcgccgcaagtctctgttagtacagcggaaatatttgccgacccagagttgacacgtaataccccggccattacagttcgcagccttcttgcagggggcggtcataatgactgtcagccaatagtcgagaagcgttacccagaagttcgtaacgctttgagcttgttgaacaaattcgttccggcaagcatgactggcactggagcttgtgtgtttgggagcttcccaaacgaaggcgaggctgataaagtccgccgccaacttccagacactttgccaagtttcgttgcccacggtcgtaacgtttcgatgttgcaccgaagccttaaaaaactggcgcaggaagcgagtgcgtagc

SEQ ID NO: 247939 - DNA, 854 bp, Unknown
  Bacterial polypeptide expressing nucleotide sequence isolated from the Sargasso Sea
aatgtcaattaatgagatacatgttcgtgctcctgcaaaaatcaatttggcacttgaagtaactggacgacgtagagatggttttcatgaaattgatactgtcatgacgacagtaagtttattcgactatatttcgatagagtcatcagaaaaattatctataaattttataggaccctattctcaagggattgatccatcgaatgatttagcgggaagggcagctattgaattagcaaaaactattgggcgtgaacctaatgtcactatcactatcgaaaaacaaattccatcttctgctggtttaggtggaggatcttctgatgctgctgcagttttaagaggattgaatgaattttggaatttaaatcaggaattaaaagatctcgaaaaaattgccagtaaaattggttcggatgtgtctttttttctttatggtggcactgcaagatgtactggtagaggtgaaataatacatcctttgaaagatttaagtaagttacgagctttgattttattgcctgaggtttcgaaaatccagaacaaaacggcgacattgtactctcaaatacattctaataatttcagtgatggcaatcattctaaacgtattgcccatcgtattgatagaaaattgcccccaccgactgccgatatggttaatgtttttgagacagttataaaaaatcactattcagaattaattgaatattatgcattattacgttcgaaaggggcacctattttgcatctatgtggatcaggtcctgctgtatatttatggatacatcaaaatgcaaaagtagaggagctcatgtttgattttaggcaggtaggtgctagtgtttttgaag

SEQ ID NO: 247940 - DNA, 850 bp, Unknown
  Bacterial polypeptide expressing nucleotide sequence isolated from the Sargasso Sea
gatgactcattggccctctccggcaaaactgaatctgtttttatacatcaccgggcaacgtgcggacggttaccactcgctgcaaacgctatttcagtttcttgattatggcgacacgatagatattgcgctgcgtggcgacggcgaaattcgcctgttaaccccggtggaaggcgttgcgcacgaagacaacctgatcgtccgtgcggcacgtttgctgatgaaggtagcatctgaaagcaatcgccttcccaacgggagcggtgcggacatcagtatcgacaaacgcctgccgatgggcggcggtcttggcggtggttcatcaaatgcggcaaccgttctggtggcgctgaaccatctctggcagtgtggactttcgattgatgaactggcggcactcggtttaaccctgggggcggatgttcccgtgttcgtgcgcggccatgcggcctttgccgaaggcgtaggagaaattctgacgccggtcgagcctgaagaaaagtggtatctggttgctcacccgggagtcagcattccgacaccggtgatttttaacgatcccgacctcccgcgcaacacgccaaaaaggtcaataaaaacgttactaaaatgtgaattcggcaatgattgcgaggttatcgcaagaaaacgttttcgcgaggttgatgcggcgctttcctggctgttagaatacgcgccgtcgcgcctgactggtacaggggcttgtgtctttgctgaatttgacactgagtctcgtgctcgccaggtgcttgagcaagccccggaatggctcaaaggctttgtggcgaaaggcgtcaacctctccccattgcacagagcgttactctaa

SEQ ID NO: 247941 - DNA, 753 bp, Unknown
  Bacterial polypeptide expressing nucleotide sequence isolated from the Sargasso Sea
catgcgctggccggctccggccaaactgaatctctttttgcacgtcaacggccgtcgcccggacggctaccacgagctgcagaccctgttcatcttcctcaaccacggcgactggctcgagttcgagccgctcaccgataccgacttgctcaccctgagcccggccattcccggcgtgcccgacgagcagaacctgatcatccgtgccgcccgcctgctgcaggccaggctgccaagcccgcagggagcccatatccggctggagaaggtgctgcccatgggcggcggcatcggcggcggttcgtcggacgccgccactaccctggttgccctcaaccacctctggcaggccggcttgagtgaagacgagctggccgagctcggcgtgcagctgggcgccgacgtgccggtgttcgtgcgcggcaaggccgcctttgccgagggggtcggtgagcggctgcagccggtcgagctgccgagtgcctggtatctggtgctcaagcccgattgccatgtggcgaccgccgccgtgttccaggatccggacctgcccagagataccccgaaaatggcattgcacaatctgctggaaggggagtggaaaaacgattgcgaattgctggtgaaaaagcgccaccccgaggttgccaatgcgctcggctggttgctagaatacgcgccgtcaagaatgacgggcacaggagcctgcgtctttgctcagttgaagacgaagtggctgctcgggaagtgtgg

SEQ ID NO: 247942 - DNA, 502 bp, Unknown
  Bacterial polypeptide expressing nucleotide sequence isolated from the Sargasso Sea
aatgaatctcaagattgaatcccatctatcaccagcaaaaataaatcttttcttacatgtcctgcgacgccgcgccgatgggtatcatgaattacaaaccttgtttcaattgcttgactatggagacgaattaacgttcgaaaccaatagtaatggcaccttagaattacaccaagaatcagcggataaaatacgaacactcccttatagtcagaatttaatcatcaaagccgcccgacttctccgacaagaatcaggtgacacaaaattaggggtcaaaatttacctaaataaacgcattccggcgggtgcaggactcgggggtggaagtagtaacgctgccaccacattaaagaccctaaataagctctgggactgtgatctgtctatggaagagctgaagaccctagccttgaagcttggtgcagacgtgccgttctttcttgaaggaaaatcagcgtggggagagggtctaggagaaaagctgcaacctgttgaactc

SEQ ID NO: 247943 - DNA, 856 bp, Unknown
  Bacterial polypeptide expressing nucleotide sequence isolated from the Sargasso Sea
catgtcgaatgacatttcgcgcaattggcccgcgcccgccaaattaaatctgtttctgcatatcaacggccgccgtgccgacggataccatgagttgcaaaccctgtttcaatttatcgattgttgtgatcaactcgattttagggtgacgcagacgcctgagctgatattgcactcgaacatgtcggccgttgtcgccgatagcgataacttaattctgcgagccgcaaaatcattacagcaagcgacaggttatcctggcggcgccgaaatctggctcgaaaaacgtttacccatgggcggcggtttaggcggcggctcctccgatgcggccaccacactcgtggccttaaatcagttgtggaacacccaattatctaacgataaattagcggcgattggtttaaaactcggtgccgatatccctgtttttattcgcggtttcgcggcatttgccgaaggcgttggcgaacgtttacaggcggtgacgcccactgaattttggtatttagtgatcgcgcccgatgcccatgtttccaccgctgcggtgttccaagatcctttgctaccccgcaatacacctaagcttggcatcgacaccttaatgagccaaccttgggcaaatgattgccaagatctggtcgtttccaaataccctcaagttgccaaggccttaggctggctgctagaatatgcgccgtcgagaatgaccggaacgggcgcatgcgtgtttggggagttttcttcgcagcagcaagctctcgcagccttggcgaaattaccgtctgatatgcaaggatttgttgcaaaagggatgaatatttcgccgctcgttgtgcgactcactcatccataa

SEQ ID NO: 247944 - DNA, 614 bp, Unknown
  Bacterial polypeptide expressing nucleotide sequence isolated from the Sargasso Sea
catgtcccaagagatttcacgcaattggccagctcccgccaaactcaatctgtttttgcatatcaacggacgccgcagtgacggttaccatgagttgcaaaccctatttcaatttgttgactgttgcgatcaactcgactttcgagtgacttacacacctgaactgattttgcactcgaacatgtcaaacgttgtcgcggatagcgataacttaattctgcgagccgcaaaatcactgcaacaatctacaggttatcctggcggtgcagaaatctggctcgataaacgtctgcccatgggcggcggtttaggcggtggctcctcggatgcagccaccacacttgtcgccttgaatcagttatggaatacccaattgtctcatgatgaattagcggcaattggattaaaactcggtgccgatatccctgtttttattcatggtttcgctgcatttgccgagggagttggagagtgtttacagacggttaatcccgctgaattatggtatttaatcattgcccctgacgcccatgtttccaccgcagcggtattccaagatccgcagctgccgcgtaatacgcctaagcttggtattgatactttactgagcaaat

SEQ ID NO: 247945 - DNA, 1678 bp, Unknown
  Bacterial polypeptide expressing nucleotide sequence isolated from the Sargasso Sea
atgaaattttctataggttttgattttggaacaaattcttgcagaggtattttagtcaatatctcttctggtaaggaagaatgcgaacatgtatataattataaaaaaggttcaagtggtgtaattttaactaaaaataatcctcttctagctcgccaacatcccattgaatatacaaacgcattaattgaatgtacaaaaaaaataatcaaaaaagctaaaaaaaaaattaataaatttagtccagataaagttattgggctaggagtggatacaactggtagttctccaatgccagttgataaagaaggaaagcctctggcattaaataaaaaatataaaaataatttaaatgctctagtttggttatggaaagatcatactagttttaaagaagcagagattattactaatttagcaaataaactttttccagaatatcttaaaaatataggtgggcgttattcatctgaatggttttggagtaaaatatttcacttaaaaaatattgatccaaaattattcaattctatttatagttttgttgagatatgtgattatataccagcattattatctggaaatactaatcctttagaattaaaaagatcagcatgcgcagcaggtcacaaagctttgtataatgaaaagtggggaggattacctgataaaaaatttttaaataagttagatccaaaaatagcagtgttaaaaaatcggttgtacaaaaatgtatataacccagaagaaccagcaggatatttatctgagatttgggcaaaaaaactaggacttaaaaaaaatataaaaatagctatgggcggttttgatgctcatattggtgcagtaggagcaaatatagaagagaaagtacttgtaaaggtaatgggtacaagtacttgcgatattgcaattcaatctcaaaaaaagaaaattaaaaatattcctggtgtttgtggtattgttaaaaattcagtaataagcaattatttaggaatagaagcaggtcaatctgctgtgggagatatttttgctagttatattaaaaataatgtaggtgaaaaatatggcaaaaattttaaagaaaaattttcaaatttagaaaaattggcttctctaataaagccaggtgaacatggcttgttagcacttgactggcataatggtaatagaactatattagtagacacggctttatcaggtttattagttggtcaaaatttacaaactaaacaacatgaaatttttaaagccttaatagaagcaacagcttttggaagtttaatgattatagatcaaatagagaaacacggtgttagcattaaagaaattatcgcaattggaggtttatcgcaaagctatgtgataatgcaaatttatgcagatattacaggtagaaaaattaaggttttaaaaagtgatcaagtttgtgcagttggttcagctatattagctgcatgtaataatacagaagggtatttaaatttaaaaaccacacaaaaaaaaatgtctgttaaggtaaaaaaaatatatcatccaaatataaaaaataacaaaatatataaacgaatatataaattatattctaatcttcatgatgtttttggaagagttaataacaaaaaatcattacatcatataatgaaagaattaattttaattagaaatctatattaat

SEQ ID NO: 247946 - DNA, 1144 bp, Unknown
  Bacterial polypeptide expressing nucleotide sequence isolated from the Sargasso Sea
ttatagttttgttgagatatgtgattatataccagcattattatctggaaatactaatcctttagaattaaaaagatcaggatgcgcagcaggtcacaaagctttgtataatgaaaagtggggaggattacctgataaaaaatttttaaataagttagatccaaaaattgcagtgttaaaaaatcggttgtacaaaaatgtatattccccagaagaaccagcaggatatttatctgagatttgggcaaaaaaactaggacttaaaaaaaatataaaaatagctatgggtggttttgatgctcatattggtgcagtaggagcaaatatagaagagaaagtacttgtaaaggtaatgggtacaagtacctgcgatattgcaattcaatctcaaaaaaagaaaattaaaaatattcctggtgtttgtggtatagttaaaaattcagtaataagtaattatttaggaatagaagcaggtcaatctgctgttggggatatttttgctagttatattaaaaataatgtaggagaaaaatatggcaaaaattttaaagaaaaattttcaaatttagaaaaattagcttcacaaataaagccaggtgaacatggtttgttatcacttgactggcataatggtaatagaactatattagtagacacagctttatcaggtttattagttggtcaaaatttacaaactaaacaacatgaaatttttaaagctttaattgaagcaacagcctttggaagtttaatgatcatagatcaaatagagaagcacggtgttagcattaaagaaattattgcaattggaggcttatcacaaagttatgttataatgcaaatttatgcagatattacaggtagaaaaattaaagttttaaaaagcgatcaagtttgtgcagttggttcagctatattagctgcatgtaataataaagaagggtatttaaatttaaaaaccacacaaaaaaaaatgtctgttaaggtaaaaaaaatatatcatcctaatatgcaaaacaacaaaatatataaacgaatatataaattatattctaatcttcatgatgtttttgggaaagttaataacaaaaaatcattacatcatataatgaaagaattaattttaatcagaaatctatattaa

SEQ ID NO: 247947 - DNA, 641 bp, Unknown
  Bacterial polypeptide expressing nucleotide sequence isolated from the Sargasso Sea
ggatcagcgccagctcggctggccgctggagagcctcgccgcccagtatccggagctgcgcaccgccatcgaggcccacaagcgggagctgctgccaagcctcgccgccgcctgggagcagcagcgcgatctggcccacctgccggtggtgctcgactggttcaatggtcgccgcaccccatacgccaaccagcgtctgcagggcaccgtcaccgggctcaacctcggcaccgatgcacccgatctgttcggtgctctggtggcctccaccgccttcggagcccgcagcatcatggagtgcatgaccagtcaacaggtgccggtggagcaggtgatcgcccttggcggcatcgcccgcaagtcggccaccgtgatgcagacctgcgccgacgtgatgaacaggcccatccaggtggtggcctcggatcagtgctgtgccctgggggcggccatctttgccgccgtggcggccgggatccacgccgatgtggccaaggcccagcgccatatggcgagcgccgtggagcgcacccaccagcctgaccctgagcgggtcgccgaatacgagcgcctctaccagcgctacctcgcctggggcgccgccgccgagccgctctacaaccggggagtaccggcatgaa

SEQ ID NO: 247948 - DNA, 829 bp, Unknown
  Bacterial polypeptide expressing nucleotide sequence isolated from the Sargasso Sea
cggctcgatcggctgcggcatcgaggagggcatgctggtcaaggtcatcggcacctccacctgcgactgcgcgatcgtcgatctgtcgaaatcggacacaatccccgggctttgcggcattgtcgaaggctcgatcctgccgggcttttacggcatcgaggcggggcagtccgccgtcggcgatatcttcaaatggtgggtcgaacgcgtctgccagggcggcccggcgctgcatgaggagctttcgcgcgaggcggctgggatgaaggccggccaaagcgggcttctggcgctcgactggaacaatggcaaccgcaccattctggtcgaccagcgcctcacgggcctgatccttggccagacgctctactcgacccgggccgagatctaccgcgctctggtggaggccaccgccttcggcgcgcgcgccatcgtcgagcgcatgaccgattacggcgtgccgatcgacaaggtcgtctgcgccggcggcattgccgagaagaacccgatgctgatgcagacctatgccgacgtcatgaaccggacgatgcttgtgacccgctcggcccagacctgcgcgctgggcgcagccgtggccgccgcctccgtcgccggcacccatgaggatatcaagacgaccacgcgggcgatgacggggctgaaggatatccgctacgacccgatccccgaaaatgtcgcggtctatgaggagctctatggtctctacctgaccctgcatgacggtttcggcgggattacccgcgattccgacttgtcgaggatcatgaaggacctgatcgacatccgcgacagggttcgcgccgcgtaa

SEQ ID NO: 247949 - DNA, 524 bp, Unknown
  Bacterial polypeptide expressing nucleotide sequence isolated from the Sargasso Sea
gcagcagcgcgatctggcccacctgccggtggtgctcgactggttcaatggtcgccgcaccccatacgccaaccagcgtctgcagggcaccgtcaccgggctcaacctcggcaccgatgcacccgatctgttcggtgctctggtggcctccaccgccttcggagcccgcagcatcatggagtgcatgaccagtcaacaggtgccggtggagcaggtgatcgcccttggcggcatcgcccgcaagtcggccaccgtgatgcagacctgcgccgacgtgatgaacaggcccatccaggtggtggcctcggatcagtgctgtgccctgggggcggccatctttgccgccgtggcggccgggatccacgccgatgtggccaaggcccagcgccatatggcgagcgccgtggagcgcacccaccagcctgaccctgagcgggtcgccgaatacgagcgcctctaccagcgctacctcgcctggggcgccgccgccgagccgctctacaaccggggagtaccggcatgaa

SEQ ID NO: 247950 - DNA, 1675 bp, Unknown
  Bacterial polypeptide expressing nucleotide sequence isolated from the Sargasso Sea
aatgtcgaatgttttatgggcttacgcgttagggcttgattacggctctgattcagtacgcgcgttattggtggatacccaaacgggcgcagaagtagcaaccaatgtggtgtactacccacgttggaagaaggggctgttttgcgagcccgcgaagaatcaatttagacaacatcccctcgattacatcgaaagccttatcgaggtagtgcaaggattatgggcaaaagcccccagtggcgccgcgcaaagagtctgcgggttgagtgttgataccacaggttcaactcccattgccgtcgacgaagctggcgttgccttagccttaaaaccagagtttgcgaataaccccaatgccatgtttttgctttggaaagatcacagcgcgatcctcgaagctcagcaaattaccgccgcagcaaacaatgcaagcgaaaattacttgaaatatgaaggagggatttattcctctgaatggttttgggccaaagcgctattcgtactgcgccacgacacagaagtcagacaagccgcctatagctgggtcgagcactgtgattggatcaccgcattaatgacgggcaccacacatccaaaagtctttaaagcagggcgctgcgccgctggtcacaaagtgatgtggcatgagtcatggaatggttatccaccgaatgactttttcgttggcatcgaccctttactcgatggtttaagagacaaattaccccttgaaacctgcacatccgacaaggtttgtggtcagttaacccctcagtgggcacagcatttagggctatcgaccgaggttatcgtgtcttttggctcatttgactgccacgcaggcgccgttggtgccaatgttaagcccggcgtcttaaccaaggtgatgggcacctctacctgcgatatcacggtcgccagttatgaagatattggtgagcgttgtatcaaagggatttgcggtcaggtcgatggttccgtattgcccggcatgattggccttgaagcgggtcagtccgcctttggcgatctctacgcttggtttagggaactcaccgcatggccgatgcaacagctcgacacttcagcactgtttgatgacgacaccagaaccaaacttattcagcaactcgaggccgaaaccttaaccgtgctgggcaatgcggccgcgaaaatccccgttggggagacgggtattgtcgcgctggattggattaacggacgccgcacgcccgatgcagaccaatctgttgccatggctatcataggcttaaccatgggcagccaagcaccgcaagtcttcaaagccttagtggaagccagcgcctatggcgcacgggccattatcgagcgcttcaaacaagaaggcgtttgcattgaccatgtggtcactataggtgggatctcgaaaaaatccgacttcattatgcaaacctgcgccgatgtgtggaattgcaatatcgacgtactcgagagcgaacaaagctgtgccctcggcgccgccatttatgccgcaaccgcagccggggtttatcccgatgtgttgagtgcccaagccgcaatggcctcaagcgttgcgaaaacctatcaaccgaatcctgaaaacgcacagaaatatcaagcgctttatcaagcgtacttagcccttggccactatgttgatggagcaaaataa

SEQ ID NO: 247951 - DNA, 1675 bp, Unknown
  Bacterial polypeptide expressing nucleotide sequence isolated from the Sargasso Sea
atgtcgaatgttttaggggcttacgcgttagggcttgattacggctctgattcagttcgcgcgttattggtggatacccaaacgggcgcagaagtagcaacgaatgtggtgtactacccacgttggaagaaggggcttttttgcgaacccgcgaagaatcaatttagacaacatcccctcgattacatcgaaagccttatcgaggtagtgcaagggctatgggcaaaagcccccagtggcgccgcgcaaagagtctgcggtttgagtgttgataccacaggctcaaccccgattgcggtcgatgaattgggtgttgccttagccttaaaaccagagtttgcgaataaccccaatgccatgtttttgctttggaaagatcacagcgccatcctcgaagctcagcaaattaccgctgcggcaaacaattcaagcgaaaattacctgaaatatgaagggggaatttactcctccgaatggttttgggcgaaagcgttatttgtactgcgccacgacgcagaagtcagacaagcggcctatagctgggtcgagcactgtgattggatcaccgcattaatgacgggcactacacatccaaaggtctttaaagccgggcgctgcgccgccggtcacaaagtgatgtggcatgagtcatggaatggctatccgccgaatgactttttcgttggcatcgaccccttactcgatggcttgagagacaagttaccgcttgaaacctgcacatctgacaaggtttgcggcaagctaaccccagagtgggcacagcatttagggctatcgaccgaggctatcgtgtcctttggctcattcgactgtcacgcaggtgccgttggggccaatgttaaacccggcgtcttaaccaaggtgatggggacctctacctgcgatatcacggtcgccagttatgacgatataggtgagcgttgtatcaaaggcatttgcggtcaagtcgatggctctgtattgcccggcatgatagggctagaagcgggtcagtctgcctttggcgatctctacgcttggtttagggatctcaccgcatggccgatgcaacagcttgacacttcagccttatttgatgaaaacaccaaagccaaactcattcagcaactcgaagctgaaaccctgacaatgttaggcaatgcggccgcgaaaatccccgttggcgagacgggcattgtcgcgctggattggattaacggacgtcgcacccccgatgccgaccaatctgttgccatggctatcacaggcttaaccatgggtagccaagcaccgcaagtcttcaaagctttagtggaagctagcgcctatggcgcacgggctatcatcgagcgcttcaaacaggaaggcgtatgcattgaccatgtggtcaccattggtgggatctcgaaaaaatccgacttcattatgcaaacctgcgccgatgtgtggaattgcaacatcgacgtactcgagagcgagcaaagctgcgcactgggcgccgccatttatgccgcaaccgcagccggggtttatcccgatgtgctgagtgcccaggcagccatggcctcgaacgttgcgaaaacctatcagccaaatcctgaaaacgcagagaaatatcaagcgctttaccaagggtacttagcccttggtcactatgttgatggagcgaaataag

SEQ ID NO: 247952 - DNA, 794 bp, Unknown
  Bacterial polypeptide expressing nucleotide sequence isolated from the Sargasso Sea
ggcaggcaacaatgcgctggtcaaggtgataggcacctccacctgcgacatcctgatcgccgacgaggccaccataggtgatcgggccattgccgggatctgcggccaggtggacggcagcgtggtgccgggcatggtgggactggaggcgggacaatcggcgtttggcgacatctatgcctggtatcagcgccagctcggctggccgctggagagcctcgccgcccagtatccggagctgcgcaccgccatcgaggcccacaagcgggagctgctgccaagcctcgccgccgcctgggagcagcagcgcgatctggcccacctgccggtggtgctcgactggttcaatggtcgccgcaccccatacgccaaccagcgtctgcagggcaccgtcaccgggctcaacctcggcaccgatgcacccgatctgttcggtgctctggtggcctccaccgccttcggagcccgcagcatcatggagtgcatgaccagtcaacaggtgccggtggagcaggtgatcgcccttggcggcatcgcccgcaagtcggccaccgtgatgcagacctgcgccgacgtgatgaacaggcccatccaggtggtggcctcggatcagtgctgtgccctgggggcggccatctttgccgccgtggcggccgggatccacgccgatgtggccaaggcccagcgccatatggcgagcgccgtggagcgcacccaccagcctgaccctgagcgggtcgccgaatacgagcgcctctaccagcgctacctcgcctggggcgccgccgccgagc

SEQ ID NO: 247953 - DNA, 1693 bp, Unknown
  Bacterial polypeptide expressing nucleotide sequence isolated from the Sargasso Sea
tatgtctgagcaccccaggtccgagcagatcaccatcggactcgatttcggcagcgattcagtcagggcactcgccgtgcgctgccacgacggcgccgagctggcaacccaggtcgcctattacccgcgctggcaggccggtcgttactgccagccggtcaccaaccagtttcgccaccaccccctcgactatctggaatccatggagcaggcggtggtggcggtggtgagccagctcacccagcgtcagcgcgccgccgtgcgcggcatcggggtggacagcacaggctccacaccggcccccatcgacgaggagggccgtgtgctggccctgcgcccagagtttgccgacaaccccaacgccatgttcgtgctgtggaaggatcacaccgccatcgaggaggccgaggccatcaccgctctgtgccacggcggccagttcccggactacagccgctacatcggcggggtctactcctccgagtggttctgggccaagatcctgcacgtctcccgcgctgacgcggcggtgcgcgccgccgcctgcaactgggtcgagctgtgcgactgggtgcccgccatcctgagcggtacccaggccccggccgacatccggcgcgggcgctgctccgccggccacaagtccctctggcacccgagctggggcggcctgccccccgccgagtttctcaacgcgctggatccgctgttgacccaggatctcgactacccgctctttaccgacagctggaccgccgatctgccggtcggcaccctgacccccgagtgggcggagcggctgcatctctcctgcgaggtggtgatcgccggcggggcctttgactgccacatgggggcagtgggggccggggccggcaacaatgcgctggtcaaggtaataggcacctccacctgcgacatcctgatcgccgacgaagccaccatcggtgatcgggccattgccgggatctgcggccaggtggacggcagcgtggtgccgggcatggtggggctggaggcgggacaatcggcgttcggcgacatctatgcctggtatcagcgccagctcggctggccgctggagagcctcgccgcccagtatccggagctgcgcaccgccatcgaggcccacaagcgggagctgctgccaagcctcgccgccgcctgggagcagcagcgcgatctggcccacctgccggtggtgctcgactggttcaacggtcgccgcaccccatatgccaaccagcgcctgcagggcaccgtcaccgggctcaacctcggcaccgatgcgcccgatctgttcggtgccctggtggcctctaccgccttcggggctcgcagcatcatggagtgcatgaccagtcagcaggtgccggtggaacaggtgatcgcccttggcggcatcgcccgcaagtcggccaccgtgatgcagacctgcgccgacgtgatgaacaggcccatccaggtggtggcctcggatcagtgctgcgccctaggggcggccatctttgccgccgtggcggccggcatccacgccgatgtggccaaggcccagcaccacatggcgagcgccgtggagcgcacccaccagcctgaccctgagcgggtcgccgaatacgagcatctctaccagcgctacctcgcctggggcgctgccgccgagccgctctacaaccgggggattacggcatga

SEQ ID NO: 247954 - DNA, 686 bp, Unknown
  Bacterial polypeptide expressing nucleotide sequence isolated from the Sargasso Sea
tcaaacattttctcatttttcttatgatgctaatttgttggaagatttacaaaatacttttaaaaattatggtgaaactggaacggcaaaaacacgtacctatgtacataatttacatgagagtgaattatatgatgttccctctggagaatttacagaatggcgtgatttacctagtgacactgatcttttattttatgaggggttacatggtgcagcaaaatatgaaaatataaatattcctcaacatgcagacttaaaaattggtgttgttccagtagttaatttagaatggatacaaaaaattcacagagatactgattcaagaggttatactactgaagcagtgaccgatacaattttaagaagaatgcatgactacgtacattgcatttgcccccaatttaccgagacagatataaatttccaaagagttcctgtagtagatacttcaaacccatttattgcaagatggatacctacagcagatgaaagtattgttgtaataagatttagagatcctcatggtattgatttcccttatcttgtttcaatgattcatgatagttggatgagtagagctaattctatcgttatacctggtggaaaactagaccttgccatgcaacttatattaacacctcttataaaaagattaatagaacgatcaaaaaaatctggttaaa

SEQ ID NO: 247955 - DNA, 499 bp, Unknown
  Bacterial polypeptide expressing nucleotide sequence isolated from the Sargasso Sea
tctacttttttatgaaggtctccacggagcggttgtcaatgacgaagttaatttagctaagcatgcagatctaaaaattggcgtagtgccagttattaatctcgaatggatacaaaaaattcacagagatagagattcaagagggtatagcacagaagcggtaactgacacaattctaagaagaatgcatgcatatgtgcattgtgtttgtccacaatttactgaaacggatattaatttccaaagagtgcctgtagttgatacatctaaccctctcgtagcaaggtggattcccacagcagatgaaagccttgtggtaataaggtttaaagatcctcacggaatagattttccctatctcgtatcaatgatacacgatagttggatgagcagagccaattctattgttattccaggaggaaaattggatttggcaatgcaattaatattgactcccttgataggtaggttagtaaatcaatcaaggagaagtatgtaa

SEQ ID NO: 247956 - DNA, 301 bp, Unknown
  Bacterial polypeptide expressing nucleotide sequence isolated from the Sargasso Sea
gatgtacgaacaagtcaaggcgctcaaggagggtaaggctgtcgataagccgatctacaaccacgtcacgggcgtgttcgacccggcggagaagattgaatccccggaggtgctcatcctcgaaggtcttcacccgttcgccgacgagcgcgtgcgcgacatgtttgatttcaagatttacttggacatctccgacgaggttaagtttgcgtggaagattcaacgcgacatggccgagcgtggtcactctctcgagtccatcaaggcgtccatcgaggcgcgcaagccggatttcgacgcc

SEQ ID NO: 247957 - DNA, 844 bp, Unknown
  Bacterial polypeptide expressing nucleotide sequence isolated from the Sargasso Sea
atggctaaaggaagtaaggagttggctgccatgagtcaaattttggcggatatcggtggcacatctatccggattggctggcagtcaaaaaaggctgaggatatcagagattcggtaacatatgcctgtcgtgattttgccaaacctgttgacgctttgaggcaatactgtgatcaaaatcaattgaaagttaatagtgttgtcctagcggtagctgctgaaatatctgggctagaagtcgatattaccaataatccatggatttttaacgcaagagagctagcgcaagagttaggagcaaatgaatatctcctgataaatgactttacagcgcaggcgttttctaactcggccttgctgagcccaaagccaattataaacccgaaacttcatattctgcttcgaaagggtttgcaggctgctggttcaccactgttggtaaccggccctggcactggattgggggtcgctgggcttctgccatcaagctcgggcccaatggtaattgagggagagggagggcatgtaagctttgtcccacgtgatgaggctgagagaaatatcttggcagtattagcggctaaatttggccatgtgtctgcggagagggtggtgagtggcccgggacttgaggcaatatacaagatacaaaatggtgccagattagctgcaccagaaattggagatggagctctggctggtgataacaaatgtcttaaagcggttaacttgatgtttaaaagctttgcaactgtgattgcaaatgccgcattaagttttggtgcaggcgctgggatagttattgcggggggaattacgcccaaggttacgtggcttgcttgat

SEQ ID NO: 247958 - DNA, 483 bp, Unknown
  Bacterial polypeptide expressing nucleotide sequence isolated from the Sargasso Sea
tttgaagctattagttgctgacattggcgggacgaatgcacgctttggttaccaggagaataataaatccgaaataaagcatattgagttcctaaattgtattgattttgcaaatatcggccaagcaatagctcattatgtttctaaaaacagccttaatattgagaatttatctttatctatagcaggaccctgtggcaataatttcgtgaaatttaccaataatcactggttttttgataaaatagatcttttaaacgagactaattgcaatagtttgctggctataaatgattttgctgcgcagggattaggcttcacaaacttgtttagtgctcattcgaactttttagataaaaagatacttgatcggcacgaacttgttttattaaaccacggaaaatctctagatgggacaaatgtacttataacaggcccaggaactggtttaggggttgggacactagtttttatagataatgt

SEQ ID NO: 247959 - DNA, 706 bp, Unknown
  Bacterial polypeptide expressing nucleotide sequence isolated from the Sargasso Sea
atgaaagctgatttggatttagccgagtttatcgtgcttaacgactttaccgcagtcgccatgagcttacctgcgctaaaacaaaccgagctggtacaaattggtgaaggccatgccgatcaatttaaacctatggcggtgttaggcgctggtacaggtttaggcgtggcacatttaattcctaccgctttaggttatctgccattaccaggcgagggcggtcatgtcgactttaccgctcaaaccgaacaggaatggtttattcataaattcctggccaataaatacggtcatgtcagcccggagcgtttgttatctggccctggtctggaagatttgtatctggctattgctgcgtttaacaacaaagtggttgaaccattaaacgcagcccagattgcaggcaaggctctagatggcagctgtgttttatgcaaagccgttattgagcagttttttgccagtttaggcggtttggcaggggatttagccctgacgttaagtaccttcggcggcgtctttgtcgctggtggtattacgccaaaattactggggctgatgaatcaaagcgaattcagaagccgatttgaagcaaaaggccggtttaaagacttcaaccgccgtattgctacttttgtcgtcactgcagagcaaccaggcttaactggctgtgcagtctacttaaaacaacatatggcgagttaac

SEQ ID NO: 247960 - DNA, 289 bp, Unknown
  Bacterial polypeptide expressing nucleotide sequence isolated from the Sargasso Sea
atgaaattattagttgcagatataggtggaacaaatgcaagatttgcttaccaaataaaaaataatggcgatcttactaattttgcttatttaaaatgttctgattttgaaaatatttatgatgctatagagcattatcaacaaaaaaataatttagacatcgaaaatatgtcaattgcagttgctagcaccacaaagaaaaatgatattaaatttacaaataaccactggaattttaggcaatcagagttcttaaaatattttaatttaaataaactaatttttgtta

SEQ ID NO: 247961 - DNA, 916 bp, Unknown
  Bacterial polypeptide expressing nucleotide sequence isolated from the Sargasso Sea
atgacagccagtaaactgactttaatttcagacataggtggcacaaatgcgcgtttggccctagtcgacaacaaaaagaagactgtaaatgagaaagtctacttgcatcaagattatgaaggtctagaacaaatattagaagattttataaaagtaacaggtgagcctgaattgcagaggggaatattaggagttgctgcacctataattggcgatgaagtaaattttgttaatgcaaatttatcctttagccaaaagaacttagaagataaattttttaaacatggcctagttgtcttaaatgatttagaactgcaggtccttgccttaaatagcctaactaaaggagatgttactgtaattggcgaacaacaattaaataactctaccaagatattaatttctccaggtactgggttagggctagcgggtttagttaaaggaacaccagtggctacagaatctggacatataaacatacctcacattgcaggcttagaatctttgattgagagcttcaggcaaaagaaaggcagaacacctacctttgaagaccttctgagtggaaaagggatattgtttcttaatgaatttgtctctaatgagattaatggctcagttacaagtgaacaagctctaatgagcaataccaaagaaggccaagaagttagagaaattttttcagtcatactggccatcttttgcagattttctgctttgatgtggggatcaaagggcggtgtatatctatctggctccattattaactctctcattgaacaaataaatttaaatgacttcagggataattttgaagatagccagacaatgaaagatttattaatggcttgtcctattattcatgttaaaaacaaaaatcttggctttataggagctaagaccctcataaagtaat

SEQ ID NO: 247962 - DNA, 322 bp, Unknown
  Bacterial polypeptide expressing nucleotide sequence isolated from the Sargasso Sea
ccaggacatcaccgagcgcgcgctggcaggcgagtgcctggattgccgccgtaccttgagcctgttctgcgtgctgatgggccgctttgccggcaacctggcgctcaacatgggtaccttcggcggcgtctacatcgccggcggcatagtgccgcgcttccaggagttcttcatcggctcgggctttcgggtggccttcgaagacaaggggcgtttcaaatcctacctcaaggatatccccgtcttcctcatcacccacgaggggccgggtctgctcggtgctggcgcctatctgcgccagtctctcggcatcaagctataa

SEQ ID NO: 247963 - DNA, 295 bp, Unknown
  Bacterial polypeptide expressing nucleotide sequence isolated from the Sargasso Sea
ggcgagtgcctggactgccgccgtaccttgagcctgttctgcgtgctgatgggccgctttgccggcaacctggcgctcaacatgggcaccttcggcggcgtctacatcgccggtggcatagtgccgcgctttcaggagttcttcatcggctcgggctttcgggtggccttcgaagacaaggggcgtttcaaatcctacctcaaggatatccccgtcttcctcatcacccacgaggggccgggtctgctcggtgccggcgcctatctgcgccagtcgctcggcatcaagctataag

SEQ ID NO: 247964 - DNA, 122 bp, Unknown
  Bacterial polypeptide expressing nucleotide sequence isolated from the Sargasso Sea
aatgacaaaatatgctttagtaggggatgttggcggcaccaacgcgcgtcttgctctgtgcgatattgccagcggcgagatttcgcaggcaaaaacctattccgggcttgattaccccagtc

SEQ ID NO: 247965 - DNA, 598 bp, Unknown
  Bacterial polypeptide expressing nucleotide sequence isolated from the Sargasso Sea
gctggtcggtgatatcggcggcaccaatgcacgctttgccctgtggcgtgacgagcaactgcaggcggtgcaggtcctggccaccgccgattttcccggacccgaacaggccattgccgcttacctgcatgcccagggcctgcccctgggcgccgtggatgccgtgtgcctggcctgtgccgggccggtcagcggtgatctgttccgcttcaccaacaatcactggcgcatcgagcgagccgccttctgcgcggcgctgcagatcgagcacctgctgatgatcaacgatttctccgccatggccctgggcatgacccgcctgcgtgacggcgagcgcctgcaggtctgccccggcgaagcccaggccggacgtccggcgttggtgatcggcgctggcaccgggcttggcgtcggcaccctgctggggctggaagacggtcgctggctggtgttgccgggggagggcggccatgtcgacctgcccatcggcagcccgcgcgaggccgagctgtggcaggtcctgcaccagcagctgggccacgtgcgcgccgaggacgtactcagcggcaacggcctgctggcgctgtaccgggcgatc

SEQ ID NO: 247966 - DNA, 970 bp, Unknown
  Bacterial polypeptide expressing nucleotide sequence isolated from the Sargasso Sea
catggctgatattcagttcgctattgttgctgatattggcggcactaacgcacgttttagtcgtgttgatttagacagcctgcatttagacaaagtagcggtttatccgtgtgcagactttgataccttggctgacgctttgcagttctaccgtgctgagcaaggtttaacagcaattcgtcacgtggctttggccattgcctgtcctgtgacaggagactttgtcaaaatgaccaatttccgttggcaattttctgtaagccaaatgaaagctgatttggatttggccgagtttatcgtactgaacgactttactgctgtggctatgagcctaccggcgctaaaacaaactgaactggtgcaaattggtgaaggccatgccgatcaatttaaacctatggcggtgttaggggctggtacaggtttaggcgtggcacatttaattcctaccgctttaggttatctgccattaccaggcgagggcggtcatgtcgactttaccgctcaaaccgaacaggaatggtttattcataaattcctggccaataaatacggtcatgtcagcccggagcgtttgttatctggccctggtctggaagatttgtatctggctattgctgcgtttaacaacaaagtggttgaaccattaaacgcagcccagattgcaggcaaagctttagatggcagctgtgttttatgcaaagccgttattgagcagttttttgccagtttaggcggtttggcaggggatttagccctgacgttaagcaccttcggcggcgtctttgtcgctggtggtattacgccaaaattactggggctgatgaatcaaagcgaattcagaacccgatttgaagcaaaaggccggtttaaagacttcaaccgccgtattgcaacttttgtcgtcactgcagagcaaccaggtttaactggctgtgcagtctacttaaaacaacatatggcgagttaa

SEQ ID NO: 247967 - DNA, 922 bp, Unknown
  Bacterial polypeptide expressing nucleotide sequence isolated from the Sargasso Sea
catggctgatatccagttcgctattgttgctgatattggcggcactaacgcacgttttagccgtgttgatttagatagcctgcatttagacaaagtggcggtgtatccatgcgcagactttgataccttggctgatgctttgcagttttaccgtaacgagcaaggtttaacagccattcgccatgtggctttggccattgcctgtcctgtcacaggtgattttgtcaaaatgaccaacttccgctggcagttttctgtaagtcaaatgaaagccgatttggatttagccgagtttatcgtgttaaacgattttaccgctgtggccatgagcttacctgcgctaaaacaaaccgagctggtacaaattggtgaaggccatgccgatcaatttaaacctatggcagtgttaggtgcaggcacaggtttaggtgtagcgcatttaattcctaccgctttaggctatttaccattgccaggcgagggcggtcatgtcgactttaccgctcaaaccgaacaggaatggtttattcaaaagtttttagcgaataaatacggtcatgtcagccccgagcgtttgttatcaggcccaggcttagaagatttgtatctggctattgctgcctttaacaacaaagcggttgagcctttaaacgccgcccaaatcgctggtaaagcgctggacggtagctgtgtgttatgcaaagccgttatcgagcagttttttgccagtttaggtggtttggcaggggatttagccctgactttaagcacttttggcggcgtttttgtcgctggtggtattacgccaaaattactgtcgctgattaatcaaagcgaattcagaacccgatttgaagcaaaaggccggtttaaagacttcaaccgccgtattgcaactttgtcgtcactgcagagcaaccag

SEQ ID NO: 247968 - DNA, 694 bp, Unknown
  Bacterial polypeptide expressing nucleotide sequence isolated from the Sargasso Sea
ctttagccatctggaaatcatcaatgatttcaccgccgtgtcgatggcgatcccgatgctgaaaaaagagcatttgatccagtttggtggcgcggaacctgttgaaggtaaaccgatagccgtctatggcgcaggaaccgggctcggcgtggcgcatctggtgcacgtggacaaacgctgggtgagcctgcccggtgaaggcggtcatgtagattttgcgcctaacagcgaagaagaaggaattatccttgaagtcctgcgcgccgaaattggccatgtttccgcagaacgcgtgctgtccggtccggggctggtgaatctgtatcgcgccatcgtcaaatcagacgggcggttgccggaaaatctgcagccgaaggatatcaccgcacgggcgctggaagattcctgcattgactgtcgtcgggcgctgtcgctgttctgcgtcattatggggcgttttggtggcgatctggcgttaacccttgggacgtttggcggtgtgtacatcgctggtggtatcgtaccgcgcttcctcgacttctttaaggcttcaggcttccgcggtggttttgaagataaaggccgttttaaagcctacgtgcaggatattccggtgtacctgattgtgcacgataatcctggactacttggcgcaggtgcgcatttgcgtcagacgctgggccatattctttaa

SEQ ID NO: 247969 - DNA, 682 bp, Unknown
  Bacterial polypeptide expressing nucleotide sequence isolated from the Sargasso Sea
atgcagcatacccatgcgctggtcggcgacgtaggcggcaccaatgcccggttggccctgtgcgagctggcaaccggcaccatttcccaggccaagacttattccgggctggcccatcccagtctggaagccgtggttcgcctctatctggatgagcacaaggtgcaggtgggcgaagcctgcatcgccatcgcctgccccatcaacggcgactgggtcgccatgaccaaccacagctgggagttttccatcagcgagatgcaggccaatctgggcctgagccggttgcaggtgatcaacgattttaccgccgtctccatggcggtgccggtgctgggcgcggctgactgcatccagctggggggcgcggcgcccgtggccggcaagcccatcgccatctacggggccggcaccggccttggggtcgcccacctggtacacagcggcgagcagtggctgagcctgccaggcgagggcggccacgtggactttgccgccaacagcgaagaagaggatgcggtgctgcaggtgatgcgcgccgagctgggccacgtctcggccgagcggctgctctccggccccggcctcgtcaacatctaccgtggtctggtgaaatccgatggccgcgaaccgcaggcgttcgaacccaaggacatcaccgagcgcgcgctggcaggcgagt

SEQ ID NO: 247970 - DNA, 496 bp, Unknown
  Bacterial polypeptide expressing nucleotide sequence isolated from the Sargasso Sea
agggcggcccgtggactttgctgccacagcgaagaagaggatgcggtgctgcaggtgatgcgcgccgagctgggccacgtctcggccgagcggctgctctccggccccggcctcgtcaacatctaccgtgggctggtgaaatccgacggccgcgagccgcaggcgttcgaacccaaggacatcaccgagcgcgcgctggcgggcgagtgcctggactgccgccgtaccttgagcctgttctgcgtgctgatgggccgctttgccggcaacctggcgctcaacatgggcaccttcggcggcgtctacatcgccggcggcatagtgccgcgctttcaggagttcttcatcggctcgggctttcgggtggccttcgaagacaaggggcgtttcaaatcctacctcaaggatatccccgtcttcctcatcacccacgaggggccgggtctgctcggggccggcgcctatctgcgccagtcgctcggcatcaagctataag

SEQ ID NO: 247971 - DNA, 601 bp, Unknown
  Bacterial polypeptide expressing nucleotide sequence isolated from the Sargasso Sea
atgcagcatacccatgcgctggtcggcgacgtaggcggcaccaatgcccggttggccctgtgcgagctggcaaccggcaccatttcccaggccaagacctattccgggctggcccatcccagtctggaagccgtggttcgcctctatttggatgaacacaaggtgcaggtgggcgaagcctgcatcgccatcgcctgccccatcaacggcgactgggtcgccatgaccaaccacagctgggagttttccatcagcgagatgcaggccaacctgggcctgagccggttgcaggtgatcaacgattttaccgccgtctccatggcagtgccggtgctggacgcggctgactgcatccagctggggggcgcggcgcccgtggccggcaagcccatcgccatctacggggccggcaccggccttggggtcgcccacctggtacacagcggcgagcagtggctgagcctgccaggcgagggcggccacgtggactttgccgccaacagcgaagaagaggatgcggtgctgcaggtgatgcgcgccgagctgggccacgtctcggccgagcggctgctctccggccccggcctcgtcaacatctacc

SEQ ID NO: 247972 - DNA, 271 bp, Unknown
  Bacterial polypeptide expressing nucleotide sequence isolated from the Sargasso Sea
gctgaagtgccgcacggtggtgatcacgcagggctcgacggcgacggtggtggtggagaacggcgtcgcgacgtcacacgccgtggagccgctggcgaaggagctgctggtggacaccaacggcgccggggacgccttcgtgggcggcttcctggcgcagctcgcgcagggcaagtccaccgcggactgcgtggcggcgggccactgggcggcgcgcgtcatcatccagcgcagcggctgctcctaccccgagacctgcgactacaaataa

SEQ ID NO: 247973 - DNA, 760 bp, Unknown
  Bacterial polypeptide expressing nucleotide sequence isolated from the Sargasso Sea
gggaaggatgcgttcgccgcgcagatgaagacgtcgtgcgagggcgacggcgtgttcgcgaattacatggtggacgagagcacgccgacggggacgtgcgcggtgatcgtgaaggatggtgaacgatcgctgtgcgcggcgctgaacgcggcgaataactacaaggcggaacacttggacgcgagcgaaaactttgccctcgtggaaaaggcggatttctactacatggcgggtttcttcatgacggtgagcccggagagcatcatgcgcgtcgccaagcacgcgtgtgagaacaagaagacgtttatgatgaacctcagcgcgcccttcttgatgcaagtgccgccgttcttggagtgcctcatgaactcgctcccgtacgtcgacatcttgttcggcaacgaatccgaggcggtgacctttgcggaatcccaaaagtgggagaccaaggacgtgaaggagattgcgctcaagatttccgccatgccggtggccgagggtaagccgtctcgcacggtcgtcatcacgcaaggcgcggacgcgaccgtcgtcgcgcgcgacggagccgtcaacgagtacgccatcatcccgctcgccaaggaggacctcgtcgacaccaacggcgccggtgacgccttcgtcggtggttacatctcccagctcgtccaaggcggtgacgtcgccaagtgctgcgccgcgggtaactacgccgccaacaagatcatccaagtctctggatgcaagtgcgaaggcgttccaa

SEQ ID NO: 247974 - DNA, 793 bp, Unknown
  Bacterial polypeptide expressing nucleotide sequence isolated from the Sargasso Sea
agttcaaaaacattacatagaaaaccgtaaaataatatctttagaaggaaatcttttaagatttgcaattaatgaaaagatttctagagacgaatttataaaattttatgttggaaatgaaataaacccgaatttaaaaagtttccttgataccaacgagacatggaagaaattttttcaaaaatataaattaaaatttaaagaaattagagatagattaatagagataagtaataagcttggtatatcagtcactgactataaattaatggttagtagaattcaaaagggtgagaaagaatctagaattgcaaagaaggagatggttgaagcaaatcttaggttggttatttcaattgctaaaaaatatacaaatagaggtctgcaatttttagatttaattcaagaaggaaatatagggcttatgaaagctgtagataaatttgaatatagaagaggatataaattctctacttatgcaacatggtggataagacaggcaataacgagatcaatagcagaccaagctagaacaataagaattcctgttcatatgattgagacaattaataaaattgtaagaactcaacgtcttattttgagtgagtttggtagagaagctacacctgaagaacttgcaaaaaaattgagaatgccccttgaaaaggtaagaaaggtactaaagatttcaaaagaaccagtatcgcttgagaaaccagttggagatgaagaagacagtagtttgggagattttatagaagatacaaaagcattagcaccacttgaaacagca

SEQ ID NO: 247975 - DNA, 295 bp, Unknown
  Bacterial polypeptide expressing nucleotide sequence isolated from the Sargasso Sea
ttggccaaagttcatttttattattcaacaatgaatgcaggtaaatccacttccctgctgcaatccaatcataattatgagataagaggtcataaaacttatttgtttactcctagagttgatgcggaaataaatgatggaaaaattcattccagaatcggactatccaaatcagcagaaatatttgacgaggactttgatttcaaaaagtattttttaagaaaatccaaagaaaatattgcttgcatattgcttgatgaagcacaattcctaactgaaattcaagtaagacaat

SEQ ID NO: 247976 - DNA, 565 bp, Unknown
  Bacterial polypeptide expressing nucleotide sequence isolated from the Sargasso Sea
tatgacgctaacacctataaattcgggttggatagaagttatatgtggtagcatgttctctggaaaaacggaagaattaatgcggagactcagaagagccgagattgcaaaaatgaatattgaaatttttaaacctaaaattgattctcgttttagctctgagcatattgttagccatgatcgatcaaaaatggaatctcatataatcgacgaccctaaagaaattcttaatatatctaaagattccgaagttataggtattgatgaaacacaattctttgcattttctatagtaaaggtctgtaaaaaattagctagtcaagggaaacgggtagtcgttgctggtctggacacagattatcgtggtctgccatttggcccaatgccagatataatgtgcgaagcagactatcttgataaacttagagctatatgtgtgaaatgtgggaatcccgcatcttatacacagcgtacatcgtcagattcactgcaggttgtaattggcgaacatgataaatatgaagcccgttgtaggaattgttttcaacctcctaagaaaaattga

SEQ ID NO: 247977 - DNA, 109 bp, Unknown
  Bacterial polypeptide expressing nucleotide sequence isolated from the Sargasso Sea
catgataaaaacgaggataaagtcactcacagttaagacatcttatgatgtatatgatattggaaaagattttgatgttattgggattgatgaggttcaattttttgat

SEQ ID NO: 247978 - DNA, 826 bp, Unknown
  Bacterial polypeptide expressing nucleotide sequence isolated from the Sargasso Sea
gcgcgcgcgctcgaggacgtggacaacgtcgtgcacgcgttcgacgtcgtgggcatcgacgagggtcagttcttcggcgacctcgtcgagttttgcgagcggtgggcgcggctgggcaagacggtcatcgtcgccgcgctggacgccacgttccagcgcaagcctttcaacgacgtcctctccctcgtacccatcgcggaggacgtcaccaagctcagcgcggtgtgcaacgcgtgcggatgcgacgcgtcgttcaccaagcgcgtgggatcatccgacgagacggtggagctcatcggcggcgaggggatgtacgtcgccacctgccgaggatgccacgacctccccgcgtcgtccttcccgcagaggggaacgaacacacacgctttggcggcggcgtcgacgcccaaggcggcggtcaacgcgtcacgaacaccccagaggcccccgtcgtcggcgtcatccgccgagcgcattcgcgtaagaaccgtcgcggaggggatgccggtcgcgggtctcgtgaagaccaagggcgacatggacaccgcgctcaaggcaggggccagcggggcggcgatgagcgagatcggggataagatgcggtcgttggccgtgatggactcgcccgccacgcccgaagacgctttcggaggcttcgggtacgagcgttccgtcggcgccacgcccggaaccgccgcgaggaagaaggcggccgggctgggcgccgcggcgatggcggccgccgcgggggtcgcggcgggcgggtcgcggtcaaagggcgcgggaggtcccggtcgatccccgtacaacgatctcgcgggcaggg

SEQ ID NO: 247979 - DNA, 864 bp, Unknown
  Bacterial polypeptide expressing nucleotide sequence isolated from the Sargasso Sea
aaaagttttttcaaaaatataagttagaatttaagaatatcagagataggctaatcgaaacaagtaacagactcggaatatcagtcaccgagtataaattaatggtaagtagaattcaaaaaggtgaaaaagagtctagaattgcaaaaaaagagatggtagaagcaaatttaagattagtaatttctatagctaaaaaatatacaaatagggggttacaatttttggatttaatacaagaaggaaacattggcttaatgaaggctgttgataaatttgagtataggagaggatataaattttctacatatgcaacttggtggataagacaagcaatcactagatcaatagcagaccaagctcggacaataagaattcctgtacatatgattgagacaattaataaaatcgtcagaacccaaagattaattcttagtgaatttggaagagaggctacgccagaagaacttgctaagaaactaaggatgccattggaaaaagtaagaaaggtactaaaaatatcaaaagaacctgtctcccttgaaaaaccagttggagacgaagaagatagcagtctaggagattttatagaagatacaaaagcattggcaccattggaacaagcgattaaatcaaacttaagtgaagcaactacaaaaatactttcaaccctaaccccaagagaagagagagttcttagaatgcgatttggtgtgggaatgaatacagaccatacattagaggaggtaggattacagttttctgttacaagagaaagaattcgtcaaattgaggcaaaggcactcagaaaactaaaacatcctagtagatctaaacagttaaaaagtttcttagaaagttaac

SEQ ID NO: 247980 - DNA, 328 bp, Unknown
  Bacterial polypeptide expressing nucleotide sequence isolated from the Sargasso Sea
atggcaaagctgtatttttactattctgctatgaacgcagggaaaaccactactctcgttcaatcagcatataattaccgtgagcgtgggatgaacacgctggtacttaagccgataatagatgagagattcatttattccgtcgtgcgttcacggattggtctggagactgatgcagttagtgttgaaggaaaagatgatttgttccttctaacagagaaatcgaataagaataatccactgagttgcgttttgcttgatgaagctcaatttttgacaaagtctcaggtattttctcttggtgagatagttgacaaattggatattc

SEQ ID NO: 247981 - DNA, 565 bp, Unknown
  Bacterial polypeptide expressing nucleotide sequence isolated from the Sargasso Sea
atggcactaacaccgataaattctggttggatagaagtgatttgtggtggcatgttttcgggaaaaaccgaagaattaatgcgaagattgcggagagctgaaattgcaaaaatgtccatttctatatttaaacctaaaattgattctcgttatgatgaaggtcatattgttagccataataaagataaaatgatgtcttttataattgataatccaaaagagataattaatgcctcagtaaatcatgatgtggttggtattgatgagacccagttctttgatcattcaattgtagatgtatgcagaaagctggcatctaataaaaagagagtaattgttgcaggcctagatacagattacaggggcctcccattcggaccaatgcctgacatgatgtgtgaggcggaatatgttgataaattaagagctatctgccttgaatgtggggatcctgcatcatatagccagaggacatccaaagattccgatcaagttgtcattggagaaatggataaatatgaggccagatgcagaaattgcttccaaccacctgagggtcattaaa

SEQ ID NO: 247982 - DNA, 830 bp, Unknown
  Bacterial polypeptide expressing nucleotide sequence isolated from the Sargasso Sea
aaataaaaaaatagttgttaaagaaataaaaactatttgtataggaaatatttatgtaggtggaactggaaaaactcctctttcgatctgtttatctaagttattagaaaatttaaattacaaaactgcatttataaaaaaaaaatataatgatcaaatagatgaacaaaaaatgttatcatcaagaggtaggctatattgtgaaaatgatagaataagtgccttaaaaaaagcaataagtgaaaaaaataatatagctatttttgatgatggtctccaagataaaaactttaagtatgatatttcttttgtatgttttaatgcagagaatttaattggaaacggacttatgctcccatcgggaccgttaagagaaaacttaaagaatttgaaaaactacgatggagtttttgtaaacggaaatggagaaaaaatttcagaaattaaaaatatcattcaaaatataaatccaaatttacctatttttgaaacacaatatgtacctttaaatatggaaaaatttgataaaaatcaaaattatatagctttttcaggaattggtaatccaaaatcttttctaaaaactttaaaaaattataattttaaaatcgtagaaaattttgattttccagatcattatgattattcaaatcaagatcttattatgattaaagaaactgctaaaaaaaataatgcaaaaataataactactgaaaaagattacaatcgattagataaatctgtctcgaatggtatagaatttcttgagataaatttagaaatttttaatgaaaaagaattaataaaactactgaataaaaaattatgaa

SEQ ID NO: 247983 - DNA, 828 bp, Unknown
  Bacterial polypeptide expressing nucleotide sequence isolated from the Sargasso Sea
tacaaagaatataataaacttattaaatatcaaaatgaaaaactagattgtttactaaattcaaaacagttttctatctcaaaagaaaaaaattataaaaaaattgtagatgatattttagaaaatataaaaactcttcaattatctccttctgttttggaggaattagttcaaaaacattatgttgaaaatcgtaaaataatttcactggagggtaatcttttaagacttgctttaaatgaaaaaatttcaagagatgaatttataaaattttatgtgggtaacgaaataaatcctaatttaaaaagtttcttagatacaaatgatacatggaaaaaattttttcaaaaatataaatcacagtttaaggatattagagatagattgatagaaattagtaataagttaggtatatcagtaacagactacaaattaatggtgagtaggatccaaaagggcgaaaaagaatccagaattgcaaaaaaagagatggttgaagcaaatcttagattagtaatttctatagctaaaaaatatacaaacagaggtttgcagtttttagatttaattcaagagggaaatataggactaatgaaggcggttgataaatttgagtatagaagaggttataaattttctacatatgcaacatggtggataagacaagcgattacaaggtcaattgcagatcaggctagaacaattagaataccagtccacatgattgaaactattaacaagatagtgagaacacaacgtttaattttaagtgaatttggtagagaggctacacctgaagaacttgcaaaaaaactaagaatgccactt

SEQ ID NO: 247984 - DNA, 352 bp, Unknown
  Bacterial polypeptide expressing nucleotide sequence isolated from the Sargasso Sea
aatggctaaggttcactttttttactcaactatgaatgctggtaaatctacagcgcttcttcagtcagctcacaattatcatgagactggaaatgaaacaattttatttattccaagagaagatgcagataagaattcaggtcttataaagtctagaattggtttaagcgcttcagcagtagtaattgattcaaaattaaagatttataattacgtgaaaaaagagctttcaaaaagaaaggttgatgcaatacttgttgatgaagctcaatttttgaagaagcatcatgttctcccaatgtgtaaagtgtgtgatgagttgcaaatcccccgtaatgtgctatggcataag

SEQ ID NO: 247985 - DNA, 471 bp, Unknown
  Bacterial polypeptide expressing nucleotide sequence isolated from the Sargasso Sea
catgacgatcaccgacccgaccctcgctgcgtttgccgctcccgcctcgcacgtaccgcgcgtgctcaccatcgccggttcggacagcggtggcggtgcgggcatccaggctgacctgaagacgtttgccgcgctaggctgctacggcatgtcagccatcacggccatcaccgcgcagaacacgctgggcgtgaccgcagtggaatcgctcacccccgacatcgtggccgcgcagatcgacgccgtggcaagtgacatcggggtggatgccgccaagaccggcatgctgggcacgccgcaggtggtagaggccatcctctctgcgctggaccgtcacccgatcgccaatctcgtcgtcgatccggtcatggtcagcaccagcggcgcgcaactcggcagcgatgccacggcacaggcgatggcgaagtggttgttcccgcgcgcgctgctcgtcacgcccaacctgccgga

SEQ ID NO: 247986 - DNA, 349 bp, Unknown
  Bacterial polypeptide expressing nucleotide sequence isolated from the Sargasso Sea
ttggctaaagttcactttttctactcaaccatgaatgctggtaaatccactgctttgcttcaatctaattataattatcacgaaagtggaatgcagactctattgtttcttccaaaaattgatgcagaaaaaaataatggaaagattcattcaaggattggattaaaagctgatgcaatatctgttgacagtgattttaatttttttaattacgtttctcaaaaacaaatggagaaaacaattgaatgcattttaattgatgaggttcaatttcttttaagagatcaaattaggcaaatatgcaaagtaagcgatgagttaaatattccagctatgtgttacggaatac

SEQ ID NO: 247987 - DNA, 284 bp, Unknown
  Bacterial polypeptide expressing nucleotide sequence isolated from the Sargasso Sea
acttgcatatggacttagaagtgacttcagaggtgaactctttgaaggaagtctgcacttgctggcttgggcagatgagttggttgagattaaaactatatgccactgcggtaaaaaagcaggtatggtattacgtcttgatgaaaatggggaaccagtaaatattggtgatcaggttaagataggtggcaatgacatttatgtttcagtatgcagaaaacactttaagcagcaacaggcagaaaacatattagatgacagcggccccaatttaagtagttaaa

SEQ ID NO: 247988 - DNA, 523 bp, Unknown
  Bacterial polypeptide expressing nucleotide sequence isolated from the Sargasso Sea
acattgctctatacaccacatattgatcatcaaaatggtaggcctgttattcactcaagaattggtattacagcggaagctattccctttactgaaaagtatgaattcctacatgaaatacaacaagaacatcaaaaagaaaaagtccattgcgttctaattgatgaatcacagtttcttactgcagaacaagtgttgcagctgacagttgtatgtgaccaactctcaattcctgtactctgttatggcatacgaacagattttcagggggagccatttgaaggcagtaaatacttattgtcttgggctgataatctgattgagatcaaaacgatttgccggagcggcaaaaaagcaacaatgaatgcacgtatagacgaagagggcaatcgcgtcaccgagggaaatcaagttgatgttggccatcactatgaggcattaagtcgaaaagaatttcagctcgaaactgtttccccaatacgccatgacactcgtatctattcaacaaataacagaaaataaa

SEQ ID NO: 247989 - DNA, 448 bp, Unknown
  Bacterial polypeptide expressing nucleotide sequence isolated from the Sargasso Sea
gttattaaacccagtatagataacagatactcgaatgaaaaaattataactcataacgatctgagccatgaatgttacgctatgaatagttgggctacagttttaaaaaaatttaattttgataaaagtgaagttgacatggttttcttagatgaaatacaatttatggaaacacatgatacactaagtaatgttgaggctattttaaataatggcatagatgtagtttgtgctgggcttgatcaagattcaagaggaaagccatgggaaacgtcttcaatgcttttaggattatctgataaaatagtaaaaatttatggtttctgtaatgtttgtggtcttgaagcaactaaaactttcagaaaaaccgagggtggcaaaagaactcaagttggagctgcaaatatttatgagccaaggtgtttaaaacattgggagccaagatagt

SEQ ID NO: 247990 - DNA, 497 bp, Unknown
  Bacterial polypeptide expressing nucleotide sequence isolated from the Sargasso Sea
aatgaatgaaattaatattgaaccatctatagatcttataattggaccaatgttcagtggaaaatctaccgaacttttgaggagattggttttatataaagaaatattttcccctgaacatgtattgtatgtaaattgtgacattgatgatcgatctaataaaaatttttctacacataattcattgattaaaaattcagaattggattttatgtctaaaaaagtaaatattaattttataaatgtgttgttagaaattgaaaatataaaagttattggaatcgatgaagctcaaatgtttacagatttatatacaatcgttatgaaattagttgaagaaaaaggtattaaagtaatactttctggtttgaattcagattgttatcgtaatgattttggagaattgtgcaaatttttctcaaaatgtgatacagtaacaaaattaaaccctttttgtaaagaatgtaaagattctgaaattattaaacctgccattt

SEQ ID NO: 247991 - DNA, 481 bp, Unknown
  Bacterial polypeptide expressing nucleotide sequence isolated from the Sargasso Sea
ccttactatttgttccaaagtttacgcagatgcaaatagtagcaaaattaaatctagaattggtttagatgcagatgcctactcttttgatcaagcattcaactttagaggctacttagatggagaattagcaaaaaaaactagctgcatatttgtggatgaggcccaatttttaacaaaattgcaagtgagagaactctgttatattgctgattgtcacaacatacctgtaatgtgttacggaataagaactgattttcgcggagaattatttgaaggtagttctgaattgttagcaatggcagatacattaaatgaactaaaaactgtctgtgattctggaaagaaggcgaccatggtagttcgactagacgaagagggaaatgttattactgagggtgatcaaattaaaatcggtggcaatgatacatataaagctgtaagtagatcactttttagaaaactcacaaaacttatctag

SEQ ID NO: 247992 - DNA, 823 bp, Unknown
  Bacterial polypeptide expressing nucleotide sequence isolated from the Sargasso Sea
ggcgagattgagaattcaggttgggaactttctctgaacacagcgttgattaatactagcaatcttcgttgggatgtcaatgttaatattgatggaaatgaaaataaaattactgaactaggagacgagggcaattggcagaaaatttatgccaatggtgtagatggaggtgattcagtttatgttgttggtggtcacagactaggctatccagttaatggattatggggaacattgataaccgaatgggacgcagcaaataaaactcataagcgttctgactatgctaagtatagaggtccttttttaccaaaaaataactattcattaggcaataccattacgtttggtgattttaggttttatgcgttgatttcgcaaacaaaaggtgcggtctttagcaatagcgatagaccatataaagttagacagggtggttctgatgaattcttgaaacattttgattttgataatctagatgcaaatggtaatccatcaagaactgctgcagctgattcaactttgaattattggagtctgacgggcgcatatgatagtagagatgctcttagattaagagagatttctttaacatattcagtgccaaatgctttatcatcgagaattggcctaggcgcaaccacgataacattctcaggtcaaaatgtatggtggtgggatgattgtcattgtgatgatcctgatatgcagtactcacagggcgctaattataatggtaatacttatggaacgaatgcttcgggatttttagctcagccgtccccgcgaacgtttttattaacatttaaaacagcactttaac

SEQ ID NO: 247993 - DNA, 930 bp, Unknown
  Bacterial polypeptide expressing nucleotide sequence isolated from the Sargasso Sea
tttatcctaccattggctgcaatggaaaatgaaattaaaccaaaggtattaaaaactatacatacgttaacaaaggaatataacaaactaatcaaataccaaaaagaaagacttcaaaatgttctggatggaaaaacttttagttcatcaaaagaaaaaaattatgaaaaaatagtaagttttattttagaaaatattaagtcgttacaattatcacctgcagtattagaggaattagttcaaaaacactatggtgaaaataaaaaaataatctctttggagggtaatttattaagattggctcttgatcataaaatacctagaaacgagtttttaaaattttatgttggtaatgaaataaatccaaacttaaagaaattcctagatacaaacgtagtttggaaacaattttttcaaaaaaataaagatgaatttaaaaatattagagaaagattaattgagataagtaataaacttggaatatctgtaactgaatttaaaaaaatgctaagcagaattcaaaaaggagaaagagagtcgcggattgcaaaaaaagaaatggtagaagcaaatttaagactagtaatatctattgcaaaaaaatataccaacagaggacttcaattcttagatcttattcaagaaggaaatattggtttgatgaaagcagtagacaaatttgaatatagaagaggatataaattttcgacctatgcaacttggtggataagacaagcaataactaggtcaattgcagatcaagctagaacaataagaataccagtacacatgatcgaaacaattaataaaattgttagaacccaaagattaattttgagcgagtttggtagagaagcaactccagaggaattagcaaaaaaattaagaatgccattagagaaggtcagaaaagtttttaaaatttcaaaa

SEQ ID NO: 247994 - DNA, 436 bp, Unknown
  Bacterial polypeptide expressing nucleotide sequence isolated from the Sargasso Sea
tatatccagaattggtttagaagctgatgcgatcattgttgataatgaatataatttttttaatgaaattgaaaaattaaatcataaggatataagttgtatatttgtagatgaagctcaatttttatcaaaaaagcaagttcaaagtttaggaaaagttgcagatgatctaagtatacccgttatgtgctatggcataagaacagattttcaaggtcaattatttgatggaagtaaagaattattagctatagcagataatcttaaagagttaaaaactatttgtagcatgtgtgagaagaaagcaacaatggtggtaagattaaatcaagaaggagaagttgttttagagggtgagaaaatagtaattggtggaaatgatatttacaaaactctttgtagaaaacattttaggcaactcacaaagttaatttaa

SEQ ID NO: 247995 - DNA, 583 bp, Unknown
  Bacterial polypeptide expressing nucleotide sequence isolated from the Sargasso Sea
tatggcaaaacttcatttcttttattcaacaatgaatgctggtaagtcaacagcccttcttcagtcaaaccataactatcttgagagcaatttatatacattgttattcattccagaacaaataggaaataaatcaaatggaaaaattatttctagaattggtttaaacgctgatgcaactgttatagatgacaaatatgatttttatgaagaaatcaagaaaagcaattttaaagatataagttgtatctttgttgatgaggctcaattcattacacagaatcaagttcatagcttaggaaaaattgcagacgaattaaatatacctgttatgtgctatggcattagaacagattttcaaggaaaattatttgtgggaagtcaggagttgttagctctagctgataatttaaaagaacttaaaacaatttgtagcatgtgcgataaaaaagcaaccatggtagtaaggttagataaaaatggtaaagttttacttgaaggagaaaaagttcttattggtggaaatgaaatatataagacagtatgtagaaagcactttagagagttaacaaaattaatttaa

SEQ ID NO: 247996 - DNA, 559 bp, Unknown
  Bacterial polypeptide expressing nucleotide sequence isolated from the Sargasso Sea
tatgataaaagaacaaaatagctttgggagtatagaggtaatatgtgggaatatgttcagtggaaagactgaagaactgataagaagattaagaagagcaaaaatagctagattaaatgtaaaaatatttaaaccaaaaattgatactagatatgaagaaggaaatattgtatctcataatcaactaaagctagagtcgttagcggtaaaatcaataaatgaattaaatgaccttgcaagtgatgccgatgtggttggtattgatgaggcccagttttttgatgaaagtataatagaaattgcaaaagatctttcttcaaagggtaaaagagtgataattgctggtttagatactgattttaagggggaaccttttggccctatgccaaaattaatgtgtgaagcagacttccttgataaacttcaagcaatatgtgttaagtgtggaaacccagcgtcgtatacccagagactatccaaggataataaacaagtagttattggggaaacagatatatatgaagcaaggtgtagacactgttatgaagggccaaattaa

SEQ ID NO: 247997 - DNA, 1646 bp, Unknown
  Bacterial polypeptide expressing nucleotide sequence isolated from the Sargasso Sea
gctgcagagcccttgccgagtcgaggttatcggccgactaccagctcgcctgttgccacttccaagtcattggccgccacaacggcgcatcgaccccgacatcagcggcttaacgacaactacaacccaagaggctggcggcgacgtgggaccggtcagccagccatcaccacaactgcagcgtgaagctctggaggactggtacggccgcttgcatcaagacggcagcttcccgcagcacggcgggcaagggcctgtggaggaaccgctggcttgcttgcgaatgctgtcgcgacactgtgatctgccatttcgccgcgatgttttgcgccgaatcttgcaggaccagcggcaacgctcgagcaacggtgagctaccagtgcaagcactagctgccatctgtgatctgttgggtctacgcaccactgcactacaacccaacagcgtcgaactgatcggccgcgctccttacccagccatcaccgtgactagtggaggccaccccctggtgctctgggaagcacgccagggcgaagtgcttgtcggcgatccacgccagggccagcaatggatggatgcgagcacactgctgatccaagccggtggagaacgcctacagcttctttgcgtagagcgcagttcaagcgcccctaaggctcgttttggcctgagctggtttgtgccagccatcaaaaagcaccgaggagccctcctgcaggtggtgatcaccagcttctttgtgcagttgctgggcttgttcaatcctctactgattcaacagatcatcgatgcggtgatcagccagggcaacttctccagcctgaatgtgcttggaacactgctagtggctatggctctagcgcaggccctgttgggttcgctgcgtacctatttgttctcagacaccacaaaccggatagatatttcattaggagcctcgattattcaccacctcctgcgcttgccgctcggatatttcgccaagcgaccggttggtgaggtgagtagccgcatcggtgagttggaaaagatacgcagcttcctcaccggcacagctctgacagtgctgctcgatgcagttttctcggtggtctacatcgcagtgatgttggtctattcggtgccactcacctttgccgctctgggcgtattgcccctcttcgtggggctaacgatgggcgtcgctcccatcattcgccgccagctcagacaacaagcggaagccaatgccaaggtccaaagccacctagtcgaaaccctctccggaatggagacggtcaagggccaaggcatggagctaccgagtgaatggcgctgggagcagctctatggcggccaaatcgaagccggctttcgcaacaccgtcaccagcacggcagcaggctcagccaaccaatttttggggcaggtctcaggcctgattgtgatttggctaggagccatgctggtgctggaaggcaagatgacccttggtcaactaatcgctttccgcatcctttcgggctacgtcaccagcccacttttgcggcttgccagcctctggcaaaacttccaagagaccgctttatcactcgagcgcctctccgacattgtcgatcacaaagaggagattgaaattgctggggaaggccttccacccctccccc

SEQ ID NO: 247998 - DNA, 1489 bp, Unknown
  Bacterial polypeptide expressing nucleotide sequence isolated from the Sargasso Sea
aatgttaaatgctctttcccagagtcctatcacggcacaacaattttttgaatggaataacaaactacaaaatgatgaaattctagtcagagaaattattgatattgacactaattatatggaggatgaagatacaggtcaaagtgcaaaacaaaagaaatcagatgacggaaataataaccaaaatagtgaggagagcaataacactaatgaagatgatgaattcaatccaacacttgcagcaatggaaactgaaattaaacctaaagttcttcaaaccgtaaataatttaactaaagactacaacaaacttataaagtatcagaaagaaaaattggattgcgtattaaacctaaaacagttttctatctctaaagaaaaaaattacaaaaaaatcgtagaagatattttagaaaacattaaaactttgcagttatcaccttcagtattagaggaattagttcaaaaacactatgttgaaaaccgtaagattatatctttagaaggcaatctgttgagatatgcattgaatgaaaaaatcccaagagatgagtttataaaattttatgttggaaatgaaattaatcctaatctgaaaacttttttaaatacaaatgaaatttggaaaaaattttttcaaaaatataaaacagaatttaaaaatattagagatagattaatagagataagtaacaaactcggtatttctgtaacagaatacaaattaatggtaagtagaattcaaaaaggtgaaaaggagtctcgtattgcaaaaaaagagatggtagaagccaatctaagattagttatatccatcgctaaaaaatatacaaacagaggtttgcaatttttagatctaattcaggaggggaatataggactgatgaaagctgtagataaatttgaatatagaagaggatataaattctctacttatgcaacatggtggattagacaagcgataacgagatctatagcagaccaagctagaacaataagaatacctgtccatatgattgagacaattaataaaattgttagaactcaacgtctaattttgagcgagtttggtagagaggctacacctgaagagcttgcaaaaaaattgagaatgccacttgaaaaggtaagaaaagtgttaaagatttcaaaagaaccagtatcgcttgagaagccggttggagatgaagaggatagtagtttaggagattttattgaagatacaaaagcactagcaccacttgagcaggcaattaaatctaacctaagtgaggcaacaacaaagatactttcaaccttaaccccaagagaagaaagagttttaagaatgaggtttggagttggtatgaatacggatcatactttagaagaagttggcttacagttttctgtaacaagagaaagaattcgtcaaattgaggcgaaggcacttagaaaattaaaacacccaagtcgatcaaaacaattaaaaagtttcttagaaagttaa

SEQ ID NO: 247999 - DNA, 197 bp, Unknown
  Bacterial polypeptide expressing nucleotide sequence isolated from the Sargasso Sea
ctggcctgggcagacgaattacgggaaaatcaaaacagtctgccattgtggtaaaaaggcaatcatgacggttcgtttgaatgaggaaggaaaaccctgcagggccggggaacagatccaaataggaggcaacgaaagttacgtgtcgatgtgccgaaggcatttcaaatcgagtttggggctatccgaaatttaga

SEQ ID NO: 248000 - DNA, 958 bp, Unknown
  Bacterial polypeptide expressing nucleotide sequence isolated from the Sargasso Sea
aatgattttaaaaaaaccaaaattttgggatttaaaaaaatcaaattttttagtgtatttgctatacccctttactatatttgttaagattaataatactatctcaagttttatccccaaaaaaaaatttactgaaataaaaactatatgcgttggaaacatatatgttggaggtactggaaaaacacctacaacattgtttctatataatcttttgaaaaaaatgaatattaatccagtgactgcaaaaaaattttataacaatcaaatagatgaacaaaaatttctaaaagataattcaaatttcatttcatatagtaatagagaaaaaatagttaaaaaagccattgaaatgaaatttgacacggtaatttttgatgacgggcttcaagaaaaatggatcaactatgatattaagtttgcctgttttgatagtgagaaatggattggaaatggtcatttgataccatctggtccattaagggaaaaaatgaatgttttaaaaaactatcatggaatatttttaaaaacagttaatgacgactcaaatttagattatatttataataagataagagaaataaatccaaacattgaagttttcgagtcaaatattgagataaaaaacattagtaaatttaatattgatagaaattatatcattttttcaggaattggaaatcccgatagtttcaaaaagttactacttaaaaataaattcaaaataattgaagaaattacttttccagatcattataattatcaagataaagatattttaaaaattatagataaagcaaattccaataatgcagcaatcattacaactgaaaaagatttcaaaagaattcctcaaaattttaaagaaaaaattagtttcttagaaataaacatgaaaatcaaagatgaaaataagcttgttcaatttttaaaaaccaagataaatgaaattaattaa

SEQ ID NO: 248001 - DNA, 553 bp, Unknown
  Bacterial polypeptide expressing nucleotide sequence isolated from the Sargasso Sea
catgaacgcaggcaagtccactgccttgcttcaatctaattacaattatcacgagagaggaatggagactctcttatttcttcctaaaattgatgcggaaaaaaataatggaaaaattcactctagaattggtttagtagctgatgctatttcggttgatagtaatttcaatttttttaattatgtttctcaaaaacaattagctaaatcaattagttgtattttaattgatgaagttcaatttctatcaagagaacaaattaggcaaatatgtaaagtaagcgatgagctgaacatcccagcaatgtgttatggaattcgtactgattttcagggcaatctttttgaaggaagctctgaattacttgcattagcagataactttattgaattaaaaacagtttgttactgtggaagaaaagcaattatggtagtcagattagatgaaaatggaaaaattgttaaagatggcgatcaaattaaaattggtggcaataattcatacaaggtattgtgcagaaaacattttagagaactgacccaactcatttaa

SEQ ID NO: 248002 - DNA, 565 bp, Unknown
  Bacterial polypeptide expressing nucleotide sequence isolated from the Sargasso Sea
atgacgctaacacctataaattcgggttggatagaggttatatgtggtagcatgttctctggtaaaacggaagaattaatgcgtagactcagaagagccgagattgcaaaaatgaatattgaaatttttaaacctaaaattgattctcgttttagctctgagcatattgttagccatgatcgatcaaaaatggaatctcatataatcgatgaccctaaagaaattttaaatttatctaaagattctgaagttgtaggtattgatgaaacacaattctttaaatattctatagtggaggtctgtaaaacattagcgagtgaggggaagcgggtagtcgttgctggtctggacacagattatcgtggtcttccatttggcccaatgccagatataatgtgcgaagcagactatcttgataaacttagagctatatgtgtaaaatgtgggaatcccgcatcttatacacagcgtacatcgtcagattcgctgcaggttgtaattggcgaacatgataaatatgaagcccgttgtaggaattgttttcaacctcctaagaaaaattgat

SEQ ID NO: 248003 - DNA, 171 bp, Unknown
  Bacterial polypeptide expressing nucleotide sequence isolated from the Sargasso Sea
aatttgaaagaattaagactgtttgtcattgtggaaggaaagctacaatggtattaagattaaatgccaaaggtgaagtggtatccgatggaactcagatagaaataggtggtgaagagaaatatgtatcagtttgcaggaagcattttattgaaaaaaatattggctaaa

SEQ ID NO: 248004 - DNA, 175 bp, Unknown
  Bacterial polypeptide expressing nucleotide sequence isolated from the Sargasso Sea
gatggcaaagctctacttccactattcgacgatgaatgcaggcaaatcaactttgctgcttcaagcgtcgcataactatcaagaaagaggcatgaaaacatacctcattaccgcgcaacttgataatagagctggtgaagggcaaattggatcaagaataggaattaatgcatca

SEQ ID NO: 248005 - DNA, 172 bp, Unknown
  Bacterial polypeptide expressing nucleotide sequence isolated from the Sargasso Sea
ttggctaaattatattttaattattcatctatgaatgctggtaaatcaacagcattgcttcaggcaagccataattatcaagagcgaggaatggatacactgataattacttctcaaaaggatgataggggtggaaaaggaaacattacttcaagaataggtctttctaaga

SEQ ID NO: 248006 - DNA, 583 bp, Unknown
  Bacterial polypeptide expressing nucleotide sequence isolated from the Sargasso Sea
catggcttcactgcactacaagtttgccaccatgaattcaggcaaatcgacccagctcattcaggcgcacttcaattatctggagcggggcatgcatcccttggccatgacacccgccatcgacgaccgcttcggggtcggggtgatcagtgcccgggtggggttggagctgagagtcgaggtattcagcgatagctgcgatctgttcgagatggtaaaagcccgccatgccgagcggcacatcgacgtgttcatcgtcgatgaagcccagttcctgaccaaggagcaggtctatcagctggcccgcatcgtcgatgagcaggacattccggtgatcgcctacggcctcaagaccgattttcgtggcgagctgtttcccggctcctaccacctgctctgcctggccgacaagttcgaggagctgaaaagcatctgctggtgcggcaacaaggcacacatgaactcccgggtcaatgaagccggccaggtgatgcgcgatggcgaacaggtggagatcggtggcaatgatcgttatgtctctctgtgccgcaaacactatctggaagggcgggccttcaaataa

SEQ ID NO: 248007 - DNA, 519 bp, Unknown
  Bacterial polypeptide expressing nucleotide sequence isolated from the Sargasso Sea
tctcaggaaagacagaagagcttattaggcgtatcaaaagagcaaagatcgctaatcaaaaaattaaagtctttaaaccagttattgactcaagaagtaaaaattttattgaatcacatgatgaaagtaagcttgaatgtatagaggtaaaatcatcaaatgaaattttaaaaaaaattgataattgtgatgttgttgctatagatgaagctcagtttttcgatgatctaatagtaccagtttgtaataaaattgcaaataatggagttagagttataattgctggtttagatatggactatcttggaaatccatttggtccaatgccaaatctaatggcaatttcagagtatgttacaaaagtacatgccgtttgtaaaaaatcaggaaatattgcaaattatagttacagaaaaaacaacaaaaaagatatcgttgttataggagaaaaagacaaatatgaacctttaagccgttcagtcttttacaaaaaaatgaataaaaataaaaaaatatgaa

SEQ ID NO: 248008 - DNA, 559 bp, Unknown
  Bacterial polypeptide expressing nucleotide sequence isolated from the Sargasso Sea
atgataagggaaatgaataattttggatgtattgaagtgatatgtggaaatatgtttagcggtaaaactgaggaattgataagaagattaaggagagcaaaaattgctagattagatgtaaaaatcttcaaaccaaagattgataccagatatgaagaaggtaatattgtatctcataatcaattaaaactaaagtcattcgttgtagaatcaataacagaaataaatgatcttgcaaatgatgcagatgtagttggcatagatgaagctcaattttttgatgatagcattattgatcttgtaaaagatttgtcttcaagggggaaaagagtgattatagctggtttggatactgattttaaaggtgtgccatttggaccgatgccaaaattaatgtgtgaatcagattatttagataaacttcaagcaatatgtgtaaaatgtggaaaccctgcatcatatactcaaagactttcaaaggataatagtcaggttgttattggagaaactgatatttatgaagcacgctgtagacattgctataaaaacccaatttaat

SEQ ID NO: 248009 - DNA, 676 bp, Unknown
  Bacterial polypeptide expressing nucleotide sequence isolated from the Sargasso Sea
aatgtcaggaaaaatagtaaattattatgatgactcaactgagtgcattggttttttatctcttccagaatcatcaaatctcgtcccactaattttggtagcacatacatggaagggcagatcagaatttgaagatcaaaaagtagttgcactcaatgatttagggtatgcagctttatccattgatatttttggaggcggtgtgaatggtcaaagtattgaagaaaatcaagcactgattgcgccctttgtgaatgataggcagctttttcgaaaacggcttataagtgcagttgaatttggtaaaacaattgaaagtgttgattcttcaagaattggattaataggattttgctttggcggccttgctgccatagagcttgctcgttcaggatatgagattgcaggctgtgtaagttttcatggacttttaaatcaatctagcgagccatttcaaaaggtaaaatctaaattattggttttacatggtgataaagatccaatggttacctctgaggaaatattagcattgcaagatgaaatgacagaatcagaagctgattggcagtttatcagctatggcaatacttatcatgcatttactaatccagcagctgacgatattgagatgggcacagtttataatccagagagtgacaagcgatcttggatcgca

SEQ ID NO: 248010 - DNA, 224 bp, Unknown
  Bacterial polypeptide expressing nucleotide sequence isolated from the Sargasso Sea
ccaaggtgaattatttgaaggcagtaaatacctgcttgcttgggcagataacttaaaagaaataaagacagtttgttggtgtggaagaaaagcaacaatggttgtccgtattaatgataaaaatgaaataatttctgaaggagaacaaatagaaataggcggcaatgaaagatacgtccctttatgcaggtcgcattttgtctcaaagaacttagggaattaaa

SEQ ID NO: 248011 - DNA, 541 bp, Unknown
  Bacterial polypeptide expressing nucleotide sequence isolated from the Sargasso Sea
tatggcaaaacttcattttttttattcaacgatgaatgctggtaaatctacctctcttttacagtctaatcataattatttagagagtaatcttaaaacacttctttttttacctgaagaaatttctaaaaagtctgattcaaatattgtttcaagaataggattaaaggcaaaagcaatatctataaatactgtatttaaattttatgaatatttggagaaagctgattataaaagcataaattgtattttcgttgatgaggctcagtttttgactaaattacaagtaagagatttaagtaaaattgctgatgaattaaatataccagtaatgtgctatgggataagaacagatttccaaggagagttatttgatggaagttctgaattattagcaattgcggataatttaaatgaattaaaaactatatgtagtgaatgtgataaaaaagctactatggtggtaaggctagatgaaaatggaaaggttattttagctggtgagaaaatattagtaggtggaaatgatatatataaaact

SEQ ID NO: 248012 - DNA, 319 bp, Unknown
  Bacterial polypeptide expressing nucleotide sequence isolated from the Sargasso Sea
atgacacttactcctaaatactctggatggattgaagtaatttgtggcccaatgtttagcggaaaaactgaagaattgattagacggttagttcgagcccaaattgctaaacaaaaagttgcaatttttaagcctgttaccgatgatagatatgatcaacagtatattgtttcacacaatcaaaaaaaaataaaatctatccaagttaaaagtgctgatgaaattcttgcgtttataaataaagctgtagtttttggaatagatgaagcacaatttttcgataaatcgatagtgacaacatgtaaaaaactagctaatg

SEQ ID NO: 248013 - DNA, 340 bp, Unknown
  Bacterial polypeptide expressing nucleotide sequence isolated from the Sargasso Sea
atggcaaaattatatttttattattctactatgaatgcaggcaaatcaactattttgctacaagctgcttataactatagagaaagaggaatggaaccctttctaattactgccaaactagataatagagccggacaacctaaaattgtaagtagaattggaattgaggggaaagccaaactatttgactcaagtgatgacttatttttaataataaaagaaaaaatcaaagaaaaaaaaataaattgtatacttttagatgaagctcaatttctatctaaaaaacaagtctggcaacttggaagagttgtagatgatctacaaatcccagttctttgct

SEQ ID NO: 248014 - DNA, 469 bp, Unknown
  Bacterial polypeptide expressing nucleotide sequence isolated from the Sargasso Sea
tatggcaaaacttcacttcttttactcaacaatgaatgcaggtaaatcaactgccttattgcaatcaaatcataactatctagaaagtggtttaaaaactatgttatttattcctcatgaaataggtaacaaatcaaaaggtaaaataatatcaagaattggtttagaagcagatgcagttattgttaataaagattatgacttttatatagaagttaaaaaaactaattttaaagaaattagttgtatttttattgatgaggcgcaatttctatctagaaatcaagttcacaacattgggaaaattgcagatgaattgaatattcctgtaatgtgttatggcattaggactgatttccagggaatgctttttgaaggtagtcaggaactcttagccattgcagataatcttaaagagctaaaaaccatttgtagtgaatgtgataaaaaggcaacaatggtagtaaga

SEQ ID NO: 248015 - DNA, 583 bp, Unknown
  Bacterial polypeptide expressing nucleotide sequence isolated from the Sargasso Sea
atggcttcactgcactacaaatttgccaccatgaactcaggcaaatcgacccagctcatccaggcccacttcaactatctggagcgtggcatgtatccgctggccatgacgcccgccatcgacgatcgcttcggtgccggcgtcatcagtgccagggtcggtcttgagctgaaagtggaggtgttcagcgacagctgcgatctcttcgagatggtcaaggcgcgccacgcaaagcggcacatcgatgtcttcatcgttgacgaggcgcagttcctgacccgtgagcaggtctaccagctcgcccgcatcgtcgacgagcaggacattccggtgattgcctatggtctcaagaccgattttcgcggcgaactgttccccggctcctaccacctgctctgtctggcggacaagttcgaggagctaaaaagcatctgctggtgcggcaacaaggcccacatgaactcgcgggtcaacgaggcggggcaggtgatgcgcgacggtgagcaggtggagatcggcggcaacgatcgctatgtgtcgctctgccgcaagcactatctggaagggcgggccttcaagtaac

SEQ ID NO: 248016 - DNA, 320 bp, Unknown
  Bacterial polypeptide expressing nucleotide sequence isolated from the Sargasso Sea
atccaaagcacaggtacgccagctgactgatgtggtagatgaattaagggtgccggtactggcatttggtctgcgtactgattttctcggtgaaacctttgccggcagcgaggcgctgttggcctgggccgataaactgatagagctgaaaacaatatgccactgcggccgtaaggcgaactttgtcgtgcggttggatgaaaatggccaggcagcgacggcgggctcacaagtgcagattggcggcaacgaaagttatgtatcaatgtgccgtgcgcattttaaagcgctggtatggcaggataaacaaacggagtagc

SEQ ID NO: 248017 - DNA, 379 bp, Unknown
  Bacterial polypeptide expressing nucleotide sequence isolated from the Sargasso Sea
cctctgagttgtgttttacttgatgaagctcaatttttgtcaaagtctcaagtattttctctgggtgagatagttgatagattagagattcctgtacttgcatatggacttaggagtgacttcagaggagaactctttgaaggaagtatgcacttgcttgcttgggcagatgagttggttgagattaaaactatatgccactgcggtaaaaaggcaggtatggtattacgtcttgatgaaaatggtaaaccagtaaatataggtgatcaggttaaaataggaggcaatgacatttatgtttcagtatgcagaaaacactttaagctacaacaggccgaaaacatatcagatggcaccggccccaatctaagtagctaaa

SEQ ID NO: 248018 - DNA, 583 bp, Unknown
  Bacterial polypeptide expressing nucleotide sequence isolated from the Sargasso Sea
ttggcaaaagttcatttcttttattcaaccatgaatgcaggtaaatctaccgccctgcttcaatcaaactacaattacaatgaaagagggatggataccctgctgtttcttcccaaagcagatgcagatgcaaataaaaataagattcactcaagaattggtttgattgctaatgcgatctcagcagacactaattttgatttttttgagtatgttaaggacttcaaaaacaaaaaaaaagttgatgcaatactgattgatgaagttcaatttcttacaaaagatcaggttaggcaaatttgtaaaatcagcgatactcttaatatcccatcaatgtgttacggaatcagaactgattttagaggagagctttttgagggtagctcagaattacttgcacttgcagataatctgatcgagctaaaaactgtatgcgactgcggaaggaaggcaaccatggtggttcggttggatgaatctggtaatgtgattacagcaggtaaaaaaatacagataggcggaaatgatacttacaaagtttattgcagaaaacacttcagggaattaacgaacttaatttaag

SEQ ID NO: 248019 - DNA, 376 bp, Unknown
  Bacterial polypeptide expressing nucleotide sequence isolated from the Sargasso Sea
atataacctactaaaatcaaagcaaaaaagctctccaattgcgtgtgtctttattgatgaagctcaattcttaaccaaggaacaagtttggcaactggcaagagctgttgatgagctctttctaccagttttgtgttacggactaagggttgactttcagggtaatctatttccaggatcatctgcactacttggcttagcagatgaattaaaagaaataaaaacaatttgccattgcggaaaaaaagctactatggtggtaagaaaatccactaacaacaaacctattaaagatggatctcaaatacagatcggaggaaatgatttgtatgagtccctatgtagaatacactggcgccaactaatggaaagctag

SEQ ID NO: 248020 - DNA, 571 bp, Unknown
  Bacterial polypeptide expressing nucleotide sequence isolated from the Sargasso Sea
aactttgacaaacaaactggatggattgaggttgtgtgtggttcaatgttttcgggcaaaactgaagaattaataagaagaattcgtagagcaaaatatgcaaatttagatgtgataatttttaagcctaaagttgataaaagagataaaaaggacaacgtagtttctcacgacgacacaactattgattgtaaaacgataaagcgtgcatctgaaatctacaaaattgtgaaagactctaaagttattggaattgatgaagcgcagttcttcgacgatgaaattgttgaggtctgtaatagcctagcaaatcatggggtcagggttattgttgctggacttgacatggattacaagggtgttccttttaaaaatatggccaacctaatggcaaccgcagaatatgtaaccaaggtacacgcaatatgtcctaagacgggtggtcttgctcactatagttacagaaaaacaaaaagtaaaaaaagaatcctacttggaaagggtgatgaatacatgcctttaagtagagctgcttattttaaaaaaaagaataaaaaaagtaagggttgaa

SEQ ID NO: 248021 - DNA, 435 bp, Unknown
  Bacterial polypeptide expressing nucleotide sequence isolated from the Sargasso Sea
tatggcaaaacttcattttttttattcaacaatgaatgctggtaaatctacttcactgcttcagtctaatcacaattatttagaaagtaacttaaaaacacttttatttttaccaaaagaaatttcagataaggctgattcaaatattgtctctagaattggcctaaaagcaaaagcaatttccatagacaatgagtttaaattttatgaatacgtcaaaaatattgaatataagaatataaattgtatttttgttgatgaggcacaatttttaacaaaaaaacaagtaagaaacttaagcaaaatttcagataaattagatataccggtgatgtgttacggcattagaaccgattttcaaggtgagttgtttcatggtagctctgagttattagccattgcagataatctcaatgaattaaaaactatatgtag

SEQ ID NO: 248022 - DNA, 506 bp, Unknown
  Bacterial polypeptide expressing nucleotide sequence isolated from the Sargasso Sea
aaccggaatgcatactattttgttcattccgaaagaagatgtctctaaaaattcaggctctataaaatctcgaattggattgaaagctccagctgttgttcttgacaaaaatatgaatcttttcaattttgtaaaagataaggatgccgttcaaaaaattgatgcagttctgatcgatgaagttcagtttttaaacaaaaaacaagtcaatgaggtttgtaaggttgctgatcttttagatattcccgttatgtgctatggcattagaacagattttagaggagaattatttgaagggagttcttctttgcttgcgttggctgacaagttagaagaattaaaaaccatttgtactgaatgcaataggaaggcaactatggttattcgtttggataaagattcaaaagtagttacatctggtgaacaaattttaattggtggaaacgaaacctataaagttctttgtagaaaacattttaacgaaatcacaaaacttctagattagt

SEQ ID NO: 248023 - DNA, 571 bp, Unknown
  Bacterial polypeptide expressing nucleotide sequence isolated from the Sargasso Sea
tatgatttgccgttttcttcagttaattttaggacctatgttttctggaaaatcaaccgagttgatacgaagactcaaaagatacgagattgcaagatatagttgtttgatagtgaagtatgcaaaagatgttagatatgatcatgaatccattgcaacccatgatcaacagactttaaaagcaatgagtacagacaagctcaaggatctgaaagtcaaattggaagactacgatgtcattggcatagacgaaggacaattttttccggatgtagttgaatttagtgaagaaatggcaaacaaaggcaaaaccgtagttattgcagctcttgacggaacattccaacgtaaagcatttacttccatccttcagttggtgcctttggctgaacatgtcatgaagctaaatgcagtctgtatgaactgctttggagaagcctctttcaccaaaagaatttctgctgataaagaggtatttatctacaaactgttaatgtctgaactacctgtgtatacaggagttatgttagcatttgaggcagtggtaaatattctaccacagaatcagtaa

SEQ ID NO: 248024 - DNA, 362 bp, Unknown
  Bacterial polypeptide expressing nucleotide sequence isolated from the Sargasso Sea
aatggcaaagctttactttaattattcttctatgaatgccggtaaatcaactatgcttttacaggccaatcataactacattgaaagaggcatgaacccaagaatatatacttctgacttagataatagatttggaaaaggagaaatagtttcacgaatagggctgaaagcaaaatcaaatatattcacaagtaaaacagatatatacaaggatatcttaaatttttgtaaaaactctagtgtagactgcgtattaattgatgaagctcagtttctaactcaaaatcaagtaagccagttgagtaaggttgtcgatgaattagatattcccgtattaacttttggtattagaacagattttc

SEQ ID NO: 248025 - DNA, 304 bp, Unknown
  Bacterial polypeptide expressing nucleotide sequence isolated from the Sargasso Sea
gcaagagttgtcgatgatctccaaatcccagttctttgctatggtttaagggttgatttccaaggagaattatttcctggttctcttgttctattgtctatagctgacgaaatgagagaaataaaaaccatttgtcattgtggaaggaaagcaacaatggttgcacgattaaataaagacggtaaagtaataactaaaggagagcaaattcaaattggcgggaatgaaagttatatatcactatgtaggcttcattggcgtgaagaaataaaaaatgctaatataaacgactcccaattttagt

SEQ ID NO: 248026 - DNA, 555 bp, Unknown
  Bacterial polypeptide expressing nucleotide sequence isolated from the Sargasso Sea
catggccaagttgtattttcattactcctcgatgaatgcaggaaaatcgacggctttattacaagcccatcataattacggggagcggggaatgaaaacttttttgctcaccgcttacctagatgaccgacatggagtgggggtgatccgttcaaggattggaattcagcaggaagccactccttttcgtaaaggggataatctgctggatgtagtaagaaaaaaaaagcaagaggattcactatcctgcgtcctggtggatgaagcacaatttctgagcaaagaacaagtgggacagctcgcagaagtggtagataaggaaggcattccggttctggcttttggaatccgaacggatttcctgaccgagccttttgagggaagccaatacttgatggcttgggcagatgagatcaaagagattaagacgatttgtcactgcggtaaaaaagcgactatgaatgcccgaattgatagttccggaaagatggaaatggcaggggatcaaatcgaaattggcgggaatgaacggtatggttcactatgccgtgcttg

SEQ ID NO: 248027 - DNA, 583 bp, Unknown
  Bacterial polypeptide expressing nucleotide sequence isolated from the Sargasso Sea
ttggcaaaagttcattttttttactcaaccatgaatgcaggcaagtccactgccttgcttcaatctaattacaactatcacgagagaggaatggagactctattatttcttcctaaaattgatgcagaaaaaaataatggaaaaattcactctagaattggtttagaagctgatgctgtttcagttgatgttaatttcaatttttttaattatgtttctcaaaaacaattagctaaatcaattagttgtattttaattgatgaagttcaatttctatcaagagagcaaattaggcaaatatgtaaagtaagcgatgagctgaacattccagcaatgtgttatggaattcgtactgattttcagggcaatctttttgaaggaagctctgaattacttgccttagcagataactttattgaattaaaaacagtttgtcactgtggaagaaaagcaatcatggtagtcagattagatgaaaatggaaaaattgttaaagatggtgatcaaattaaaattggtggcaatgattcatacaaggtattgtgtagaaaacattttagagagctgacccaacttatttaaa

SEQ ID NO: 248028 - DNA, 613 bp, Unknown
  Bacterial polypeptide expressing nucleotide sequence isolated from the Sargasso Sea
atggctaaactgtatttttactattctgccatgaacgcaggtaaaacgactactctcgttcaatcagcatataattaccgggagcgggggatgaacacgcttgtactcaaaccggaaatagatgagagatatagttcttcaattgttcgttcacgaattggtctggagactgatgcaaaaactattggtgcaaaagataatttgttccttctcgtagagaaaacaaataggaaaaatccactgagttgtgttttacttgatgaagctcaatttttgacaaagtctcaggtatattctctaggtgaggtagttgataaattagagattcctgtacttgcctatggacttaggagtgacttcagaggagaactctttgaaggaagtcttcacttgctggcttgggcagatgagttagttgagattaaaactatatgccactgtggtaaaaaagcaggtatggtattacgtcttgatgaaaatgggaaccctataaatataggcgatcaggttaagataggtggcaatgacatttatgtttcagtatgcagaaaacactttaagcagcaacaggcagaaaacatattagatgacagcgtccccaaatttaagtaat

SEQ ID NO: 248029 - DNA, 499 bp, Unknown
  Bacterial polypeptide expressing nucleotide sequence isolated from the Sargasso Sea
tttggctaaagtacactttcattactcaactatgaatgcagggaaatcaacctccctcttacaatcaaaccataactacgaagtacgaggattaaaaacttatctttttacacctaaggcagatgcagatatgtatcacggcgctatacactcacgactaggtttagaaaaaaaggccaatatatttgaagagtcttttgaatttgataagtattttcttgataaaaaagatgaaaagatagcctgcatattggttgatgaagctcaatttttgacaagcaaacaagtaaaagaattatgtttagtatgcgataaattaaatatacctgtcatgtgttatggcattagaacagacttcaggggcgatctattctcaggtagtgcagccttgttggcatatgccgatactttagttgaattaaagactatatgtgaatatgaaggctgtgcgcgaaaagcaactatgatagccagatatacagatggaaaaatagtcaca

SEQ ID NO: 248030 - DNA, 604 bp, Unknown
  Bacterial polypeptide expressing nucleotide sequence isolated from the Sargasso Sea
aatgtttcttgaaaatactttgaaatacggcaaacaatttggatggattgaagtagtctgtggatcaatgttctcagggaaaactgaagaattaattagacgtctaaaaagggcaaaatttgcaaaattaaaggtggctatttttaagccaagtatcgacacaaggcacaagaagtcaaaaattgtatctcacaacaaaaacaagattaaatgtaaaactgtgaaaacagctaaagacatctataagctaggtcataaatgtgatgtagttggtatagatgaagcccagttttttgatgatgggattattgaagtctgtaacgggcttgctaatagtggtgtgcgagttatagtagctggtctagatatggactacacagggaagccttttggcccaatggcaaatttaatggcaactgctgaatatgtcactaaggtacatgccatatgttctaagactgggggtcttgcacagtatagttatagaaaagccaaaagtgatgagttaattatgcttggtgaagaacaagaatatgagccattgtgtagggcaactttttttaaacgtatgacaaaaagagccaaaaaaataactgtttctgag

SEQ ID NO: 248031 - DNA, 286 bp, Unknown
  Bacterial polypeptide expressing nucleotide sequence isolated from the Sargasso Sea
atggcgcaactttatttttattattcagcaatgaatgcaggtaaaagtacaacactcctgcagtctgcacataactacgaggagcgcgggatgcgaacgcttctctacacttcgatcattgacgacaggagtggccgtgccgttattcactcacgcattggcattacggcggaggccactgcctttagacaagattatgattttttccagtctgtgaaacaggaagacgaaaaggaaaaagttcattgcgtgttgattgatgaagcccaattttctcactcctcag

SEQ ID NO: 248032 - DNA, 556 bp, Unknown
  Bacterial polypeptide expressing nucleotide sequence isolated from the Sargasso Sea
aatgaatgctggcaaatcgacagttttgttacaagcttcacataattatggtgagaggggtatgaaaactatgttatttactgctgaattagataataggtctaaagttggaaatatatcttccagaatagggttaagtgaaaaagcttcaacatttaataatgataataatcttttcagctcagtagaaaaaagattaaaaaaagataaaatatcatgtgtgtttgttgatgaggcacaatttttaactgacaaacaagtttggcaactttcagatgtagttgaaatacttaaagtccctgttatgtgttttggtttgagaactgactttcagggcaaattatttgaaggcagttcaactttattagcgattgctgatgaattaaaagaaattaagactatctgtcactgtggcaagaaagctaatatggttgttagggttgacagtaatgggaaagttcttaaagaaggcgctcaaattgaaattgggggtaatgaaaaatatatttcattgtgcagaaaacactggaaaaatgagatggaaaataatagataa

SEQ ID NO: 248033 - DNA, 298 bp, Unknown
  Bacterial polypeptide expressing nucleotide sequence isolated from the Sargasso Sea
tttggctaaagtacactttcattattcaactatgaatgcagggaaatcaacctccctcttacaatcaaatcataactacgaagtacgaggattaaaaacttacctttttacacctaaggcagatgcagatatgtatcacggcgctatacactcacgactaggtttagaaaaaaaggccaatatatttgaagagtcttttgaatttgataagtattttcttgataaaaaagatgaaaagatagcctgcatattgattgatgaagctcaatttttgacaagcaaacaagtaaaagaatta

SEQ ID NO: 248034 - DNA, 589 bp, Unknown
  Bacterial polypeptide expressing nucleotide sequence isolated from the Sargasso Sea
aatggctaaggttcactttttttactcaactatgaatgctggtaaatctactgcactactccagtcagctcacaattaccatgagactggaaatgaaacgattttatttattccaagagaagatgctgataagaatttaggtcttataaaatctagaattggtttaagcgcttcagcggttgtaattgattcaaaattaaagatttataattacgtaaaaaaagagctttctcaaagaaaggttgatgcaatacttgttgatgaagctcaatttttgaagaagcatcatgttctgcagatgtgtaaagtatgtgatgagttgcaaatccccgtaatgtgttatggcataagaactgattttaggggagagttgtttgaaggaagtgcggctcttttggcattagcagacaatttaatagagctaaaaacggtatgcaatgtatgcagtagaaaagcaactatggttgttagacttgatgagagtggaaaggttattactgaaggttcaaaagttcaaatcggcggaaatgatgtatacagagtattgtgtagaaaacactttaacgaggcaacaaaactattagattag

SEQ ID NO: 248035 - DNA, 376 bp, Unknown
  Bacterial polypeptide expressing nucleotide sequence isolated from the Sargasso Sea
gattacgtttataaacatcgatctgatgatttaagttgcattttagtagatgaagctcaatttttatcaaaaaaacaagtcagagagttaggtaaaattgcagatgaattaaactatccagtaatgtgctatggtatcaggacagactttcaaggtgaattatttgagggtagttctgaattattagcagtaagtgataatttaatagaactaaaaaccatttgtgcattttgtaatagaaaagcaacaatggtagttcgaacagatgataaaaataatattattactgaaggcaataaagttgaaattggtggtaacgagatttataaatcagtatgcagaaaacactttagagaacttacagggttaatttaat

SEQ ID NO: 248036 - DNA, 575 bp, Unknown
  Bacterial polypeptide expressing nucleotide sequence isolated from the Sargasso Sea
aatgtttttagaaaactccgtacatagaaataaacaatttggttctatagaagtaatctgtggctcaatgttttctggtaagacagaagagttaatcagaaggctcaaaagagcaaaaattgcaaatcaaaaaattcagatttttaaaccctctttagactctagaaataatgaatatatagagtcccatgataaaaacaggataaagtcactcacagttaagacatcttatgatgtatatgatattggaaaagattttgatgttattgggattgatgaggttcaattttttgatgacgaaattgtttctgtttgtaattcgcttgcaaacaatggggtaagagtaatagctgctggacttgatatggactatttgggaaatccatttggcccaatgcctaaccttatggcaatagcagaatatgtaacaaaagttcatgcaatatgttctaaaactggaaatattgctaactatagctatagaaaaaataaagaagactcaataatactaataggcgaaaaagatgaatatgaagctctgagtagagaaatcttttatgaaaaaatggatagta

SEQ ID NO: 248037 - DNA, 604 bp, Unknown
  Bacterial polypeptide expressing nucleotide sequence isolated from the Sargasso Sea
catggccaagctctattttaactactccacgatgaatgcgggcaaatccacggttctgctgcaggcgtctcacaactatcgcgaaaacaagatgcagacctacctgctcaccgcgcgcgtcgatgaccgcgcgggcaccggtcggattgcatctcgtatcggcatcagcgccgaggcggacatcttcgccgcagaagacaacctgtttgagaaaatctcaagccgcctgaaacagggatccgtcgctgcgatttttgtcgatgaagcccagttcctgacccgcgaacaggtctggcaactggcccgtgtggtagatgatctgcgtgttccggtgctggcctttggtctcagggtcgattttcaaggcaacctctttcccggttccgccaccctgctggcgctggcggacgaaatgcgagaagtccgcaccatttgccattgcggaaagaaagccacaatggtggtccgccaagacgatcagggcaatgtgttgaccgaaggcgatcaggttcagatcggcggcaatgaaacctacgtctcactctgccgccgccactggcgcgctgcaatgggcgatctcccagcgtcatcagacggcaactag

SEQ ID NO: 248038 - DNA, 365 bp, Unknown
  Bacterial polypeptide expressing nucleotide sequence isolated from the Sargasso Sea
tatgcatcaaaaacctatagaattaggttggatagaggttatctgtggaagcatgttctgtgggaaaactgaagagcttttaagaagattaagacgagcaaaaattgcaaatcttaatataattgcgtttaaggcaaaaatagataacagatacagtaaagataagatcgtcagccatgacagaaattctttagaatcaattgctattgacaatgctgaagacttaatgaaacttggtcgcaattatgatgttgtaggtatagatgaagcacaattttttgataacagcctgttgcttgcttgtaaaactcttgcggaaaatagaactagagttatagttgctggtcttgatactgattataagg

SEQ ID NO: 248039 - DNA, 589 bp, Unknown
  Bacterial polypeptide expressing nucleotide sequence isolated from the Sargasso Sea
atggctaaggttcactttttttactcaactatgaatgctggtaaatcaaccgcacttcttcagtcggctcacaattaccatgagactggaaatgagacaattttatttattcctagagaagatgcagataagaattctggtcttataaagtctagaattggtttaagcgcttcagcagttgtaattgattcagaatttaaaatttatgactacgtaaaaaaagagctttcgcaaagaaaggttgacgcaatacttgttgatgaagctcaattcttaaaaaaggatcatgtcctgcaaatgtgtaaagtatgtgatgaattacaaatccccgttatgtgctatggaataagaactgattttagaggagagttgtttgaaggaagtgcgtcacttttggcattagcagataatttaatcgagctaaaaacggtatgcaatatgtgcagtagaaaagcaaccatggttgtaagacttgatgaaaatggaaaggttattactgaaggttcaaaagttcagattggtggaaatgatgtatacagagtattgtgcagaaaacactttaatgaagctacaaaactactagattaaa

SEQ ID NO: 248040 - DNA, 664 bp, Unknown
  Bacterial polypeptide expressing nucleotide sequence isolated from the Sargasso Sea
ctgcgtgtacttgacgaaattggttcggtatctcgcgcagcaggaagagcgagagtatgtacatcatcagtctattctgctcactcgacgatttctggcgaaatccacctcatactcgggccgatgttcgcgggcaagacgaccgcactcttggatcaaattgcgcgggaagaggctcacggtatgtccgtcactctcgtcaagtccagcaaagacaacagatattcgcacgatgaaattgtctctcacgacggaacatcacgacgatgcaacgcagttgctgagcttagtgatctccgcggtatcattggcgaggagcagtggaatggagctcacgtccttgccatcgacgaggcccagttcatcccagacttagtgtctttctgtgttaacgcagctgacgagcatcagaagaaagtgatcgttgcagggcttgacggtgacttccgtcgccagcgattcggtgaggttctagacttactccccctgtgcgatactgtcaccaagcttacagcgcaatgtggcgtttgttctgttcgacctgcgctgttttcgctgagaactacaggggacacaagcacacaagaactggttgggggtgccgactcgtacaaaccagcttgtcgcttgtgttacgtgaaggctacttccgggaatgagtaaa

SEQ ID NO: 248041 - DNA, 565 bp, Unknown
  Bacterial polypeptide expressing nucleotide sequence isolated from the Sargasso Sea
ttttattcaaccatgaatgcaggtaagtcaactgccctacttcaatcaaaccataactattcagaaagtaatttaaaaacattattatttattcctaaagacttaggagataaatcagatggaaaaattatatccagaattggtttagaggctgatgcgatcattgttgataatgaatataatttttttaatgaaattgaaaaattaaatcatgaggatgtaagttgtatatttgtagatgaagctcaatttttatcaaaagagcaagttcaaagtttaggaaaagttgcagatgatctaagtatacccgttatgtgctatggcataagaacagattttcaaggtcaattatttgatggaagtaaagaattattagccatagcagataatcttaaagagttaaaaactatttgtagcatgtgtgagaagaaagcaacaatggtggtaagattaaatcaagaaggagaagttgttttagagggtgagaaaatagtaattggtgggaatgatatttacaaaacactttgtagaaaacattttaggcaactcacaaagttaatttaga

SEQ ID NO: 248042 - DNA, 545 bp, Unknown
  Bacterial polypeptide expressing nucleotide sequence isolated from the Sargasso Sea
gtggattgaagtcatatgtggttctatgttttcaggaaaaacagaggagttaattagaagagttaaaagggccaagcttgctaagcaaaaaataaaaatttttaaaccaaaacaagatgtaagatatagtaagaaaaaagttacatctcatgataataactctatcaagtctaagccagttaaatcatctgaaaagatattagagctatccgtaaaatgtgatgttataggtatcgatgaagcacagttttttgatgatggtataattgaagtttgtaataaacttgctaatgctggtaagcgtgttatagtagctggcttggatatggattatagaggtaacccttttggtcctatgccaaatttacttgctatcgctgagtatgtaaccaaagtacatgctatatgtacaagatctggtaagatggcgtcttatactcataggattgtgaagagcgaagaccttgttctactgggagatactagaagatacgaggctttaagtagaagagaatttataaaagccaaacaaaagaaaaaataaa

SEQ ID NO: 248043 - DNA, 394 bp, Unknown
  Bacterial polypeptide expressing nucleotide sequence isolated from the Sargasso Sea
atgtttttagaaaactccttacatggaaataaacaatttggttctatagaagtaatctgtggctcaatgttttctggtaagacagaagagttaatcagaaggctcaaaagagcaaaaattgcaaatcaaaaaattcagatttttaaaccctcattagactctagaaatagtgaatatatagagtcccatgataaaaacaggataaagtcacacacagttaagacatcttatgatgtatatgatattggaaaagattttgatgttattgggattgatgaggttcagttttttgatgacgaaattgtttctgtttgtaactcacttgcaaacaatggggtaagagtaatagctgctggacttgatatggactatttagggaatccatttggcccaa

SEQ ID NO: 248044 - DNA, 358 bp, Unknown
  Bacterial polypeptide expressing nucleotide sequence isolated from the Sargasso Sea
aatgatccagaaacctaaaaatatgggctggattgaagtaatatgtgggagcatgttttcgggaaaaactgaagaattaatacgcagacttaggcgcgcaaggattgcgcagctacccatctcaatatataaaccgaaaattgactcacgatatagtgaaagtcatatcgttagtcacaataaatctgagatgcaatctcagatagttaagaatgcagaagaagtacttacgctttctaaaaatgataaggttgttggcatagatgaagctcaatttttcgataattctcttatcaaagtttgtaaaaaacttgcctcagagagaaagcgggtgattgttgcaggattagacagagat

SEQ ID NO: 248045 - DNA, 562 bp, Unknown
  Bacterial polypeptide expressing nucleotide sequence isolated from the Sargasso Sea
tatgcatcaaaaacctatagagttaggttggatagaggtgatttgtggaagcatgttctgtggaaaaactgaagagcttttaagaagattaagacgtgcaaaaattgcaaatcttaatgtaattgcgtttaaggcaaaagtagatgacagatacagtaaaaatagaatcgtcagccatgacagaaattctctagaatcaattgctattgacaatgctgaagacctaatgaaacttggtcgcgattatgatgttgtcggtatagatgaagcacaattttttaacgatagccttttgcttgcttgtagagctctagcgaaaaatagaactagagttatagttgcaggtcttgatactgattataaaggccagccatttggccctatgccattaatcatgtgcgaatctgattatttagacaagctgactgcaatctgtatgaaatgcggaagagatgctacatacacccagagaattatctcaaatactcaacaagtcgtcataggtgagactgatgcttatgaagcacgttgtagaaaatgtttcattcctccaaaaatataa

SEQ ID NO: 248046 - DNA, 552 bp, Unknown
  Bacterial polypeptide expressing nucleotide sequence isolated from the Sargasso Sea
aatgggtagtattgaagttatatgtggctctatgttttccggaaaaactgaggagttaattaaaagaatcgaaaaaattaacaatacaaatcttaattacaaagtctttaagcctgagattgataaaagaagcggggagagtaaaattaaaactcacaacaataaaagtattgatgcaattaatattaagaatgttagcgaaattattaaccaatccaatcattgtgatgtaattggaattgatgaggctcaatttttcactgaagatattgttgacgtatgcaatactttagcaaacaaaggtattagggttataattgcaggtcttgatatggattatttagggaaaccctttgggccaatgccaaaattaatggcaattgccgaagacgtaataaaggttcatgcagtttgtacagaaactggaaaacctgcaaattatagctttagaaaatcaaataaaaatgatactgtaatgttgggagaaaaaaatgagtatgagcctctaagtcgtgaagcttttgtatcaaaaatgaagaagaaaaaaaattg

SEQ ID NO: 248047 - DNA, 583 bp, Unknown
  Bacterial polypeptide expressing nucleotide sequence isolated from the Sargasso Sea
tatggcaaaactatacttcttttattcaaccatgaatgcaggtaagtcaactgccctactccaatcaaatcataactactcagaaagcaatttaaaaacattattattcattccaaaagacttaggagataaatcagatggaaaaattatttccagaattggtttagaagctgatgcgaccatcgttgatagtgaatataatttttttaatgaaattgaaaaattagatcataaggatataagttgtatatttgttgatgaagctcaatttttatcaaaagaacaagttcaaagtttaggaaaagttgcagacgaattaagtatacctgtgatgtgttatgggataagaacagattttcagggccaattatttgatgggagtaaagaattattagctatagcagataatcttaaagagttaaaaactatttgtagcatgtgcgagaagaaagcaacaatggtggtaagattaaatcaggaaggagaagttgttttagagggtgaaaaaatagttattggtgggaatgatatatacaaaacactttgtagaaaacatttcaggcaactcacaaaattaatttaa

SEQ ID NO: 248048 - DNA, 589 bp, Unknown
  Bacterial polypeptide expressing nucleotide sequence isolated from the Sargasso Sea
atgtttttagaaaaccctgcatacaacagtgaacaatttggttggattgaagtaatctgtggatcaatgttttctggcaaaacggaggagttaataagaagggttaaaagagcaaaaattgcaaatcaaaatgttaaaatttttaaacctattattgactcaagaactaaaaactttattgaatcgcatgacgataataaacttcagtcaattgaagtaaaatcatcatcagaaattttaaataagttaaaaaactgtgatgtagtagctatagatgaagctcagttttttgatgatgaaataattgatgtctgcaatatcattgcaaacaagggtgttagagtaattgttgcaggattggatatggattatcttggcaaaccatttggaccaatgccagatcttatggctatctctgagtatgttactaaagttcatgcagtatgtaaaaagtctggaaatattgctaactatagttacagaaaaaatagaaagaaggatattgtgataataggtgagaaagataaatatgagcctttaagtagagcgatgttttttaaaaaaatgaaaaagaataaatcaaaatgaa

SEQ ID NO: 248049 - DNA, 562 bp, Unknown
  Bacterial polypeptide expressing nucleotide sequence isolated from the Sargasso Sea
aatgcataaaaaactaataaactctggatggatagaagttatttgcggaggaatgtttagtgggaaaaccgaagaattattaaggagaattcgtagggctcaaattgcaaatatgtctacaataatttttaagcctcaaattgatactcgttatagtaaaaataaaattgtaagccataacaataatagtatggaatcagagataattcaaaaaacaaaggatatatttaatattggtaagaataatgatgtcgtaggtattgatgaagcacaattttttgatagtgaattgctagatgtatgtaaaaaactagcaaaaaataatactcgtgtgattattgctgggttagatagcgattatagaggattgccttttagctctatgccagaaataatgtgtgaagctgattatttagataaactaactgcaatttgtgtaaaatgtgggaatcctgcatcatgcacacaaagaattacaaaagaaaaagatcaagtaattattggtgagactgatatttatgaagccagatgtagaaactgttttaaccccccggagaaataa

SEQ ID NO: 248050 - DNA, 586 bp, Unknown
  Bacterial polypeptide expressing nucleotide sequence isolated from the Sargasso Sea
tttggctaaggttcattacttctattccactatgaatgcgggtaagtccacttccctactacagtctagccataactatgaagagagagatcttaacgttttactattcacacctgaagttgatgcaaaaatacatgattcattcattcactctaggattggtctaaaaaaacctgcttacgtatttaatgagaaatttgattttatagactatgtttataaagaaaataaaaagcgagtatcctgcattttagtagatgaagcacagttcttaacatctgaacaagttaaacagctttgcagaatatgtgatgaaaaaaatattcctattatgtgttacggcattagaacagattttagaggagagctttttcctggaagtttggctctactttcactggctgataacattatcgaaattaaaacaatatgcgagtacccctcttgttccagaaaagccacaatgattgctagatatgacaagaatggagaaattgtcttggaaggtaatcaaattgatataggtgctgataaatataaagtttactgccgtaaacattacagagaattaactaagattatctaa

SEQ ID NO: 248051 - DNA, 565 bp, Unknown
  Bacterial polypeptide expressing nucleotide sequence isolated from the Sargasso Sea
gatgacacatacaccaataaattctggttggatagaagttatttgcggtagtatgttttccggaaaaaccgaagaattaatgcgccggttgcgaagagccgaaattgcaaaaatgtccatttccgtatttaaacctaaaattgattctcgttatgataaaggtcatatcgtcagccataataaaactaaaatgatgtcttccataattgaaaaccctaaagaaataatcaatgcttcaaaggatcataatgtggttggtattgatgaaacccaattctttgatcattcaattgttgatgtttgcaaaaggttagcttataataaaaaacgagtgattgttgcagggctagatacagattatagaggcctcccgtttggcccaatgcctgatatgatgtgtgaagcagaatacgttgataaattaagagctatctgcattgaatgcggaaaccctgcatcgtatagccagagaacatctgaagattcccatcaagttttgattggagaaatggataaatatgaggcgagatgcagaaattgcttccaacctcctaaaggttattaa

SEQ ID NO: 248052 - DNA, 583 bp, Unknown
  Bacterial polypeptide expressing nucleotide sequence isolated from the Sargasso Sea
tatggcaaaactatacttcttttattcaaccatgaatgcgggtaagtcaactgccctacttcaatcaaaccataactactcagaaagtaatttaaaaacattattatttattcccaaagacttaggagataaatcagacggaaaaattatttccagaattggtttagaggctgatgcgatcattgttgataatgaatataatttttttaatgaaattgaaaaattagatcataaggatgtaagttgtatatttgtagatgaagctcaatttttatcaaaagagcaagttcaaagtttaggaaaagttgcagatgaattaagtatacctgtgatgtgttatgggataagaacagattttcaaggtcaattatttgatgggagtaaagaattattagctatagcagataatcttaaagagttaaaaactatttgtagcatgtgtgagaagaaagcaacaatggtggtaagattaaatcaagcaggagaagttgttttagagggtgagaaaatagtaattggtgggaatgacatttacaaaacactttgtagaaaacattttaggcaactcacaaaattaatttaa

SEQ ID NO: 248053 - DNA, 583 bp, Unknown
  Bacterial polypeptide expressing nucleotide sequence isolated from the Sargasso Sea
ttggctaaagtacactttcattattcaactatgaatgcaggtaaatctacttccctgctgcaatcaaaccacaactatgaagtacgaggattaaaaacttatctttttacaccaaaagcagatgcagatatgtatcacggctctatacattcacgtttaggtttagaaaagaaggccaatatatttgatgaatcatttgaatttgataaatactttcttgataaaaaagatgaaaaaattgcatgcatcttagttgatgaagctcaatttttaacaagcaaacaagtaaaagagctatgtttagtttgcgataaattaaatatacctattatgtgttatggcattcgaacagactttaggggtgatttattttcaggtagtgcagctctgcttgcatatgctgatacattagttgagttaaagactatttgtgaatatgaaggctgtgcacgaaaagcaaccatgatagctagatatacagatggaaagatagttacagaaggacaacaaattgatattggtggagataaatataaagttttttgtagaaagcactacagaaaattaactaatcttatctaaa

SEQ ID NO: 248054 - DNA, 331 bp, Unknown
  Bacterial polypeptide expressing nucleotide sequence isolated from the Sargasso Sea
atgaaccctaaaccggtaaatgctggttggattgaagtaatctgcggtagtatgtttagtggaaaaacagaagagctcttgcggaggcttcgtcgcgcccaaattgctaagatgcatacaattgtttttaaatcaagggttgactcgcgtttcgataaaaatcgtatagttagccacaataaattaacaatgaaatcttctattatagcaaaagcctctgatatttttcttttatcaaagaaagctgatgttattgctattgacgaggcgcaattttttgatgattctcttattgatgtttctaaaaaattagcagatattggcaaaagaa

SEQ ID NO: 248055 - DNA, 592 bp, Unknown
  Bacterial polypeptide expressing nucleotide sequence isolated from the Sargasso Sea
aatgtttttagaaaactccgtacatggaaataaacaatttggttctatagaagtaatctgtggctcaatgttttctggtaagacagaagagttaatcagaaggctcaaaagagcaaaaattgcaaatcaaaaaattcagatttttaaaccctctttagactctagaaataatgactatatagaatcccatgataaaaacaggataaagtcactcactgttaaggcctcttatgatgtatatgatattggaaaagattttgatgttattgggattgatgaggttcaattttttgatgacgaaattgtttctgtttgtaattcgctggcaaacaatggggtaagagtaatagctgctggacttgatatggactatttgggaaatccatttggcccaatgcctaaccttatggcaatagcagaatatgtaacaaaagttcatgcaatatgttctaaaactggaaatattgctaactatagctatagaaaaaataaagaagactcaataatactaataggcgaaaaagatgaatatgaagctctgagtagagaaatcttttatgaaaaaatgaatagtaaaaagaaaaaaacatga

SEQ ID NO: 248056 - DNA, 568 bp, Unknown
  Bacterial polypeptide expressing nucleotide sequence isolated from the Sargasso Sea
aatgaccctgactccccataattcaggctggatcgaagttgtctgcggtagtatgttttctggtaaaacagaggaattaataaggaggcttcgaagagcagaaattgctaaaatgaatatagtaatattcaaaccaaaaattgattcacgttttagtgctgaacatattgttagtcataatcaattaaaaatgagatcacatgttataagtgacacaaaagaaattcttaaaatctcaaaaagtaatgaagttgtaggtattgacgaagctcagttttttgatcaatctatagttatgatctgtaaacagttagccggagaaggaaagagggtcattgttgctggtctagatacggattatcgaggtttgccatttggccccatgccagagataatgtgtgaagctgactatcttgataagttaagagccatatgtgtgaagtgtgggaaccccgcctcctatacacaacgcacaacaaaagattcagggcaggttgttatcggagaacttgacaaatacgaagctcgttgcagaaactgctttcgggctccagataaaaatttataa

SEQ ID NO: 248057 - DNA, 595 bp, Unknown
  Bacterial polypeptide expressing nucleotide sequence isolated from the Sargasso Sea
atgagcaaactctttttccgttacggcgccatgaacagcggcaagagcaccgccatgttgcaggtggcccataactatgaggagcgcgatcagcgcgtcgtgttggtgaagtcgtcagtggataccaaaggcgatgatcagattgtgtcgcgcctcggtgtgacgcgtcgggctgatttgctgctctctcccggtcaggacctgcgtgcggcgctacaaacgctctctgcgcagcggtctgagctcagtgacggcgtagcctgcgtgctgatcgatgaggcccagtttctgacgccggagcaggtcgatcaggcgctggcgattgcggtgctggatatgatcccggtggtggcttttgggattcgcacggactttcgcaccaaagcttttccggggagccagcgcttgatggaggtagcgcattcgctgcaggagatgaagacgatctgccgctgcgggaacaaggccatctttaacgcccgcttgggcgagcagggcattatccgccagggcgagcaggtcatgatcgacggcgaatccgcccgatacgaggcactttgcgcgcgctgttatctggaggcggagggcggctagg

SEQ ID NO: 248058 - DNA, 589 bp, Unknown
  Bacterial polypeptide expressing nucleotide sequence isolated from the Sargasso Sea
atggctaaggttcactttttttactcaactatgaatgctggtaaatctaccgcactacttcagtcagctcacaattatcatgagactggaaatgaaacaattttatttattccaagagaagatgcagataagaattcaggtcttataaagtctagaattggtttaagcgcttcagcagtagtaattgattcagaattaaaaatttttgattacgtaaaaaaagagctttcaaaaagaaaggttgatgcaatacttgttgatgaagctcaatttttgaagaagcatcatgttctgcaaatgtgtaaagtatgtgatgagttgcaaatccccgtaatgtgctatggcataagaactgatttcaggggagagttgtttgaaggaagtgcatcactcttggcattagcagataatttaatagagctaaaaacggtgtgcaatgtatgcagcagaaaagcaaccatggttgttagacttgatgaaaatgggaaggttattactgaaggttcaaaagttcagattggcggaaatgatgtatacagagtattgtgcagaaaacactttaatgaagctacaaaactactagattaaa

SEQ ID NO: 248059 - DNA, 559 bp, Unknown
  Bacterial polypeptide expressing nucleotide sequence isolated from the Sargasso Sea
tatggctaaattatatttttcatattcaacaatgaatgctggcaaatctacagttttgttacaagcttcacataattatggtgaaaggggtatgaaaactatgttatttactgctgaattagataataggtctaaagttggaaatatatcttccagaatagggttaagtgaaaaagcttcaacatttaataacaatgataatctattctactctgtagagaaaagattaaaaaaagataaaatttcatgtgtttttgttgatgaggcacaatttttaactgacaaacaagtttgggaactttcagatgtagttgaaatacttaaagtccctgttatgtgttttggtttgagaactgattttcaaggcaaattatttgaaggcagttcaactttattagcgatttctgatgaattaaaagaaattaagactatctgtcactgtggtaagaaagctaatatggttgttagggttgatagtaatgggaaagttcttaaagaaggcgctcaaattgaaattggaggtaatgaaaaatatatttcattgtgcagaaaacactga

SEQ ID NO: 248060 - DNA, 586 bp, Unknown
  Bacterial polypeptide expressing nucleotide sequence isolated from the Sargasso Sea
tatggctaaattatatttttcatattcaacaatgaatgctggcaaatctacagttttgttacaagcttcacataattatggtgaaaggggtatgaaaactatgttatttactgctgaattagataataggtctaaagttggaaatatatcttccagaatagggttaagtgaaaaagcttcaacatttaataatgatgataatctctttagctcagtacaagaaagattaaacatagataaaatttcatgtgtgtttgttgatgaggcacaatttttaactgaaaaacaagtttgggaactttcagatgtagtagaaatacttaatataccagttatgtgttttggtttgagaactgattttcaaggtaaattatttgagggcagttccagtttgctagcaattgctgacgaattaaaagaaattaagactatctgtcattgtggcaagaaagctaatatggttgttagggttgatagtaatggaaaagttcttaaagaaggcgctcaaattgaaattgggggtaatgaaaaatatatttcattgtgcagaaaacactggaaaaatgagatggaaaataatagatag

SEQ ID NO: 248061 - DNA, 583 bp, Unknown
  Bacterial polypeptide expressing nucleotide sequence isolated from the Sargasso Sea
tatggcaaaacttcattttttttattctacaatgaatgcaggtaaatcaaccgcccttcttcaatcaaaccataactatcttgaaagtaatttaaaaactattttatttttaccagaagaaatttcaaaaaagtctgataaaaaaattgtatcaaggattggacttgaggccgaggcgataccgattgataaagattttaatttctttgactacataaaagatcaagaccacaaatcattaagttgtgtattcatcgatgaggttcagtttctcagtaaagagcagattcagcaactagggagaattgctgatgaaattaaccttcctgttatgtgttatggaataagaacagacttccaaggaaagttatttgatggcagttcggagttacttgcaattgcggataatctaattgaattaaaaactatatgcagtgaatgcgataaaaaagctactatggtggttcgacttgactcaaatggtaaagttttgttagagggtgaaaaagttctagtaggtggtaatgacatatataaaactgtctgtagaaaacattttagagatttaacaaaattaatttag

SEQ ID NO: 248062 - DNA, 589 bp, Unknown
  Bacterial polypeptide expressing nucleotide sequence isolated from the Sargasso Sea
atggctaaggttcactttttttactcaactatgaatgctggtaaatcaaccgcactactccaatcagctcacaattaccatgagactggaaatgagacaattctatttattccaagagaagatgcagataagaattctggtcttataaaatctagaattggtttaagcgcttcagcagttataattgattcagaattaaaaatttatgactacgtaaaaaaagagctttcacaaagaaaggttgatgcaatacttgttgatgaagctcaatttttgaagaagcatcatgttctgcaaatgtgtaaagtttgtgatgagttgcaaatccccgttatgtgttacggaataagaactgatttcaggggagaattgtttgaaggtagtgcatcacttttagcattagcagataatttaatcgaactaaaaacggtatgtaatgtatgcagcagaaaagcaaccatggttgttagacttgatgagaatggaaaggttattactgaaggttcaaaagttcagattggtggaaatgatgtatacagagtattgtgcagaaaacactttaatgaagctacaaaactactagattaaa

SEQ ID NO: 248063 - DNA, 583 bp, Unknown
  Bacterial polypeptide expressing nucleotide sequence isolated from the Sargasso Sea
tatggcaaaacttcatttcttttattcaactatgaatgcgggtaaatcaactgctcttcttcaatcaaatcacaattacaaagaaagtaatttaaaaacattgttatttgtaccaaaatctatagcggataaatcaaatggcaaaatagtttcaagaattggattgcaagctgatgcaataatcgtaaataatgaatatgacttttataatgaaatcagtaaaaaacaatctgaaaaaataagttgtatatttgttgatgaggctcagtttttaactaagaagcaagtccatggccttggtaaaattgcagatgaattaaatatacctgttatgacttatgggataagaacagattttcgaggagagctatttgaaggaagtcaagagctactagctctagctgataatcttaaagaacttaaaactatatgcagtgaatgtgacaagaaagccaccatggttgtaagattagattcgaatggcaaaattcttcttgaaggagaaaaaattcttataggtggaattgagatatacaaaactctttgcagaaaacattttagagaactaactaaattaatttaa

SEQ ID NO: 248064 - DNA, 589 bp, Unknown
  Bacterial polypeptide expressing nucleotide sequence isolated from the Sargasso Sea
atgtttttagaaaaccctgcatacaacaatgaacaatttggatggattgaggtaatatgcggatcaatgttttctggtaaaactgaagaattgataaggagggtaaaaagagctaaaatagctaatcaaaaagttaaaatttttaaacctattattgattcaagaagtaaaaactatattgaatcacatgacgacaacaaacttgagtcaattgaagtaaaatcatcatcagagattctaaataatatagaaaattgtgatgtagtagctattgatgaagctcagttttttaataatgaaatagttgatgtttgtaaccatatagcaaataacgggataagggtaattattgctggattagatatggattatctaggaaatccttttgggccgatgcctaatctaatggctatttcagagtatgttactaaagttcatgcggtatgtaaaaaatctgggaatgttgctaactatagctacagaaaaaacaaaaaaaaagatattgttgtaataggtgagaaagataaatatgagcctttaagtaggtcagttttttttaaaaaaatgaaaaaaaagaaatcaaaatgaa

SEQ ID NO: 248065 - DNA, 841 bp, Unknown
  Bacterial polypeptide expressing nucleotide sequence isolated from the Sargasso Sea
gttggaggtcatcttcggtccgatgtttagtggaaagtccaccgagctgcagagacgcctgcgcagacacacggtggcgagtcggagggtgctggtggtgaagcacgcgggggataataggtacgacgagcaggtcggctccacgacgtcggcggtgacccatgatttggcatcgatgccggcgctgccgacgaaggatttgcgaaacatcgataacgtttcgcacaactacgacgtgatcggcatcgacgaggggcaatttttcaacgatatcgcgcactactgcgaaaagtgggcgcaaacgggtaagactgtcatcgtcgccgcgctggacgcgacgttccagcgcaagcctttcaactccatcctgcagctcgtgcccttggcggaaaaggtgacgaaattgaccgcggtgtgcacggactgcgcggccgacgccgcgttcacggcgcgaacgaccaaggagacggacgtggaagtcatcgggggctcttcctcgtacaaggcagtgtgtagaaattgctacgaaaagtatgcggcggagatgcgcgagaacggtgcgagcgcgaagacggcggtagggacgccgttgacgaagcgcgtcgcggagcacatgggtgaactgagtctgaagacgcccgctccgacagagacttcattcacctttgcaactccggccacgccgactctcggtgaggcgacggtgcacaagacgaagaacgtcgagagttcggcgatgaagagcgcgaaaaagtcacgtgggttcggtggcccgggacggtcaccgctgaacgatttcatgactggtttccaccgctctccactcagtacgttgcggtag

SEQ ID NO: 248066 - DNA, 583 bp, Unknown
  Bacterial polypeptide expressing nucleotide sequence isolated from the Sargasso Sea
ttggctaaagtacactttcattattcaactatgaatgcagggaaatcaacctccctcttacaatcaaatcataactacgaagtacgaggattaaaaacttacctttttacacctaaggcagatgcagatatgtatcacggcgctatacactcacgactaggtttagaaaaaaaggccaatatatttgaagagtcttttgaatttgataagtattttcttgataaaaaagatgaaaagatagcctgcatattggttgatgaagctcaatttttgacaagcaaacaagtaaaagaattatgtttagtgtgcgataaattaaatatacctgtcatgtgctatggcattagaacagacttcaggggcgatctattctcaggtagtgcagccttgttggcatatgccgatactttagttgaattaaagactatatgtgaatatgaaggctgtgcgcgaaaagcaactatgatagccagatatacagatggaaaaatagtcacagaaggtcaacaaattgatattggtggtgacaaatataaggttttttgtagaaagcactacagaaaattaaccaatcttatctaaa

SEQ ID NO: 248067 - DNA, 583 bp, Unknown
  Bacterial polypeptide expressing nucleotide sequence isolated from the Sargasso Sea
tatggcaaaacttcacttcttttattcaacaatgaatgcaggtaaatcaactgccctattgcaatcaaatcataactatcttgagagtaatttaaaaactatgttgtttattcctcatgaaataggtaacaaatcaaaaggtaaaataatatcaagaattgggttagaagcagatgcggttattgttaataaagattatgacttttataaagaagttaaaaacacaaattttgaagagattagttgcatttttattgatgaagcacagtttctatcaaagcatcaagttcacagcattggaaagattgcagatgatttaaatattcctgtaatgtgttacgggattagaactgattttcaaggaatgttatttgaaggtagtcaagaactcttagctattgcagataatctcaaagagcttaaaactatttgtagtgaatgtgataaaaaagcaacaatggtagtaaggatagatgaaaatggcaaagtaattttagaaggtgaaaaaatacttattggtgggaatgaggtatacaagacactttgtagaaaacactttagagaattaacaaaattaatttaa

SEQ ID NO: 248068 - DNA, 337 bp, Unknown
  Bacterial polypeptide expressing nucleotide sequence isolated from the Sargasso Sea
atggcagctcttcattttatatattcgacaatgaatgcaggcaaatcaacagcactattgcaagctagccatggttatcgtgaaagaggtcttgagaccatggtttttacgtcatcaaaggatgaccgttatggtgaatcagaagtggtatcaagagttggattgagaactcctgctcatacttatactgaatcagacgatatcttggtgatggtccaagatatgaataagaagaatgaattaagttgtgtgctgattgatgaggcgcaatttctaagcaaagatcaagttgagcaattaggaaagattgtcgatgagatgaacattaccgtaatgg

SEQ ID NO: 248069 - DNA, 583 bp, Unknown
  Bacterial polypeptide expressing nucleotide sequence isolated from the Sargasso Sea
ttggctaaagtacactttcattactcaactatgaatgcagggaaatcaacctccctcttacaatcaaaccataactacgaagtacgaggattaaaaacttatctttttacacctaaggcagatgcagatatgtatcacggcgctatacactcacgactaggtttagaaaaaaaggccaatatatttgaagagtcttttgaatttgataagtattttcttgataaaaaagatgaaaagatagcctgcatattggttgatgaagctcaatttttgacaagcaaacaagtaaaagaattatgtttagtatgcgataaattaaatatacctgtcatgtgttatggcattagaacagacttcaggggcgatctattctcaggtagtgcagccttgttggcatatgccgatactttagttgaattaaagactatatgtgaatatgaaggctgtgcgcgaaaagcaactatgatagccagatatacagatggaaaaatagtcacagaaggtcaacaaattgatattggtggtgacaaatataaggttttttgtagaaagcactacagaaaattaaccaatcttatctaaa

SEQ ID NO: 248070 - DNA, 583 bp, Unknown
  Bacterial polypeptide expressing nucleotide sequence isolated from the Sargasso Sea
atgtttttagaaaatcctgcatacaacaatgaacaatttggttggattgaggtaatttgtgggtcaatgttttctggtaaaactgaagagttaataagaagggttaaaagagctaaaatagctaatcaaaaagttaaaatttttaaaccaattattgactcaagaagtaaaaactatattgaatcacatgatgacaacaagcttgagtcaattgaagtaaagtcatcatcagagatttttaataagctgaaaaactgtgatgtagtagctattgatgaagctcagttttttgatgatgaaatagtggatgtgtgtaataaaatagctaatagtggaattagagtaattattgccggattggatatggattatcttggcaacccttttggaccaatgcccaaccttatggcgatctctgaatatgtaactaaagttcatgcagtgtgtaaaaaatccggaaatgttgctaactatagctatagaaaaaataaaaaaaaggatattgttgtaataggtgagaaagataaatatgagcctttaagtaggtcagttttttttaaaaaaatgaaaaaaaataaataaa

SEQ ID NO: 248071 - DNA, 466 bp, Unknown
  Bacterial polypeptide expressing nucleotide sequence isolated from the Sargasso Sea
ttggctaaggttcattacttctactccactatgaatgcgggtaagtccacttccctacttcagtctagccataactatgaagagagagatcttaacgttttactatttacacctgaagttgatgcaaaaatacatgattcattcattcactctaggattggtctaaaaaaacctgcttatgtatttagtgagaaatttgattttatagactacgtttatgaagaaaataaaaagcgagtatcctgcattttagtagatgaagcacagttcttaacgtctgaacaagttaaacagctttgcagaatatgtgatgaaaaaaatattcctattatgtgttacggcatacgaacagattttagaggagagctttttcctggaagtttggctctactttcactggctgataacattatcgaacttaagacaatatgcgagtacccctcttttccagaaaagccacaatgat

SEQ ID NO: 248072 - DNA, 538 bp, Unknown
  Bacterial polypeptide expressing nucleotide sequence isolated from the Sargasso Sea
ttgggaagaattgaagtaatatgtggttctatgttttcaggtaaaactgaagaattaattaatagagtaaaaaaatcgaacaagtcttataaggtttttaaaccggatattgatactagaaatgaaaaaggtaaaattaaatctcacagcaaaattgaaattgatgccactactattgatgatattaatgaaattttgaattataaagataagttcgatgtaattggaattgatgaagcacaatttttttcaaatgatatagtatctgtatctaattcacttgctaacaacggagtgagagttattattgcaggtctcgatatggacttttcgggtaaaccatttggacctatgccatttttgatggcaatagcggaggatgttacaaaagtacatgctaaatgtgttgagacaggtgaacctgctttgtacagttttagaaaagttgataatgatgaaactgtaatgataggtgaaaaaaaagagtatcagcctctttcaagaaaagctttcatctctaaatctaaaaaatcataat

SEQ ID NO: 248073 - DNA, 598 bp, Unknown
  Bacterial polypeptide expressing nucleotide sequence isolated from the Sargasso Sea
ctgagaaaagtggccaaactctacttttattattctgccatgaatgcaggaaaaaccaccaccctgcttcagtcgagtcacaactacgctgagcgggggatgacaactctattgctcaaaccactcattgatgaccgtgaaggcttgaacgtcatacggtccagggtcggtcttgaggcagaggcaaagaattttgagaaagacgataacctttttcaaacaatcgaagcgcagtataaaacaaaatccctgaattgtgttttggttgatgaagcacagtttttaactcgtgatcaagtgattcagttaggggacgttgtggaccgtctagatattcctgtactatgttatggtttacgcaccgattttcttggggagttatttgaaggaagccgatctctgctggcctgggcagacgaattacgggaaatcaaaacagtctgccattgtggtaaaaaggctatcatgacggttcgtttgaatgaggaaggaaaacccttacaggccggggaacagatccaaataggaggcaacgaaagttacgtgtcgatgtgtcgaaggcatttcaaatcgagtttggggctatccgaaatttaga

SEQ ID NO: 248074 - DNA, 503 bp, Unknown
  Bacterial polypeptide expressing nucleotide sequence isolated from the Sargasso Sea
gatggcagctcttcattttatatattcgacaatgaatgcaggcaaatcaacagcactattgcaagccagtcatggttatcgtgaaagaggtcttgagaccatggtttttacgtcatcaaaggacaaccgttatggtgaatcagaagtggtatcaagagttggattgagaactcctgctcatacttatactgaatcagacgatattttgatgatggtccaagatatgaataagaagaatgaattgagttgtgtgctgattgatgaggcgcaatttctaagcaaagatcaagttgagcaattaggaaagattgtcgatgagatgaacattaccgtaatggcttttgggatcagaacagactttcagggtgaattatttgaaggaagcaagtatctgttggcttgggcggatagattaaaagagttacgtgctgtttgtcattgcggaagtaaagcaaccatgatcgtacgcgtcagcgaagatggctccattatgagatccggtg

SEQ ID NO: 248075 - DNA, 580 bp, Unknown
  Bacterial polypeptide expressing nucleotide sequence isolated from the Sargasso Sea
aatggcaaagttatttttcaattattcaactatgaatgcaggaaaatcaacgattctattacaagctgcgcataactatgaagaaagaggtatggtgccctaccttttaacagcagaaattgataagagatctggtgaagggaaaatagctagtaggataggcatagagaagcaagctgatacatttaatgacagacttaacttgtataacctattaaaatcaaggcaaaaaagctctccaattgcgtgtgttttaattgatgaagctcaattcttaactaaagaacaagtttggcaactggcaagagctgttgatgatctttttctaccagttttgtgttacggactaagagttgactttcagggtaatttatttccaggatcctctgcactacttggcttggcagatgaattaaaggaaataaagacaatatgccattgtgggaaaaaagctactatggtggtaaggaaatccactaacaacaaacccattagagatggatctcaaatacagattggaggaaatgatttatatgagtccctatgtagattacactggcgccagctaatggatagctag

SEQ ID NO: 248076 - DNA, 583 bp, Unknown
  Bacterial polypeptide expressing nucleotide sequence isolated from the Sargasso Sea
atggcaaaactttatttctcatactctgcgatgaatgctggtaaatctacccttttgctgcaagcctcttacaattatggcgaaagaggcatgaaaactattctctttacagctaaactagataatagaagcaaattaggtgaaattacatcaagaataggtttggctgaaaaggccaaaacatttgaagaacaggataatcttttttcaatcattgaaaacaaaataagcgattattctatatcttgtatattgattgatgaagcacaatttctaacccaaaaacaagtttgggaacttagcgatgttgtcgataaattaaatattcctgtcatgtgttatggacttagaactgattttcaaggaaaattattccctggcagtgaaactcttttatctattgctgatgaattaagagaaattagaacaatttgtgactgtgggaaaaaagcaattatggtagtaaggcaagatgaaaaaggtaaagtcattaaagaaggcgagcaaattgagataggtggaaatgataaatatatttctctatgcagatttcattggaaatctcaaatgaataaaatataat

SEQ ID NO: 248077 - DNA, 505 bp, Unknown
  Bacterial polypeptide expressing nucleotide sequence isolated from the Sargasso Sea
agcggggcatgaatacactcgtgatcaaccccggatcgacagccgctctggtgaaaaccgcgtgcgctcacgcatcggtcttgaagcagaggctgtggatgtggatcccagcgtcaatttgctgggcctggttcagaacacatctgagggtcagccgatccactgtgttcttgtcgatgaagcccagtttttaagcgctgatcaggttgatcagctgaccgaggtggttgacgcgctgaatatcccggtgctcgcctatggcctgcgcacggattttctcggcaccctctttgaaggttcccgccagctcttggccctggcggatgagttgcgtgagatcaagactgtctgccactgcggtcgaaaagccaccatggtcgtgcgcttcgatggtgaggggcagcccatgcacagcggcgaccagattcagatcggcggtaacgaaacctacgtgtcgatgtgtcggcgccacttcaaggaaagcctgaagatctcttcaggctga

SEQ ID NO: 248078 - DNA, 500 bp, Unknown
  Bacterial polypeptide expressing nucleotide sequence isolated from the Sargasso Sea
ttttactccaaaacttgatgataggtttggagaaggaaaggtttcatctcgaattggacttgagagggatgtagaaaaattcgagggcgaagatgatttatatgtctggacagctcatgaacatcaaagagagaaaatctcctgtgttttagttgatgaagctcaatttcttactccaaaacaagtactccagctctccttagtagtagacaaattaaaaataccagtcttatgttatggcttaagaactgattttagaggagaaccatttcccggaagtatatatcttttaggttggtcagacgaaataactgagttaaaaacaatttgtaaatctggaaaaaaagcaacctttaatgctcgattagatgaaaacggaaacagagtcacagaaggtgatcaaatatcaattggtctgaattatgaggctcaagctagagatgtatttgagttagataaagtttcacctatagattatcaaatcccagaagctaattagt

SEQ ID NO: 248079 - DNA, 370 bp, Unknown
  Bacterial polypeptide expressing nucleotide sequence isolated from the Sargasso Sea
atggctaagctttacttcaattactcttctatgaatgcaggaaaatcaacaatgctactgcaagcaaatcataattatcaagaaagaggtatgagtacaattatttacacatccagtgtagatgatcgttacggaaagaaagagatagtatcaaggataggccttaaagcagaatcaaatatcttttcagccaatacaaatatttatgaagaaattataaactttaataaagaaaatagagttgactgtgtgttgatagacgaagctcaattccttaataaagaacaagtgtctcaactaggtcaaatagttgataacttagacatacctgttcttacatttggaataagaactgattttaaaggtaatt

SEQ ID NO: 248080 - DNA, 442 bp, Unknown
  Bacterial polypeptide expressing nucleotide sequence isolated from the Sargasso Sea
atggcagctcttcattttatatattcgacaatgaatgcaggcaaatcaactgcactattgcaagcaaaccatggttatcatgaaaatgatcttgagaccatggttcttacgtcatcaaaggatgaccgttatggtgaatcagaagtggtatcaagagttggattgagagcccctgcgcatacttatgctgaatcagacaatattttgatgatggtccaagatatgaatgagaaaaatgaattgagttgcgtactgattgatgaagcgcaatttctaaccaaagatcaagttgatcaattaggaaaaattgtagatgaactgaatattaccgtcatggcctatgggatcagaacagattttcaaggggaattatttgagggaagcaagtatctgcttgcttgggcggatagattaaaagagctacgtgcagtttgtcatgtgg

SEQ ID NO: 248081 - DNA, 415 bp, Unknown
  Bacterial polypeptide expressing nucleotide sequence isolated from the Sargasso Sea
atggcaaagctttactttaattattcttctatgaatgccggtaaatcgactatgcttttacaggctaatcacaactacattgaaagaggcatgaatccaaggatatatacttctgacttagataatagatttggaaaaggagaaatagtctctcgaatagggcttaaagcaaaatcaaatatattttcaagtaaaacagatatatacaaggatgtcttaaatagttgcaaaaactctatagtagactgtgtattaattgatgaagctcagtttctaactcaaaatcaagttatccaacttggtaagattgtcgatgaattagatacaccggtattagcttttggtattagaacagattttcaaggcaatctatttgaaggtagtaagtatcttttagcttgggcagataattgaa

SEQ ID NO: 248082 - DNA, 598 bp, Unknown
  Bacterial polypeptide expressing nucleotide sequence isolated from the Sargasso Sea
cctgagaaatgtggccaaactctacttttattattctgccatgaatgcaggaaaaaccaccaccctgcttcagtcgagccacaactatgccgagcgggggatgaagacactattgctcaaaccactcattgatgaccgtgagggcttgaacgtcatcaggtccagggtcggacttgaggcagaggcaaggaatttcgagaaagacgataaccttcttcaaacaatcgaagcacagcataaaacgaaatccctgaattgtgttttggttgatgaagcacagtttttaactcgtgatcaagtgattcagttaggggacgttgtggaccgtctagagattcctgtattatgttatggtttacgtaccgattttcttggagagttatttgaaggaagcagatctctactggcctgggcagatgaattacgagaaatcaaaacagtctgccattgtggtaaaaaggcaatcatgacggttcgtttgaatgaggaaggaaaacccttgcaggccggggaacagatccaaataggaggcaacgaaagttacgtgtcgatgtgccgaaggcatttcaaatcgagtttggggctatctgaaatttag

SEQ ID NO: 248083 - DNA, 451 bp, Unknown
  Bacterial polypeptide expressing nucleotide sequence isolated from the Sargasso Sea
cattctcgaattggaatcactgccgacgccaccgctttcgcagaaacttacgattttttcgacgcaattcgagaggcgcagcagactcaaccggtgcactgcgtgttgattgatgaggcgcaatttctcactgcgccgcaagtgctgcaactgacacaagtttgcgatcatctttcgataccagttctctgttatggaatccgcaccgatttccgcggcgaaccctttgagggtagtaaatacttgctttcctgggcagacaatcttatcgagatcaaaacaatctgtcgtagtgggaaaaaggcaaccatgaacgcacgcttggatgaagcgggtaaccgtgtcattgaaggcgagcaaatcgatattgggcaccattatgaggctctcagtcgaaaagagtttcatttagaagaggtttcgccggtgattcgcaagacctgcaaatgaa

SEQ ID NO: 248084 - DNA, 358 bp, Unknown
  Bacterial polypeptide expressing nucleotide sequence isolated from the Sargasso Sea
aaaatacaaagagataagttgtatttttattgatgaagctcaatttttatcaaaaaaacaagttcataatttaggaaggattgcagatgaattaaacatacctgtaatgtgttatgggataagaactgactttcaaggagagctctttgaaggcagtaaagaattattagctcttgcagacaatcttaaagagttaaaaactatttgtagtttatgtgataaaaaagcaactatggttgttcgaatagatcaagacggtaaagttatactaaaaggtgagaaaatacttattggcggcaatgaaaaatataagacattatgcagaaaacattttagagaattaacaaaattaatatag

SEQ ID NO: 248085 - DNA, 427 bp, Unknown
  Bacterial polypeptide expressing nucleotide sequence isolated from the Sargasso Sea
tagaattggaattggtcaaaaatctgaaacatttaactccaaagaggatctgtttttaaaacttcaaagtcagttgcaaatttcacgtatagattgcgtattaattgatgaagcacaatttcttacaaaagatcaagtttggcagttagcaaaaacggttgatgacttaaacgtacctgtgatgtgcttcggcctacgagtggactttagaggcgaattgtttccaggctcggcctctcttttagctttgtccgacgaaatgagagaagtccgcaccatatgtcattgtggcaaaaaagcaaccatggttgttcgcaaagattgcaagggacgtgctattttgtcgggtgatcaaatacaaattggtggcaatgaaacttacctgagcttatgtagaaagcattggaggcaagaagtcggttgttag

SEQ ID NO: 248086 - DNA, 604 bp, Unknown
  Bacterial polypeptide expressing nucleotide sequence isolated from the Sargasso Sea
atggcaaaattatatttttattatgcagctatgaatgctggaaaaagcacaactctcttacagtctgcacataactatgaagaaagaaatatgagaactcttttattcacaccaaaactagatgacagatttggagagggtaaaattgcttcaagaattggtttagacagggaatgtgaaatttttactgctgatgatgatctatatgtctggactgcacatgaacatcagagggaaaaagtatcctgcgttcttgttgatgaatcacagtttctaagcccaaaacaagtgcttcaattatctttggttgtagataagcttaaaattcctgttctttgttatggtttgagaacagattttcgtggagaaccttttccaggaagcgtatatttattagcttgggccgatgaaatgacagaaataaaaacaatttgtaaatctggcaaaaaagcaaccatgaatgcaaggctagatgaaaatggcaatagagttactgaaggagaccaaatatctataggtttgaattacgaagctcaagctagagatgtatttgaactagataaagtttctccaataggatatcaaattcctgaagctaattaga

SEQ ID NO: 248087 - DNA, 559 bp, Unknown
  Bacterial polypeptide expressing nucleotide sequence isolated from the Sargasso Sea
gatgtcagctcttcattttatatattcgacaatgaatgcgggcaaatcaacagcactattgcaagctagccatggttatcgtgaaagaggtcttgagaccatggtttttacatcatcaaaggataatcgttatggtgaatcagaagtggtatcaagagttggattgagaactcctgctcatacttatactgaatcagacgatatcttgatgatggtccaagatatgaataagaagaatgaattgagttgtgtgctgattgatgaggcgcaatttctaagcaaagatcaagttgagcaattaggaaagattgtcgatgagatgaacattaccgtaatggcttttgggatcagaacagacttccagggtgaattatttgaaggaagcaagtatctgttggcttgggcggatagattaaaagagttacgtgctgtttgtcattgcggaagtaaagcaaccatgatcgttcgcgtcagcgaagatggctcaattattagatccggtgaacaggttgaaatcggaggaaatgaaagatacttatcgctttgccgaaaatgtttt

SEQ ID NO: 248088 - DNA, 580 bp, Unknown
  Bacterial polypeptide expressing nucleotide sequence isolated from the Sargasso Sea
atggccaagctctactttaattattcttctatgaatgcaggaaagtcaacaatgctcttgcaggctaatcataattatcaagaaagaggaatgaatacaattatttatacttccagcgtagatgatcgatatggaaaaaaagagatagtatcaagaataggcctgaaggcagaatcaaatatcttttcaagcgatacaaatatttatgaagaagttataagcttcaataaggataaaaaggtagattgtgtattgatagatgaggctcagttcctaagtaaagatcaagtagctcaactaggtcaaatagtcgatgacttagacataccagtccttacgtttggaataagaactgattttaaaggtaatctatttgaaggaagcgaatatttattagcttgggcagataacttaaaagagattaaaacggtctgtcattgtggtagaaaagcgactatggttctaagattagatcaaaagggaaatgttattgaagaaggagatcaaatagaaataggaggcaatgagaaatatgtttcaatatgcaggaaacatttctatgaaaaaaatataggttaat

SEQ ID NO: 248089 - DNA, 447 bp, Unknown
  Bacterial polypeptide expressing nucleotide sequence isolated from the Sargasso Sea
aatcagaagtggtatcaagagttggattgagaactcctgctcatacttatactgaatcagacgatatcttgatgatggtccaagatatgaataagaagaatgaattgagttgtgtgctgattgatgaggcgcaatttctaagcaaagatcaagttgagcaattaggaaagattgtcgatgagatgaacattaccgtaatggcttttgggatcagaacagactttcagggtgaattatttgaaggaagcaagtatctcttggcttgggcggatagattaaaagagttacgtgctgtttgtcattgcggaagtaaagcaaccatgatcgtgcgtgttagtgaggatggctcaattattagatcgggtgaacaggttgaaataggaggtaatgaaagatacctatcgctttgccgaaaatgtttttataaaggagccattggctcatagt

SEQ ID NO: 248090 - DNA, 565 bp, Unknown
  Bacterial polypeptide expressing nucleotide sequence isolated from the Sargasso Sea
gcttgctgcatcttcgtacattatcaggaacgtgggatgcgtgctgttgtatatacagcggaaattgatgatcgttttggtgctggaaaagtaagttcacgtataggtctgtcgtcgcctgcaaaattgtttaaccaaaattcatctttgtacgaagagattcgtgctgaaaatgagcagcaaagaattcactgtgtactggttgatgagtcgcagtttctgactcgacaacaggtttatgaattatctgaagttgtcgatcggctggatattcctgtgttgtgctatggcttacgcacagatttccgtggtgaattatttggcggcagcgaatacctgcttgcgtggtcagataagctcgttgaattaaaaaccatttgtttctgtgggcgtaaggccagcatggttttacgtcttgatcagtctggaaggccctataacgagggcgagcaggtggttattggcgggaatgaacgctatgtgtcggtatgtcgtaaacactacaaacaggcgcagtctgagggctctctgacggcgatacaagaacgacacagccacgattaac

SEQ ID NO: 248091 - DNA, 380 bp, Unknown
  Bacterial polypeptide expressing nucleotide sequence isolated from the Sargasso Sea
acaaatcgaagcacagcataaaacgaaatccttgaattgtgttttggttgatgaagcacagtttttaactcgtgatcaagtgattcagttagggaacgttgtggaccgcctagagattcctgtattatgttatggtttacgtactgattttcttggggagttatttgaaggaagtcgatctctgctggcctgggcagacgaattacgggaaatcaaaacagtctgccattgtggtaaaaaggcaatcatgacggttcgtttgaatgaggaaggaaaacccttgcaggctggggaacagatccaaataggaggcaacgaaagttacgtgtcgatgtgtcgaaggcatttcaaatcgagtttggggctatccgaaatttaga

SEQ ID NO: 248092 - DNA, 580 bp, Unknown
  Bacterial polypeptide expressing nucleotide sequence isolated from the Sargasso Sea
atggcaaagctctactttaattactcatctatgaatgctggaaaatccaccatgcttttacaagcaaaccacaactatcaagaaagaggaatgaatacagttatatacacttcgagtgtagacgatcgttacggaaaaaaagaaatagtttcaaggatagggcttagagctgattcaaatatcttttcggaaagcacaaacatctatgaagaagtggttaatttaaataaaacaaaaaaagtggattgtgtattaatagacgaagctcagtttttaaataaagagcaagtaaaacaattaggtaaaatagtagatatcttgaatacacccgttctaacgtttggaataagaacagactttagaggaaacctattcgaaggaagtgaatatctattagcttgggcagataatttaaaagaaattaagacggtttgtcattgtggcaggaaagccaccatggttttaagattagacgaaaatggtaatgtacttgaaaccggggatcagatagaaataggaggaaatgagaaatatgtttcaatatgtaggaaacatttctatgaaaaaaatattggttaac

SEQ ID NO: 248093 - DNA, 580 bp, Unknown
  Bacterial polypeptide expressing nucleotide sequence isolated from the Sargasso Sea
atggctaagttattttttaattattcaactatgaatgcaggaaaatcaacaattctgttacaagccgcgcataactatgaggaaaagggtatggtcccctatcttttaactgcagaaattgataatagatctggtgaagggaaaatagctagtaggataggaatagagaagcgagctgatacatttaacgatagactaaacttatacaacctgctgaaatcaaagcaaaaaagttctccactagcgtgtgttttaattgatgaagctcaatttttaaccaaagaacaagtatggcaactagcaagagctgttgatgacctctttttaccagttttgtgttacggactaagggttgattttcagggtaatttatttccaggatcatctgcgctccttggcttagccgatgaattaaaagaaataaagacaatttgccattgcgggaaaaaagctactatggtggtaagaaaatccaataacaacaaacctattaaagatggatctcaaatacagattggaggaaatgacttatatgaatctttatgtagaattcactggcgccagttaatggagagctaga

SEQ ID NO: 248094 - DNA, 583 bp, Unknown
  Bacterial polypeptide expressing nucleotide sequence isolated from the Sargasso Sea
atggcagctcttcattttatatattcgacaatgaatgcaggtaaatcaacagcgctattgcaagcaagccatggttatcgtgagagaggtcttgagaccatggtttttacgtcatcaaaggatgaccgttatggtgaatcagaagtggtatcaagagttggattgagaactcctgctcatacttatgctgaatcagacaatatcttgaggatggtccaagatatgaataagaagaatgaattgagttgtgtactgattgatgaggcacaatttctaagcaaagatcaagttgagcaactaggtaagattgtcgatgagctgaatattaccgttatggcctttgggatcagaacagactttcagggtgaattatttgaaggaagcaagtatctcttggcttgggcggatagattaaaagagttacgtgctgtttgtcattgcggaagtaaagcaaccatgatcgtgcgtgttagtgaggatggctcaattattagatcgggtgaacaggttgaaataggaggtaatgaaagatatctatcactttgccgaaaatgtttttataaaggagccattggctcatagt

SEQ ID NO: 248095 - DNA, 580 bp, Unknown
  Bacterial polypeptide expressing nucleotide sequence isolated from the Sargasso Sea
aatggcaaagctttactttaattattcttctatgaatgcaggtaaatctactatgcttttacaggccaatcataactacattgaaagaggcatgaagccaagaatatatacttctgacttggataatagatttggagaaggagaaatagtttcaagaatagggctgaaagcaaaatcaaatatttttacaagtaaaacagatatatacaaggatgtcttaaatgttcacaataactcaatagtggactgtgtactgatagatgaagctcagtttctaactaaaaatcaagttatccagcttggtgaggttgttgatgaattagatataccagtattagcttttggtattagaacagattttcagggtaatctatttgaaggtagtaaatatcttctagcttgggcagataatttgaaagaaattaagaccgtttgtcattgtggaagaaaagcgactatggtcttaagattaaatgccaaaggtgaagtagtatccgatggaactcagatagagataggtggtgaagaaaagtatgtatcagtatgcaggaagcattttattaaaaaaaatattggctaa

SEQ ID NO: 248096 - DNA, 604 bp, Unknown
  Bacterial polypeptide expressing nucleotide sequence isolated from the Sargasso Sea
catggcaaaactttatttttattatgcggcaatgaatgctggtaaaagtacaaacttacttcagtctgctcacaactatgaagaaagaaacatgaaaacattaatttttactccaaaacttgatgataggtttggagaaggaaaggtttcatctcgaatcggacttgagagggatgtagaaaaattcgagggtgaagatgatttatatgtttggacagctcatgaacatcaaagagagaaaatctcctgtgttttagttgatgaagctcaatttcttactccaaaacaagtactccagctctccttagtagtagacaaattaaaaataccagtcttatgttatggcttaagaactgattttagaggagaaccatttcccggaagtatatatcttttaggctggtcagatgaaataactgagttaaaaacaatttgtaaatctggaaaaaaagcaacctttaatgctcgattagatgaaaacggaaacagagttacagaaggcgaccaaatatcaattggtctgaattatgaggctcaagctagagatgtatttgaattagataaagtttcacctatagattatcaaatcccagaagctaattag

SEQ ID NO: 248097 - DNA, 604 bp, Unknown
  Bacterial polypeptide expressing nucleotide sequence isolated from the Sargasso Sea
atggcaaaattatatttttattatgcagcaatgaatgctggaaaaagtacaactctcttacagtctgcacataattatgaagagagaaatatgagaactcttttattcacaccaaaactagatgacagatttggagagggaaaaattgcttcaagaattggtttggacagggaatgtgaaatttttactgctgatgatgatctatatgtttggactgcacatgaacatcaaagggaaaaagtgtcttgcgtacttgttgatgaatcacagttccttagcccaaaacaagtgcttcaattgtctttggttgtagataagcttaaaattcctgttctttgctatggattgagaacagattttcgtggagaaccttttccaggaagtgtatatttattagcctgggctgatgagatgactgaaataaaaacaatttgtaaatctggcaaaaaagcaaccatgaatgcaaggctagatgaaaatgggaatagggttactgaaggagatcaaatatctataggattgaattacgaagctcaagcaagagatgtatttgaattagataaagtttcaccaataggctatcaaatccccgaagctaactaaa

SEQ ID NO: 248098 - DNA, 604 bp, Unknown
  Bacterial polypeptide expressing nucleotide sequence isolated from the Sargasso Sea
tatggcaaaactttatttttactatgcagcaatgaatgctggaaaaagtacaaacttacttcaatcagcttataactatgaagaaagggaaatgcgttctttaatatttacaccaaaactagacgatagatttggtgaggggaaaattacctcaagaataggacttgagagagatgtagaaaagtttgttggagaagatgatttatatgtttggactgcacatgaacatcaaagagaacctgttgcttgtgtcttagttgatgaagcacagtttttaactccaaaacaggtacttcaacttagtttggtagtagacaaattaaaaatacctgtgctttgctatggattaagaacagatttcagaggagaaccatttcctggaagtgcttatttactagggtgggctgacgaattagtagaattgaaaacaatttgtaagtctgggaagaaagcaacatttaatgctcgactggacgaaaacggaaacagagttactgaaggtgatcagatttcgattggattaaattatgaagctcaagcaagggacgtcttcgaattagataaagtttcacctattgactatcagattccagaagcgaattag

SEQ ID NO: 248099 - DNA, 592 bp, Unknown
  Bacterial polypeptide expressing nucleotide sequence isolated from the Sargasso Sea
tatggctaaattatatttttcttactcaacaatgaatgctggcaaatcgacattactactccaggcttctcataattatggtgagcgaggaatgaaaacaatgttgtttactgctgaattagatgacaggtcttcagttggaaatatttcatctagaatagggttaaccgaaaaggcatcaacatttaacagtaaagataatattcataaattaattaaagatagattaactatagaaaaaatttcatgcatatttattgatgaggcacagtttcttacaaaaaaacaagtttgggaactttcagatgttgttgaaattcttaaaattccagtaatgtgctatggactgcgaactgatttccaaggtaacttgtttgaaggtagcgcctctttattagcaattgcagatgaattaaaagaaattaagacaatttgccattgtgggaaaaaagctactatggttgttaggttggatggaaatggtaatgttgttaaagaaggtgcacaaattgaaatcgggggaaatgataaatatgtttctttatgcagaaagcactggaaattggatatgcaaataaataatttagtgtaa

SEQ ID NO: 248100 - DNA, 571 bp, Unknown
  Bacterial polypeptide expressing nucleotide sequence isolated from the Sargasso Sea
attgtacttttactattcagcaatgaacgcgggtaaatccacctctctcctacaatcttcctataactaccgcgaacgcggcatgaacaccttagtgatgactgcctccatcgatgacagatatggtaaaggtaaagtggcttcacgcattgggattgaaactgaagcccaggtatttagtagccaagacaatctgatagacatgatcaccactgcccatcaacaaaatcacttaagttgtgtattggtggatgaatgccaattcttaagcaaagagcaagttaaacaacttacttatgttgttgataaaattgatatccccgttttgtgctatggtttacgtaccgacttccaaggcgaactcttcagcggcagtcattatttattggcttgggccgataaattagttgaactgaaaaccatttgtcactgtggccgtaaagccaatatggtggtgcgcctcgatggtgaaggcaaagtgatgcgtgaaggtgagcaggtcgcaattggcggtaatgaaagttacgaatcggtttgccgtaagcattttcgtgaatttatttgggattga

SEQ ID NO: 248101 - DNA, 565 bp, Unknown
  Bacterial polypeptide expressing nucleotide sequence isolated from the Sargasso Sea
tatgactttatcaccaaaaaactcaggatggattgaagtaattactggcagtatgtttagtggaaaaactgaagaattgattcggcggatacgaagggcagaaattgctaaaatgaaaacggttctatttaaaccatttattgataaccgttatagttctaaacatgttgtttcccataataaatcaaagctagaatcaatcatggtcaaaacatcaaatgaaataattaaatattcaaatgaaatggatgttatcggaattgatgaagctcaattttttgacaatcagattgtggacgtttgtaaaagattagctgataaaaaaatacgagttattgttgccggccttgatacagattatagaggaaaaccgtttggttttatgccacaattaatgtgtgaatcagattatttagataaattaagagcaatctgtgttatatgtggtaaccctgcatcatacactcaacgcactatctcaaattcaaaacaagtgcttatcggtgaaacagatatgtatgaagctcgatgcagaaattgttttgaactcccagtaaatgattaa

SEQ ID NO: 248102 - DNA, 604 bp, Unknown
  Bacterial polypeptide expressing nucleotide sequence isolated from the Sargasso Sea
atggcaaaactttatttttattacgcagcaatgaatgccggaaaaagtacaaaccttcttcaatcagctcataactacgaagaaagaaacatgaaaacattaatttttacacctaaattagatgatcgatttggagaaggcaaagttacatcaagaattggtctagaaagagatgttgagagattcgagggtgaagatgatttatatgtttggaccgcacatgaacatcagagagaaaaagtttcatgcattttagttgatgaagcccagttcttaacacctaaacaagtattacagttatctcttgttgttgataaattgaaaatacccgttctttgttatggtttaagaactgattttaggggagagccatttcccggtagtatctatcttcttgggtgggccgatgagttaatcgaactaaaaactatttgtaaatcaggaaagaaagcaacgtttaacgctcgtcttgatgaaaatggaaatagagtaactgaaggtgatcaaatttctattggtttgaactatgaggcacaggcaagagatgtttttgaactagataaagtttcaccaatagattatcaaattccagaagctaattagt

SEQ ID NO: 248103 - DNA, 571 bp, Unknown
  Bacterial polypeptide expressing nucleotide sequence isolated from the Sargasso Sea
ttgtacttttactattcagcaatgaatgcgggtaaatctacctctttattacaatcttcctataactaccgtgagcgcggtatgaatacgttagtgatgacggcttctatcgatgatcgatacggtaagggcaaagtagcttcgcggattggtattgagactgaggcgcaggtttttagccgtgatgacaacttgattgaaatgattaccgctgcccatcaagtgaatcatctgagttgtgtgttggttgacgaatgccagtttttaactaaagaacaagtcaaacaacttacatatattgttgataatatagatatccctgtattgtgctatggattgaggactgactttcaaggtgagctttttagtggtagtcattatttattagcttgggcagataaattaattgagctaaaaaccatttgtcactgtggtcgcaaagcgaatatggtggtgcggctagatggtgaaggaaaagtcatgcgcgaaggtgagcaggtcgcaattggcggtaatgaaagttacgaatcggtatgccgtaaacattttcgtgagtttatttgggattaac

SEQ ID NO: 248104 - DNA, 513 bp, Unknown
  Bacterial polypeptide expressing nucleotide sequence isolated from the Sargasso Sea
accacaactatcaagaaagaggaatgaatacagttatatacacttcgagtgtagacgatcgttacggaaaaaaagaaatagtttcaaggatagggcttagagctgattcaaatatcttttcggaaagcacaaacatctatgaggaagtgcttaatttaaataaaacaaaaaaagtggattgtgtattaatagacgaagctcagtttttaaataaagagcaagtaaaacaattaggtaaaatagtagatatcttgaatacacccgttctaacgtttggaataagaacagactttagaggaaacctattcgaaggaagtgaatatctattagcttgggcagataatttaaaagaaattaagacggtttgtcattgtggcaggaaagccaccatggttttaagattagacgaaaatggtaatgtacttgaaaccggggatcagatagaaataggaggaaatgagaaatatgtttcaatatgtaggaaacatttctatgaaaaaaatattggttaac

SEQ ID NO: 248105 - DNA, 583 bp, Unknown
  Bacterial polypeptide expressing nucleotide sequence isolated from the Sargasso Sea
gatggcagctcttcattttatatattcgacaatgaatgcaggtaaatcaacagcgctattgcaagcaagccatggttatcgtgaaagaggacttgaaaccatggtttttacgtcatcaaaggataaccgttatggtgaatcagaagtggtatcaagagtcggattgagaactcctgctagtacttatgcagaatcagacaatatcttgatgatggtccaagatgtgaataagaaaaatgaattaagttgtgtgctaattgatgaggctcaatttctaaccaaagatcaagttaagcaattaggcaaaattgttgatgaaatgaatattaccgtaatggcttttgggatcagaacagactttcagggtgaattatttgaaggaagcaagtatctcttggcttgggcggatagattaaaagagttacgtgctgtttgtcattgcggaagtaaagccaccatgatcgtacgtgtcagcgaagatggctcaattattagatccggtgaacaggttgaaatcggaggaaatgaaagatacttatcgctttgccgaaaatgtttttacaagggggctattggttcatag

SEQ ID NO: 248106 - DNA, 619 bp, Unknown
  Bacterial polypeptide expressing nucleotide sequence isolated from the Sargasso Sea
aatggcaaagctttactttaattattcttctatgaatgccggtaaatcgactatgcttttacaggccaatcataattacattgagagaggtatgaacccaaggatatatacttctgacttagataatagatttggaaaaggagaaatagtttctcggatagggcttaaagcaaagtcaaatatattttcaagtaaaacagatatatacaaggatttcttaaatagttgcaaaaaatctatagtagactgtgtattaattgatgaagctcagtttctaactcaaaatcaagttatccaacttggtaagattgtcgatgaattagatacaccggtattagcttttggtattagaacagattttcaaggtaatctatttgaaggtagtaaatatcttctggcctgggcagacaatttgaaagaaataaagactgtttgtcattgtggaagaaaagcgactatggtcctaagattaaatgccagaggtgaagtagtatccgacggaactcagatagagataggtggtgaagaaaaatatgtatcagtttgccggaagcattttattgaaaaaaaacattggctaaagtattccaataataaatccagtaaggcaggatgctaa

SEQ ID NO: 248107 - DNA, 583 bp, Unknown
  Bacterial polypeptide expressing nucleotide sequence isolated from the Sargasso Sea
gatggctgcgcttcattttatatattccacaatgaatgcgggcaaatcaacagcgcttctgcaagcaagccatggttatcgtgaaagaggtctcgagacgatggtttttacctcatcaaaggacgatcgttatggcgaatcagaagtggtatcaagagttggtttaagatcaccagcccacacttattctgaatcagacaatatcctgaagatggttcatgatgaaaatgagaagcatgaattgagctgtatactgatcgatgaggcacaattccttaccaaagatcaggtaaagcaattaggaaaaatcgtcgatgaactgaagattactgttatggcctttggaatcagaacggattttcaaggagaattatttgaaggaagcaaatatctgctggcttgggcagataaattaaaggagcttcgtgcggtttgtcattgcggaagcaaagcaactatgattgttcgtgttagcgaagatggttcaatcatgagatcaggcgatcaggttgaaatcggaggcaatgaaagatacttatcgctgtgtcgaaaatgcttttatagcggaactattggtccttag

SEQ ID NO: 248108 - DNA, 770 bp, Unknown
  Bacterial polypeptide expressing nucleotide sequence isolated from the Sargasso Sea
attgaataaaaataaaatctctatatactcaggactttacaaacagttagtaggaaatataaaggatattgacgacttcgacactttttcttactcagatgagataaaaaattatgatttactcatttgtttaggaggagatggttcaattttagactcactttccattgttagaagttcaaatatccctgtttttggtatcaacacaggaaggctaggatttttatctagcatatcttctgaggaagtcaaatctcccttagatgaaatcctatcgggtaatttacaatacgaacgaagaagtatattaaaactttctacaaaatcaaatcacttcggtgatatcaactatgcactaaatgaagtaactgttcaaaaaaaggattcatcctctatgatgaccattcatgcatacgtagatgatgaatatctaaactcctattgggcagatgggttaattgtatcaacaccaacaggttctacaggttataacttaagctgttccggaccaattataatgccgggcagtgaagtatttattataactccaatcgcaccacataatttaaatgtaagacctttaataattcccgataaaaagaaaataacacttaaattagaaggtagggatgatgaatttttagttgctttagacgcaagaagtgaacccattaaaatcaatgaagaactagtaattaatcatggtgagttttatatgaatgtagttcgaactccagaccattctttcttttcaaccatacgtaataaat

SEQ ID NO: 248109 - DNA, 653 bp, Unknown
  Bacterial polypeptide expressing nucleotide sequence isolated from the Sargasso Sea
tatgaagattgcattatacatagcatttcaaaacaaatcttcaattgattgttgtaaagagataattgatcttatttctgagaataatcaacttattatagattctaaatttaaaaatgatttagatgaaagtaaaagagatagttttattttttttgattctaatgaaccaatagatagtgacatagactttgtttttgctataggtggtgatggaacaattttaagatctataacttatgttaaagactcaaacattccaattttgggagttaacacaggcagattaggattcttaactagtattcagaaagaaagtataagtgatgctatatcacaaattaagaataaagagtacactgtcattgaaagaactattcttcgagttaatttaggctctacaaataatgcttttgctgattatccttatgccctgaatgagattactattcaaaggaaggacactacttctcttttaaatatttcatgtgaaatcaatgataattatctaacaaattattggtctgatggcttaatagtttcaacaccaaccggatctacaggatattctctaagtaatgggggctcaatagtatcaccagaatcgaatgtaatattattaaaccatatagcacctcataatattaatatga

SEQ ID NO: 248110 - DNA, 514 bp, Unknown
  Bacterial polypeptide expressing nucleotide sequence isolated from the Sargasso Sea
tggatttcctgtttttaatgcagataaagaggtattaaaaatctacaaacataatagagtttgttttaaaaaaataaaacaaaagtttgctaaatataaattatcatatccacttaaaaaaaaagatttagctaaaataattattaaaaacaaagagaatattaaaaaaatcaataaaattgtacatccgttagtaagaaaaagaattaaattttttttaaaaaaaaataaaaataaaaaggccgttgttcttgatatacctctcttactagaaaataatctttacaataaaaaatatattttaatatttgtagagtcaaaaaataaaataattttaaatagattaaaaaaaagaaaaaattacaaccccaaggtattaaagatattaaaaaaaattcaacttcctttagaatttaaaaagaaaaaatcagattatattattaaaaataattttgcaaaatcttctgtaaaaaaaagtgttaggttgttaaaaagaaaaatatttaaaaaatga

SEQ ID NO: 248111 - DNA, 598 bp, Unknown
  Bacterial polypeptide expressing nucleotide sequence isolated from the Sargasso Sea
atgcttattggtttaacaggtggaattggatccggcaaaagcttagctggggatttttttaaaagtaaaaatattgatgtaattgatgctgatgatcttgcccacaatgctctagatataaaaggagaggggtacaaaaagtttttagatattttcggagaaacgtttctagatgaaaattctgaaatagatcgaaaagctcttagaaagtatatttttcaaaatccagaaatgaaaaataagttggaggaaatagttcatccgattgtgcaaaatggcatattaaactttatcaataattcaaatagtatatataggattattattgttccacttatagcagaaacaaacagttcttcattttatgaccgggttttggcaatagattgcaaaaaagaaatccaaatagaaagagcctcaaaaagagataactccaatgaagagcagatcttaaaaataattcagtctcaggcttcatccgaggataggaataagatcgctaatgatgtagttgaaaataatgatactaaagatgaatttttaatgaatctagaagatattcataaaaaatacttaattcttgcaaacaatgattaac

SEQ ID NO: 248112 - DNA, 604 bp, Unknown
  Bacterial polypeptide expressing nucleotide sequence isolated from the Sargasso Sea
atgggtaagagtttaaaaataggactgacgggtggaatagcatcaggtaaaacgacaattagtgattattttaaagcacttggcatactaattattgatgccgatgttatatctcatgaagttacgaagccaaatgggtcagcatttgaagaaatcatatcctcgtttggatcaaatatccttgatgagagtggtttaatcgatagaaaaaaaatgagggcaataatttttgatgatgcaagcaagaaggagatgcttgaaggaattatacatcccaaggtcagagagaaaatgtttaatttagtttcacaatcaaataatcattatttgattctttctgtgcccttattgattgagactggaatgaatcaaatgatggatagaacccttgtagtagattgctcagttcagactcaaattgaacgtttaattcagcgggataaaattaacttaaatgaagcaaagtctatattgagaaatcaaacaaatagatcaactcgtctaaaagtagctgatgacttgattgttaatgaaaaaaatgtcactttgagtgacctagaaaaagaagtatttgaattgcataggatttattccaaattgtaat

SEQ ID NO: 248113 - DNA, 586 bp, Unknown
  Bacterial polypeptide expressing nucleotide sequence isolated from the Sargasso Sea
cttgggtctaacagggatcaatggggaatgggaatgggaaacaagcacagcatccttgtttgaaaaatacaattgtggagtatgggatgctgataaagctgtacatagactttatgcaaaaggtggtgaagcggtaaagccaatagctgagctttttccaaaggccataacaaagtgttcggtaaataggacaaagctaaaacaatgcctaagcgaagattttgaaaaaataactttattagaaaatatagttcaccctttggtgtcagcggataggaaaaaatttatcgaagacacaaaatatgaaattaatgtattcgacataccattgttgtttgaaactggttctaataaaatcatggataaagtagcatgtgtatttgtttcgaagcctatccagttgcagagaatacggtcacgaagatctatgacagaagaacagatagaaaaaataataaaacaacagatgccaatagaaaaaaaatgtaagttatcagattttgttatagaaacatacaataaaaaagatactgaaaaacaagttgtaagtataattaaagagatagaaaaatgtctatatgcgtga

SEQ ID NO: 248114 - DNA, 598 bp, Unknown
  Bacterial polypeptide expressing nucleotide sequence isolated from the Sargasso Sea
atgatagttggacttacaggcggaataggatctggaaaatcttcagctgctaaattttttattgaacttgggatagatgtaattgatgcggatgaagtttctaagaacattttagattctaacatagaagcaaaagataaatttgtagatatctttggtaatgaatttcttgatactaataataaaattgatcgaagcttgcttaggtcagaaatatttaaagatgaacaaaagaaaactcttttagaatcaattattcacccattagttagagaacaaattttaaaatttattgagaactctaaaagcatatataaaattattatggtacctcttatttttgaaacaaaatcagaaagtttttatgacaaaatacttgttgtagattgtgaagaagaaatacaaatcaagagagcgagcaaaagagataaaaaatctactgataacataattaatatcatgaaggcgcaagcatcaagacaagagagaaactcaattgcagatataataattatgaataatgattcacttgaagatttaaaaaaagaagttacaaaaactcatcaaaaactgcttggtataaatataaatgaataaa

SEQ ID NO: 248115 - DNA, 181 bp, Unknown
  Bacterial polypeptide expressing nucleotide sequence isolated from the Sargasso Sea
catgcaacgccgcatcgggctcaccggcggcatcgccagcggcaaaagccgtgtgggccgcctgctggaagcgtatggctggcctgtactcgacgccgacagctacgcccgggaagccctggcagctggcagcgacgccacgcttgaagtgctgaagcgctggggagatgccgtgcgcgcg

SEQ ID NO: 248116 - DNA, 592 bp, Unknown
  Bacterial polypeptide expressing nucleotide sequence isolated from the Sargasso Sea
atgtataaattaggaataactggaggaattggatctggaaaaactaccgcatctcttttttttgaaaagaagggcgctaaaatatttaatgcagataaagaagcaaaaaaacacctcaaaaacactataacacttcaacataaaataattgaaagtttaggaaaagatgttgtggaaaataataaattatcacttaagaaacttgctgaagtctcattctcaaataagcttaatcaagaaatattaaatggtattatgtggccagaggtatatttattaattgatgctgcaatagataaagctaaatctaaaaaaaatgaaatatttattctagatgccgcaatgatatttgaggctaagcttgctagctttctagatgaagtactattggtaactgcaaaaaaaacaatacgaattgaaagagctctaaaacgtaagaatctaccactagagcaaattcaaaacaggatgtcacttcaagttacagaaaaagagaaacgttctaaagcagattttattattgagaataatagtacagaagaaaaattctatgataaattagaggaattttattcttcgctatccatttaga

SEQ ID NO: 248117 - DNA, 253 bp, Unknown
  Bacterial polypeptide expressing nucleotide sequence isolated from the Sargasso Sea
atggatattcttcaaaaaacaaaaaacaaacagaggagaattggtttaacaggaggtattgccagtgggaagacaaccataactaattacattagaaaacatagaaacattccaatattagatgcggataatttatcaagagaattaatcaaaccaaacacatatggatataagaaaattttagattattttggaaataaaattattgataataagaacaattcagaaagattaataaacagaaaactttaag

SEQ ID NO: 248118 - DNA, 595 bp, Unknown
  Bacterial polypeptide expressing nucleotide sequence isolated from the Sargasso Sea
gatgttaaaaataggattaacagggggtattggctccgggaaaagtgaggtgagtaaatttttaaatttatggggcgcttatatctttgatgcagataaagaggccaaaacaatcattgataaaaataaaatagcccaaaaggaaataattgaagagtttggaagtgatgttataaataaagaaaataaaatagaaaagaaaaagctagctagaattgcttttcaggatgattttcatcagtcaaaacttaatgctattgttcatccatatgtttttaaaaagatcgatgaaacatttgaaaaaatagctaaagaaaataaacataaaatattcgttgttgatgctgcactcatttatgaatctggtgcagatacacacatggactatgttattgttgttacatcactattaagatatcggacagagagggtaatgagcaagggggaaatatcgcgggatgattttatgaaaagagttgatctacaatggtctgatgaagataaagaacacatggcagattatgttattcagaacaatgctgatataaaaacattagaaaacgaatcaaaaaagatatttgaaactcttttttag

SEQ ID NO: 248119 - DNA, 601 bp, Unknown
  Bacterial polypeptide expressing nucleotide sequence isolated from the Sargasso Sea
atgttgcgcgtgggcattaccggtggcatcggcagcggcaagaccgccctgaccgactggctcgcgacccaaggcattgtcattgtcgatgccgatctcgccgcccgcctcgtggtcgagcccggccaaccggcgctgaccgaaattgccgagacgtttggtgaggaattcctgctacccgacggacaactcgaccgcgccgcgctccggcaacgggtcttcgccaatgaagatcagcgcaaagcgcttgaggtcattacccatcctcgtattcgggatgaactggcccggcagatgagcgaggcgggctcaccctatgtcgtactgagctccccactcttactggagagcggtcagtcggcgatggtggatgtcagtgtggtagtcgacgtgcccgaggcactgcaaatcgagcgcacgatggcccgggatcagaatgatcggcagctggttgagcagatcatggccgcgcaactggatcgggaaacgcggattgcacgcgctgacatggtgatcgacaacagcacgtcgctggacgcactgcacaagcgcgcggcggtattgcacgagacactgctggcacgcgcagcggcgcattaac

SEQ ID NO: 248120 - DNA, 142 bp, Unknown
  Bacterial polypeptide expressing nucleotide sequence isolated from the Sargasso Sea
tatggatattcttcaaaaatcaaaaaacaaccaaagaagaattggtttaacaggaggtattgccagtggtaagacaaccataactaattacattagaaaacataaaaacatcccaatattagatgcagacaatttatcaaga

SEQ ID NO: 248121 - DNA, 604 bp, Unknown
  Bacterial polypeptide expressing nucleotide sequence isolated from the Sargasso Sea
tatggatgaaagtaaaaaaataggtctgacgggtggaattgcatctggaaaaacaactgtcagcgattgttttgaaaaaattggcgctcatgtgattgatgccgatgtgatttctcatgatgttaccaaacccgatgggtccgcattcagtgagatcatatcctcttttgggccagatattcttgatgagaatggttggatcaatagaaaaaagatgaggtcgataatctttgatgatgtcagtaagaaggaaatacttgaagaaataatacatcccaaggtcagccaagaaatattgaaagcaatcaatcaatcgaatgagcattatttgatcatttctgtacccttattgattgagactggaatgatacaaatgatggacagaactcttttggtggactgttcagagactactcaaatagagcgattgatgaaaagagatgaaatcactttacatgaagcaaggtccataatggctaatcaagcgcttagatcagatcgtcaaaggtttgccgatgacttgattgttaatgaaaataatgtcactttgatagaattagaagagcaagtgcttgaactttcacagcgctattccaaattataa

SEQ ID NO: 248122 - DNA, 369 bp, Unknown
  Bacterial polypeptide expressing nucleotide sequence isolated from the Sargasso Sea
acttaaaaaaaataactttattagaaaatattgttcaccctttggtgtcagcggatagggaaaaatttatcgaagacacaaaatatgagattaatgtatttgacataccattgttgtttgagactggttctaataaaatcatggataaagtagcatgtgtatttgtttcaaagcctatccaaatggagagaatacggtcacgaaaatctatgactgaagaacagatagaaaaaataataaaacaacaaatgccaatagaagaaaaatgcaggttatcagattttgttatagaaacgtacaatgaaaaagatactgaaaaacgagttgtaagtataattaaagagatagaaaaatgtttatatgcgtgaa

SEQ ID NO: 248123 - DNA, 592 bp, Unknown
  Bacterial polypeptide expressing nucleotide sequence isolated from the Sargasso Sea
atgacaaaaactatagcaataacagggggcataggctcgggtaaatcaaccttatgtagtaaattaaaagaaaaaggctttaaaattcatagctcagatgagcaggtggccaaaatatataaaaaccctgaaaaaaaatttgttacttatttacgtaccataggtttgtctaaatccatttcaaaaaaaaacatagataaaaaaattatatcaaagattatatttgaaaacacacagataagaaaaaagctcgagttatacatatttaaaatagttagaaaaaagagatctgattttataaaacaagaaaaacaaaaaaaaacaagattaatatttattgatataccactattgtttgaaaacaatttagagaaacagttcaacaaagtaatatcgataatagcctccaaacaagtaagattaaaaagattaaaaaaaacaagaaaaatgactgaaaaccaatttaagaatataactcgatctcaaacatcagacgttataagaaaaaagaaatctgattatgttatttataacaactcgacattaaaggattataaaattaagattaataagctaataagtaaactttagt

SEQ ID NO: 248124 - DNA, 557 bp, Unknown
  Bacterial polypeptide expressing nucleotide sequence isolated from the Sargasso Sea
aatgattgaccaaaaacaaacaaacaatctttgtcttagatggaaaggcaagcagagaagaataggtatcactgggggtatcgccagtggaaaaacaatcattggagattttctatttcaagctaagcaatggcctattttagacgctgacttatacgctcatgaagcattaagtgctgaaagtgaaatagtcaaaaaagtctggttgagatatggaagtcaaataattaaaaattcaagtaaaaataatcaaattattaatcgcaaagcattggccaaaatagtttttcaaaatgaaattgaaaaaaaatggctagagggaataatacatccattcgtcaacagaagaattgaagaagaattagaaaaattgaaatcaaattcaattgtaattttgattattccactcctatttgaaaaaaattatacagggttatgtagtgaaatttgttacatagattgccctagaagcatggcattaaagcgacttcagtcaagagataatttaagtattaaagaagcaaatcaaagaattgatgctccatggggcaacgctt

SEQ ID NO: 248125 - DNA, 592 bp, Unknown
  Bacterial polypeptide expressing nucleotide sequence isolated from the Sargasso Sea
atgtatgtacttggaataactggtggaattgggtctgggaaaagtacagcttcaaattatttaaaaaacaaaggagctgttatattcaatgccgatcaagaagcaaagaaacatcttaagcacacaaaaattctacaaaatagaattatagatgcatttggtcaaagggttgtcgaaaaaaataaattaagtataagcaaattagctgaaacagcattctcgaataagatagatcaaaaaattctaaatggattaatgtggccagaagtatttatactagttgaaaaatcaattaatgaagccaagcaaaataaagaaaaactatttgttgtagatgcggcaatgatttttgaagctaactttgaacatatgtttaattcaactctattaattctaactcgaaaaaaaatcagactagagcgcgctcttaaaagaaaaaatttacatttagagcaaattcaaaatagaatgtctttacagatgccagaaactgaaaagaaaattaaagctgactatattattaataatgatggtactatagaaaatttctataaaaaaatggatgattttatggagcagataaatttctaac

SEQ ID NO: 248126 - DNA, 595 bp, Unknown
  Bacterial polypeptide expressing nucleotide sequence isolated from the Sargasso Sea
atgctaaaaattggtttaactggaggtattggttctggaaaaagcgaggttagtaaatttttccaagcttggggtgcatacatttttgatgcagataaagaagcaaaacatattataaataccgatgaaagtgctcaaaaagaaataattaaagaatttggcagcgatgtaatagatgcggaccaaaatatagataatcaaaaattggctagagttgcattccaagatgaatttcatcagctagctttaaattccataatacacccacatgtgtttaaaaaaattgattctgcatttgaaaaaattcaacaacaaaacaaacataactgctttgttgttgatgctgctcttatttatgaatcaggggctgacacacatatggattatgtaattgtgattacttctttacttcgatatagaacagagagagtaatgtcaaggaataacatgacaagagacgactttttgaaaagagtatcactacaatggccagatgaagacaaagagcatatggcagattatattatacaaaataattcagatttaaataatttagaaagagaatcaaaaaaaatatttgattcaattatttagg

SEQ ID NO: 248127 - DNA, 604 bp, Unknown
  Bacterial polypeptide expressing nucleotide sequence isolated from the Sargasso Sea
atggatgaaagcaaaaaaataggtctgacgggtggaattgcatctggaaaaacaactgtcagcgattgttttgagaaaattggcgctcatgtgattgatgccgatgtgatttctcatgatgttaccaaacccgatgggtctgcattcagtgagatcatatcctcttttgggccagatattctaaatgaagatggatggatagatagaaaaaaaatgaggttgatgatctttaatgatgtgagtaagaaggaaatgcttgaagaaataatacatcccaaggtcagccaagaaatatttaaagcaatcaatcaatcgaatgagcattatttgatcatttcagtacccttattgattgagactggaatgatacaaatgatggacagaactcttttggtggactgttcagagactactcaaatagagcgattgatgaaaagagatgaaatcactttagatgaagcaagttccataatggccaatcaagcgcttagatcagatcgtcaaagatttgccgatgacttgattcttaatgaaaaaaatgtcactttgaaagaattagaagagcaagtgcttgaacttcacaagcgctattccaaattataaa

SEQ ID NO: 248128 - DNA, 328 bp, Unknown
  Bacterial polypeptide expressing nucleotide sequence isolated from the Sargasso Sea
atgattgtaggcctcacgggtggaattggatctggcaaatcagctgctgcaagtttttttaaaaatgaaggtattagtgtcatagatgcagatcacgtagctaaagaggttgttgaaaaagatactcctggctttaaaaaagttgtcgaatattttggtactgaaataattcatgctgatggttcgatagacagagctaagctcagaaaagaggtctttgagagtattgaaaaaagagaggcccttgaatctattactcatcccttagttcgcgaaaagatgttagaaagaatactagcatctaaatcaccatactcaattattgagg

SEQ ID NO: 248129 - DNA, 598 bp, Unknown
  Bacterial polypeptide expressing nucleotide sequence isolated from the Sargasso Sea
gatgcttattggtttaacaggtggaattggatccggcaaaagcttagctggagattttttcaaaagtaaaaatattgatgtaattgatgctgatgatcttgcccacaatgctctagatatagaaggcgagggatacaaaaagtttttagatattttcggggaaacttttctagatgaaaactctgaaatagatagaaaagctcttagaaagtatatttttcaaaatccagaaatgaaaaataagttggaggaaatagttcatccgattgtgcaaaatggcatattaaactttatcaataattcaaacagtatatataggattattattgttccgcttatagcagaaacaaacagttcttcattttatgaccgggttttggcaatagattgcaaaaaagaaatccaaatagaaagagcctcaaaaagagataactccaatgaagaacagatcttaaaaataattcagtctcaagcctcatctgaggataggaataagatcgctaatgatgtagttgaaaataatgatactaaagatgaatttttaatgaatctagaagatattcataaaaaatacttaattcttgcaaataatgattaa

SEQ ID NO: 248130 - DNA, 598 bp, Unknown
  Bacterial polypeptide expressing nucleotide sequence isolated from the Sargasso Sea
atgacaaaaattattggcataacagggggaatagggtgtgggaagaccacacttgctgaatatttaaaaaaaaacaactttaaggttcatgagtcagacaaggttgtttcacaaatttacaacaaacccaaaaaacaatttatattttatttaaaaaaaaccttctctaacgaaattgtgaatcacaaaaaaatcaacaagtcaaaaattgctgaaataatttttaacaataccacaacaaaaaaaagccttgaaaaatatcttcacaaagaggttaaaaaatccagagatgtttttataaaaaaaaacctcaaaaacagcaaaggcgcactcttctttgatgtccctcttttgtttgaaaacaatatggaaaaaaaatttgatgttgttttgtgcattattgcaaagaaaaaaaccagagccgaaagggtgcttaaaaacaaaaaatttacaaaaccaacattgaaaaaaatttttaaatcccaaatatctgactcagaaagaaaaagaagatcagacatggttatttataacaacaaaaccaaaaaagactttattttttcaacagataaggctttaatagaattattaaaatgag

SEQ ID NO: 248131 - DNA, 298 bp, Unknown
  Bacterial polypeptide expressing nucleotide sequence isolated from the Sargasso Sea
tatggatgaaagtaaaaaaataggtctgacgggtggaatagcatctggaaaaacaactgtcagcaattgttttaaaaaaattggtgctcatgtgattgatgccgatgtgatttctcatgatgttaccaaacccgatgggtctgcattcagtgagatcatatcctcttttgggccagatattctaaatcaagatgggtggatcgatagaaaaaaaatgaggtcgatgatcttcaatgatgtgagtaagaaggaaatgcttgaagaaataatacatcccaaggtcagccaagaaataatt

SEQ ID NO: 248132 - DNA, 232 bp, Unknown
  Bacterial polypeptide expressing nucleotide sequence isolated from the Sargasso Sea
tatggatattcttcaaaaatcaaaaaacaaccaaagaagaattggtttaacaggaggtattgctagtgggaagacaaccataactaattacattaaaaaatataaaaacattccaatattagatgcagataatttatcaagagaattaatcaaaccaaatacatatggatataagaaaattttagattattttggaaataaaattattgatcataagaacaattcagaaagg

SEQ ID NO: 248133 - DNA, 364 bp, Unknown
  Bacterial polypeptide expressing nucleotide sequence isolated from the Sargasso Sea
atgcttaaaattggaattactggaggtatatcaagcggaaagtctacagcctcgctacatctttcaaaaaaagataaagtatttatatttaatgctgaccaagaatcaaaaaaacatttaaaaaaatctttaagcttacaaaaaaaacttatacacgtttttggaaataagataactgaaaacaaaaaaatttctattgacctattagctcaagaagcattctcaaatgaaactaatcataagatattaaacggaataatgtggccagagatattaattttaataaatagagcatatgagaatgctaaaaaaaataaattcaaactatttatagttgatgcagctttaatctttgaagcttaat

SEQ ID NO: 248134 - DNA, 124 bp, Unknown
  Bacterial polypeptide expressing nucleotide sequence isolated from the Sargasso Sea
catgaaaaaaccctatatcatcggtttgaccggtggaatcggatgcggcaaaagcaccgtggccagaatgctagaaaaacgcggatatccggtgatcgatgccgatcttcttggacatcgggtg

SEQ ID NO: 248135 - DNA, 370 bp, Unknown
  Bacterial polypeptide expressing nucleotide sequence isolated from the Sargasso Sea
atgaatattcttcaaaaattaaaaaacaaccaaagaaggattggtttgacaggaggtattgcaagtgggaagacaaccataactagttacataagaaaacataaaaacataccaatactagatgcagaccatttttcaagagaattaatcaaaccaaacacatatggatataagaaaattttagattattttggaaataaaattattgataataaaagcaattcagaaaaggaaataaacagaaaacttttaaggaacattatttttaaacattcagaaagcaaggaatggattgaaaaactgcttcaccccttaattaaagaaagaatgatagaagaatgcagtcaatacagaaataatcaaactatag

SEQ ID NO: 248136 - DNA, 136 bp, Unknown
  Bacterial polypeptide expressing nucleotide sequence isolated from the Sargasso Sea
tatggatgaaagtaaaaaaataggactgacgggtggaatagcatctggaaaaacaactgtcagcgattattttgaaaaaattggcgctcatgtgattgatgccgatgtgatttctcatgatgttaccaaaccagat

SEQ ID NO: 248137 - DNA, 463 bp, Unknown
  Bacterial polypeptide expressing nucleotide sequence isolated from the Sargasso Sea
aatgacaaaaactatagcaataacaggcggcataggatcgggtaaatccaccttttgtagtaaattaaaagaaaaaggttttaaaattcacagctcagatgagcaggtggccaaaatatataaaaaccctgaaaaaaaatttgttacttatttacgcaccataggtttgtctaagtccatttcaaaaaaaaacatagataaaaaaattatatcaaagattatttttgaaaataaacagataagaaaaaagctcgagttatacatatttaaaatagttagaaaaaagaggtctgattttataaaacaagaaaaacaaaaaaaaacaaaattaatttttattgatataccattgttgtttgaaaataatttagagaaacagttcagcaaagtaatatcgataatagcctccaaacgagtaagattaaatagattaaaaaaaacaagaaaaatgactgaaaaccaa

SEQ ID NO: 248138 - DNA, 305 bp, Unknown
  Bacterial polypeptide expressing nucleotide sequence isolated from the Sargasso Sea
gatgcttattggtttaacaggtggaattggatccggcaaaagcttagctggagattttttcaaaagtaaaaatattgatgtaattgatgctgatgatctcgctcataatgctctagatagagaaggagaggggtacaaaaaatttttagacattttcggagaaacctttctagatgaaaactctgaaatagataggaaagcccttagaaagtatatttttcaaaatccagaaatgaaaaataagctagaagaaatagttcatccaattgtacaaaatggaatattaaactttattaacaattcaa

SEQ ID NO: 248139 - DNA, 268 bp, Unknown
  Bacterial polypeptide expressing nucleotide sequence isolated from the Sargasso Sea
ggtggttctggatataccgttgttatttgaaacgggcggcgattcggcctgcgatgctgtggcggttgtgtctgcgccgttttaccttcagagcttgcgcgtgctggcccggtcgggcatgaccgcggaaaaattttttggaattatggcccgtcaaatgtcggatctggaaaagcgccggcgggcggattttgttattccaacgggccttggcaggcgcaaaagcttgctttccattcgggacatcatcaaagtaacgaccagatga

SEQ ID NO: 248140 - DNA, 437 bp, Unknown
  Bacterial polypeptide expressing nucleotide sequence isolated from the Sargasso Sea
aatgaaattcaaacttggtctaacaggatcaatggggatgggtaaaacaagcacagcaatcttgttccaaaaacacaattgcggagtgtgggatgctgataaagctgttcacagactttatggaaaagatggtgatgctgtaaagccgatagctaagtattttccgaaagctataacagagggctcggtaaataggacagcgctaaaaaaatatctgagcgcagattttgataagataaccctgttggaaaaaattgttcatcccttagtgtctgcagatagagaaaaatttatcgaaaaaacaaaatataagatcaatgtgttcgacataccgttgttgtttgagactggttctaataaaattatggacaaagtagcgtgtgtttatgtctctaactctattcaaaatggagagaatactgtcacgaaaatccatg

SEQ ID NO: 248141 - DNA, 571 bp, Unknown
  Bacterial polypeptide expressing nucleotide sequence isolated from the Sargasso Sea
tatgagaagaataggtattttaggtgatataggttgtggcaaaacatacatagcgaaatgttttggttttcccgtatttaatgctgatttagaagttgcaaaaatttatcgacatgacaaaaaagtctttcaaaagttaaaaaaaaaacttccaaattattttgactcttttcctgtaaaaaaaaaagaaattattgatgcaatattatctaatagaaaaaatttaaaaaaaattattaaaattgttcatcatgaggttagaaaaaaaatgaatgattttttaagaaaaaataaacataaaaaatttgttgtattagatattcctcttcttttggagaacaagattaataaaaaaaaagatatattaatttttgttgagtcaaagaaatcagaaattttaaaaagactaaggaaacgaaaaaattttaatatgaaaatagtaaataattttaaaaggatacaactttcacttgtcttaaaaaagaaaaaatctcaatttataattaagaacaattttaaaaaaaattctgttaaagtaagagttaaagaaattgtaaaaaatttggtatga

SEQ ID NO: 248142 - DNA, 598 bp, Unknown
  Bacterial polypeptide expressing nucleotide sequence isolated from the Sargasso Sea
atgattgttggtcttactggtggaattggctcaggaaaatctgttgctggagatttttttattgaattaggaatcgatgtaatagatgcagatcatgtttcaaaaaacattcttgatgataatgaaagcgcaaaaaaacttttcctagaacactttggtgaaaaatttattgataaaaataacaatgttgatagagctcttttaagagatgaaatttttaagaatgaagataaaaaagaagcacttgaatcaataattcatccacttgttcgtgaggaaatctttaattttatagaaaactcaaatagcgtatataaaatcattatggtcccattaatttacgagactaattcacaagatttttatgacaaaattgtggttgttgattgcaaagaggaaaatcaaattattagggcaagtaaaagagataataaaacaaaaaatgatattatcaatattatgaaaaatcaggcttctagtgacgaaagaatgtcaattgcagacgaggttatcaaaaatgattcatcattggatgatttaaaaaaacaggtaataaaagtccatcagaaattattaggaattaatattgatgattaaa

SEQ ID NO: 248143 - DNA, 217 bp, Unknown
  Bacterial polypeptide expressing nucleotide sequence isolated from the Sargasso Sea
aatgacaacaataatcggtttaacaggaggaattgcttctggaaaaacaacagctgttaattttcttaaaagcaaaggatacccaatacacgattcagattctgttgttaaaaaaatatactcaaaaccaaacaaacaacttattaacttgctaaaaaaaacaagtctttcacgagcaatagtaggtaaaaaaattaatacaaaaattattagggat

SEQ ID NO: 248144 - DNA, 598 bp, Unknown
  Bacterial polypeptide expressing nucleotide sequence isolated from the Sargasso Sea
atgacccaaaagtctataattggtctgaccgggggtataggaagtggaaagagcgccgccgctaaatatttctcaaatcacggagtatcagtggttgatgcagatcaagctagccgagaagttgtgaaaaagggcgaaccagctttgtcatccataagcgattattttggaaaggatatattaaagaaagatggcagtttagataggtcgaagcttcgggtaatagttttcaaagatgaaaaaaaacgcaagtggcttcaatcgctcatgtatccgataaccaacaactggataatcggtgcaatcgaaaaatccaactcatcctatacaatcctgatgaatcccctattaatagaaagtcgacaatacaaatggtgcaaaagaattgcagtggtcgacgtgtcgatagaaacccaaataaatagaaccatgacaagagacgacaacacaagagatcaagtagagtcgataattgcggctcaagttgaccgagcaaaaagacttcaatttgctgacgatgttatcaacaacgaccactcccgaaaggacctagaggaaaagattatcaagcttcacaacaagtatcttacgctatgaa

SEQ ID NO: 248145 - DNA, 646 bp, Unknown
  Bacterial polypeptide expressing nucleotide sequence isolated from the Sargasso Sea
catgaaaaaaccttacataatcggcttgaccggtggaatcggatgcggcaagagcaccgtggccagaatgctggaaaaacgcggatactcggtgattgatgccgatcttcttggacatcgggtgttggaaccttcccatccgggcttcaatgaggtgcttcaggcttttgggaaaggaatccttgaccaggaaggtcgaatcagtcgacccaaattgggattgatggtgtttcaggatccgaaaaaactggaaaagctgaacagcatttcgcatccccacattgccaggatgattgaagaagaatccctaaaactggcccaagaacaggcttcccgaatcgtttttctcgaagccgctttattgattgaaaccaactggcaggaaacatgtcaaaaggtttgggtcattgattcaaaggaggaaaacgttttaaaacgccttgcccttcgaaacggattaagccgggaagaggctaaacaaaggatttcttcccaaatttcttcagaagaacggttggaccatgctgatttgctgttggaaaataatgggaccgagactgatcttgaggaaaaaattgatgaagagcttgaatttatattaaggtttaatagggctgaaatgtccttgactagaagagttaattaa

SEQ ID NO: 248146 - DNA, 271 bp, Unknown
  Bacterial polypeptide expressing nucleotide sequence isolated from the Sargasso Sea
atgggtaagagtttaaaaataggactgacgggtggaatagcatcaggtaaaacgacaattagtgattattttaaagcacttggcataccaattattgatgcagatgtgatatctcatgaagttacgaagccaaatggatcggcatttgaagaaatcatatcctcgtttggatcaaatatccttgataagagtggtttaattgatagaaaaaaaatgagggcaataatttttgatgatgtaagtaagaaggagattcttgaaggaatcattc

SEQ ID NO: 248147 - DNA, 374 bp, Unknown
  Bacterial polypeptide expressing nucleotide sequence isolated from the Sargasso Sea
aaatgtgttaaataaaaaaaatattaaaattatatcaaaaatagttcatccttatgttaaattaaatttaaaaaaatttttaaaaaaaaattttaaaaaaaaatatgtagttcttgatattcctttattaattgaaaataacttatataaaaaaacagacattttagtttacgtaaaagcacctaaaaacttaattttaaaacgtcttaaaaaaagaggaatctttaataaaaaaataatagatattttaaattctcaacaattaaaagttagtaaaaaaattaaaatatcaaaatttttaattgataataaatatggaaaaaaacatattatagaacaaataaagaaaattaaaaaacaattggatgattgag

SEQ ID NO: 248148 - DNA, 595 bp, Unknown
  Bacterial polypeptide expressing nucleotide sequence isolated from the Sargasso Sea
aatgcttaaaattggccttacaggtggtattggttctggtaaaagtgcagttagtacattattttacaattggggagcgtatatatttgatgcagatgctgttgcaaaagaaatattagaaacaaatgaaacagctcagagtgaaataattgcggagtttggaacagatatccttaacagagaaaacaagatagaaaaatttaaactatcaagaattgccttccaagatgagaatcatcaactgagattaaatacaattatacatccttatatctttgaaaaaatcgattctacatttaacagcatactgaaaaaaaataagcatgaattattctgtattgatgctgctttgatttatgaatcaggagcagatacccatatggactatgtagttgttgttacctctcatcttaaattacgcactgaaagagtaatggaacgaggtggattaacaagagatgaatttctaaaaagagtagaattacaatggcctgatgaagataaagttcacatggcagattttgttatccataataatggcagtgaatctgacttatttgatgaagcaaaaaagatttatagcttattaagataa

SEQ ID NO: 248149 - DNA, 418 bp, Unknown
  Bacterial polypeptide expressing nucleotide sequence isolated from the Sargasso Sea
atgacaaaaattattggtttaacaggaggtataggaagtggcaaaactactgttgctcattattttatggagcaaaatattcctgtttatattgctgatgatgaagctagaaaaattacagattcaaaaaatgttattgaaaaaattgtatcaaattttggaaatcaagtcatagaaaatggtacagttaacagaaaagctttagccaatattgttttcaaagacaaggataaattagcccaactcaatgctataattcatcctgaagtaaaaaaacattttaaaaaatggttaaaaaaacatcaaaaacattccttcgtaataaaagaatcggctattttgtttgaatctggttcttatgttgattgtgatgctataattttagttacagctccactagaacttagaatacaacgaa

SEQ ID NO: 248150 - DNA, 361 bp, Unknown
  Bacterial polypeptide expressing nucleotide sequence isolated from the Sargasso Sea
gaatttgaaaaaaattatcaaaattgtccatccgctagtgagatttaatatgaataaatttttgaaaaaaaataacaataagaaatatgttgttttagatataccgctgctattagaaaataaaataaataaaaaaaaagatatattaatttttgtagatggaaataaaaaaaaaactgccctgagattaaaaaaaagatttaattttaacccgaaaattgtaaaaaaatttaaaaaacttcaacttcctttagaatttaaaaaaaaacattcaacttttattataaaaaacaattttataaataaatctgtcaaaaaaaatgttagaaatataaagaaaaaaattttattaaatgcttga

SEQ ID NO: 248151 - DNA, 346 bp, Unknown
  Bacterial polypeptide expressing nucleotide sequence isolated from the Sargasso Sea
catgatagttggtttaactggtggaataggaagcggtaagactgcagtttcagactgctttgaagagctcgggatagttatagtagatgctgatttagcttcaagagtagtagtcgaaaaaggtaaaccatgcttagaacaaatatctgaacgcttcggtcaagatatcctaaatgaagcaggggagttagatagagcaaaattgagagaaataatctttaactctgatgaagagaaagattggctagaatctttattgcatccagccatagcaagacaaatacaagacgaactcaaagcttcaacaagcccttattctatttttagtttcaccccttttacttga

SEQ ID NO: 248152 - DNA, 587 bp, Unknown
  Bacterial polypeptide expressing nucleotide sequence isolated from the Sargasso Sea
tattggacttacaggaggtattggatcaggcaaaacaattgctgggaaatattttcaggactttggagtcgatgtcatagatgctgatgatattgcaaaggctgtcatggaacctgaaggtaaggcttatcaaaaattcattcaaacatttggtattaagtatctagatcatgaaaataaaatagatcgcaaaaaattacgaaagttaatatttgaagacaaagatgccaaagcttctttagagtcaattatccatcccttagtctcacaagagatcggtgcttttattcagtctgccaaaagtccttatcaaatagtgattgtgcctttaataactgaaacatcttctgcagatttttatgatcgcattcttgtgattgattgtgaggttgttaaacaattatctcgggcagcgcaaagagatgcagtcgagattaatgacatccgcaaaattgtcaataaacaagcaaaaagagaaaaacgtaatagcattgctgatgatattattgagaattctggaaccttggaagatttacaaacacaggtcaaagaacaacataaacaatacctgaaattaataaaatgaa

SEQ ID NO: 248153 - DNA, 598 bp, Unknown
  Bacterial polypeptide expressing nucleotide sequence isolated from the Sargasso Sea
aatgatagttggacttacaggcggaataggatctggaaaatcctcagctgctaaattttttattgaacttggaatagatgtaattgatgcggatgaagtttctaagaacattttagattctaacatagaagcaaaagataaatttgtagatacctttggtaatgaatttcttgatactaataataaaattgatcgaagcttactaaggtcagaaatatttaaggatgaacaaaagaaaactcttttagaatcaattattcacccactagttagagaacaaattttaaaatttattgagaactctaaaagcatatataaaattattatggtacctcttatttttgaaacaaaatcagaaagtttttatgacaaaatagttgttgtagattgtgaagaagaaatacaaatcaagagagcgagcaaaagagataaaaaatctacttataacataattaatatcatgaaagcgcaagcatcaagacaagagagaaattcaattgcagatataataattatcaataataattcacttgaagatttaaaaaaagaagttacaaaaactcatcaaaaactgcttggtataaatataaatgaataa

SEQ ID NO: 248154 - DNA, 135 bp, Unknown
  Bacterial polypeptide expressing nucleotide sequence isolated from the Sargasso Sea
catgatagttggtttaactggtggaataggaagcggtaagactgcagtctcagactgctttgaagagctcgggatagttatagtagatgctgatttagctttcagagtagtagtcgaaaaaggtaaccatgctta

SEQ ID NO: 248155 - DNA, 133 bp, Unknown
  Bacterial polypeptide expressing nucleotide sequence isolated from the Sargasso Sea
aatgattattggacttactggcggaattggatctggtaaatcagctgcagcaaatttttttcaaaatgaaggtatcactgtcatagatgcagatgatttagcaagagaggtcattgaaaccgaacacgcctgg

SEQ ID NO: 248156 - DNA, 598 bp, Unknown
  Bacterial polypeptide expressing nucleotide sequence isolated from the Sargasso Sea
atgaccctaaccgtagcaataacaggtggaatagggtcaggcaaatcaactttttcaaacgaagttcttaaaaaaaaattaaaattatttgattctgataaacaggttcataaaatatataaaattccaaaaaaaaattttttagaatacctaaataaaattggccttgaaaaagcagtacaaaacaaaaatattaataaaaacataataagaaacacaatatttacagattataaaattaagaaaaaattagaaaattatatttttaatattgtaaggcgagaaagggaaggttttataaaaaaacacagaagaagaaatactaaaattattttttttgatataccgcttttgtttgaaaatgatttaacaaataatttcgatgttgtaatatcaataatttcttctaaaaaaaataggtttcaaagattaaaatcttcaaaaaaaatttctattgaaatttttaataatattatcaaatcacaaacatcagacgtagtaagaaaagaaaaatctgatatagtaatttacaataacacatctatggaaaactatattaaaaaaattcataaagcgcttgaacgtattttaccatgag

SEQ ID NO: 248157 - DNA, 608 bp, Unknown
  Bacterial polypeptide expressing nucleotide sequence isolated from the Sargasso Sea
aataattttaatgatagtaataggtttaacaggaggaataggatcaggaaagtcatccgtctcagaaatctttgagggcttaggagtgaaagttgttgacgcagatgtagcttctagacaacctgtgatgaaaggacaaccagctttaaaaaaaatcgctgaaaaatttggatcaaatattcttacctctgagggagaattagacagaagaaagctcagagaaattatatttaaagagagttctgcaaaagactggttagaaaatctacttcatccattaattcatcaaatactcattaatggtttagcaactgcgacctcaaaatatgcaattttagtttctcctttgttgtttgaaacaaatcaaaaagacctttgttcaaaaacaatagttgtcgacacaagcgaagacaatcaaatcgatagaaccacaaaaagggataatgttgaagccagccagattaaatcaattattgattcccaaatagatagaaatagcaggaataagcttgcagatataattatttcaaacaatggttctttgcaggaattagaagagaaggtcaaaaaaattcatcaagatttagaaagagaaattcttaaatgaa

SEQ ID NO: 248158 - DNA, 589 bp, Unknown
  Bacterial polypeptide expressing nucleotide sequence isolated from the Sargasso Sea
aatgaaaattatcggattaaccggaggaattggatctggaaaatctagtgttttagaaatctttaaaaaaattggtataagcacatacaatgcagatgaatctgcaaaagaattaataagttctgataaaaaaatcatagactcaataaaacaactatttggagaagatatttataatgaaaatgaactaaactcaaaattagtttctaaaatagtctttaacgataatgaaaaacttaagtctctaaattcaataattcaccctgcagtagctgtagattttgataatttttgctttaaacatagagacgaaaactatattgtaaaagaagcagcaattatttttgaaactaaaacagagaatctttttgataagattatatacgttaaagccccaaaagaagctagaattgatagggtaatgcagagagataaactatctagagatgatgtgttaaatcgaatacagaatcagataaatgaaacttcaattattgataaatgtgattttataattgataatattaatttcactgatttggagggcaaagtattagaaattcacgatacactaataaacctaaggtag

SEQ ID NO: 248159 - DNA, 400 bp, Unknown
  Bacterial polypeptide expressing nucleotide sequence isolated from the Sargasso Sea
atgaaaattattggattaaccggaggaattggatctggaaaatctagtgttttagaaatctttaaaaaaatcggtataagcacatacaatgctgatgaatctgcaaaagaattaataagttcaaatagaaaaataatacactcaataaaacaactatttggagaagacatttataatgaaaatgaacttaactcaaaattagtttctaaaatagtatttaacgataaagaaaaacttaagtctctaaatttaataattcaccctgcagtagctattgattttgataatttttgctttaatcatagagacgaaagctatattgtaaaagaagcagcaattatttttgagactaaaacagagaatctttttgataagattatatacgttaaagctccaaaag

SEQ ID NO: 248160 - DNA, 688 bp, Unknown
  Bacterial polypeptide expressing nucleotide sequence isolated from the Sargasso Sea
ttgataaactatcaaatttattttgtaaatattccttttgtgggagatagtataattagatttggaggatatattcaagcagtcaaatcctcttttttgccaatgggttatttaagctcatcttattctgatgatattcaaaaaatctttagtataacttggattctacttatttgctttgcacttattttatttttaagtgtcatgaaatttaataagaaaaaattgaaaaaatttttaattttattttcactagttatagtttcggcactacctcatctttctatttcaagatcctttggaatatatctgccaagcatttttgctttaatgttaatttcaattttaattgaaaaaacttttaatagttttaacacatccaataacctactaaaattcattagtaagattttatcagtgcttataattttcattggtattactggaggaatttatagatctaatttgcatattgagtcagtaaataaattttcaaattctattgtccaatatgatgctcgtatgctttatcaattaaaggatgcgagtattccagaagagagatttaattataacaaaaagcatttagaaaatttaaatgtttatgagtacaattggaaaaaaacatatagtggtatagtatctccaaaaattattgataataaatatcatccattaaaattttaaa

SEQ ID NO: 248161 - DNA, 619 bp, Unknown
  Bacterial polypeptide expressing nucleotide sequence isolated from the Sargasso Sea
tatggatattcttcaaaaattaaaaaacaaccaaagaaggattggtttaacaggaggtattgcaagtgggaagacaaccataactaattacattagaaaacataaaaacataccaatattagatgcagatcatttttcaagagaattaatcaaaccaaacacatatggatataagaaaattttagattattttggaaataaaattattgataataaaagcaattcagaaagggaaataaacagaaaacttttaaggaacattatttttaaacattcagcaagcaaggaatggattgaaaaactacttcaccccttaattaaagaaagaatgatagaagaatgcagtcaatacagaaataatcaaactatagtattggttattccattattgtttgaagcaaaatttgaagatatttgcactgaaatatggttagttaaatgtcctaaagaactacaaaaaaacagacttatcacaagagataaaattagcgaaaaagaagcatatgaattgataaattttcaattaagttttgaagaaaaaagaaaattctcagatattattttagagaattcggatgatcaaaataaatggatcaatacgataaaagagcttctttaa

SEQ ID NO: 248162 - DNA, 1569 bp, Unknown
  Bacterial polypeptide expressing nucleotide sequence isolated from the Sargasso Sea
accacgagctgtaacagagttatcacatacaattctagtttttgatgctttctacgatgtccaggccaaggcagagcagggaaatgaatttgcaactcaagtattgaatagttggtctgaggctgagtggttcacctccagagatccactgcaacataaacttactttgaccgtatttcgcgtcactggtgaaacaaacacagatgatttgtcaccggcacaagatgcttggagtagaccggatattcctctacacgcccttgctatgttgaaaaacgagcgtgatggtgttacaaacgccatgcagcaactacaagaactgaaagagaaagggttcccgctcgtttatgtcggtgatgtggtgggtacgggctcttccaggaagtctgctacaaactctttactgtggcacatgggagtggacataccgtttgtacccaacaaacgttcgggtggtatcacaataggtgcaaaaattgcaccgatcttcttcaataccatggaagacagtggttctctcccactcgagatgtgtattgataatttgaacatgggagatatcatcgatatatatccatatgatgggatcgtgaaacgtcacaataccgaggaagtactcgctaacttcactcttcgcaatccagttcttttagatgaatggcgagctggaggtagaattccacttataatcgggcgtggtttgacggaacgggccagaaagtattttggccttccaccatccgacatttttacaaagccgagtcaaggaaagaacttggggaagcaggcgtttacatatgcacaaaagatagttgcaaaagcatgtggtctcactggtggaatactaccaggtacgtattgtgagccaaaagttactacagttggtagtcaagatacaactggtcccatgactcgagacgagttaaaagacttagcttgtcttggcttcagtgctgatctagttcttcaatctttctgtcacacggctgcgtatccaaagccggttgatatttcaactcatcactctctcccagatttcgttcgcaccagaggaggtgtatcattgaaacctggcgatggtgtcatccacagctggctaaaccgaatgctcttacctgataccgtaggaacgggcggtgactcacacactcgattcccactgggaatttcattcccagcaggctctggcctagttgcctttggtgctgcaacaggtgtcattccactggatatgccagaatcggttttggttaagttcagtggttctcttcaacctggcatcactttacgtgatcttgtacatgctatcccatatttcgccattcaagaaggattgctcactgtttctaaagaaaacaagctcaatgttttcagcggtcgaattttagaaattgaaggtgttgaacacttaaagtgcgaacaggcatttgaattgtcggacgcaagtgctgaaagaagtgccgccggctgtactataaagctcgataaagagccaattcaagagtatcttgaaagtaatatagtcttgctaaagtggatgatagcccgggggtacggggacaagcgtgc

SEQ ID NO: 248163 - DNA, 598 bp, Unknown
  Bacterial polypeptide expressing nucleotide sequence isolated from the Sargasso Sea
aatgatagttggacttacaggcggaataggatctggaaaatcctcagctgctaaattttttattgaactcggaatagatgtaattgatgcggatgaagtttctaaaaatatcttagatgaaaacttagaggcaaaagataaatttttagacgctttcggtaaagagtttcttgatattaataataaaattgatcgaagtttattaaggtcagaaatatttaaagatgaacagaagaaaactcttttagaatcaattattcacccactagttagagaacaaattttaaaatttattgagaactctaaaagcatatataaaattattatggtgcctcttatttttgaaacaaaatcagaaagtttttatgacaaaatagttgttgtagattgtgaagaagaaatacaaatcaagagagcaactaaaagagacaaaaaatctacagataacattataaatattatgaaagcacaagcatcgagacaagagagaaattcaattgcagatataataatcatgaataataattcacttgaagatttaaaaaaagaagttacaacaacccatcaaaaactgcttggtataaatataaatgaataa

SEQ ID NO: 248164 - DNA, 604 bp, Unknown
  Bacterial polypeptide expressing nucleotide sequence isolated from the Sargasso Sea
catgtttactgtaggcttaaccggcggaataggtagcggcaaaacaaccatagctagctttttcctagaccaaaatatagaagtgataaatgccgacgaaatagccagaaaggttgtggagccgggaacagcagctctatcaaaaatacaagaacggtttggtagcgagatactaattaacgaaaagagtttaaacagggctcttcttcgagagaaaattttcaaagataacagccatagaaattggttagagaatctattgcatcccctcatcgaggaggagattactaatttgatggcaggagccgtttctcgatacgtcatcttagagtcacctctattatttgagacaaaccaacacaagttagtaaatcgcacacttgttgttgacgtttcaccagaaattcaactcgaacgcgctatatcaagagacggcggatctgaagcaaccatcaaagccataatggattctcaaatatcaagggaggatcgaataagtttggccgatgacatattagataatgaacaaaacttgcaatcagtccaaacacaacttaaaaagtttcaccaaaactatcttaatttggccaaaaaaaatgactaa

SEQ ID NO: 248165 - DNA, 595 bp, Unknown
  Bacterial polypeptide expressing nucleotide sequence isolated from the Sargasso Sea
atgattgttggtcttacaggtggtattggatctggtaaatcagctgctgcatgtgtttttaaaaatgaaggcattaatgttattgatgcagacaatcttgctaaagaggtagttgcaaaagatactccaggttttataaaagttgtcgaatattttggctcagaaattattgctgaagatggttcactagatagagccaaattaagaaaggaggtttttggcagtaatgaaaaaaggatagctttagagtctattactcatcccttggttcgagaaaagatgtcagaaaaaatactagcttctcaatctccatactcgattattgaggtaccattgatttttgaaacaaaaagtatgagctcatatgataggattctggttattgattgtgagtcaaaacttcaacttgaaagagcaatcttaagagataataactcaggcgatgtcatacaaaagattattaactctcaatgctccagagaggagaggttaagtattgctaatgatgtgatatctaataatgattctcttaaaaacctgcaaatgagatcattagcaatgcatcatttctatctaggtctgaccaaacaatgaa

SEQ ID NO: 248166 - DNA, 589 bp, Unknown
  Bacterial polypeptide expressing nucleotide sequence isolated from the Sargasso Sea
catgattattggattgacgggtggaatcggaagtggcaagacagctgtttcagatacttttgaagaacttggaatagttgtggttgacgccgatctagcttcgcgagtagtagttgaaaaaggaaagccatgtcttgaagaaatcgccaaacattttggtgatgatattttgactgaaaatctagaattggatcgagctaaactcagggaaatcatatttcagtctgaagaggagaagcattggcttgaatcacttctacaccctgctatcgcaaaacaaattcaggatgaattatctgcttcaagcagtccatatactattttggtatctccgttgttgttggaaacgaatcaaaaagacttttgcaataaagtcttagttgtggatgtcccagttgagttgcagatggagaggactttgaaaagggatggcgtatctgaggaacaagttaaatcaattatcaaagcccaaattagtcgagatgatagactagagttagctgatgaagtcattattaatgatggcagcctagaggatcttcaatctcaggttaaagaattacacgaacgtataatttccgaaatatga

SEQ ID NO: 248167 - DNA, 454 bp, Unknown
  Bacterial polypeptide expressing nucleotide sequence isolated from the Sargasso Sea
atgattgtaggtcttactggtggaattggctcaggaaaatctgttgctggagatttttttattgaattaggaatcgatgtaatagatgcagatcatgtttcaaaaaacattcttgatgataatgaaagcgcaaaaaaacttttcctagaacaatttggtgaaaaatttattgataaaaataacaatgttgatagagctcttttaagagacgaaatttttaagaatgaaaataaaaaagaagcacttgaatcaataattcatccacttgtacgagaggaaatctttaattttatagaaaactcaaatagcgtttataaaatcataatggtcccattaatttatgagactaattcacaagatttttacgacaaaattgtggttgttgattgtaaagaggaaaatcagattattagggcaagtaaaagagataataaaacaaaaaatgatattatca

SEQ ID NO: 248168 - DNA, 589 bp, Unknown
  Bacterial polypeptide expressing nucleotide sequence isolated from the Sargasso Sea
atgataattggtttaactggtggaataggaagcggtaagacagcagtttcagattgctttgaaaagcttgggatagttatagtagatgctgatttagcttcaagagtagtagtcgaaaaaggtaagccatgcttagaaaaaatatctgaacgctttggtcaagatatcctgaaagaatcaggcgagttagatcgagcaaaattgagagaaataatctttaattctgatgaagagaaagattggcttgaatctttattacatccagccatagcaagacaaattcaagatgaacttaaagcttcaacaagtccttatacagttttagtttcaccgcttttactagagacaaatcaaaaagatttttgtgataaagttttagtggtagatgttcctgtcgaaactcaagtagagagaactttgaaaagagatggcgtatctgaagagcaagttcaatctattattaaagctcagatttctcgacaaaagagattggagcatgctgatgaagttatcatcaatgataatactctcgaggctttgcaattagccgtgaaaaaacttcatcaacaatttattgctgaactatgaa

SEQ ID NO: 248169 - DNA, 389 bp, Unknown
  Bacterial polypeptide expressing nucleotide sequence isolated from the Sargasso Sea
tatgggtaagagtttaaaaataggactgacgggtggaatagcatcaggtaaaacgacaattagtgattattttaaagcacttggcataccaattattgatgcagatgtgatatctcatgaagttacgaagccaaatggatcggcatttgaagaaatcatatcctcgtttggatcaaatatccttgatgagagtggcttaatcaatagaaaaaaaatgagggcaataatttttgatgatgtaagtaagaaggagattcttgaaggaatcattcatcccaaggtcagagaggaaatatttaatttagtttcacaatcaaatgatcattatttgattctttctgtgcccttattgattgagactggaatgaataaaatgatggatagaatcc

SEQ ID NO: 248170 - DNA, 166 bp, Unknown
  Bacterial polypeptide expressing nucleotide sequence isolated from the Sargasso Sea
atgtctggatatatagtaggcctgactggcggtattggcagcggtaaaaccactatcgccaatttatttcatgatttaggtgtacaaagtgttgatgccgatctggttgcgcgtgaagtagtgatgccgggagaacccgctttggcagccatagtgcagcactttg

SEQ ID NO: 248171 - DNA, 625 bp, Unknown
  Bacterial polypeptide expressing nucleotide sequence isolated from the Sargasso Sea
atgttgttgataggtgtaacaggatccattggcatgggaaaatctacagtcgccaagatgtttactgagtatggttttggcctctacaatgcagatgacaccgttcactatatttatgaaaacgatgaagaagtaattaataaaattgaagagtcttttcctggaactaaattagagggaaaagtaaatcgaattgcacttagagacatacttaataaagaacctgagaagtttagggatcttgaaaaaattgttcatccagctaccagacggtatcaaatcgtatacattgagaaattaataagcgaagatagtccaggatgtattctggatattcctttattatttgaaacaggtggagaaaagtatatcgatgtttcagttgtggtgacagcatcagaagaaaagcaaaaagaaagagtggttgcggaaagaaaggtacctttagaaatttttaattcgataaagaatcaacaaatgccagaccgagaaaaattaaagaaagcagattatataatttcaacagatcaaaccttagatgagacaaaactcgaagtaaaagatgttgtatctaaaataaaattgattaatcctaaggcatggaaagccttttataagaaatgag

SEQ ID NO: 248172 - DNA, 646 bp, Unknown
  Bacterial polypeptide expressing nucleotide sequence isolated from the Sargasso Sea
catgaaaaaaccctacatcatcggcttgaccggtggaatcggatgcggcaagagcaccgttgccaggatgctggaaaaacgtggatacccggtgatcgatgccgatctccttggacatcgggtgctggaaccttcccatcctggtttcaatgaggtacttcaggcttttgggaaaggaatcctggaccaggaaggtcaaatcagtcgaccgaaattgggattgatggtgtttcaggatccgcaaaagctggaaaagctgaacagcatttcgcacccccacattgccaggatgattgaggaagaatccctcaaactgacccaagaacaggcttccccaatcatttttctcgaagccgctttattgattgaaaccaactggcataaaacttgtcaaaaggtttgggtcattgattcacaggaggaaaacgttttaagacgccttgcccttcgaaacggattaagccgggaagaggctaaacaaagaatttcttcccaaatttcttcagaagaaaggttggaccatgctgatttgctgctggaaaataatgggaccgagactgatcttgaggaaaaaattaatgaagagctagaatttttattaaggtttaatagggctgaaatgtccttaactagaagagataattaa

SEQ ID NO: 248173 - DNA, 519 bp, Unknown
  Bacterial polypeptide expressing nucleotide sequence isolated from the Sargasso Sea
tatgagtaagagtataaaaatagggctgaccggtgggatagcatcaggaaaaacaaccgtcagtaatttttttaagcaatttggaacagaagtgatcgatgcagatgtaatatctcatcaagtcacaaaaccagatggaactgcttttcaagaaatcatatcttcctttggatcaagcgttcttgatgaaaatggtttaatcgatagaaaaaaaatgaggaaaataatttttgatgatgtaagcaagaaggagatgcttgaaagaatcattcaccccaaagtcagagaggaaatgttcaatttagcatcgcaatcaaatgatcattatttgattgtctctgtgcccttattggtcgagactggaatgaatgaaatgatggatagaacccttgtggtagattgctcagaagagactcaaattgaacgcttaatgcatcgagataaaattaccttgggtgaagcaaaatctatattgaggaaatcaacaaatagaacaactcgtctaaaacccgctgatga

SEQ ID NO: 248174 - DNA, 604 bp, Unknown
  Bacterial polypeptide expressing nucleotide sequence isolated from the Sargasso Sea
atggatgaaagtaaaaaaataggactgacaggtggaataggatctggaaaaacaactgtcagcgattgttttgaagaaattggcgctcgggtgatcgatgccgatgtgatttctcataatgttaccaaacccgatgggtctgcgttcagtgaaatcatatcctcttttgggtcagatattcttgatgagaatggttggatcaatagaaaaaagatgaggtcgataatctttgatgatgtaagcaagaagaaaatgcttgaaaaaataatacatcccaaggtcagcgaagaaatatttaaagcaatcaatcaatcgaatgaatattatttgatcatttctgtaccgttattgattgagactggaatgatacaaatgatggacaggactcttttggtggactgttcagaggatactcaaatagagcgattgatgaaaagagatgaaatcactttagatgaagcaaagtccataatggcgaatcaagcacttagatcagatcgtcaaagatttgcggatgacttgattgttaatgaaaaaaatgtcactttgaaagaattaaaagagcaagtgcttgaacttcataagtgctattccaaattataaa

SEQ ID NO: 248175 - DNA, 619 bp, Unknown
  Bacterial polypeptide expressing nucleotide sequence isolated from the Sargasso Sea
tatggatattcttcaaaaattaaaaaacgaccaaagaaggattggtttaacaggaggtattgcaagtgggaagacaaccataactaattacattagaaaacataaaaacataccaatattagatgcagatcatttttcaagagaattaatcaaatcaaatacatatggatataagaaaattttagattattttggaaataaaattattgataataaaagcaattcagaaagggaaataaacagaaaacttttaagaaatattatttttaaacattcagcaagcaaggaatggattgaaaaactacttcaccccttaattaaagaaagaatgatagaagaatgcagtcaatacagaaataatcaaactataatattagttattccattattgtttgaagcaaaatttgaagatatttgcactgaaatatggttagttaaatgtcctagagaactacaaaaaaatagacttatcacaagagataaaataagcgagcaagaggcagatgaattgataaattttcaattaagttttgaagaaaaaagaaaattctcagatattattttagataattcggatgatcaaaataaatggatcaatacgataaaagagcttctttaa

SEQ ID NO: 248176 - DNA, 634 bp, Unknown
  Bacterial polypeptide expressing nucleotide sequence isolated from the Sargasso Sea
atgagcaaatctgatattaaagcatcgccttgggtacttggcttaacaggtggtataggctgtggcaaaacagcggtaagtaatatgtttgagcagctgggtataacaatagttgatgccgacattattgcgcgccaagtcgtaaagcctaaaagcgatggtttaaatgccattgtaagcaaatttggacaaagtattttattgcgcgaaggcacactaaacagaagcgctttacgtgaacgtatttttactaatagtgccgacaaagagtggctaaataatttattgcatccactcattagaaataaaatacataacgaccttactgccgcaaaaagtccatatgtagtacttgtagcaccacttttgtttgaaaacgccctagataaattgtgtaaccgaacgctactgattgatatacctcaaagtgtacaaatagagcgcacagcttcgcgtgataatgtaagtgtagagcaagtaaaagcgattattgcagcgcaaatgtcacgcgaagataaacaaaaaaaagccgatgatattttaaataacgaccgtgcacttagcgacgttaaccacgacttattaacgctacataaacgttatctgcacaaggcacaaatgcaagcaacttaaa

SEQ ID NO: 248177 - DNA, 589 bp, Unknown
  Bacterial polypeptide expressing nucleotide sequence isolated from the Sargasso Sea
aatgaaaattattggattaaccggaggaattggatctggtaaatctagtgttttagagatctttaaaaaaattggaattagcacttacaatgctgatgaatctgcaaaagaattaataagttcgaataaaaaaatcatattcttaataaaacaactattcggagaagatatttataataaaaatgaactaaattcaaagttagtttctaaaatagtctttaacgacaaagaaaaactgaagtctctgaattcaataattcaccctgaagtagctaaagattttgataatttttgctttgaacatagaaatgagagttatattgtaaaagaggcagcaattatttttgagactaaaacagagaatctttttaataagattatttacgttaaagcccctaaagaaattagaattgatagggtcatgcaaagagataatttatctagagatgatgtgctaaatcgaatacagaatcagataaatgaaacttcaattattgataaatgtgattttataattgataacattaattatacagaattggaggaaaaagtattaaaaattcacaatacattaataaacttaaattag

SEQ ID NO: 248178 - DNA, 595 bp, Unknown
  Bacterial polypeptide expressing nucleotide sequence isolated from the Sargasso Sea
tatgctaaaagtaggtttgactgggggtatcggcagtgggaaaagttctgttagcgcactatttagtgattgggggtcttacattttcgatgctgattctgtagctaaagaaatcctaaatcataatgaaactgcacagggagagattattgcagagtttggtacagatatcttagatggaaacaatagtatagataagcaaaagttagcgcgagttgcttttcaagatgagaatcatcaattacgattaaatactataatacacccatatgtattttctgaaatagattcaaaatttgatataatactggcaaagaaagagcatgaaatatttgttgtagatgctgcattaatatatgaatctggggcagacacgcatatggattatgttattgtggttacttctcacttaagattgcgcactcagagagttatggaacgaggtggattaactagagaagaatttctagaccgggttgatctacaatggcctgatgaagataaagtacatatggcagattttgttattcataataatggcacagaaaaaaatcttttagaagaatcaaaaaaggtctttgaccgactaggataa

SEQ ID NO: 248179 - DNA, 589 bp, Unknown
  Bacterial polypeptide expressing nucleotide sequence isolated from the Sargasso Sea
atgattattggtttaacaggaggaataggtagcggaaagacagcagtttctgatagttttgaagcattgggaattacgatcgtggatgcggatcttgcctcaagggtagtcgttgaaaaaggtaagccttctctgaattctatcgaagagcattttggcaatgaaattcttactccagaaggagaacttgatagagcaaagctcagagagatcatctttaactctgattcagaaaaacaatggcttgagtctttgcttcatcctgcaatcgcaaatcaaatacaggaagagctgagctcatcaaagagcccttatacaattttagtttctccgcttttgtttgaaacaaatcaaaaagagttttgttcaaaagttctcgtggtagacgttcctgtggagacccaagtaatcagaactcttgaaagagatggagtttccgaggaacaagttaactcaatcataaattcacaaatcgatagagaaaagcgcttggaattagctgatgaagtcattttaaataatggttcgttggctgatttacaggaagctgtaagagagcttcatcataaatttttatctgaaatatgat

SEQ ID NO: 248180 - DNA, 607 bp, Unknown
  Bacterial polypeptide expressing nucleotide sequence isolated from the Sargasso Sea
atgacaatatttgttggattaacagggggcattgctacaggaaaaagcacaatagttaagtttttgaaaaaaaaaggatataagattcacgactcagatttaattgttaataaaatatattctcaaccaaataaaaaactttttgttattttaaaaaaaattggattatctaagtctattaaaaataaaaaaattgacaaaagcattatcagggatgaaattttttctaataaagtaaagaaaaaaaaattagaaacatttattcacaaagaagtaagaaaatcgaggagtctttttataaaaaaatataaaaataaaaaaaacaaaataatatttttcgatataccccttctttttgaggcaaagctaactcaaatttgtcattatataatcttgctttatgcccccaaaaaaacaaaaattgaaagagccttaaaaagaaaaaccattaacaaaaaagttattacaaaaatactaaagaatcaaatagatgataaaattaaaaaaaagaaatcagactatattatcaacacatcaaaaccaaaaaaccattcttttaaaatgattttaaaggctattagtaatatattagaaacaaatgcgtgaa

SEQ ID NO: 248181 - DNA, 625 bp, Unknown
  Bacterial polypeptide expressing nucleotide sequence isolated from the Sargasso Sea
aatgttgttgataggtgtaacaggatccattggcatgggaaaatctacagtcgctaagatgtttaccgagtatggttttggcctctacaatgcagatgacaccgttcactatatttatgaaaacgatgaagaagtaattaataaaattgaagagtcttttcctggaactaaatcagagggaaaagtaaatcgaattgcgcttagagacatacttaataaagaacctgagaagtttagagatcttgaaaaaattgttcatccagctaccagacggtatcaaatcgtatacattgagaaattaataagcgaagatagcccagggtgtattctggatattcctttattatttgaaacaggtggagaaaagtatatcgatgtttcagttgtggtaacagcatccgaagataagcaaaaagaaagagtggtcgcagaaagaaaggtgcctttagaaatttttaactcgataaagaatcaacaaatgccagaccgagaaaaattaaagaaagcagactacataatctcaacagatcaaactttagatgagacaaaactcgaagtaaaagatgttgtatctaaaataaaattgattaatcctaaggcatggaaagccttctataagaaatga

SEQ ID NO: 248182 - DNA, 580 bp, Unknown
  Bacterial polypeptide expressing nucleotide sequence isolated from the Sargasso Sea
atgaaaattgttggattaactggtggtataggttctggtaaatcttctgttcttaatcaatttaaaaatttaggtataaacacatatagcgctgataatgcagcaaagaagcttataaattcagataaagatttaattaaatcaatcaaaaacctatttggggataatatttacgaaaataatattttagattctgtaaagttgtctaaaattgtttttaaggatccatataaactaaagtcactcaattcgattattcatccagctgttgcaaaagattttgaatcttttataaaaactataaatggagattatattgtaaaagaagtagcgattattttcgagacaaatactgagcataattacaacaagattatattagttagggcaccattagaagaaagaatcaaaagagtaatacttcgagataacctatcaagagaagatgtaataaaaagggtaaataatcaaatagatgattctacaattattgacaactgtgactacataattgaaaatattaatcttaaggatctaaaagaaaaagttcttaagatacatatagacttaattagataat

SEQ ID NO: 248183 - DNA, 604 bp, Unknown
  Bacterial polypeptide expressing nucleotide sequence isolated from the Sargasso Sea
tatgggtaagagtttaaaaataggactgacgggtggaatagcatcaggtaaaacgacaattagtgattattttaaagcacttggcataccaattattgatgcagatgtgatatctcatgaagttacgaagccaaatggatcggcatttgaagaaatcatatcctcgtttggatcaaatatccttgataagagtggtttaattgatagaaaaaaaatgagggcaataatttttgatgatgtaagtaagaaggagattcttgaaggaatcattcatcccaaggtcagagaggaaatatttaatttagtttcacagtcaaatgatcattatttgattctttctgtgcccttattgattgagactggaatgaatcaaatgatggatagagtccttgtagtagattgctcagttaatactcaaattgaacgtttgattcagcgcgataaaataaacttagatgaagcaaagtctatattgagaaatcaaacaaatagatctattcgcctaaaagtagccgatgacttgattgttaatgaaaaaaatgtcactttgattgacttagaaaaagaagtgtttgaattgcataggatttattccaaattgtaa

SEQ ID NO: 248184 - DNA, 595 bp, Unknown
  Bacterial polypeptide expressing nucleotide sequence isolated from the Sargasso Sea
atgttaaaaataggattaacagggggcattggctccgggaaaagcgaggtcagtaaatttttcaatttatggggtgcttatatatttgatgcagatcaagaggccaaaaaaattattgataaaaataaaatagcccaaaaagaaataattgaagagtttggaactgatgttgtaaataaagaaaataaaatagaaaagaaaaagctagctagaattgctttccaggatgattttcatcagtcaaaacttaatgctatagtacatccatatgtatttaaaaggatcgatgaaacatttgaaaaaattgctaaagaagataaacataaaatattcgttgttgatgctgcgctcatttatgaatccggcgcagacacgcacatggactatgtcattgttgtaacatcattattaagatatagaacagaaagagtaatgagtaacggacaaatatcgcgagatgatttcatgaaacgagttgatcttcaatggtcggatgaagataaagagcatttagcagattatgttattcaaaacaatgccgatataaaaactttagaaaaagaatcaaaaaagatatttgaaacttttttttagt

SEQ ID NO: 248185 - DNA, 607 bp, Unknown
  Bacterial polypeptide expressing nucleotide sequence isolated from the Sargasso Sea
aatgacaatatttgttggattaacagggggtattgccacaggaaaaagtacaatggttaagtttttgcaaaaaaaaggatacaaggttcacgactccgattcaattgttaacaaaatatactctcgaccaaataaaggactatttgttattttaaaaaaaattggactatctaagtctattaaaaataaaaaaattgataaaagtgttatcagagatgaaattttttctaacaaattaaagaaaaaaaaattagaaaaatttattcataaagaagtaagaatatcacgaaatctttttataaaaaaacacaaaaacaaaaaaaacaaaattgtattttttgatataccccttctttttgaagcgaacttaactcatatttgccattatatcatcttactttatgcccccaaaaaaacaaaaattgaaagagccttaaaaagaaaaactattgacaaaaaagttattactaaaatattaaagaatcaaatcgatgataaaattaaaaaaaagaaatcagactatattatcaacacatcaaaaccaaaaaaccattcttttaaaatgattttagaggctattagtaatatattggatcaaaatgcgtga

SEQ ID NO: 248186 - DNA, 592 bp, Unknown
  Bacterial polypeptide expressing nucleotide sequence isolated from the Sargasso Sea
aatgacaaaaaccgtagcaataacaggcggtataggatcgggtaaatccaccttttgtagtaaattaaaagaaaaaggttttaaaattcacagctcagatgagcaggtggccaaaatatataaaaaccctgaaaaaaaatttgttaattatctacgcaccataggtttgtctaagtccatttcaaaaaaaaacatagataaaaaaattatatcaaagattatttttgaaaataaacagataagaaaaaagctcgagttatacatatttaaaatagttagaaaaaagaggtctgattttataaaacaagaaaaacaaaaaaaaacaaaattaatttttattgatataccattattgtttgaaaacaatttagagaaacagttcaacaaagtaatatcgataatagcctccaaacgagtaagattaaaaagattaaaaaaaacaagaaaaatgactgaaaaccaatttaagaatataacccgctctcaaacatcagacgttataagaaaaaagaaatctgattatgttatttataacaactcgacattaaaagattataaaattaagattaataagctaataagtaaactttag

SEQ ID NO: 248187 - DNA, 586 bp, Unknown
  Bacterial polypeptide expressing nucleotide sequence isolated from the Sargasso Sea
atgattataggtttaactggcggaatagggagtggcaaaactgccgtttcagatttatttcaagatcttggtattactatcgtggatgcagatttagcctctagagtagtagtggaaaaaggtcgagaggagctcaataaaatctccgatcactttggtcaagatatccttactaaagaaggagaattagatcgagctaagttaagagaaattatttttaattctgaagaagaaaagctatggcttgaatctttgttacatcctgcgatagctgcacagataaaaatggaattagattcctctaagagtctttatacagttttggtttctcctttattgttagagacggagcaaaagaatttctgcactaaagttttagtagtagatgttcctgtagaaatgcaaattcaaagaacaagcgagagagataatgtttctgaagaacaaataaaatccattattgcatctcaaatagatagagattctagactcgaacaagcagacgaagtgattctaaatgatggctcaattcaggatctaaaaaataaagtaaaaaaactacatataaaatttttatcttcatgag

SEQ ID NO: 248188 - DNA, 167 bp, Unknown
  Bacterial polypeptide expressing nucleotide sequence isolated from the Sargasso Sea
catggcgcctggcgagccgttctcgcaacgacgcatcggactcacgggcgggatcgcaagcggcaagagcagcgtgggccattggttggcgcagcaaggtctgccggtgttggatgcggatcaattcgcccgagaggccctcgcacccggtcgcccggccacgacca

SEQ ID NO: 248189 - DNA, 646 bp, Unknown
  Bacterial polypeptide expressing nucleotide sequence isolated from the Sargasso Sea
atgaaaaaaccctacatcatcggtttgaccggtggaatcggatgcggcaagagtaccgtggccagaatgctggaaaaacgcggatatccggtgatcgatgccgatcttcttggacatcgggtgctggaaccttcccatccgggctttaatgaggtaattcaggcttttgggaaagggatcctggaccatgaaggtcgaatcagtcgaccgaaattgggattgatggtgtttcaagatccgcaaaaactcgaaaagctgaatagcatttcgcatccccacattgccaggatgattgaagaagaatccctcaaactggcccaagaacaggctctcagaatcgtttttctcgaagccgctttattgattgaaaccaactggcaggaaacatgtcaaaaggtttgggtcattgattcaaaggaggaaaacgttttaaaacgccttgcccttcgaaacgggttaagccgggaagaggcaaaacaaagaatttcttcccaaatttcttcagaagaacggatgagccatgctgatttggtgatagaaaacaatggcgccgagagtgaacttgaggaaaaaattgatgaagagcttgaatttatattaaggtttaatagggctgaaatgtgcttgactagaagggataattaat

SEQ ID NO: 248190 - DNA, 604 bp, Unknown
  Bacterial polypeptide expressing nucleotide sequence isolated from the Sargasso Sea
atggatgaaagtaaaaaaataggtctgacgggtggaatagcatctggaaaaacaactgtcagcgattatttcgaaaaaattggcgctcatgtgattgatgccgatgtgatttctcatgatgttaccaaacccgatgggtctgcattcaatgagatcatatcctcttttgggccagacattctaaatgaagatgggcggatcgatagaaaaaaaatgaggtcgatcatcttcaatgatgtgagtaagaaggaaatgcttgaagaaataatacatcccaaggtcagacaagaaatatttaaagcaatcaatcaatcgaatgagcattatttgattatttctgttcccttattgattgagactggaatgatacaaatgatggacagaactcttttggtagactgttcagagactactcaaatagagcgattgatgaaaagagatgaaatcactttagatgcggcaaggtccataatggccaatcaagcgcttagaacagatcgtcaaagatttgccgatgacttgattcttaatgaaaaaaatgtcactttgaaagaactagaagagcaagtgcttgaacttcacaagcgctattccaaattataaa

SEQ ID NO: 248191 - DNA, 604 bp, Unknown
  Bacterial polypeptide expressing nucleotide sequence isolated from the Sargasso Sea
tatggatgaaagcaaaaaaataggactgacaggtggaatagcatctggaaaaacaactgtcagcgattgttttgaaaaaattggcgctcgggtgatcgatgccgatgtgatttcccatgatgttaccaaacccgatgggtctgcattcagtgagatcatatcctcttttgggacagatattctcgatgagaatggttggatcgatagaaaaaaaatgaggtcgataatcttcgatgatttgagcaaaaaggaaatgcttgaaaaaataatacaccccaaggtcagccaagaaatatttaaagcgatcaatcaatcgaatgagcattatttgatcatttctgtacctttattgattgagactggaatgatacaaatgatggacagaactcttttggtagactgttcagaggatactcaaatagagcgattgatgaaaagagatcagatcactttagatgaagcgcaatccataatggccaatcaagcgcttagatcatatcgtgaaggatttgccgatgacttgattcttaatgaaaaaaatgtaacttttaaagaattagaagaacaggtgcttgaacttcataagtgctattccaaattataa

SEQ ID NO: 248192 - DNA, 592 bp, Unknown
  Bacterial polypeptide expressing nucleotide sequence isolated from the Sargasso Sea
aatgaaagtagttgggattactggtgggatagcatcgggaaaaagtactatatcttcttatttacaaaataaacataaggcttatatttttgatgctgataaagaagcaaaattattactgaattccaaacttatatctgaaaaaatttataaagcattccctaagcttttagatttgtctaaaacttccattgcaaatgaagcctttaaaaatcaagaatcgcaaagaaaaataaacaatattattcaccctgttataagtgatttaattttggaaagaatcaatgataaaaaaacttcacatactttatttgtaattgacgctgcattaattatagaatctggaatttttaataaacatagagagaatggttctaaattaattctagttactgcagagaaagatttaagactgaaaagggctttagaaagaagtaatttatctgaacaaacaattaataatagaatgaaattgcaaatgaatgatagtcaaaagattaaatacgcagattatattatcaaaaataattcaacaaaatctgaactttataatagagtagatgaaataattaaaaaaataattcatgaataa

SEQ ID NO: 248193 - DNA, 595 bp, Unknown
  Bacterial polypeptide expressing nucleotide sequence isolated from the Sargasso Sea
gatgttaaaaataggattaacaggaggcattggctccgggaaaagcgaagtcagtaattttttcaatttatggggcgcttatatctttgatgcagatcaagaggccaaatcaattattgataaaaataaaatagcccaaaaggaaataattgaagagtttggaactgatgttgtaaataaagaaaataaaatagaaaagaaaaagctagctagaattgctttccaggatgattttcatcagtcaaaacttaatgctatcatacatccatatgtatttaaaaaaatcgatgaaacatttgaaaaaattgctaaagaagataaacataaaatattcgttgttgatgctgcgcttatttatgaatccggcgcagacacgcacatggactatgtgattgttgttacatcactattaagatatagaacagaaagagtaatgagtaaaggggaaatatctcgagatgatttcatgaaacgagttgatcttcaatggtcggatgaagataaagagcatttagcagattatgttattcaaaacaatgccgatataaaaactttagaaaaagaatcaaaaaagatatttgaaacttttttttag

SEQ ID NO: 248194 - DNA, 598 bp, Unknown
  Bacterial polypeptide expressing nucleotide sequence isolated from the Sargasso Sea
atgcttattggtttaacaggtggaattggatccggcaaaagcttagctggggatttttttaaaagtaaaaatattgatgtaattgatgctgatgatcttgcccataatgctctagatatagaaggagagggatacaaaaagtttttagatattttcggagaaacttttctagatgaaaactctgaaatagatagaaaagctcttagaaagtatatttttcaaaatccagaaatgaaaaataagttggaggaaatagttcatccgattgtgcaaaatggcatattaaactttatcaataattcaaatagtatatataggattattattgttccacttatagcagaaacaaacagttcttcattttatgaccgggttttggcaatagattgcaaaaaagaaatccaaatagaaagagcctcaaaaagagataactccaatgaagagcagatcttaaaaataattcagtctcaggcttcatctgaggataggaataagatcgctaatgatgtagttgaaaataatgatactaaagatgaatttttaatgaatctagaagatattcataaaaaatatttaattcttgcaaacaatgattaac

SEQ ID NO: 248195 - DNA, 598 bp, Unknown
  Bacterial polypeptide expressing nucleotide sequence isolated from the Sargasso Sea
atgcttattggtttaacaggtggaattggatccggcaaaagcttagctggagatttttttaaaagtaaaaatattgatgtaattgatgctgatgatcttgctcacaatgctctagatatagaaggagaggggtacaaaaagtttttagatatttttggaaaaacttttctagatgaaaactctgaaatagataggaaagctcttagaaaatatatttttcataatccagaaatgaaaaataagctagaggaaatagttcatccgattgtgcaaaatggaatattaaactttattaataattcaaatagcatatataggattattattgttccacttatagcagaaacaaatagctcttcattttatgatcgggttttggtaatagattgtaaaaaagaaatccaaatagaaagagcttcaaaaagagataattctaatgaggaacagatcttaaaaataattcagtctcaggcttcatctgaggataggaataagatcgctaatgatgtagttgagaataatgatactaaagatgaatttttaacgaacctagaagatattcataaaaaatacttaattcttgcaaacaatgattaat

SEQ ID NO: 248196 - DNA, 598 bp, Unknown
  Bacterial polypeptide expressing nucleotide sequence isolated from the Sargasso Sea
tatgcttattggtttaacaggtggaattggatccggtaaaagcttagctggagatttttttaaaagtaaaaatattgatgtaattgatgccgatgatcttgcccataatgctctagagaaagaaggagaggggtacaaaaagtttttagacattttcggagaaacctttctagatgaaaactctgaaatagataggaaagctcttagaaagtatatttttcgaaatccagaaatgaaaaataagctagaggaaatagttcatccaattgtacaaaatggcatattaaaatttatcaataattcaaatagtacatataggattattattgttccacttatagcagaaacaaatagctcttcattttatgaccgggttttggcaatagattgcaaaaaagaaatccaaatagaaagagcttcaaaaagagataactccaatgaggagcagatcttaaaaataattcagtctcaggcttcatctgaggataggaataagatagctaatgatgtagttgaaaataattatactaaagatgaatttttaatgaatctagaagatattcataaaaaatacttaattcttgcaaacaatgattaa

SEQ ID NO: 248197 - DNA, 763 bp, Unknown
  Bacterial polypeptide expressing nucleotide sequence isolated from the Sargasso Sea
cttggaaccacctgatcccatttcgaactcagaagtgaaacgagttaacgccaatggtagtgcagggtctccctgtgtgagagtaggaaatcgtcaggctttttattttaggctcttagtaaaaaatactaagagcctttttttatggctaagatataattatggaatgatagtaggacttacaggtggaataggatctggaaaatcttcagctgctaatttttttattgaacttggaatagatgtaattgatgcggatgaagtttctaagaacatcttagattctaacttacaggcaaaagataaatttttagacgctttcggcaaagagtttcttgatactaataataatattgatcgaagcttactaaggtcagaaatatttaaagatgaacaaaagaaaactcttttagaatcaattattcacccactagttagagaagaaattttaaaatttattgagaactctaaaagcatatataaaattattatggtacctcttatttttgaaacgaaatcacaaagtttttatgacaaaataattgttatagattgtgaagaaaagatacaaatcaatagagcaagcaaaagagataacaaatctagagataacataatcaatattatgaatgcgcaagcatcaagacaagatagaaactcaattgcagatataataattatgaataatgattcactcgaagatttaaaaaaagaagttataaaaactcatcaaaaactccttggtataaatataaatgaataa

SEQ ID NO: 248198 - DNA, 188 bp, Unknown
  Bacterial polypeptide expressing nucleotide sequence isolated from the Sargasso Sea
tctgatcgggattacaggtggcattgcttcagggaaaagtacagttattcaatatttgctctatcaaggctttcctgttatagatgcagataaattagggcacaaagttctggaaccagggaatcatgggtacaacaaagtggtagaacaatttggggaaggtattttgaacaaagacaaaagcgtaa

SEQ ID NO: 248199 - DNA, 415 bp, Unknown
  Bacterial polypeptide expressing nucleotide sequence isolated from the Sargasso Sea
aatggcaaaaattgtaggaataacaggcggtataggatcgggcaaaaccacagcttctgaatatttaaaaaataataacttcgctgttcatgagtctgaccaaatagttgcccaaatgtataacaggcccaaaaagtcatttttaaattttttaaaaaaaaatgtctctagtgaggttgtgagaaacaacaaaattagcaaacaaaaaattgccaacattatattcaacaacacaaatataagaaaaagtcttgaagcttatgttcacaaacatgtaaaaaaatctagagacagctttataaaaaaaaacaataaaaacaaaaagggaattgtgtttgttgacatacctcttatgctcgaaaacaagctagaaaaaaattgtgatgttgttttgtgtttaattgctcagaaaaaa

SEQ ID NO: 248200 - DNA, 181 bp, Unknown
  Bacterial polypeptide expressing nucleotide sequence isolated from the Sargasso Sea
ccaatttgttgtcggtttaacgggcgggattggcagtggtaaaacgaccgtggcgaatctgtttgcggcagaaggtgtttgcctagtcgatgccgatgtcgttgcccgagaagtcgtcgcaccaggcacctacggattaaacgccattattgaccattttgggacagaaatggtcaataat

SEQ ID NO: 248201 - DNA, 598 bp, Unknown
  Bacterial polypeptide expressing nucleotide sequence isolated from the Sargasso Sea
atgacaaaagttataggtatcactggcggaataggttcgggcaaaacaacactatgtaactatttaaaaaaaagaggctttgctattcatgagtcagacaaggttgtttcagacatgtacacacaatcaaataaaagttttgttgtttttgttaaagaaaatgtttcaaaagaagcggttcaaaaaaacaaaattaacaaaaacaaaatagcaaatgttatttttaataatcaaaaagctaaaacagggctagaaaaatatattcacaaagaggttcaagcatcgagaaaaaaatttatacaaaataatcgcaaaataaaaaaaaagatagtttttgtagatattccgcttttgtttgaaaacaatcttgagaatgaatttgatttgattgtttgtataatttcttcaaaaaaaaataggtcaaacagagttttgaaaaaaaagaagtttacaaaaaaaatacttaacaaaatatttaatttacaaacctcagacaaagaaagaagaaaacgatctcaaattataataaataacaacaaaacaaaaaaagactttatttttaatgctgaaaaagctttaataggacttttaaaatgag

SEQ ID NO: 248202 - DNA, 391 bp, Unknown
  Bacterial polypeptide expressing nucleotide sequence isolated from the Sargasso Sea
tctgatcggtcttacaggcggcattgcttcaggaaaaagtacagttgttcagtatctgcgttatcagggctatcctattatagatgctgataaacttgggcacaaagttctggaacctgggaatccaggatacagcaaagtggttgaaaaatttggtaaaagcatattgaacaaagacaaaaccataaatcgacttattttgggaggaattgttttttcagatccttctcggcttaaggctctaaatgaaatttctcaccctataattgctgaaatggttctgaaagaatttaaatcaatagactcaaaagactcaaaaggaattgtgtttctggaagccgcattattaattgaagcaaattggtacaacatgtgccatcaaatttgggta

SEQ ID NO: 248203 - DNA, 453 bp, Unknown
  Bacterial polypeptide expressing nucleotide sequence isolated from the Sargasso Sea
gatgatcgggctaacaggtggcattgccagtggtaaatcaacggtcagtgcgctgcttcaagaggcaggcgttgcgctgattgatgccgacaagctctaccatgagctgattcaacccaccgacggtaaggccagtgcgttgggccaaaagattgcagatgcctttcccggggtacttcttgaagatggttccattaaccggacagccttgggctctcgggtcttcggcaatgaagaggaactcaaaaagcttagctcgattacccatcccgcggtgggaggagcttttatggcccgggttcaagagctccaacaaagcggtgaaagcctcgcagtctacgatgtccctctgctttatgagcgcgggatggaacaaatgctggccggagtcattgtcgtctgggtaccgcaacacctgcagctggcacgtctcatgtctcgcgacaaaattga

SEQ ID NO: 248204 - DNA, 598 bp, Unknown
  Bacterial polypeptide expressing nucleotide sequence isolated from the Sargasso Sea
aatgactataaaaataggaattaccggaggtataggatcaggaaaaacaaccttgtcaaaacaccttaagaaaaaaaattttccggttcatgaatctgatcaagttgtagacaatatgtataaaaaaccgtcaaaaaaatttaaaaaacttcttatatctttgggccttgaagctgctataaacaaaaaaagcataaacaaaaaaattatctctaatataattttttctaacacacacataaaacaaaaacttgaaacatttattcataaagaaacaaaaaatcaaagagcggaatttatcaaaaaccataaaacaaaaaataaaaaaattattttttttgatgtaccacttctttttgaaaaaaacttagataatttttttgacaaaatcatttgtataatttcttcaaaaaaaacaagattaaagagagttttatattcaagaaatgtttccaaaaaactttttaataaaataattaaccaacaaacaataaaccaagaaaggtttagaagatcagattatattatttacaacaacaaagataaaaaaaactttattagtaaagttgatagagttataagtttaattaatatatga

SEQ ID NO: 248205 - DNA, 487 bp, Unknown
  Bacterial polypeptide expressing nucleotide sequence isolated from the Sargasso Sea
tatgaaaccctggatactcggcctgactggcggcattggcagcggcaagagcgcggtggcgcaaggctttatcgaacgtggcgtgcacgtggtggacgccgatcatgcggcgcgctgggtagtcgagccggggcgtccggcgctggccaggatcgtcgagcatttcggcgcgggcgtattgcaagccaatggcgagctggaccgcgccgcactgcgcaagctggtatttgccgcacccgagcaacgccgctggctggaaagcctgctgcacccgctgatcggccaggagatcgttcaggtgctggcgcgcgcagaatcgccctatgccattctggtgtcgccactactggtcgagtccggccagcggcagatgacccaacgcatattggtcgtcgacacgcctgccgagttgcaggtgcaacgcaccatcgcgcgcgaccagagttcggaagaacaggttcgcgccatcatgcaggcccaggccagc

SEQ ID NO: 248206 - DNA, 235 bp, Unknown
  Bacterial polypeptide expressing nucleotide sequence isolated from the Sargasso Sea
atgtccaagtttgtcgtaggtctaacgggtggcattggtagcggtaaaactaccgttgccaacttatttgccgaagaaggtgtcgatttagtcgatgccgatatagtggctcgcgaagtggtagcaaaaggctcaaaagggctcgaagccattatcactcacttcggcactgaaatagtaaccgaggctggtgagcttgaccgagcaaagctacgacaacgagtatttagcgaga

SEQ ID NO: 248207 - DNA, 322 bp, Unknown
  Bacterial polypeptide expressing nucleotide sequence isolated from the Sargasso Sea
atgattaaaataggaattactgggggaattggttctggaaaaagtatagtaagtggtttttttttagaatggggtgcatatgtttttgatgcagataaagaggcaaaaataattttaaaagaaaatgaaactgcacaaagtgaaatcattgcagagtttggaacagatattttaggttcaaataatagaatagaaaaaaaaaaattatctaaaattgtttttcaagatgagaatcacttactgcgccttaataccatagtgcacccttatatatttaatgaagttgataaaagattagaaatcatttcagctaaaagtaaac

SEQ ID NO: 248208 - DNA, 373 bp, Unknown
  Bacterial polypeptide expressing nucleotide sequence isolated from the Sargasso Sea
aatgacaaaaattgttggtattactggcggaattggatctgggaaaacaacgctttgtaaacatttgaaaaaaaacggataccttgtacacgagtctgataaactagtttctggtatttataaaaagcctaataagtcgtttttaagctttattaaaaaaaatgtttctaaagacgttgtagaaaattataaaataaacaaaaaaaaagttgctaaaattatttttaacaatgaagtagttagaaaaaagcttgaaaaatatattcacaaagaggtcagaatatccagagaaagttttataaaaaaaaatcacaaaaacaaaaaaggtgttatttttgtagacatacctcttttgtttgaaaataacctcgat

SEQ ID NO: 248209 - DNA, 619 bp, Unknown
  Bacterial polypeptide expressing nucleotide sequence isolated from the Sargasso Sea
atgaatgagacttttaaaattggactaacaggagggatcgcttctggtaaaactacagtctgtaatctttttaaagaattatcgatagacattatcgatgccgatgtaatctctcatgaattaagcaaaaaagggggggctgcatttgaagaaattgttgaagcttttgaagatgatattattggtgatgatggagaacttgatagaaaaaaacttcgttcaatagtttttagtaacaatactaaaaagaagatgttagaaaatatcattcatcctaaggtattattaagcattaatgaaaaaattgaagcttccctatctaattacctaattatatcagttccacttatgatagaaacaggaatgaatgcaatgatggatagagtcctcctaatagactgtagcgctgaaacccaaatacaaagattaattaaaagagatcaaacgacccgagaggaagccattataatcattgagaaccaagcctcaatagaaactaaaagagaattatcagatgatattattataaacaataatgcaacttccattgaagaactaagaatgaaagtaaaagatctggatgatttttatagatatcttaataataagaagatataaa

SEQ ID NO: 248210 - DNA, 524 bp, Unknown
  Bacterial polypeptide expressing nucleotide sequence isolated from the Sargasso Sea
tggatatgccgtgcacgagtccgataaattggtttctaacatttataaaaaacccaacaaaccatttataaattttcttaaaaaaaatgtttccaaagacgttgtgcaaaattataaaataaataaaaataaagttgctaacattatttttaacaacaaaataattagaaaaaaacttgaaaaatacattcataaggaggttaaaatatctagagaagactttataaaagaaaattataaaaacaaaaaaggtattatttttgtagacataccacttttgtttgaaaaaaatcttgataaaaattttgatatagtgatttgtgttatttccaaaaaaaaaattagaacagaaagggttttaaaaagtaaaaaatttacaaaagaaattttgaaaaaaatttttaagtcgcaaacatctgataagaacagaaggtcaagggcacaaataattattaacaacaacaaaacaaaaaaagactttatttcttcagcagaaagggctttagtaggttgtttaaaatgag

SEQ ID NO: 248211 - DNA, 526 bp, Unknown
  Bacterial polypeptide expressing nucleotide sequence isolated from the Sargasso Sea
tatggatattcttcaaaaattaaaaaataaccaaagaagaattggtttaacgggaggaattgcaagtgggaagtcaacaataacaaattacattagaaaacataaaaacattccaatattagatgctgataatttatcaagagaattaatcaaaccaaacacatatggatataaaaaaattttggaatattttggaaaccaaattattgataataagaacaattccgaaaaagcaataaacagaacatgtttaagaaaaattatttttaacaattcagaaagtaaagaatggattgaagcattgcttcaccctttaataaaagaaagaatgatagaagaatgcagtcaatacgaaagtaatcaaactttattattgattattcctttactatttgaagcaaattttgaagatatatgcactgaaatatggttagttaaatgtcctagcgaactacaaaaaaagaggcttatcaaacgagataaaattagcgaaaaagaagcctatgaaattataaattctcaatta

SEQ ID NO: 248212 - DNA, 598 bp, Unknown
  Bacterial polypeptide expressing nucleotide sequence isolated from the Sargasso Sea
atgacaaaagttattggcatcacaggcggtataggatctggaaaaacaacactttgtaaatacttaaaaaaaaatggatataatgtgcacgagtctgacaagattgttttcaacatatacaaaaacccaagcagattgtttttaaacttcattaagaaaaatatttccgagaaagtcgtaaaaaattataaaataaacaaaaaaaaagttgccgagattgtttttaacaatgatgtaattagaaaaaaacttgaaaactatatccaccaagaggttaaagtttctagagaaaggtttataaaaaaaaaccaaaaaaacaataagcgcgtagtatttgtagatataccgcttttacttgaaaacaatcttgaaaaaaaattcaatgtagttgtttgtattatttccaaaaaaaaaattagaacagaaagggttttaaaaagtaaaaaatttacaaaaccaatattaaacaaaatatttaattctcagacatctgataaaaatagaaggttgagatcacaaataattattaataacaataaatcaaaaaaagactttattttttcagcagaaaaggctttaatagattttctaaaatgag

SEQ ID NO: 248213 - DNA, 433 bp, Unknown
  Bacterial polypeptide expressing nucleotide sequence isolated from the Sargasso Sea
tatgactaaccagaagtttgtcgtaggcttaacaggtggcatcgctagcgggaaaaccaccgtggcgaatctgtttgcagagttcggtattgagttggttgatgcagatgtaattgccagagaagtcgttgcaaaaggctctgctgggcttagtgccattgttgatcactttggtgatgaaatattacttgccaatggccaacttgacagagcaactctgcgtaacaaagtgtttaataacgaaacacagcgcctatggctcaataacttactacacccaatgatccgacaaaagatgttagaccaagtgcaagcatcaacatctaaatatgtcattatggttgtgcccttgctatttgagaatcaattagatagtttagtcagtacaactttggtggtagatatttcccctgagttacaaatttcaagaacg

SEQ ID NO: 248214 - DNA, 160 bp, Unknown
  Bacterial polypeptide expressing nucleotide sequence isolated from the Sargasso Sea
atgtccaaatttgttgtcggtttaacgggcgggattggcagtggtaaaacgaccgtggcgaatctgtttgcggcagaaggtgtttgcctagtcgatgccgatgtcgttgcccgagaagtcgtcgcaccaggcacctacggattaaacgcccattattgac

SEQ ID NO: 248215 - DNA, 625 bp, Unknown
  Bacterial polypeptide expressing nucleotide sequence isolated from the Sargasso Sea
tatgtctggctatgtagtaggactgacaggtggaataggcagcggtaaaactactgtcgccaatttatttcatgatttaggcatacaaagtgttgatgctgatctggtagcccgtcaagtggtgatgccaggagaagcagcattagatgccatagttcagcactttggggcggacattttgcagcacgatggccagttggatcgagctgctttgcgaactaaaatcttcgcgaatgaagcagaaaagcaatggctgaatcagctgttacatcctttaatccgtcagcgtatgctgcagcaattagccgcatgcacctcagattatgctttgttaatagcccctttactgctggaaaataacctacagatctacgcagacagagtactggtggtcgatgtgcctgaagagctacaactaagccgcactatacaacgggatcaagtgccagcagaacaagtgcagaatattctgaacagccagatatcaagacctgaacgcctgcgcttagcagacgatgtagtactcaatacagtacctgtttttgcgcttcagccacagatacaacaactacatagccgttatcagcagtttgccaaggaaaaactagcaaaaagctcgacttag

SEQ ID NO: 248216 - DNA, 136 bp, Unknown
  Bacterial polypeptide expressing nucleotide sequence isolated from the Sargasso Sea
tatgtccaaatttgttgtcggtttaacgggcgggattggcagtggtaaaacgaccgtggcgaatctgtttgcggcagaaggtgtttgcctagtcgatgccgatgtcgttgcccgagaagtcgtcgcaccaggcacc

SEQ ID NO: 248217 - DNA, 616 bp, Unknown
  Bacterial polypeptide expressing nucleotide sequence isolated from the Sargasso Sea
atgtatgtagtcgcaatcaccggcggaattggcagcggcaagaccacggttgccaatcagtttgcagagctcggcatcgaagtagtggatgcggacgtcatcgcccgcgaggtcgtcgagcccggtaccccggccctggccgccattactgcccattttggctcagcagtcatcacccccgctggccagctcgatcgccgtcggctgcgtgagcgggtcttcactgacccgcaggccaagggctggctcaacgccctgctccaccccctcattcgcaccgagatgcagcgccagtgtgcggccgctcgctccccctattgcttgttggtagtgcccttgctggtggaaaaccggctcactgccctggccaatcgggtactggtgatcgacgtggacgaggcgacccagattgaacgaacctgccgccgggacggcgtgagccgcgagcaggcccaagccatcctggccgcccaggcgagccgggccgaacggctggcggcagccgacgatgtgctggataaccagaatggcacgcccgaggcgataaagagccgaattttaacgctgcacgagacatatctggcatttgcctctcaacaagcccgccaactgtgag

SEQ ID NO: 248218 - DNA, 418 bp, Unknown
  Bacterial polypeptide expressing nucleotide sequence isolated from the Sargasso Sea
atgtccaagtttgtagtaggtctcacgggtggcattggtagcggtaaaactaccgttgccaatttatttgccgaagaaggtgtcgatttagtcgatgccgatatagtcgctcgcgaagtggtagcaaaaggctcaaaagggctcgaagccattatcgctcacttcggcactgacatattaactgaaactggtgagcttgaccgggcacaactgcggcagcgggtatttagcgatgaacaagcgcgccaatggttgaatcagttactccaccctatgatccgccaagaaatgctttctcaagtcgaaaatgcgacctctgactatgtaattatggttgtccccttgctatttgagaacgggttagataggttagtcaatcggactttagtggtggatatttcgcctgagttgcaaatca

SEQ ID NO: 248219 - DNA, 598 bp, Unknown
  Bacterial polypeptide expressing nucleotide sequence isolated from the Sargasso Sea
atgatagtagggttaacaggaggaataggttcaggtaaatctgcagctggcgatttttttattgaacttggtatagatctaatagatgcagatatgatctcaaaagatattttagataataatttaaaagcaaaagaactatttattgaaaattttggtgagatttatatagatgaaaataataatattaatagaggcttattaagagaagatatctttaaagataataataaaaaagaaaaactagaatctattattcacccatttgtaagagaagatataactgaatttattacaaaatcaaacagtatttataaaatcattatggttccacttatatatgaaacaaaatcacaagatttttatgacaaaattatccttatagattgtgatgaggattatcaaatcaaaagagcaagccaaagggatgaaaaatcaaaagaagacataataaatattataaaaaaccaagcaaccagggaagaaagacagtcaatagcagatgagattattttaaataactcaacattagatgatttaaaaaatcaggttataaaagtacatcaaagattactaggtataaatataaatgaataaa

SEQ ID NO: 248220 - DNA, 157 bp, Unknown
  Bacterial polypeptide expressing nucleotide sequence isolated from the Sargasso Sea
aatgatattagtaggattaactgggggaataggttctggtaaatcaactgttattaattatttcaaagagttagggattacctgttatcaagctgacgatgaggctaaaaaattaatgaattcagataagagcctaataaaaaaaataaaaaattct

SEQ ID NO: 248221 - DNA, 598 bp, Unknown
  Bacterial polypeptide expressing nucleotide sequence isolated from the Sargasso Sea
aatgttttcaattggtctaactggtggaattggctctggaaaaacttttattgcagagatacttaaagctaactttgatattaaaatttttgattctgattatagtgcaaaagaaataattcaaaaaaataaatcagttaaaaaaagtataatcttaaattttggtaaagagtcttacatagatgatcaaatcaacaataaatttatttctaaaatagtttttaataatcctaataaactcatcaaattgaacagcattgttcatccattagtttttaaagactttgaagattttaaattaaaatattctgaaaaaataattattgttgaatctgctttattgttcgagagtggtatgtatttatcaaataatattaatattcttgttacttctcctcttgaaattaaacttcaaagactaattgtgagagataaaagaaatgaagaagatgtattaaaaataattaattctcaatgggacgattctaaaaaaataaaacttgctgattttgtaatcgagaatattaataaattagaaactgaaaaaaaagttaaaaaattaatgagtgatattatatctaagtatgaagaaaattag

SEQ ID NO: 248222 - DNA, 265 bp, Unknown
  Bacterial polypeptide expressing nucleotide sequence isolated from the Sargasso Sea
atgaagatcattggaattactggtggtatagcatcagggaaaagcacagtttctttatatctacaagataagtacaaggcatatatttttgatgcagacaaagaagcaaaagcactactccaatcatcttttgtaaaagataaaattcttcaagcttttccaaatcttgaagacttctctactacatctatcgctcaagaggtatttaaaaactcagaatcgcaagcaaagataaataatattattcaccactataataagtgat

SEQ ID NO: 248223 - DNA, 580 bp, Unknown
  Bacterial polypeptide expressing nucleotide sequence isolated from the Sargasso Sea
atgaaaattgttggattaactggtggtataggctctggtaaatcgactgttcttaatcaatttaaaaacttaggtataaacacatattgcgctgataaagcatcaaagaagcttataaattcagataaagatctaattaaatcaatcaaaaacttatttggaaataatgtatacgaaaatgatgttttaaatactgcaaagttatctaaaattgtttttcaagatccaaataaactaaagtcactaaattcaattattcatccagctgttgcaaaagattttgaatcttttataaaaaataataatggagattatattgtaaaagaagtagcgattattttcgagacaaatactgaggataattacgataagatcatattaattagggcaccattagaagaaagaatcaaaagagttatactccgagacaatctatcaagagaggatgtaataagaagagtaaataatcaaatagatgattctacaattattgacaactgtgactatataattgataataataatcttaaagatttaaaagaaaaagttcttaaaattcataaagacttaatcagataat

SEQ ID NO: 248224 - DNA, 619 bp, Unknown
  Bacterial polypeptide expressing nucleotide sequence isolated from the Sargasso Sea
tatgtccaagtttgtcgtaggtctaacgggtggcattggtagcggtaaaactaccgttgccaacttatttgccgaagaaggtgtcgatttagtcgatgccgatatagtggctcgcgaagtggtagcaaaaggctcaaaagggctcgaagccattatcactcacttcggcactgaaatagtaaccgaggctggtgagcttgaccgagcaaagctacgacaacgagtatttagcgatgaacaagcgcgccaatggttgaatcagttactccaccctatgatccgccaagaaatgttgtcacaagtcgaaaatgcaacctctgactatgtaattatggtcgtacccttgctatttgagaacgggttagataggttagtcaatcggactttagtggtggatatttcgccggagttgcaaatcagccgtaccgtaaaacgggacaatgtggacgccactcaggtaaataacatcattaatagccaatgtagtcgcagtgacaagctcgccagagccgacgacattattgataatcagggagagatatcaacactaaaacaagaggtgcaagcattgcaccagcgctatttacaattatccggtaatcacgacgcccatgactga

SEQ ID NO: 248225 - DNA, 367 bp, Unknown
  Bacterial polypeptide expressing nucleotide sequence isolated from the Sargasso Sea
catgattgttggtcttacaggtggaattggttcagggaaatctgcagctggaaaatattttgttgaattaggaatagatgttattgatgccgatgatatttcaaaaaatattttagatgaaaatataaaagcaaaagaactttttattaaaaattttggcgataaattcttggataaaaacaataatattgatagggacctattaagatcagaaatttttgtcaatgaggagaaaaaaaatatacttgaatctattattcatccaattgtaagagaagaaataactaaatttataaatcagtctgacagtatttataaactaataatggttcctttaatatatgaaacaaattcacaagacttttat

SEQ ID NO: 248226 - DNA, 583 bp, Unknown
  Bacterial polypeptide expressing nucleotide sequence isolated from the Sargasso Sea
gatgaaaaaaattggaataacaggtggtattggatcaggtaaaagttttatatctgaaataattaaagctatgggttaccctgtatttaattctgatatggtagctaaagacatcatgaacaataatgttgatactattaaatttataatcaataattttggctcatcttcttatcataatggcactattaataaagcttatcttgcaaaacagttctttaataatccagaaaagttaaaaattatcaacaatcatattcatccaaaagttagagatcaatttgatgatttttgtaatgtaagtaacagcgatttcatttttaatgaatctgcaataattttcgaaaccggtattcaagaaagatttgatgctgtcgtattgattttgtccccaaaagaactcagaatcaaaagaattatggatcgagatgatgtttcacttgaggatgttacaaaaagaatggataatcaattatcagatgagcaaaagttgccattgacaaaatttcacattaacaatgacaatgagtcgcctcttctcattcaaattcatgattttattgaagaattgtcatcaatttaa

SEQ ID NO: 248227 - DNA, 598 bp, Unknown
  Bacterial polypeptide expressing nucleotide sequence isolated from the Sargasso Sea
aatgttcgttgttggattaactgggggaattggttcaggcaaatcagctgctacatctatttttgaagatttaggaatagacgtagtcgatgctgatttagcatccagggaagcggtattacccggctcaaaatctctaagtgaaattcaaaagaaattcggaaacgaaatactccttgaagataaaagtttgaacagggcaaagttaagggaaataatttttgacagctctaaagataaagtttggttagagcaactattacacccggaaataagaaatattattcaatctaaattaaaaaaatcatcttcagagtatgttattttagtttcgcctttattatttgagacagatcaacacgaattttgtaatgatactatcttgattgactcttcattagattcgcaaatatctagaacttcaaaaagagactctgtttcaaaagagtctgtaaagaaaataatttcagctcaaatgtctcgagaagataaattaaaaattgcaacgatagttatcaaaaatgatgattctttagagcaacttgaaacaaatgttaaaaaagtacacaagaatcttttaaaaaaaatacataaatga

SEQ ID NO: 248228 - DNA, 598 bp, Unknown
  Bacterial polypeptide expressing nucleotide sequence isolated from the Sargasso Sea
aatgacgctcattgttggattaacgggcggcattggctctggtaagtcaaccttttcaaaggagttgactaaaagaaatattaaaactttagactctgacaaagaggtggcactaatttacaaaaaaccaaccaaaaaatttttacattatttaaaaaaaattggtttatctggttcaacaaaaagcaaaaaaataaacaaacgacttataagtgaaaaaatattttctaacaaagaaaccaaaaagcaactagaaaactacatctttaaaattaccagaaaaaaaagacaccagtttattaaaagagaaaagaaaagaaaaacaaaaataattttcttagacatacccctattatttgaaaataaacttaataatgaatttgacttgattattagcattttgtctactaaaaaaaacagatacaatcgcctaaagctctctaaaaatatgtcaaaaacacagttcggcgcaataattaaaacacaaacttcagatgtggtaagaaaaaacaattctgatatagtaatttacaacaacaacacaatggtaaattatatatcaaaaattaacaaaatattagacaggcttattttatga

SEQ ID NO: 248229 - DNA, 598 bp, Unknown
  Bacterial polypeptide expressing nucleotide sequence isolated from the Sargasso Sea
catgatagtgggattaacaggtgggattggatcaggaaagtctgcagctgcaaaaatatttgttgaattaggtatcgatgtgatagatgctgatgaactttcgaaaaacgttctcatagaaaatcaaaaggctaaaaaaatatttgttgaaaaatttggacacaaatacattaactcaaatgatgagatagacagagaactcttgagagaggatatttttaaagacgaaaaaaaaagaaaagatcttgaagggataattcatccaatagttagagaagagatttcagaatttgtcgttaattccaaaagtatctataaaattattatggtgccgcttatattagaaacaaactctgttgatgcatatgaaaaaattgttgtagttgattgtgatcttgataaacaaattgagagagcctcaagaagagatgatgttagtaaagagaatgttgaaaatataattaaaaatcaagcatcgagggaagaaagattaagcattgcagatcaagtaataatgaacaatgcttcgcttgacgatttacgtttagaggtcataaaagttcatcaaaaattgctaggattgaagatcgatgagtaa

SEQ ID NO: 248230 - DNA, 586 bp, Unknown
  Bacterial polypeptide expressing nucleotide sequence isolated from the Sargasso Sea
gatgattattggtttaacgggcggaatagggagtggcaaaacagccgtttcagatatttttcaaggtctaggcataactgttgttgatgctgatttagcttctagagttgtagttgaaaaaggcagagaagaattaaataaaatatcggatcactttggaaaagatattcttagtcgggacggagaattagatcgtgcaaagttaagggaaattatctttaattctcaagatgaaaagttatggcttgaatctttattgcatccagctatagctgctcaaattaagaaggaattagattcgtctactagcccttatacagttttagtatcacctttgctgcttgagactgatcaaaagaatttttgttcaaaacttttagtagtcgatgttcctatagaaactcaaattcaaagaaccagcaaaagagacaatgtttcagaagaacaaattaaatcaattatttcttcacaaatagatagagaatctaggttgcgacaagcagatgaaattatattgaatgatggttcgcttgaggaattagcggttaaggtgaaagaattgcacgaaaaatttttagctacatga

SEQ ID NO: 248231 - DNA, 619 bp, Unknown
  Bacterial polypeptide expressing nucleotide sequence isolated from the Sargasso Sea
tatgtccaaatttgttgtcggtttaacgggcgggattggcagtggtaaaacgaccgtggcgaatctgtttgcggcagaaggtgtttgcctagtcgatgccgatgtcgttgcccgagaagtcgtcgcaccaggcacctacggattaaacgccattattgaccattttgggacagaaatcttaacggcctcgggtgagcttgaccgcgcaaaacttaggcaacgagtgtttagcgatgaacaagcgcgtcagtggttaaatcaactgctgcaccccatgatccgccaagaaatgcttttgcaagtcaaaaatgccacctcagactatgtaattatggttgtacccttgctatttgagaacgggttagataggttagtcaatcggactttagtggtggatatttcgccagagttacaaataagccgtaccgtaaagcgggacaatgtcgatgcaactcaagtaaataacatcattgagagccagtgtagccgcagtgaaaaactcgctagagccgatgacattattgataatcagggagagatatcaacgctaaaacaagaggtgcaagcattgcatcagcgctatttacaattatctggtaatcacaacgcccatgactga

SEQ ID NO: 248232 - DNA, 598 bp, Unknown
  Bacterial polypeptide expressing nucleotide sequence isolated from the Sargasso Sea
atgtttgttgtgggactgaccggcggcatcggcagcggtaaatccactgtggccgacctgttcgctgcgcacggcgtaccgcttgtcgacaccgacctgattgcacaccgcattacggcgccgcacggcatcgcaatgccccaaatcgccgcggagttcggcgattcgttcgttgccgcggatggctcgctcgaccgcgcccgcatgcgcacgctggtgttcagcgacgacggtgcccgcaaacgcctcgaaggcattacgcatccgttgatccgtgcggagaccgaacgcgaacagcgtgaagcgcaagggccatacgtgatcgtggtcgtaccgctgctggtggagtcgggcaactggagaacgcgcgtgaaccgtgtgctgacggtcgattgcagcgtcgagacgcaaatcgcgcgcgtgatgagccgcaacgggttcagccgggaacaggttctcgcgatcatcgcccgccaggtaacgcgcgaagcgcgcctcgccgcagccgacgacatcatcaacaacgacaacgcgccgctggatgcgctcaaggcgcaggtcgacgcgcagcatcgcgcctatctggcactggccgctg

SEQ ID NO: 248233 - DNA, 610 bp, Unknown
  Bacterial polypeptide expressing nucleotide sequence isolated from the Sargasso Sea
atgttcgcaattggactcaccggcggcatcggcagcggcaagacgaccgtcgccgacctgttcggcgcccgcggcgcgtccctggtcgataccgatctgatcgcccatcgcatcaccgcaccacgcggtctcgcgatgcccgcgatcgaacaggcattcggtcgcagcttcgttgccgccgacggctcgctcgaccgtgcgaagatgcgcgcactgatcttcagcgacgacgccgcgctccggcgcctcgaggcgatcacgcatccgctgatccgcgcggagaccgatcgcgaagcacgcgaagcgcaaggcccgtacgtgatattcgtcgtgccgctgctcgtcgagtcaggcaactggaaggcgcgctgcgatcgcgtgctcgtcgtcgattgcccggtcgaaacacagatcgcacgcgtgatgcggcgcaacggcttcacgcgtgagcaggtcgaagcgatcatcgcgaaacaggcaacacgcgaggcccgcctcgcggcggccgacgacgtgatcgtcaacgacgcgacgacacccgacgcgctcgccgcacaggtcgatgcactgcaccaacgctatctcgggtttgcggccgccgcgcgctgaa

SEQ ID NO: 248234 - DNA, 189 bp, Unknown
  Bacterial polypeptide expressing nucleotide sequence isolated from the Sargasso Sea
aaaaaagggatcctaagggtttatataaaaaagctagatcaggagaaataaaagattttacaggaatagactcaccttatgaaattccaaaggaccccgatttggaaattgatacaaaaaatttatctattgaagatagcgaaaatttgttactggatttcatttctgaaaaaacttctaactcttaac

SEQ ID NO: 248235 - DNA, 434 bp, Unknown
  Bacterial polypeptide expressing nucleotide sequence isolated from the Sargasso Sea
atattactttgatggtgacaatgttagacatggattaaatagcgatctggggtttaatgaagaaagtagaatagaaaacattcgtagaattggtgaagtttctaagttatttcttgattcaggcatcattgcgcttacagctttcatttctccatttaaatctgatcgtaagttggtaagagaattatttcaaatgggagaatttttagaggtgttcattgatagttctctagaggtttgtgaaagtagagaccctaaagggatgtacgctaaagcgcgcagtggtgaaataaaaaactttacaggtattagctctccttatgagccacctcacaatcctgaaatacatgttataaataattcaattacacttgatgaggcatcagatcaaataattacttatttgatagatcgtcaattaattaatagttaaa

SEQ ID NO: 248236 - DNA, 471 bp, Unknown
  Bacterial polypeptide expressing nucleotide sequence isolated from the Sargasso Sea
atgtagctctgcacaaacatggttattcaacttatgttttagatggtgataacatcagacatggtttatgcaaagacttaggtttttctgatcttgatagagaagaaaatattagaagaattggcgaagtctctaaattgtttcttgacgctggaataattgttttaactgcatttgtatcaccatttagggccgatcgcgataatgcaagatcattagttggagaaaatgattttatagaaatatattgttcagctgatttagaagtttgtgaaacaagagatacaaaaggactttatgccaaggcaagaactggagacatcaaagatttcacaggaatctcaagtccttatgaagatcctcagtctccagaattgaaaattgatactggaaatctagagattgataaatgtgtagacatagttactaacttgcttgtgaagaaaaagattatttcaaaaattgcttagt

SEQ ID NO: 248237 - DNA, 586 bp, Unknown
  Bacterial polypeptide expressing nucleotide sequence isolated from the Sargasso Sea
atgaatgcggcagtaacatcagacgccatagatgcacccgtcagcaaagacgacagggcgctacaaaagcaccagaaaccctgcatcatctggtttaccggcctcagcggctcgggcaaaaccaccacggcaatcgccctggagaaacgtcttaacgccattggcaagcacacctacctgatcgacggtgaccacctgcgccagggcctgaacagcgacctttcttttaccgatgaagaccgaacagagaatatccgacgagtcggcgaagtcgccaagctatttgttgatgctggcctgatcgtaatagttgctcttatatcccccttcagagcagacaggctagcagttcgaaatcttgtaaaaaaagacgaattcatcgaagtgtatatgagcacgccgctagaagtatgcgagcagcgcgatgttaaaggtttatataaaaaggcgcgtgcgggggagattcagaacttcactggggttgattcaatatatgaatcgcctcaaaacccggatgttgttattgatagttcaacggctgaaaccgaagaaaacattgatcgtgtgattggcacgattttgtagg

SEQ ID NO: 248238 - DNA, 552 bp, Unknown
  Bacterial polypeptide expressing nucleotide sequence isolated from the Sargasso Sea
catgactaagttaactatcgataaatcaacaagagagaagctttacagccagagaggcaaagtattctggatgactgggctgagtgcttctggtaaaacgacaatagctgacgccttcgaaaagacacttcatgaaagcaggctgcgcacctgtatcctagatggtgataatttgcgccaaggtctaaacaaagatttaggttttgttgaggctgatagaattgaaaacagtcgccgcgttgctgaagtggccaagcttatgattgatactggactaattgttattgcagcccttatttcaccattcaagtctggaagagacgccgctcgtgccttatttgaaaaaggagactttgttgaagtctatatcgacgctccgctcgacgtcgtagaaaagcgcgaccccaaaggcctctataaaaaagctaggaatggggagataccttatttcactgggatcgacagttcctttgaagttccagagcaaccagaattacacttgcagactgctgaactcactgtggagcagtctgtacagcgattgatcgagta

SEQ ID NO: 248239 - DNA, 847 bp, Unknown
  Bacterial polypeptide expressing nucleotide sequence isolated from the Sargasso Sea
gaaaatgttaaaattcttaaaaataagggacactttgatgattttttgatgcctgttcaatgggtaaatcgtccaaatcaaaaatttcgtggattttctggtaaagttgaatgtggaactttaatgccaggagatattgtacgcgttcttccatcaaagaaaacaagtgtaattgatagaatagttacatatgacggtgatttatatcaagcaaaagaaaatcaatcaattactttaacttttaaagatgaaattgattgttcacgtggtcaaattattacaaataagaattcaaatattgaattatctgatcaatttgaaacaataattatttggatgaatgaagagagtatgatttttggtcgttcatattacctcaaaattggaacacaaactgtttcagcatctatatcaaaacctaaatataaaattaacgtagactcaatggaaaaggaagctgcattaagtttagatttaaacgacatttgtgtagcaaatatttcaacagaccaattgataccatttttatcgtataagcaaaaccacacgctaggtggatttatattaattgataagatgactaatgcaacagtaggcgctggactaattaatcatgcccttcgtagatcacaaaatattcattggcaaaaaatggatattgatcgttatcatcacgctaaactaaaaaaacaaagaccagttgtattatggatgacaggtctttctggttcaggtaaatctactatagctaatgctttagaaaagaggttagctgaaatgaataagcatacaattttactggatggagataatgtcagacaaagactcaacaaagatctaggattta

SEQ ID NO: 248240 - DNA, 284 bp, Unknown
  Bacterial polypeptide expressing nucleotide sequence isolated from the Sargasso Sea
atttattagcgatagagataaggtgagaaaaattattggatctaaggattttattgaagtttattgtgctgctgatatcacagtttgtgaaaaaagggatactaaaggtctttataagaaagctcgtttgggagaaattaaagagtttacagggatttctagtccatatgaagctcctcataatcccgaaattgttgttgatactggctcgttagatttaaatgattccgttgaaaaagttattaactaccttacaaaagaaaactttcttaacaaggcctaat

SEQ ID NO: 248241 - DNA, 301 bp, Unknown
  Bacterial polypeptide expressing nucleotide sequence isolated from the Sargasso Sea
tacagcattcgtttcgccatttattagcgatagagataaggtgagaaaaattattggatctaaggattttattgaagtttattgttctgctgatatcaaagtttgcgaaaatagggatactaaaggtctttataagaaagctcgtttgggtgaaattaaggaatttacagggatttctagtccatatgaagctcctcataatcccgaaattgttgttgatacaggtttgttagatttaaatgactccgttgaaaaagttattaactaccttaaaaaagaaaactttcttaacaaggcttaa

SEQ ID NO: 248242 - DNA, 694 bp, Unknown
  Bacterial polypeptide expressing nucleotide sequence isolated from the Sargasso Sea
aaaactgttcccttttcgacttttaaagaaaataaaattttgggatcttttataattattgatccaattaataatcaaactatgggaatgggaatgataaacttttctcttcgaagatcacaaaatattcaacttcaaaacttaaccatcaataagaatttaagagagaagattaatggtcacaaaggtcaagtgctgtggatgactggcctctcaggatcagggaaatccactatagcaaatgaagtagaaaaaatattatattctcaaggtaaaaaaacatacattcttgatggagacaatatccgacacggattaaataaagatttaggctttacagataaagatagagttgaaaatataaggcgagttgcagaggtggcaaaacttatgtgtgacgctggactaattgtgatcactgcttttatatcaccgtttagattagagagagaaatggctcgatcactttttgaaaagaatgattttaaagaaatttatatttcaactcctttaaaagtagctgaaaaaagagatccaaaaggtttatataaaaaagcaagacagggtaagataccaaacttcacaggtatagacagtatttatgaaaaacctacaaatcctgaactggaaattgatacctctaaagtttctttaagtaaggctgtaaaaaaaatattgaatattattacttaag

SEQ ID NO: 248243 - DNA, 367 bp, Unknown
  Bacterial polypeptide expressing nucleotide sequence isolated from the Sargasso Sea
tctgaatgtgcaaagaattggatttgtcgcgagtgaaataacaaaaaatagtggtattgcaatatgtgcaccaattgctccatacagaagtgatcgcaatattaataggcagttaatttcaaaagttggtggttacattgagatatttgttaatactcctttagaaaaatgtgaagaaagagatcctaagggattatacaaaatggctagggaagggaaaataaaagaatttacagggatttctgacccatatgaggaaccagaaaatgccgagattgtagttagctctgatgggttagtatcaccagaaaaattagtagatatgatttataatagaataactgagattggctatattgccaaatga

SEQ ID NO: 248244 - DNA, 550 bp, Unknown
  Bacterial polypeptide expressing nucleotide sequence isolated from the Sargasso Sea
agaagctgctttaaatcaaaaaggaataaccttatggttaactggtctttccggatcagggaaaactaccattggcgcctttttagaaaaaaaactattccaaaacaacattaccactacgctacttgatggagataatattagaactggaatcaacaataacttatctttttcagataaagacagaattgagaacataagaagaattgccgaagtatctaaattgtttaactcttctggaattgtttccataaattgctttgttagtccttttcagtcctcaagagatttagctaaaaaaataattggaagagaaaacttttttgaagtttttgttgacacttctattgaagaatgtgaaaaaagagatgtaaaaggattatataaaaaagcaagagcaggagagataaagaattttactggaatttcttcttcatttgaaactccgattaatcctgatttcaccatttcaactttaggaaaaacagctaaagaaagtggagatgaactttttaactatattttaccaaagattaaagctaaaaaatga

SEQ ID NO: 248245 - DNA, 252 bp, Unknown
  Bacterial polypeptide expressing nucleotide sequence isolated from the Sargasso Sea
catgttagtaaaaaaaagagatcgctcacttataaagaaacatagatcatgtattatatggcttacaggtttgtctggtgcaggcaaatctacagttgcagatcttttagaacagaaacttaacaaacaagataaacatacatttttattagatggagacaacctaagacatactctcaatcaagatttaggtttttcagattatgacagaaatgaaaatattcgtagaattggtcatgtaggaaaacttat

SEQ ID NO: 248246 - DNA, 244 bp, Unknown
  Bacterial polypeptide expressing nucleotide sequence isolated from the Sargasso Sea
atctaaggattttattgaagtttattgttctgctgatatcgcagtttgcgaaaatagggatactaaaggtctttataagaaagctcgtttgggtgaaattaaggaatttacagggatttctagtccatatgaagctcctcataatcccgaaattgttgttgatacaggttcgttagatttaaatgtttccgttgaaaaagttattaactaccttaaaaaagaaaactttcttaacaaggcctaa

SEQ ID NO: 248247 - DNA, 721 bp, Unknown
  Bacterial polypeptide expressing nucleotide sequence isolated from the Sargasso Sea
atgtatgatataatagatcttccaaatattactaatgttatatacggaagagatgtaggttataaagttgaaaaagtatcatttgataaagatatagaatctatttctgcaacaaatgtaagaaaatcaatgaacatttctccaacgaaaaatgaagtcaccataaaagaaagatttaaaagaagtggtcatgcaggaggtgttgtttggctgacaggtttatctgcttcaggaaaaacaacaattgcatgtcaggttgaacgagaacttttcgataagggttataatgtatttatgcttgatggtgataatttaagggatggtctaaattttaatctgggcttttccaaggaagatagacatgaaaatataagaagggcaggtgaggttgctgcaatattatctagttcagggtttattgttatttcatcatttattacgcctctagcgatagacagagaagttgcgaaaaaagcatgcaacgataatttttatgaagtttttgtttcagcgagtatagaggaatgtgaatcaagagacccaaaaggattatataaaaaagctcgttctggtgaaataaaagattttacaggaattggttcgatctatgaaattcctgaaaatcctcatcttatccttaatactgaagatgcaaaagaaaatgattctgcaaatcaattaattgattttatcatttctaaatttcctctaaaacaataaa

SEQ ID NO: 248248 - DNA, 598 bp, Unknown
  Bacterial polypeptide expressing nucleotide sequence isolated from the Sargasso Sea
atgccccaagatttcaagaatttgtcacccgccacgccgacgaacggtcattccgccagttctgacgtgaaacaggatcgagccttcgtggtgtggctgaccggtatctccggcgcaggcaaatcgacgctggcaactctgctgcaggaacaactcaatgcccgcggactgcgcacctatctgctggatgctgaccgcctgcgcgaggggctgaaccgggatctcggattcagcgatgccgatcgccatgaaaatatccgacgaaccgccgaggtggcgaagctgctggtggatgccggattcgtcgtcatcgctgcgctgatctcaccattccaggaggcgcgcgccaaagcgcgtgcgcgctttgcggctggtacgttcttcgaagtctttgtcgatacttcactcgaagtcgcagaggctcgcgacccgaagggactctacgcgttggcaaggcaaggcgcgattcgccaatttaccggcatcgattccgtctatgagccaccgcagtcccctgacgttcacgtcaggacggccgagacgagcccctcggaatgtgtagacgcgatcatccggaaactgccgctgggcggctgac

SEQ ID NO: 248249 - DNA, 460 bp, Unknown
  Bacterial polypeptide expressing nucleotide sequence isolated from the Sargasso Sea
atgaaggtaatattattagaaaacataagaagaattggatctataggagatgttatagatgtaaaaagaggttttgcgcgtaattatctaattgcaaataaaaaaggcttatatgcttcaaaagaaaatattaagcaagttgaaaaaattaaatcagaattagataaaaaagatcttgaaaagaaaaaaattgcgaaacagattcacgataatgttaatggaaatacatatgaggttaaaaaattaagcacagaaaataaggaactttatggatcagtaaaaccaacagaaatttcaaagctcattcatgaaaaagataaggtagaaataaaaccctctttaatacaactaacaaaagaaattaaaactttaggaacatttaaagttaaaattaatttacattctgaagttcaatctgaagtttctattagagtagttcaagaagaaactattcaataat

SEQ ID NO: 248250 - DNA, 456 bp, Unknown
  Bacterial polypeptide expressing nucleotide sequence isolated from the Sargasso Sea
tatgtcgtcgccgacacccattcccttgccagccggtgctcctgacgactcccgcgccttcctgcaacgcagccacggcgaagttaccagccaggacaggatgcaaatgttccgccacaagccggttacgatctggctgacgggattgtccggggcgggcaaatcaaccatcgctttcgaactcgagcggcggctcgcagcgctaggccacgcgtgctatgttctcgacggcgacaatgtccgccacggcttggcaagcgatcttggcttcgacaggaaagaccggcgtgaaaatattcgccgggtggcgcacgtggcgcaattgatgaacgatgcgggcctgatcgtcattacggctctgatctcgcccatgcgtggagaccggggcatggcgcgcgaaatcatcgggccccgggcatttcatcggaacctacctgtcggcctctgtcgacgctt

SEQ ID NO: 248251 - DNA, 553 bp, Unknown
  Bacterial polypeptide expressing nucleotide sequence isolated from the Sargasso Sea
gatgaaagtaaaaagggcaaatcgctcttttataaagaaacacagatcatgtattatatggctcacaggcctttctggtgcagggaaatctacagttgcagatcttttagaacaaaaacttaataaacaaaataaacatacatttttattagatggagacaacctaaggcatactcttaatcaagatttaggtttttcagatgatgataggaatgaaaatattcgtagaattggtcatgtaggaaaacttatggtggatgctggtctaattgtaatagcctcatttatttcccctttcgaaaaacaaagagaatttacaagaaatctctttgaaaaaaatgaatacatagaagtttttttaaatacgcctctagaggtttgtgaaaaaagggatactaagggcctttataaaaaggcacgttcaggacaactcaaagactttacgggcattgattcagcttatgaaatacctaaaaatccagaaattacttttgatggtgaaaagtatactgccgatgaattgtcagacaaaatcattaaatattttgtctga

SEQ ID NO: 248252 - DNA, 634 bp, Unknown
  Bacterial polypeptide expressing nucleotide sequence isolated from the Sargasso Sea
atgagcaaaataacaaatcaatataccgttttacaagagcctgcagtttatcgtaaagatagagaagagatgaatggccataaaagcgtagtagtatggtttactggactatctggttccggtaaatcaactttagcttatgcgctagaaaaaactttacatgaaaataaagtaaggactttcgttttagatggagacaatatacgtcaaggtctttgtaatgatcttggtttctcagataatgatagagttgaaaatattaggcgtataggcgaagtcagtaagcttatgatgaatgcaggttcgattgttataacggcatttatttcaccatttatcaatgatagaaggattgcaagagaattagtaggaggcaatgactttattgaaatttattgtgattgccctttagagatatgtgaatcacgtgatgtaaaaggactttataagaaagctcgtaaaggtgaaataccagaatttacaggtatatcatctccttacgaaataccaaaaagccccgaattaattttaaaaacacattcactgtcaattgaacaatgtcttgaaaaattgctcacttatattttagaaaaaaaattattacatcaattcgaaaataatttttcaaaatgaa

SEQ ID NO: 248253 - DNA, 218 bp, Unknown
  Bacterial polypeptide expressing nucleotide sequence isolated from the Sargasso Sea
aatttttgtagatacaccattggaagaatgtgagagtcgagatccaaaaggattatataaaaaagctagatcaggaatattaaaaaactttacaggaatagattctgtttatgaggtaccttctgatccagaaattaaattgaaaacactttcaaaaagtcctgaagaattagctgatgaagttttagatttcttgaaagttaataatataatttaat

SEQ ID NO: 248254 - DNA, 525 bp, Unknown
  Bacterial polypeptide expressing nucleotide sequence isolated from the Sargasso Sea
tttggtttactgggctttctggtgtcggcaaatccacaattgcacaagccgctaaactgaggctcgaattaaatggaatgaaggttcttattcttgatggggatgctgttagaagtgagttgcacatggatttaggttttagtgaatctgatattaaagaaaataaccgtcttatcttggagctatgtcttaaacatcaaaaaaaatataatatcattctagtacctattatttctcccttcattcactcaagaagtgaagctaggaaaaaactgggcacgaaatattttgaaatccatctcgatgccagcttaaaaatactacataagcgagatacaaaagggctttacaaaaaagctagaaataatcaaatagacaatctcattggagtttcaaaaaaaagtaaatatgaaccaccaactaatccagatttaagaattaacactgaaaaatctatggaagaaaactcgattaacctgttttataattttgtcctcgatagttataaaaaggatagtgtttagt

SEQ ID NO: 248255 - DNA, 787 bp, Unknown
  Bacterial polypeptide expressing nucleotide sequence isolated from the Sargasso Sea
acagtgggtaaatagatctagttcagattttaggggatatgctggaacgatcacttctggtaaaatatctaaaggagatgtaatcacaactgcctcatcgaattctcaaacttctattaagaatatttatggacccaatggtgagttggacgaagcttttactaatcaggcagtaacattaacgttacaagatgaattagatatttctagaggtgatatctttcttacacaagataataaggaaatcataaaagctgatcagtttgcagctcatcttgtttggatggatcaagacgcaatgttgccagagcgaaattatatttttcgtttcaataacacttatataagtggacaaataactgatctagctcacagtattaatgtgaattcttatgaagaaatcgcaaccaaaaaattaaatttaaatgatattgcttattgtaaaatagcattaaataaaatgcacagtatcgctccttataaaaacaatcatcaattaggtagtttcgttatcattgacccatataataataaaacaattggtgccggcatgattgaccatgcgttacgtcgatccactaatatttcttggcatgaaatgagtatcaataaagagacgcgctccaaattaaatatccaacaaccatgtgtgatttggtttactggattatcaggatcaggtaagtcaacaattgccaatattctggaacaaaaacttcatacgatgaacaaaagaacttatctattagatggtgataatgtgcgtcatggcttaaataaagattta

SEQ ID NO: 248256 - DNA, 871 bp, Unknown
  Bacterial polypeptide expressing nucleotide sequence isolated from the Sargasso Sea
ggtagcgctgttaccctcttgatagaagatgacattgatatcagcagaggggatattttagctaaaccaaattctttaccggaaatagcagatcaattttccgcatggctgatatggctacatgaagaagagatgctacccgaaaggccctacttcattagattttcaaatctagaggccactgctcaaataacggagctctcgtatcagcttgatataaatagtttagatcatcatgcttgcaaaactttaaagctcaatcaaattggttattgcaaaattgctttagatcgctctatagcttttgactcatataaaacgaatcggatcacaggatcatttgttctcatagacaaacgaacatatgccactgttggcgcagggataattaactttgcccttatgcgtgcaaaaaatattggctggcaccaaatgcaagtcaataaaacttttagaggaaaattaaaaaatcaaaaacctcaattaatttggtttactgggatgtcgggttcgggaaagtctaccgtggctgatcttttggagcaagaattagtgcagaaaggatatcacacctacatactagatggcgataacttacgacacggcctaaatagagacttaggattcacggataaagatagagtagagaatattcgtcgcgtttccgaagtaggcaaactaatggtagatgctggtctaattgtgttagcttgttttatttcacctttccgagccgaaagagatatggctcgcaatttattcaacaaagatgagttcgtggaggtttacgttgatactcctttaaaaatttgtgaactgcgagaccctaaggggctttataaaaaagcgagagccggtatcttgaaaaact

SEQ ID NO: 248257 - DNA, 548 bp, Unknown
  Bacterial polypeptide expressing nucleotide sequence isolated from the Sargasso Sea
aatgaaagaccaagatcaaacaaattcaaccaatataaagtggcacaatttaactattgatagagatcagttagagaaaatgagaggtcataaaggaatggtcatttggtttactggtttatcaggctctggtaaaagtacattggccaatgctttaaatgaagttttacacttagaaggtttttcaacttacgttttggatggagataatataagacatggtttatgtaaagatcttgggttttcggatcaagatagagaagaaaatataagaagaataggagaagttgcgaatttatttatgaatgctggcataataactattacagcattcgtttcaccatttattagcgatagagataaggtgagaaaaattattggatctaaagattttattgaagtttattgtgctgcagatattaaggtttgtgaaaacagggatactaaaggtctttataagaaagctcgtatgggtgaaattaaggattttacaggaatttctagtccatatgaagccccccataatccagaaattattgttgatacag

SEQ ID NO: 248258 - DNA, 454 bp, Unknown
  Bacterial polypeptide expressing nucleotide sequence isolated from the Sargasso Sea
ctcgagaaaagtctctttaagcgaggtgtcagaagctacatcctcgatggagataatataagacatggtttgaacaaggatttgggatttaccaacgccgatcgtgtcgagaacattcgtagggtggcggaagtcgccaagttaatggtcgaagcgggtctccttgttattacagcctttatttcaccatttcgttctgaaagggcggtagcaagagctctttttgatcaggatgaattcatcgaggtcttcgtcaatgtgcctattgaagtcgctgaatccagggatccgaagggtttatataagaaagccaggcaaggtgacctacctaattttacgggcatcgattctgattacgaaatccccgagtcggcagagttggaagtgaacacaagtgatttaaatctggagcaatccgtcatcaagatattagagttgttggataaaaagtaac

SEQ ID NO: 248259 - DNA, 895 bp, Unknown
  Bacterial polypeptide expressing nucleotide sequence isolated from the Sargasso Sea
caaaaagataaaaaatcttgctattcagatcaatcaatttctttatgtattgacaaggaattggatattagtaggggagatattctagtatctgaaaaaaatattttaaatttaactgaccaatttgcatgtaatataatgtggtttgatgaacaagaattaataccagaaagagaatatacttttttactctcaacgactgaaacaattgcaaaaataacaaagttagaataccaagtagatattaattcagataagaaattagctactaaaactttaaaacaaaatcaaattggctattgtaaagttacaattaataaaccaattgttgctcatgattataaaactaacaaaaatttaggttctttcatattaattgatagaataacaaacaatactgttggcgcgggaacaataatattttccttaagaagatcagaaaatttattttggcaaaatcataaaataaataaaaaaattcgatctgaaaataaaaatcaaaaatcatgtattatttggtttacagggttatcaggatctggaaaatcaactattgcagacaaattggaacaaaaattaaattttcagggcaagcatacatatattctagatggtgataatattagacatggtttaaataaagaccttggcttcactgatgaagcaagagttgagaatattagaagagtagctgaagttggaaaattaatggttgatgcaggattaattacaatagttgcttttatatcaccttttaatcaggaaagaatgatggcaagacgtatgtttaaaaaagaagagttttttgaagtttttgttgatacccccctggaagtttgtaaaaaacgagatcctaaaggtctatataaaaaagcattagccggtaaaataaaaa

SEQ ID NO: 248260 - DNA, 742 bp, Unknown
  Bacterial polypeptide expressing nucleotide sequence isolated from the Sargasso Sea
aatgatattgcatattgtaaaattgctttgagtaagccaactttttttaaatcttatattcagaataatcagcttggaagttttgtaataattgatcaatttaataatctaacagtcggagctggaatgattgattttgagctaagaagatcaagtaatatttcatggcatgatatgacaatagataagaataaaagatcaacattgaactctcaaaaaccctgtgctttatggttcacaggactttctggttcaggtaaatcaactattgcaaatattttagaacaaaaattacatcaacttaataaaagaacatacttattagatggggataacattaggcatggattaaataaagacttaggatttactgatgctgacagagtagaaaatattcgaagagtcgctgaagtatcaaaattaatgactgacgcaggattaataacattaatttctttcatatcaccttttaaatctgagagaagaatggcaagagatttatttgatactaatgaatttatagaaatttttgttgatacgcctatagaagaatgtgaaaaaagagatcctaaaggattatataaaaaagcaagatcaggaaaactaaaaaattttacaggaatcgactctgattacgaaatacctttatctccagaaataaaattaaaaacagtttcaaaaaagcctgaagaattagctgatgaaattttaaattatatgaaaaaaaataatattatttaat

SEQ ID NO: 248261 - DNA, 598 bp, Unknown
  Bacterial polypeptide expressing nucleotide sequence isolated from the Sargasso Sea
accaatataaagtggcacaatttaactattgatagagaaaagttagagaaaatgagaggtcataaaggaatggttatttggtttacaggtttatcaggctctggtaaaagtactttggccaatgctataaatgaaattttgcacttggatggtttttcaacttacgtgttggatggagacaatattagacacggtttatgcaaagatcttgggttttcggatgaagatagagaagagaatattaggagaattggagaagttgcaaatttatttatgaatgctgggataataactattacagcattcgtttcaccatttattagtgatagagataaggtgagaaaaattattggatctaaagattttattgaagtttattgtgctgcagatatcgaagtttgtgaaaaccgtgatacgaaaggtctttacaagaaagctcgcttgggagaaattaaggattttacagggatttctagcccatatgaagcccctcataatccagaaattatggttgatacaggttcgttagatttaaaggattcagttgaaaaagttcttcactatcttaaacaagaaaacttccttaaaaaaagctaat

SEQ ID NO: 248262 - DNA, 889 bp, Unknown
  Bacterial polypeptide expressing nucleotide sequence isolated from the Sargasso Sea
agttccaattttaggggttatagcggtacaatttcatctggtaaaattaaagtaaatgatgaagttcaagttttaccaagtggagaaaaaaataaaataaaaaaaataataacacccagtggggagaaagactatgcagtaaaagatcaagctgtaactttgacttttgataaagaaatagatgtttcaaggggtaatttaatatgttcaaatggaaaacataattacttttctgccgatcaatttgcctctcatattatttggatgaataaggaaaaaatgctacctgaaagaaattatatttttagatttataaattctcaaatagttggaaaaattactgacctcgttcataaagtaaatattaatacttttgataaaattgcctccaagtcattaggcttaaatgagattggttattgtaaggttgcattaaataaaaatacaatttttaattcttataaaaaaaataagaggcttggaagttttgtaataattgatcaatttactaatcaaaccttagcagcgggggttattgatcatgaactaagaagagcttcaaacatttcatggcaagatatgtctataaataaaaatcttagatcttctattaatggacagaaaccttgtatattatggtttactggactttcaggatcaggcaaatctactatagcaaatataattgaacaaaaattacatgagctaagtaaacatacatatttgttagatggtgataatgtaagacatggactaaacaaagatcttggttttactgattctgatcgtgtggaaaatattcgacgtatttcagaagtttctaaattaatggttgatgctggattaattacaattgtatcttttatctcgccatttaaatcgagaggaa

SEQ ID NO: 248263 - DNA, 928 bp, Unknown
  Bacterial polypeptide expressing nucleotide sequence isolated from the Sargasso Sea
gagcgaatagtgttatttgacgaggagttggagtcagcagtaaagcctcagtcggtaacgttgacccttgataaagaaattgatgcgtccagaggagacgtcatcgttagtagtaaccagccatgtcaggtctctgatcagtttgactgtcaattggtttggctagactccgaagaaggatacatcggccgtacttactggctgatattaggaagtgaacgagtcaatgcgacgctctcggagataaagtttaaatacaacgtcaatacactcgaagagttgccagctcgcagctttgagttgaatgatatcggtcgggtgaccttgagctgtgataaggcgattccattcgaaacttatgaggcatgtcgggaaatgggctcgctagtattagtggatcggttctccaattctacagtgggcgctggaatggtaaattttgctctgcgtagagcgcagaatatccactggcaccatcatgcgattaccaagttagatagagaaaagttaaatggacatagaggtagagttttgtggttgacaggactaagcggatcagggaagtcaacaattgcaagcgagctcgagaaaagtctctttaaccgaggtattagaagctacatcctcgatggagacaatataagacatggtttgaataaggatttgggatttaccaacgccgatcgtgtcgagaacattcgtagggtggcggaagtcgccaagttaatggtcgaagcgggtctccttgttattacagcctttatttcaccgtttcgttccgaaagggcggtagcaagagctctttttgatcaggatgaattcatcgaggtcttcgtcaatgtgcctatcgaagtggctgaatccagggatccgaagggtttatataagaaagccaggcaaggtgacctacctaattttacgggcatcg

SEQ ID NO: 248264 - DNA, 304 bp, Unknown
  Bacterial polypeptide expressing nucleotide sequence isolated from the Sargasso Sea
tatgaataaaaaaaataaaaataccgattttagtaatgaggttttcaagcatgcaatgaaaatcgataaactcaatagatctaaaataaaaaatcaaaaaccatgcattatttggtttactggtttatcgggagctggaaagtcaacagttgcagatcttttagaacaaaaacttaataaattaaaaaaacataccttcctattagatggtgataaccttaggcattcattaaactctgacttaggtttttctaatgaagatagagatgaaaatatacgacgaataggccatttgggggctctt

SEQ ID NO: 248265 - DNA, 961 bp, Unknown
  Bacterial polypeptide expressing nucleotide sequence isolated from the Sargasso Sea
aaaaagtaatatcaaacaaaaaaaagttcattctaaattcagactccccattcaaaatgtattaagaccaaattctgattttagaggctatcaaggaactgttgcctcaggtgctataaaaaaaggagataaagttattattcaaccaggttctcattccaccagaataaaagaaatattcttctccggtaaaaaagttgatcaagtacagtctggtagtgcagtcacagttacattaaaaaatgaaattgacattagcaggggcaatattttaacagaagaaaaggggcagtgtgaaagtagcaaccaatttcaatctaaattaatttggatggatgaaaatgaaggacacattggtaggtcttatatactaaaaattaataatcaaacagctggggcgcagatatctaaaattaaagcgaaaattgatattaacaaactatcagaagtcacggcaacaaaacttaacttaaatgatatctcaattgtaaacatcaatttagataaagatattttttttgaaccttacgacaacaataaaacacttggtgggtttattttagttgatagatttaccaataaaacagttgcagctggcctaattaatttttctttaagacgtgctcaaaatatatttgagcaaaatttaactataaataaaaaattaagacaaaaactcaataatcataagagtaagatactttggtttacaggattaagtggatcaggcaaatcaacaatcgctaatgagctagaaaaaaaactttatgaacgaggaataaggtcttttattttagatggagataatatcagacatgggctgaataaggatttaggatttaccgatgcagatagaattgaaaatattagacgaattggcgaggtagctaaattgatggttgatgcaggtttagtagtaataactgcatttatttctccatttattgcagagagaaatatg

SEQ ID NO: 248266 - DNA, 337 bp, Unknown
  Bacterial polypeptide expressing nucleotide sequence isolated from the Sargasso Sea
atggccaccgacaacgttgtttggcataaacatgaagtaaacaagaccacccgctctgaaaagcttggtcaaacgcctcgtgtattctggctaacgggtttaagcggctctggtaaatcgacattagcaaacctgcttgagaaaaagctccacgagcagcacaagcacacctacctgcttgacggcgacaacgtgcgccacgggctatgtggcgatttaggtttcagcgataaagatcgcgttgaaaacattcgccgcatcagtgaagttgctaaactttttgtcgatgccggtaccattgttcttaccgcttttatctctccttcaaagccgaccg

SEQ ID NO: 248267 - DNA, 439 bp, Unknown
  Bacterial polypeptide expressing nucleotide sequence isolated from the Sargasso Sea
aatgaaagaacaagatcaaagaaagtcaaccaatataaaatggcacaatttaactattgatagagaaaaattagagaaaatgagaggtcataaaggtatggttatctggtttacaggtttatctggctctggtaaaagtactttagccaacgcattaaatgaagttttacacttagatggtttttcgacttacgtgttggatggagataatattagacatggtttatgtaaagatcttgggttttcggatgaagatagagaagaaaatataagaagaattggagaagttgccaatttatttatgaatgccggtattattactattacagcattcgtttcaccatttattagcgatagagataaggtaagaaaaattattggaacaaaggattttattgaagtttattgtgctgcagatatcacagtttgcgaaaatagg

SEQ ID NO: 248268 - DNA, 595 bp, Unknown
  Bacterial polypeptide expressing nucleotide sequence isolated from the Sargasso Sea
atgacaagcaatctacattttcatggggctactatatcaactaaagataaggctacaaagaataaacataggccagccgtattgtggtttacaggactttcgggctcgggcaagtctacattagctaacgctgtagagtgtttgttatttcagcggggttatcaaactcacacgctagatggcgataacatacggatgggacttaatagtgatcttggtttttcacccgaggatagaactgaaaacataagacggatatctgaagtggctaacttgatgagagaatctggtacaatagtatgcacagcatttatttctccataccgtaaaagtagacaatctgcaagagatattataggaaaagattttatagagatatatgtcaaggcaccacttgagacatgtgaagatagagatcccaaaggattatataaaaaagcacgaagtggtgagattccaaactttacaggtgtaagcgccccatatgaaaatccagaaaacccagaagttgttgtagagacacacgaatctaagatagacgactgcgccgagcagataataaaataccttgaagataacgaatactttaagttat

SEQ ID NO: 248269 - DNA, 707 bp, Unknown
  Bacterial polypeptide expressing nucleotide sequence isolated from the Sargasso Sea
ttgtgataaggcgattccattcgaaacttacgaggcatgtcgtgaaatgggctctctagtattagtgatcgggttctccaattcgacagtgggcgctggaatggtaaattttgctctgcgtagagcgcagaacatccaccggcaccatcatgcgattaccaagcaagatagagaaaagttaaacggacatagaggtagagtcttgtggttgacaggactaagcggatcagggaagtcaacgattgcaaacgagctcgagaaaagtctctttaagcgaggcgtcagaagctacatcctcgatggagacaatataagacacggtttgaacaaggatttgggatttaccaacgccgatcgtgtcgagaacattcgtagggtggcggaagtcgccaagttaatggtcgaagcgggtctccttgttattacagcctttatttcaccatttcgttctgaaagggcggtagcaagagctctttttgatcaggatgaattcatcgaggtcttcgtcaatgtgcctattgaagtggctgaatccagggatccgaagggtttatataagaaagccaggcaaggtgacctacctaattttacgggcatcgattctgattacgaaattcccgagtcggcagagttggaagtgaacacaagtgatctaaatctggagcaatccgtcatcaagatattagagttcttggataaaaagtaac

SEQ ID NO: 248270 - DNA, 247 bp, Unknown
  Bacterial polypeptide expressing nucleotide sequence isolated from the Sargasso Sea
catgtccgccagccccacctacggagagatcaccaaccagggggcgtctaccaacatcgcctggcacaaggcttcggtgaatcgggctgcacgggctgagcagcgcggtcatagcagcgccatcctctggttcaccggcctttccgggtccggcaaaagcaccttggccaatgccgtcaacgctgccctgttccaacggggcctggcgacctatgtgctggatggcgacaacgtgcgccacggcctc

SEQ ID NO: 248271 - DNA, 359 bp, Unknown
  Bacterial polypeptide expressing nucleotide sequence isolated from the Sargasso Sea
aatggccaccgacaacgttgtttggcataaacacgaagtaaataagaccacccgctctgaaaagcttggtcaaacacctcgtgtattttggctaacgggtttaagcggctctggtaaatcgactttagcaaacttgcttgagaaaaagcttcacgagcagaacaagcacacctatctgcttgacggcgacaacgtgcgccacggtctgtgtggcgatttaggtttcagcgataaagatcgcgttgaaaacattcgccgcattagcgaagtcgctaaactgtttgtcgatgccggtaccattgtgcttaccgcttttatctcgcctttcaaagccgaccgcgattattgccgcagcttaa

SEQ ID NO: 248272 - DNA, 595 bp, Unknown
  Bacterial polypeptide expressing nucleotide sequence isolated from the Sargasso Sea
tatgagtcaggtcgtttggcaaaactatcaaatcagtcgctttgatcgggagcaacaaaacggtcatcagggcgttgtattgtggtttaccggcttaagcggcgcaggaaaatccacagtggccaatgctttagagcaagaacttgttaaacgtaaagtgcatagttatttgctggacggcgacaatgtgcgtcatggtttatgtgctgatttaggctttagcgaagcggaccgcactgaaaatatccgtcgggtaggcgcagtggctggcttaatgctcgacgcgggcctggtggtgttgagcgcctttatttcgccttaccgtgcacagcgtcaggcgataaaagacagcctgcctgatggcaagtttttagagatttatatcgccacgtctttagatgtgtgtgaacagcgggacgtgaaaggtttgtatcaaaaagccagacgtggtgaaatcagtcacttcacagggatttccgatccttatgaagcaccggagcaagcggatttgatcatagacacagcacagcaaagtctggagcaaagtgttgatcaactgattgccttactgaccgaaaaaggagtgctgagctaa

SEQ ID NO: 248273 - DNA, 1225 bp, Unknown
  Bacterial polypeptide expressing nucleotide sequence isolated from the Sargasso Sea
cccttaagatgccaaattcaagatgtatataaattggatgatagaagaattttagttggtaggatagaaagtggtaaaattaaaaagggagataaattaattttttctccatcaaataaatcttctgaaataaatacaattgagttttggggtaagggtgcaaataaagaatccgtttataaggggcattcagttggtataactttaaaggatcaaatttttattgaaagaggtgaaattgcttcacatgtaactaaaaatgatatgccaatagaaactgatatattcaaagcaagagttttctatcttggatctagtccaatgtttattggtcagtcatttactatggaatgtggtacttgttcagttaaagtatttattcaggatattatttctataatttcaacagacgatctgagtcataataaatcttcaactgtaagtaagaatcaggttgctgaattggttattagatccgaaaagattattgctattgatgagtttattaatatctctgctacaggaagatttattttaattaatgaaaacataattgttgctggcggtttaattagtatggagggttatgctaatcaaagaggcttagatatttctctctcaaaaaatttaacttctgttgaacatagagtaagtattgacgagagagcagaaagaaaccgtcataatggtggggtcttttggttaacaggcttatcaggttcaggaaagtcaacgatcgctcttgatgtagaaagaagactttttgaggcaggatatcaagtttatcttcttgatggtgataatgtgagggagggtttaaattcaaatttaagtttttctccagaagacaggtctgagaatataagaagggttggagaagttgcgcttttatttgctaatgcaggtttcatagttttaagtgcttttataactccgtatatatctgatagagctagattaagaagaaatttgtccgataagacagaatttcatgaaatttatatagaatcgtcaatcgaaatatgtgagcaaagggaccccaaagggctctataaaaaagctagggttggggagataaaggattttacaggaatagattcaccctacgatattcctgtgaacccagatttagttataaatacaattagtgaggataagaatttatctgcctcaaaattagaaaattacattcataaaaatctcggttttttgctaaaaacctgat

SEQ ID NO: 248274 - DNA, 238 bp, Unknown
  Bacterial polypeptide expressing nucleotide sequence isolated from the Sargasso Sea
tatggatgaaaatatagtttggcataactacgcaaccactaaagcacaacgtagcgagcaaaaaaaacataagccggctattttatggtttacaggtttttcaggctcaggtaaaagcaccgtagccaacgcactcgaagcagcgcttaatcagcaaggcgtacacacttacctgctcgatggcgacaacgtacgccacggcttatgtaaagacctaggctttagcgatgaagaccgc

SEQ ID NO: 248275 - DNA, 625 bp, Unknown
  Bacterial polypeptide expressing nucleotide sequence isolated from the Sargasso Sea
atgaaagaacaagatcaaacaaagtcaaccaatataaagtggcacaatttaactattgatagagaaaagttagagaaaatgagaggtcataaaggtatggttatctggtttacaggtttatctggttctggtaaaagtactttggctaacgctttaaatgaagttttacacttagatggtttttcgacttatgtgttggatggagataatattagacacggtttatgcaaagatcttggtttttcggatgaagatagagaagaaaatataagaagaattggagaagttgcgaatctatttatgaatgctgggataataactattacagcattcgtttcaccatttattagcgatagagataaggtcagaaaaattattggagctaaagattttattgaagtttattgtgctgctgatattacagtttgcgaaaatagggatactaaaggtctttataagaaagctcgtttgggtgaaataaaggaatttacagggatttctagtccatatgaagctcctcataatcccgaaattgttgttgatacaggttcgttagatttaaatgattccgttgagaaagttattaactaccttaaaacagaaaactttcttaaaaaggcctaat

SEQ ID NO: 248276 - DNA, 679 bp, Unknown
  Bacterial polypeptide expressing nucleotide sequence isolated from the Sargasso Sea
atgtcctccagcccgacctacggagagctcaccaaccagggggcgtcgaccaacatcgcctggcaccaggcttcggtggatcgggctgcacgggctgagcagcgcggtcatcgcagcgccatcctctggtttaccggcctctctgggtccggtaaaagcaccctggccaatgccgtcaacgccgccctgttccaacggggcctggcgacctacgtgctggatggcgacaacgtgcgtcacggcctctgcaaggacctcggcttttccgatgcagatcgcgaagagaacatccgtcgcatcggcgaggtggccaaattgttcctggattctggcgtcattgtgctgacggccttcgtttcccccttccacgccgaccgggacaaggcccgcgcattggttgacgacggtgatttcctcgaaatccactgcgccgcggatctggaggtctgcgaatcccgcgatcccaagggtctctacgccaaggctcgttccggccagatcaaggaattcaccggtatctccagcccctacgaagcgccagaggccgcagaactgaagatcgaaaccggcagccaggagctcgccgaatcggtcgatatggtgatcaaggcgctgcaggaacggggggtgattccggcggctttaagccagtccgggctgcatcagccaggcttttgac

SEQ ID NO: 248277 - DNA, 484 bp, Unknown
  Bacterial polypeptide expressing nucleotide sequence isolated from the Sargasso Sea
tatgaaatcggaaaacgtaatttggcacgaacatcaagtcagtagagaagagcgagagagactaaaaggacatcaaggggctgtattgtggtttacagggctaagtggctctggcaagagtactgttgcaaacgaagttgagtatttgctaaatcgttccggagtccatacttacctcctagacggagataatgtcagacacggcttgaacaacaatttagggttttctaaagaagatcgcgcagaaaacataaggcgaattggcgaggtatgcaagctaatgtcagatgcgggcctcataacgttcactgctttcatctcgccctaccgcgtggacagaaataaggttcgtaatcttatggaagggatgccttttatagaaatttactgcaaagcctctctggaaacctgtgaaagtagagattcgaaaggtttgtacaagaaagccagggcaggcgagattaccggatttacgggaatagat

SEQ ID NO: 248278 - DNA, 660 bp, Unknown
  Bacterial polypeptide expressing nucleotide sequence isolated from the Sargasso Sea
ttctggatagtgccgggggcgggattgttgggatcggtgttatcgatttcgcacttcgccgctcgaccaacatttcctggcaccagaccacggttgatcaggctgccagagcacgtgttcatagccaccagccttgcgtagtctggtttaccggtttgtcaggatccggcaagtcgacggttgccaatgtccttgagcagaagctccacagcgaggggcggcatacctacctgcttgacggcgataacgtgcgccacggactttgccgggatctcggatttaccgatgccgatcgggtggagaatatccgccgggtctcggaagtggcaagactgatggctgatgcagggcttatcgtcatcgcttcattcatctcaccttttgccaatgagcgcgagatggctcgtctcgcggctggggatatccttttcgtcgaggcattcgttgatacgccgcttgcggtgtgtgaatcccgtgatcccaagggtctttacaaaaaagcacggaatggtgagctgaaaaactttaccggtatcgactcagcctatgaggcgccaagccggcctgagattacactgcatggtgcagagcacacgccagaagtgctggccgatcaggtcgcagaatatctttcttccaagaatgtcttttctgtttagg

SEQ ID NO: 248279 - DNA, 603 bp, Unknown
  Bacterial polypeptide expressing nucleotide sequence isolated from the Sargasso Sea
cgctcaacggtcatcgtggaggcgtggtttggttcaccgggttgtccggatccggtaaaagtaccattgcaaaccttgtcgaccacaaactccacgcaatgcaggtgcacacgtttttactcgatggagataatgtccgacacgggttgaacgcaaccacatcgcgactggccgatcagtataaccaggcgtttggtgagcgatttggtctcggattttccgaggaagacaggcaagagaatatccggcgcatcggagaggttgccgcactttttgccgaggcgggattgctcgttctgacggcatttgtgagcccctaccgccgcgaccgagatgctgtaagaaaccgcctggaggagggcgattttgtggaagtatttgtcgatgctcccctggaaatctgcgaacagcgcgatcccaaggggctatacaggaaagcacgggcgggtgaaattcagggcatgaccggcatcgacgatccgtatgagagtcccgagcggcccgaacttgtattgccttcaggacaggattcggcggagtcgcttgccgatgaggtgctccgttatttacgtgcggcggagaagattccaagtatctcctgat

SEQ ID NO: 248280 - DNA, 676 bp, Unknown
  Bacterial polypeptide expressing nucleotide sequence isolated from the Sargasso Sea
tctcccgtggtgttgtttctggatagtgccgggggcgggattgttgggatcggtattatcgatttcgcacttcgccgctcgaccaacatttcctggcaccagaccacggttgatcaggctgccagagcacgtgttcatagccaccagccttgcgtagtctggtttaccggtttgtcaggatccggcaagtcgacggttgccaatgtccttgagcagaagctccacagcgaggggcggcatacctacctgcttgacggcgataacgtgcgccacggactttgccgggatctcggatttaccgacgccgatcgggtggagaatatccgccgggtcgcggaagtggcaagactgatggctgatgcagggctcatcgtcatcgcttcattcatctcaccctttgccaatgaacgtgagatggcccgcctcgtggctggagatatccttttcgtcgaggtattcgtcgatacgccgcttgcggtgtgtgaatcccgtgatcccaagggtctttataaaaaagcacggacgggtgagctgaaaaactttaccggtatcgactcagcctatgaggcgccaagccgtcctgagatcacactgcatggcgcagagcacacgccggaagtgctggccgatcagatcgcagaatatctttcttccaagaatgtcttttctgtttagg

SEQ ID NO: 248281 - DNA, 503 bp, Unknown
  Bacterial polypeptide expressing nucleotide sequence isolated from the Sargasso Sea
catgaccgccagccccacctacggagagctcaccaaccagggggcgtccaccaacatcgcctggcatcaggcttcggtggatcgggcggcacgggctgagcaacgcggtcatcgcagcgccatcctctggttcaccggactttccggctccggcaaaagcaccctggccaatgccgtcaacgccgccctgttccaacggggcctggcgacctacgtgctggatggcgacaacgtccgccacggcctctgcaaggacctgggcttttccgatgccgaccgcgaagagaacatccgtcgcatcggcgagttggccaaattgttcctggactccggcgtcatcgtgctgacggcctttgtgtcccccttccgcgcggaccgggacaaagcccgcgccctggtggaggacggtgatttcatcgaaatccactgcgcggcggatctggaggtctgcgaatcccgcgatcccaagggtctctatgccaaggcccgtgccggccagatca

SEQ ID NO: 248282 - DNA, 484 bp, Unknown
  Bacterial polypeptide expressing nucleotide sequence isolated from the Sargasso Sea
aaatcgacattagccaacctgcttgagaaaaagcttcacgagcagaacaagcacacctatctacttgacggcgacaacgtgcgccacggtctgtgtggcgatttaggtttcagcgataaagatcgcgttgaaaacattcgccgcattagcgaagtcgctaaactttttgtcgatgccggtaccattgtgcttaccgcttttatctcgcctttcaaagccgaccgcgattattgccgcagcttaatggaagacggagagtttgtagaagtgtttatcgatacacctcttgaagtgtgtgaaaaacgcgacccgaaagggctatacaagaaagcgcgtagcggtgaaattaaggacttcacaggtattgattcagcctatgaagcacctgaagcgccagaagtacacttaacctatcaggatgaaccagcagagcaaaccgctgagcgattgtatgctttgcttcaagaaaagggattggtgtaat

SEQ ID NO: 248283 - DNA, 796 bp, Unknown
  Bacterial polypeptide expressing nucleotide sequence isolated from the Sargasso Sea
ttaatttggatggatcaagaacctatgttgcctgagagaaattatatttttcgttttaataattcttacattaatggaaaaataactgatttagttcatagtataaatgttaattcttttgaagaagttgcctccaaaaaattaaatttaaatgatattgcttattgtaaagtcgccattgataaaatgcatgatattagttcgtacgctaataatcaaaagttgggaagttttgttataattgatccttataataacaaaacaattggggtaggcatgattgatcatgctcttcgtcgatctagcaatatttcttggcatgaaatgtcaattaataaaaaaactcgatctgaattaaattcccaaaagccatgtgttgtatggtttacgggattatcaggttctggtaaatcaacaattgctaatattttagaacaaaaattacacaccataggaaagcgaacttatttattagatggtgataacgtacgtcatggacttaataaagatttaggatttactgatactgatagggtagaaaatattcgtcgtgttgcagaagtatccaagctaatggttgatgctggattaataacattagtttcatttatttcacctttcaaatcagaaagacaaatggcgaaagatttattatcttcagatgagttttttgaaatttttgtaagcacgtcacttgaagagtgtgaaaagagagatccaaaaggattgtataaaaaagcaagagctggagagttaaaaaactttacaggtatagactctttatatgaggaaccag

SEQ ID NO: 248284 - DNA, 723 bp, Unknown
  Bacterial polypeptide expressing nucleotide sequence isolated from the Sargasso Sea
aatgacgactaacttacattatcataagcataagataaccaacattatgagatcaaataagtatggtcataagccggctgtaatttggctaacgggcctatctggatctggaaagtctactgtagcgaaccttgtagagtctaagctgtttgatttgggttgcaaaacatatattttagacggagataatgtaaggcttggcctaaataacgaccttgggtttagtcctggggatcgaaaagaaaatataaggagaataggcgaggttgcaggcttattctctgattctggatcaatagttttagctgcgtttatatctccctataaagatgatagaaatcaagcaagaaagtcttgcaatcatgattttatagaagtgtacgtgaactgtagcattgaggagtgcgaaagaagagatccaaaaggactatataagaaggccagatctggagaaataaaaggctttacgggagtagacgccccttacgaggagcctgaaagtcctgatgttataataaatactaataattttagcgtagaagagtgtgctgatagtattgtggcggagttggttcgcagaggcacaataaaggcaagcttaggagagatagcaactcttgataaaaagaagacaattgctatagattttgatggagttgttcatgcctattcaaggggtttttctgggctggacaatgcttatgaccctccacatcatggtgt

SEQ ID NO: 248285 - DNA, 646 bp, Unknown
  Bacterial polypeptide expressing nucleotide sequence isolated from the Sargasso Sea
atgtccgccagccccacctacggagagctcaccaaccagggggcgtccaccaacatcgcctggcaccaggcttcggtggatcgtgctgcacgggctgagcagcgcggtcatcgcagcgccatcctctggttcaccggcctctccgggtccggcaaaagcaccctggccaatgccgtcaacgccgccctgttccaacggggcctggcgacctacgtgctggacggtgacaacgtgcgccacggcctctgcaaggacctgggcttttccgatgccgatcgcgaagagaacatccgtcgcatcggcgaggtggccaagttgttcctggactcgggcgtcatcgtgctgacggccttcgtgtcccccttccgcgccgaccgggacaaggcccgcgccttggtggacaacggtgatttcatcgaaatccactgcgccgcggatctggaggtctgcgaatcccgcgatcccaagggtctctatgccaaggctcgtgccggccagatcaaggaattcaccggcatctccagcccctacgaagcgcccgaggctgcagaactcaagatcgacaccggcagccaggagctggctgaatcggtcgaactggtgatcaaggcgctgcaggaacggggggtgattccggcggcttgac

SEQ ID NO: 248286 - DNA, 625 bp, Unknown
  Bacterial polypeptide expressing nucleotide sequence isolated from the Sargasso Sea
atgaaagaacaagatcaaacaaagtcaaccaatataaagtggcacaacttaactattgacagagaaaagttagagaaaatgagaggtcataaaggtatggttatctggtttacaggtttatctggttctggtaaaagtactttggctaacgctttaaatgaagttttacacttagatggattttcgacttatgtgttggatggagataatattaggcacggtttatgtaaagatcttggtttttcggatgaagatagagaagaaaatataagaagaattggcgaagttgcgaatttatttatgaatgctgggataataactattacagcattcgtttcgccatttattagtgatagagacaaggtgagaaaaattattggttctaaggattttattgaagtttattgttctgctgatatcaaagtttgcgaaaatagggatactaaaggtctttataagaaggctcgtatgggtgaaattaaggaatttacagggatttctagtccatatgaagctcctcataatccagaaattgttgttgatacaggttcgttagatttaaatgattctgttgaaaaagttattaactaccttacaaaagaaaactttcttaacaaggcctaga

SEQ ID NO: 248287 - DNA, 625 bp, Unknown
  Bacterial polypeptide expressing nucleotide sequence isolated from the Sargasso Sea
aatgaaagaacaagatcaaacaaagtcaaccaatataaagtggcataacttaactattgatagagaaaagttagaaaaaatgagaggtcataaaggtatggttatctggtttacaggtttatctggttctggtaaaagtactttggccaacgctttaaatgaagttttacacttagatggtttttcgacttatgtattggatggagataatattagacacggtttatgcaaagatcttggtttttcggatgaagatagagaagaaaatataagaagaattggcgaagttgcgaatttatttatgaatgctgggataataactattacagcattcgtctcgccatttattagcgatagagataaggtgagaaaaattattggatctaaggattttattgaagtttattgttctgctgatatcacagtttgcgaaaatagggatactaaaggtctttataagaaagctcggttgggtgaaattaaggaatttacagggatttctagtccatatgaagctcctcataatcccgaaattgttgttgatacaggttcgttagatttaaatgattccgttgaaaaagttattaactacctaaaaaaagaaaactttcttaacaaggcctaa

SEQ ID NO: 248288 - DNA, 613 bp, Unknown
  Bacterial polypeptide expressing nucleotide sequence isolated from the Sargasso Sea
atggccgccgccaccaacatcgtctggcacgaagcgtcggtggatcgggaggcccgtagccgccagcggggacatcgcagcgtgatcctctggttcaccggcctttcgggttccggtaaaagcaccctggctaatgccgttaatgcggttctgtttgagcgtggcctggccacctatgtgcttgatggcgacaacatccgccatggcctctgcaaggacctgggcttttccgatgcagaccgcgaggagaacatccgtcggatcggcgaagtggcgaagttgtttgttgatgccggggtgatcaccttgaccgcctttgtgtcccctttccgtgctgaccgggacaaggccagggacctggtggcccatggtgatttcatcgaggtgtattgcgccgcggatctggcggtctgcgaggaccgcgatcccaaggggctctatgccaaggctcgggctggggtgatcaaggaattcactggaatctccagtccttatgaggctcctgaagcgcctgagctgcaggtggataccggaagccagtccctcgaagaaagtgtggcttccgtacttagcctgttggaggagaagggggttctgaaggctgcagcctgag

SEQ ID NO: 248289 - DNA, 628 bp, Unknown
  Bacterial polypeptide expressing nucleotide sequence isolated from the Sargasso Sea
atgaaggaactaaatcagaaaaatttaggaagaaatataaaatggcacaatttaactattgatagaaataagttagaaagaatgagaggacataaaggaatggtcatttggtttacaggtttatcagggtccgggaaaagtaccttagccaatgcattaaatgaggttttacatttagatggattatcaacttatgtacttgatggggataatatcaggcatggtttatgtaaggaccttggcttttctgatgaagatagagaagaaaatataagaagaattggagaagttgctaatttattcatgaatgctggaatcataactattacagcatttgtctccccttttattagcgatagaaataaagttagagaaattattggatcaaaagattttgtagaagtatattgtgctgcaaacattgatgtatgtgagagtagagatactaaaggtttatataaaaaagcacgtatgggagaaattaaagaatttactggaatatctagtccatatgaggctcctataaatccagagatatttgttgatacaggttctttagatctaaatgattctgttgaaaaaattatgaattatcttaaagaacagaatttaattgaacgactttaat

SEQ ID NO: 248290 - DNA, 427 bp, Unknown
  Bacterial polypeptide expressing nucleotide sequence isolated from the Sargasso Sea
cataccttccttctcgatggcgacaatgttcgccacgggcttaacaaggatctcggctttaccgaaagcgaccggatcgagaatatccgccgcataggcgaagttgcgaaactcatgaccgatgctggcctgatcgtgctgacagccttcatcagcccttttcgcgccgaccggcagctggtgcgggacatgatcgatggaggcgaattcatcgagatccatgtcgatacgccgctggaaattgccgaggcgcgcgatgtgaaggggctttacaagaaggcgcgcgaggggaagctgaagaacttcaccggcatcgacagcccctacgaaccaccggaaagtccggaaattcgcgtcaacacggtggagatgacacccgaagaggcggcggaccatatcatcgcgaagatcttgccattgaagtagg

SEQ ID NO: 248291 - DNA, 601 bp, Unknown
  Bacterial polypeptide expressing nucleotide sequence isolated from the Sargasso Sea
atgaacgaaaacaatattaaatggcaacaacacgacattaatgcgcaaagccgcgaggcgttgttcggccataaaagcgcggtgatctggtttaccggcttatccggctcgggcaaatcgactgtcgccaatgcgttagagcaagcgttggcggcacaaggcaagcacacctatttgcttgatggcgataatgtgcgccatggcttgtgtgctgatttaggctttagcgcacaggacagaaccgagaatctgcgccgcgtcggcgctgtcgccggtttaatggtcgacgccggcttactggtattaagcgcctttatctcgccctaccgtaatcagcgtgaactggtaaaaagctttattccacaaggtaagtttattgaagtgcatatcgctacgccgctggaagtttgcgaacagcgcgatgtaaaaggcctgtataaaaaagcccgtgctggtgaaatcagccactttaccggtatttccgacccttacgaagcgcccgaagcagccgatttggtgcttgatacgtcagtgacctcgctccaagatagtgtgcaacaacttttggcattactgagagaaagacagattataagctgat

SEQ ID NO: 248292 - DNA, 625 bp, Unknown
  Bacterial polypeptide expressing nucleotide sequence isolated from the Sargasso Sea
catgaccgcaaccacccccaaggccaccaacatcgtttggcatgaagcctcggtggatcgtcaggcccgggccagtaagcgcggtcacagcagctccatcctctggttcaccggcctgtcgggatcgggcaaaagcaccttggccaacgcggtgaatgcggccctgtttgagcgtggcctcgccacctacgtgctcgatggcgacaacatccgccacggcctctgcaaagacctgggcttctccgatgccgaccgcgaggagaacatccgccgtatcggtgaggtggccaagctttttcttgatgccggcgtgatcgtgctcaccgcctttgtctcacccttccgcgccgaccgtgacaaggcgcgcgcccttgtggccgatggtgatttcctcgagatccactgcgctgctgacctcgcggtgtgtgaatcccgcgaccccaagggcctctatgccaaggctcgcgctggacagatcaaggagttcaccggcatttccagcccctacgaggcgccggagaagcccgagctttgcctcgacactggcgcccaaaacctggagcagtgtgtggctgctgtgatcaacctgctggaggagcggggggttctgaaggctgcagcctga

SEQ ID NO: 248293 - DNA, 574 bp, Unknown
  Bacterial polypeptide expressing nucleotide sequence isolated from the Sargasso Sea
atgaaaatcaataaacttaatagatctaatataaaaaatcaaacaccatgcattatttggtttacaggcttatcgggagcaggaaaatcaacggttgcagatctattagaacaaaaactaaataaattaaaaaaacataccttcctgttagatggtgataaccttagacattcacttaattctgacttaggtttttctaatgaagatagaaatgaaaatatacgacgaataggccatttaggggctcttatggtcgatgcaggcttaattgtaattgcatcttttatttcgccatttaaaaaacaaagagaaaatactcgtaatttatttgaaaaaaaagaatttattgaagtatttttagatactccaataagaatatgtgaaaaaagagacccaaagggactatataagaaggctcgttcaggacttataaaagattttacaggaatagactcagcctatgaaaaaccagaaaatcctgaaattaccttggatggatctcaaaaaacaccagaagacctttctggagaaatcataagctatttattaaaaaatgatattataaatttatgac

SEQ ID NO: 248294 - DNA, 526 bp, Unknown
  Bacterial polypeptide expressing nucleotide sequence isolated from the Sargasso Sea
gtcgtttggtttaccgggttgtccggttcaggtaaatcaacggttgcaaacggcgtagagaaggaactgcatcgtcatggtgtccggacatacgtccttgatggcgacaatgtccgtcacgggttgagtaaggatcttggttttaccgacgccgatcgcgttgagaatattcgtcgtgtcgcggaggttgcgcgattgatggtagatgctggtttagtggtgttgacatcttttatttcaccctttcgatctgagcgggatctagccagacagctgttcgacgaaggtgagttcttcgaggtctacgtcaatgttcctttgacggtcgcagaggagcgtgatcctaaaggtctttaccgtaaagctcgagcgggcgagattccaaacttcaccggcatcgatagtgactatgaggcgcccgtatcacctgagcttgaggtgagaactaacgaactcctactgccagagtgcattcaggctgtctttgaactcctgaaagcgaacagtatatttatgacccgctgaa

SEQ ID NO: 248295 - DNA, 495 bp, Unknown
  Bacterial polypeptide expressing nucleotide sequence isolated from the Sargasso Sea
aatgagcaatatcgtgtggcatcagcatgccgtgggcaaagagcgtagggccgaattgaaagggcaaaagcccctggtgatttggttcaccgggctctcaggggcgggcaagtccaccctggcgggggcactggagcaggcgctggccgcgcaaggcaagcacacctatctgctggatggggacaacgtgcgccacggcctgtgcggcgatctcggcttcgatgacgccgcccgtcaagaaaacatccgccgggtcggcgaggtggcaaaactgatggtggatgcgggccttatcgtgctcaccgcttttatctcgccatttcgtgccgagcgggagctggtgcgcaatctcgtgggtgaaggggagtttgtcgaagtgtttgtcgatgcgccgcttagcgtgtgcgaagagcgcgaccccaaggggctctacaagaaggcgcgggcaggggagatccgcaacttcaccggcatcgactccgcctacgaggcgcc

SEQ ID NO: 248296 - DNA, 590 bp, Unknown
  Bacterial polypeptide expressing nucleotide sequence isolated from the Sargasso Sea
acaccggggctgcgtcatttggtttaccggattgtcaggttctgaaaagagtactcttgctaacgaagttgataggcagctgcatgctcgcggtcatcgtagttttattcttgatggggataatgtgcgtcatggtctgaatgcctctccaaaaatccttgaaacaattcatgggcagccgttcgcaaagcgatttggtctaggcttcggtcctgaagaccgccaggagaatattcgtcgggtaggagctgttgcagaactctttacgcaggctggaattattacactcacggcatttattagcccttatcggagtgatcgtgaagcagtgcggaaaatgttaccagcggcagactttattgaagtatacgtcaaagcaccgctggacatttgcgagagtcgtgatccaaaagggctgtacaaaaaagctcgtgctggtgaaatttctggattcaccggtatcgatgcgccctatgaagaaccagaaaaggcagagattacagtcgaatctactaccaagagtccacaagtacttgctgagcaaattctcgtttggcttgaacgagctaaagttattcccgtacggtaat

SEQ ID NO: 248297 - DNA, 598 bp, Unknown
  Bacterial polypeptide expressing nucleotide sequence isolated from the Sargasso Sea
atggccaccgacaacgttgtttggcataaacacgaagtaaataagaccacccgctctgaaaagcttggtcaaacacctcgtgtattttggctaacgggtttaagcggctctggtaaatcgactttagcaaacttgcttgagaaaaagcttcacgagcagaacaagcacacctatctgcttgacggcgacaacgtgcgccacggtctgtgtggcgatttaggtttcagcgataaagatcgcgttgaaaacattcgccgcattagcgaagtcgctaaactgtttgtcgatgccggtaccattgtgcttaccgcttttatctcgcctttcaaagccgaccgcgattattgccgcagcttaatggaagacggagagtttgtagaagtgtttgtcgatacacctcttgaagtgtgtgaaaaacgcgacccgaaagggctatacaagaaagcgcgtagcggtgaaattaaggacttcactggtattgactcagcctatgaagcacctgaagcgccagaagtacacttaacctatcaggatgaaccagcagagcaaaccgctgaacgtttgtatgctttgcttcaagaaaagggattggtgtaat

SEQ ID NO: 248298 - DNA, 874 bp, Unknown
  Bacterial polypeptide expressing nucleotide sequence isolated from the Sargasso Sea
aaaccaggttttgtaggaagaggttattttttgaaaataggaacaactttggtaaatgcaatcatcactaaaattaaacacaaaattaatatagataatttaaacagttcgccggctaacgaattgatttttaataatatttacgaagtatccataaaacttaacaaagagatactttgtgataaattttctgattaccctggaacaggatcctttattttgattgataaagaaagtttgaatacagtcggtggaggcatgataaacttcgttttgcatagatctcataatttattcaagcaaaaatttaaaattaccactaaagatagattcctattaaatggtcacaaagccaaagttatttggtttactggtttatctggaagtgggaagtctacaattgcaaatgaacttgaaaaaaaattatactctatgggtatcagaacgtttattcttgatggtgacaatgtaagacagggtttaaatagtgacattggatttaaagacgctgacagaatagaaaatattagaagagtttcagaagtggcaaaattaatgtttgatgcggggttagtagtaatagtttcttttatttctccatttcgttcagaaagagatatggcgcgtaaactttttaaaaaaaatcaattttttgaagtatttgttaatacacctttaaatatagcagaaaaaagggatccaaaaggtttatataaaaaggcaagaaaaggactattaccaaattttacaggaatagatagtccatatcaaaaacctataaaacctgaaattaccttagatactactacaaaaaaagcaaaagattgtagtgaattaatagtaaaaaaaatattcaaaaatcccattcagatag

SEQ ID NO: 248299 - DNA, 571 bp, Unknown
  Bacterial polypeptide expressing nucleotide sequence isolated from the Sargasso Sea
tatgaaaatcaataaactcaatagatccataataaaaaatcaaacaccgtgcattatttggtttactggattatcgggagcagggaagtcaacagttgctgatcttttagaacaaaaacttaataaattaaaaaaacataccttccttttagatggcgataaccttaggcactcacttaattctgacttaggtttttctaatgacgatagaaatgagaatatacgacgaattggccatttaggagctcttatgattgatgcaggattaattgtaattgcgtcttttatttctccatttaaaaaacaaagagacaatacgcgtaatttatttgaaagaaaagaattcattgaagtatttttagatactccaattggaatttgtgagaaaagagacccaaaaggactttataagaaggctcgttcaggacttataaaagattttacaggaatagactcagcctatgaaaaaccagaaaatcctgaaattatcttggatggttctcaaaaaacaccagaagatctttccgaagaaataataaactatttattaaaaaataatattataaattaa

SEQ ID NO: 248300 - DNA, 601 bp, Unknown
  Bacterial polypeptide expressing nucleotide sequence isolated from the Sargasso Sea
ttgagtaaaccagtagaaggccctagcggcaaacaggatcaggttacagaagaggttgatgttcgatggcatgcagccacaatcagtcgagatcaacgtgaacgtagtgcaggccaccggggctgtgttatttggtttaccggcttatcaggatctggaaaaagtactcttgctaacgaagttgataagttgttgcatgcccgtggacatcggagttttattctcgacggagacaacgtgcgacatggtctgaatgcatctcccagtctgcttgaaacaattcacggacagcctttcgcaaagcgatttggccttggctttggggcagaagatcgcaaggagaatattcgtcgagtcggggcagttgcagaactctttactcaggctggaatcattacgctcacggcatttattagcccctatcgtagtgatcgtgaagcagtacggaaaatgttgccagaggcagattttgtcgaggtatatgtcaaagcacccttagacatctgcgagagtcgggatccaaaagggctctataaaaaagctcgtgctggtgaaattagtgggttcactggtattgatgacccatatggaagagcctgaa

SEQ ID NO: 248301 - DNA, 613 bp, Unknown
  Bacterial polypeptide expressing nucleotide sequence isolated from the Sargasso Sea
agatcaaacaaagtcaaccaatattaagtggcacaatttaactattgatagagaaaagttagagaaaatgagaggtcataaaggtatggttatctggtttacaggtttatctggctctggtaaaagtactttggccaacgctttaaatgaagttttacacttagatggtttttcgacttatgtgttggatggagataatattagacacggtttatgtaaagatcttggtttttcggatgaagatagagaagaaaatataagaagaattggagaagttgcgaatttatttatgaatgctgggataataactattacggctttcgtttcgccatttattagcgatagagataaggtgagaaaaattattggatctaaagattttattgaagtttattgtgctgcagatattacagtttgcgaaaatagggatactaaaggtctttataagaaagctcgtttgggtgaaattaaggaatttacagggatttctagtccatatgaagctcctcataatccagaaattgtagttgatacaggttcattagatttaagtgattccgttgaaaaagttgttaactaccttcaaaaagaaaactttcttgacaaagcctaa

SEQ ID NO: 248302 - DNA, 625 bp, Unknown
  Bacterial polypeptide expressing nucleotide sequence isolated from the Sargasso Sea
atgaaagaacaagatcaaacaaagtcaaccaatataaagtggcacaacttaactattgatagagaaaagttagagaaaatgagaggtcataaaggtatggttatctggtttaccggtttatctggttctggtaaaagtactttggccaacgctttaaatgaagttttacacttagatggtttttcgacttatgtgttggatggagataatataagacacggtttatgtaaagatcttggtttttcggatgaagatagagaagaaaatataagaagaattggtgaagttgcgaatttatttatgaatgctgggataataactattacagcatttgtttcgccatttattagcgatagagataaggtgagaaaaattattggatctaaggattttattgaagtttattgttctgctgatatcacagtttgtgaaaatagggatactaaaggtctttataagaaagctcgtttgggtgaaattaaggaatttacagggatttctagtccatatgaagctcctcataatcctgaaattgttgttgatacaggttcgttagatttaaatgattccgttgaaaaagttattaactacctcaaaaaagaaaactttcttaacaaggcctaat

SEQ ID NO: 248303 - DNA, 703 bp, Unknown
  Bacterial polypeptide expressing nucleotide sequence isolated from the Sargasso Sea
ttgagtaaaccagttgaaggccctagcggcaaacaggatcatgttaccgaagaggttgatgttcgatggcatgcagccacaatcagtcgagaacaacgtgaacgtagtgcaggccaccggggctgtgttatttggtttaccggcttatcaggatctggaaaaagtactcttgctaacgaagttgataagttgttgcatgcccgtggacatcggagttttattctcgatggagacaatgtgcggcatggtctgaacgcatctcccagtctgcttgaaacaattcacggtcagcctttcgcaaagcgatttggccttggctttgggtcagaagatcgcaaggagaatattcgtcgggtcggggctgttgcagaactctttactcaggctggaatcattacgctcacggcatttattagcccctatcgtagtgatcgtgaagcagtacggaaaatgttgccagaggcagattttgtcgaggtatatgtcaaagcacccttagacatctgcgagagtcgagatccaaaagggctctataaaaaagctcgtgctggtgaaattagtgggttcacaggtattgatgacccttatgaagagcctgaaaaggcagaaattactgttgaatctgctgtgcacaatccgcaggtactcgcccaacaggttcttgtttggctcgaacgtgctgaaattattccagcacgataat

SEQ ID NO: 248304 - DNA, 619 bp, Unknown
  Bacterial polypeptide expressing nucleotide sequence isolated from the Sargasso Sea
atgagcaatatagtgtggcatcaacatagtgtcgaccaagcagccagagccaaactcaaggggcagaatccggtattgctttggtttaccgggctttctggcgcaggtaagtcgaccctagcaggtgcgcttgagcgtgcattatttgaagcgggctttcacacctatctgctcgatggcgataatgtgcgccacggtctatgtaaagatttgggctttagcgtggccgacagggatgaaaacctacgccgtgttggcgaggtagcaaaacttatggtggatgcgggcttggtggtgttatcagcttttatctctcccacccgagaagagcgcgatagcatacgtgcaagattccccgctggacaatttatcgaagtgcatgtatcgacgccacttagcgtatgtgaagcgcgtgatcccaagggattgtacgttaaagcacgcaagggcgaaatcgcacattttactgggatttcatcgccctatgaggccccgctctccgctgagttgacgattgataccagcaaaggggatttagcatctcaagttcgggctttgattgattatttaaccgcaatcgatgttattagcccaagtcgcctcacggcgctggcataga

SEQ ID NO: 248305 - DNA, 600 bp, Unknown
  Bacterial polypeptide expressing nucleotide sequence isolated from the Sargasso Sea
aatgaaagaacaaaatcaaacaaagtcaaccaatataaagtggcacaacctaactattgatagagaaaagttagagaaaatgagaggtcataaaggtatggttatctggtttacaggtttatctggttctggtaaaagtactttggccaatgctttaaatgaagttttacacttagatggtttttcgacttatgtgttggatggagataatattagacacggtttatgtaaagatcttggtttttcggatgaagatagagaagaaaatataagaagaattggcgaagttgcgaatttatttatgaatgctgggataataactattacagcattcgtttcgccatttattagcgatagagataaagtgagaaaaattattggatctaaggattttattgaagtttattgtgctgctgatattacagtttgcgaaaatagggatactaaaggtctttataagaaagctcgtttgggtgaaattaaggaattcacagggatttctagtccatatgaagctcctcataatcccgaaattgttgttgatacaggttcgttagatttaaatgattccgttgagaaagttattaactacctaaaaaa

SEQ ID NO: 248306 - DNA, 640 bp, Unknown
  Bacterial polypeptide expressing nucleotide sequence isolated from the Sargasso Sea
tatgaactcaaaaaaattacaaaaagcaacaaacatatcatggcatgaaggtgagatttcacgatttgatagatacaagatattacctcagaaaggagcaacgatatggtttacaggtttatctggaagtggaaaaagcactattgcagtagcgcttgagaaggcgctttacaaagatggaattctctcttataggctagatggtgataatgttagaatgggaataaacaagaatcttggattttctgagaaagatcgccaagaaaatattcgtcgaattggtgaggtttgcaagctctttggtgatgctggattgatagcaatctcgagttttataagtccatatactcatgatagagatgatgtaagacagttacacattgagtcaaatttggagtttatagaagtatttgttgattgccctcttgaagttgctgaaaaaagagatccaaaaggactatataaaaaggctcgagcaggaaaaatacaaaatttcacaggaattgatgatccatatgagcctccagaatcaccagaaattcacttacgcagccatgaaatgtcactggagtcagaagttaatgcaatcatcaattatttaaatgaatgcggcatcataaaagcaaagaaaaatgaataa

SEQ ID NO: 248307 - DNA, 598 bp, Unknown
  Bacterial polypeptide expressing nucleotide sequence isolated from the Sargasso Sea
atggccaccgacaacgttgtttggcataaacacgaagtaaacaagaccacccgctctgaaaagcttggtcaaacgcctcgtgtattctggctaacgggtttaagcggctctggtaaatcgacattagccaacctgcttgagaaaaagcttcacgagcagaacaagcacacctatctgcttgacggcgacaacgtgcgccacggtctgtgtggcgatttaggtttcagcgataaagatcgcgttgaaaacattcgccgcattagcgaagtcgctaaactttttgtcgatgccggtaccattgtgcttaccgcttttatctcgcctttcaaagccgaccgcgattattgccgcagcttaatggaagacggagagtttgtagaagtgtttatcgatacacctcttgaagtgtgtgaaaaacgcgacccgaaagggctatacaagaaagcgcgtagcggtgaaattaaggacttcacaggtattgattcagcctatgaagcgcctgaagcgccagaagtacacttaacctatcaggatgaaccagcagagcaaaccgctgagcgattgtatgctttgcttcaagaaaagggattggtgtaat

SEQ ID NO: 248308 - DNA, 595 bp, Unknown
  Bacterial polypeptide expressing nucleotide sequence isolated from the Sargasso Sea
aatgagcaatatcgtgtggcatgcccatgctgtcgacaaacagagccgggccgggcagaagggacagaagccgctggtgatctggttcaccggcctctccggggcgggcaagtccaccctggcgggagccttggagcaggctctggtggccgagggcaagcacacctatctgctggatggggacaacgtgcgccacggcctctgtggcgatctcggcttcgatgacgccgcccgccaggagaacatccgccgggttggcgaggtggcaaaactgatggtggatgcgggacttatcgtgctcaccgcctttatctcgccgttccgtgccgagcgggagctggtgcgcaatctcgtaggtgaaggggagtttgtcgaagtgtttgtcgatgcgccgctcgccatctgtgaagggcgagaccccaaggggctctacaagaaggcgcgggccggggagatccgcaactttaccggtatcgactctgcctacgaggcgccggaaaatccagaaatccatctgctgaatgccggcaagccggtggaggtgctggtggatgagttgctgactgcgctaaggctgcggaggttgatcgattaa

SEQ ID NO: 248309 - DNA, 1777 bp, Unknown
  Bacterial polypeptide expressing nucleotide sequence isolated from the Sargasso Sea
gatggaaagcacactcattgggagaatgctttatgagtctcagatgatatttgatgatcaagttgcctctttaaaaaatgactcgaaaaaatatggaactcaaggtgaggatattgattttgcattactagttgatggtttatcagctgagagagaacaaggtattacgattgatgtagcttatcgatttttctctagtagtaaaagaaagttcattgttgcagatacacctggacacgaacaatacactagaaatatggcaaccggtgcttcaacagctgatatggccatcttactagttgatgctcgaaatggtatactcacacagactaagagacattcttttattgtttctcttcttggaattcaaaatattgtcttggcaattaataaaatggatttaattggctatgataaaaaaatatatgaaaagttaagttctgaatacatatcattttcaaaaaaattaaattttaaaaaaattcaaagcatacctatatcagctcttaaaggagataatattcataataaatcgaaaaatatgaaatggtattctgataaaactttatttgattatttagaaactacaaaatctcaaaactctaataaagatggtttcatatttcctgttcaaagggttaatcgacctaatctaaatttcaggggatattctggaactattacttgtgggaaaattaaaataggcgacgaactaacatctcttccatctaatcaaaaagctaaagtaaaagatattctgattggagaaaaatcaataaaatctgcgggtttaaagcaaagtgttaccattacattaaataaagagatagatacctcgagaggcgatgttctttgttcaaaaaaatcagttatagaaatggctgatcaatttaatttgaatgttatttggatgtcagaggagaaatgttttaatgggagaacgtacttagccaaaattcataatatatctacaagtattaaaattatgagtattaaaaaaatatataatgtaaatacacttgaatttgatgtccgggatgagttgaaacttaatgatgttgcagaaatttcagtctccttcaataaagacattccctattcaacttttaaagaaaataaaactttaggttctttaataattattgatccaataagcaatcaaactattgggatgggtatgataaattttgctcttcgaagatcccaaaatatccaaattcaaaatttatctataaataaaaatcttagagaaaaaattaatggacataagggtcaagtgctttggatgactggtctctctggctctggaaaatctactttggctaatgaacttgaaaaaaaattatactcccaaggtaaaaaaacctacattcttgatggagacaatattagatatggattaaataaagatttaggttttacagataaagatcgaatagaaaatataagaagggtagcagaggttgcaaagcttatgtgtgatgctggtcttatagtcattactgcttttatatcgccattcagattagaaagagaaatggctcgatcactttttgaaaaaagtgatttcaaagaaatttttatttccactcctttaaaagtagctgaaaaaagagaccctaaaggtttgtataaaaaagcaaggcaaggaaaaataccaaactttacaggtatagacagtgtttatgaaaaaccgataaatccagatttagaaattgatacttctaagatttctttaggtgaggcagtaaaaaaaatattgaatattattgtttaa

SEQ ID NO: 248310 - DNA, 1579 bp, Unknown
  Bacterial polypeptide expressing nucleotide sequence isolated from the Sargasso Sea
atggatttagaaaaattttttcaacatcaaaataataagaagcaagttaaaattttaacatgtggatctgtggatgatggcaaatcaactttattaggaagattattgtatgactctcaaaatgtatttatcgatcaaattgatcaaacaaagattgaaagtgaaaaatatggaactcaaggaaaagatatagacttagctctattaattgatggcttacaagcggagcgcgaacaaggaattacaattgatgttgcataccgtttttttgaaacatcaaaatgtaaatttattgttgccgatacgccaggacatgaacaatatacacgtaatatggcaacaggtgcatctaattctgatgttgctattatcttaattgatgcacaaaaaggtgttttagagcaaacaaaaaggcacagttttattgttaatcttttaggtattcaacatgttgtagtggcaattaataaaatggatttagtaaattatgatgaaaatatttttcataaaatcgtcaaagaatataaagagttaataaagaattttcattttatctctacaaattatattcctctatcagctttaaaaggagataatgttttttcaacttttgaaaatactaaatggtatacaggtccttcccttattgaaacgttagaaaatatccaaattgaagaggaagatcttaataattcatttagcatgccagttcagtgggtaaataggtcaagttcagattttagaggatatgctggaaccataagttctgggaaaatatcgaaaggagatgtaatcacaactccttcatcaaattctcaaacttctattaagaatatttatggaccaaatggtgaattggatgaagcttttactaatcaggcagtaacattaacattgcaagatgaattagatatttctcgaggcgatatcattcttacacgagataataagaaaattttaaaagctgatcagtttgcagctcatcttgtttggatggatcaagattcaatgttaccagagcgtaattacatttttcgttttaataatacttttatcaatggacaaattactgatctagtacacagtattaatattaattcttatgaagaaatagcaaccaaaaaattaaatttaaacgatattgcatattgtaaaatagcattaaataaaatgcacaatattgctccttataaaaacaatcatcaattaggcagtttcgttatcattgacccatataataataaaacaattggtgctggcatgattgatcatacgttgcgtcgatccactaatatttcttggcatgaaatgagtatcaataaagagacgcgctccaaattgaatacccaacaaccatgtgtgatttggtttactggattatcaggatcaggtaagtcaacaattgccaatgttctggaacaaaaacttcatacgaaaaacaaaagaacttatcttttagatggtgataatgttcgtcatggcttaaataaagatttaggttttaccgatactgaccgtgttgaaaatattcgccgtgttgctgaagtatcaaaattaatgttagatgctggtttgatac

SEQ ID NO: 248311 - DNA, 625 bp, Unknown
  Bacterial polypeptide expressing nucleotide sequence isolated from the Sargasso Sea
aatgaaagaacaaaatcaaacaaagtcaaccaacataaagtggcataacttaactattgatagagaaaagctagagaaaatgagaggtcataaaggtatggttatctggtttacaggtttatctggttctggcaaaagtactttggccaacgctttaaatgaagttttacacttagatggtttttcgacttatgtgttggatggagataatattagacacggtttatgtaaagatcttggtttttcggatgaagatagagaagaaaatataagaagaattggcgaagttgcgaatttatttatgaatgctgggataataactattacagcattcgtttcgccatttattagcgatagagataaggtgagacaaattattggatctaaggattttattgaggtttattgtgctgctaatatcacagtttgcgaaaatagggatactaaaggcctttacaagaaagctcgtttgggtgaaattaaggaatttacagggatttctagtccatatgaagctcctcttaatcccgaaattgttgttgatacaggttcgttagatttaaatgattccgttgaaaaagttattaactaccttaaaaaagaaaactttcttaacaaggtctaa

SEQ ID NO: 248312 - DNA, 625 bp, Unknown
  Bacterial polypeptide expressing nucleotide sequence isolated from the Sargasso Sea
catgaccgcaaccacccccaaggccaccaacatcgtttggcatgaagcctcggtggatcgtcaggcccgggccagcaagcgcggtcataacagttcgatcctttggtttaccggcctctcgggatcgggcaaaagcaccctggccaatgctgtgaacgccgcactctttgagcgcggcttggccacctacgtgctcgatggcgacaacatccgccacggtctctgcaaagacctggggttctcagatgctgatcgggaggagaacatccgccgcatcggagaggtggcgaagttgttccttgatgcgggagtgatcgttctcaccgccttcgtctcacccttccgcgcagaccgtgacaaggcgcgtgccctggtgcccgatggtgatttcctcgagattcactgcgccgctgatctggaggtctgcgaatcccgcgatcccaagggcctctacgccaaggcgcgcgccggccagatcaaggagttcaccggcatttccagcccctatgaggctcctgaaaagcccgagttgtcactcgataccggggctcagagcctggatcagtgcgttgccgctgtgatcaacctgctggaggagcggggtgttctgaagaatgcagcctga

SEQ ID NO: 248313 - DNA, 646 bp, Unknown
  Bacterial polypeptide expressing nucleotide sequence isolated from the Sargasso Sea
gatgttccggtggcatacagccacaattagtcggaatcaacgtgaacgtagtgcaggccaccggggctgtgtcatttggtttaccggcttatcaggatctggaaaaagcactcttgctaatgaagttgacaagcagttgcatgctcgcggccatcgcagtttcattctcgatggagacaatgtgcgtcatggtctgaatgcatctcccaaccttcttgaaacaattcacggtcagccgttcgcgaagcgatttggccttggctttggagcagaagaccgtaaggagaatattcgtcgggtcggagcggttgcagaactctttactcaggctggaattattacgctcacagcatttattagtccctatcgtagtgatcgtgaagcagtacgaaaaatgttaccagaggcagactttatcgaggtatatgtcaaagcgcccttagacatctgtgagagccgtgatccaaaagggctgtacaaaaaagcccgtgctggtgaaattaagggattcactggtatcgatgacccttatgaagagccagaaagtgcagaaatcacggtcgaatctactgtaaatagtccacaggtgctcgcccagcaagttcttgtttggctcgaacgtgctgaagttattccagtacgttaa

SEQ ID NO: 248314 - DNA, 1594 bp, Unknown
  Bacterial polypeptide expressing nucleotide sequence isolated from the Sargasso Sea
atgtaaatttattgttgctgatacgccgggacatgaacaatatacacgtaatatggcaaccggcgcttctagttctgatgttgctattatcttaattgatgcacaaaaaggggttttggaacaaacaaaaagacatagctttattgttaatcttttaggtattcagcatgttgttgttgcaataaacaaaatggatttaataaaatatgataaaaatatctttaataaaattgtcactgaatataaagaattaataaaaaattttaattttatctctaccaagtatattccactgtcagccctaaaaggagataatgttttttcatcttttgaaaataccaaatggtatacaggtccttctcttattgaaactttagaaaatattaaaattcaagaggtagatcttaataatgcatttagcatgccagttcagtgggttaatagatcaagttctgattttagaggatattctggaaccataagttctggaaaaatatcaaaaggagctttaatcacaactgcattatcgaattctcaaacttctattaagaatatttatggacccaatggtgagttggatgaagcttttaataatcaggcagtaacattaacattacaagatgaattagatatttctcgaggtgatattattcttacacaagataataaggaaattataaaagctgatcagtttgcagctcatcttgtttggatggatcaagattcaatgttaccagagcgtaattacatctttcgttttaataacacttatatcaatggacaaattactgatctagttcacagtattaatattaattcttatgaagaaaaagcaacaaaaaaattaaatttaaacgatatagcatattgtaaaatagcattaaataaaatgcacagtattgctccttataaatacaatcatcaattaggtagtttcgttatcattgatccatataataataaaacaattggtgccggcatgattgaccatgcgttgcgtcgatccactaatatttcttggcatgaaatgagtattaataaagagacgcgctctaaattaaatacccaacaaccgtgtgtgatttggtttacaggattatcaggatcaggtaagtcaacaattgccaatattcttgaacaaaaacttcatacgattaacaaaagaacttatctattagatggtgataatgttcgtcatggtttgaataaagatttaggttttaccgatacagaccgtgttgaaaatattcgacgtgttgctgaggtatcaaaattaatggtagatgctggattgattactctggtttcctttatttctccttttcgatcagaaagaaaaatggcaaaagatttgcttcaggaaggcgaattttttgaagtatttgttagtacccctctagaagaatgtgaaaagagagatccaaaaggattatataaaaaagcaaggtcaggcgaattaaagaattttacaggaattgattctacttatgaaataccagaaaatgcagatctcgtccttgatacgaaaacaaataatgctgaagagttagccgatcaaattatcaattttttagaaagtaaaaaaattatttaa

SEQ ID NO: 248315 - DNA, 607 bp, Unknown
  Bacterial polypeptide expressing nucleotide sequence isolated from the Sargasso Sea
aatggccaaccatgacgagaatgttgtctggcacagccacgttgtcacgcgtgagcaacgggaacaacaccacgggcaccgtggtgttgtgctgtggttcactggcctgtcaggctcgggcaaatccacggttgctggtgcactggaagtggcactgagcaagctcggcgtcagtacctatttgctggatggcgacaatgtgcgccatggcttgtgcagcgacctgggattcagcgatgcagatcgcaaagaaaacatccgcagagtgggggaagttgcccggctgatggtagacgctggcctggttgtgctgacggcatttatctctccgcaccgcagcgaacgggcgatggtgcgcgagcgcctgggggaagggcggtttattgaagtatttgttgataccccgcttgaggtgtgtgaaacccgtgaccccaaagggttgtataaaaaagcccgtgcgggggaactgcgtaatttcaccggaattgatgcggtttatgagccgcctgaaatgccggaaatccaccttgatggtcaacaattggtaacaaatttgacagcccaattattagatctgttgcgcagggaagatattatcaaatcctga

SEQ ID NO: 248316 - DNA, 619 bp, Unknown
  Bacterial polypeptide expressing nucleotide sequence isolated from the Sargasso Sea
atgagcaatattgtgtggcaccaacatagcgtcgaccaagcggccagagccaaacttaagggccaaaatccggtattactctggtttactggactgtctggtgcgggtaagtcgactttagcaggggcgcttgagcgcgcactgtttgaggcgggctttcacacttatttgctcgatggcgacaatgtgcgccatggtttatgtaaggatctgggttttagcgtcgccgatagggatgaaaacttacgccgtgtcggcgaagtggcaaaactcatggtggatgcgggtttagtcgtactatcggcctttatctcgccgacccgcgaggagcgcgatagcatacgtgcacgctttcctgaaggtcaatttatcgaagtgcatgtatcgacgccgcttagcatatgtgagcagcgcgatcctaagggcttgtatgttaaggctcgccgcggtgagatcagcaactttaccggcatttcatccccctacgaggcgccgctctcggcggagttaacgattgataccagtaaaggggatttagcctcgcaagtgcgtgctttaatcgattatttaaccgcgatcggggtcatcaatcccgataaggctaaagcattagcctaag

SEQ ID NO: 248317 - DNA, 1867 bp, Unknown
  Bacterial polypeptide expressing nucleotide sequence isolated from the Sargasso Sea
aatgtataaagccggtacaattagaagatacttaaaaagtcaagcttccctaaatctattaaggtttatcacttgtggatctgttgatgatggtaaaagtacattaattgggaggatgctttatgaatctcaaatgatatttgatgatcaagttgcttccttaaaaaacgactcaaaaaaatatggaacacaaggtgagaatatagattttgcattactggtcgatggtttatcagctgagagagaacaaggtattactatagatgttgcatatcgatttttttcaagtagcaaaagaaagtttattgtagcagatacaccaggtcacgagcaatatactagaaacatggcgactggggcctcaacagctgagttagctatcttacttgttgatgcccgtaatggcatacttacacaaactaagagacattctttcattgtatctcttcttggaattaaaaatattatcttggcagttaataagatggatttagttaactatgataaaaatatttacgaaaaaataagctccgaatacaaattattctcaaaaaaattaaattttaaaaatattcaaagtattcctatatcagcacttaagggggataatattcacaaaaaatctaaatacatgaaatggtacaatgataaaaccctatttgactatttagaaactactaaaactaaaatacaaagctcagacagatttgtacttcctgttcaaagtgtcaatagacctaatttaaatttcagaggatattcaggaaccatcgctgagggaaaaattagaaagggtgatgagttaatttctcttccgtcaaatcaaaaagtaaaagtaaaagatatttttgtaggcgaaagatcacttaaaacagctaatttaaagcaaagtatcacacttaccatagacaaagagatagatacatctaggggcgatatactatgctcaaaaaactccacagttgatatggctgaccagtttaacgttaatgttatttggatgtcagaggataagggttttactggaagaacttatttagcgaaaattcataatatctcaaccagtattaaaattatgaacataaaaaaaatatatgatgtaaatacactagaattcgctgctggaaatgaacttaaactcaatgatgttgcagaaatttctatatcatttaataaaactgttcccttttcaacttttaaagaaaataaaattttgggatctttaataattattgatccaattaataatcaaactattggaatgggaatgataaacttttctcttcgtagatcacaaaatattcaacttcaaaacttaacaatcaataagaatttaagagagaagattaatggtcataaaggtcaagtgctttggatgactggtctctcgggatcaggaaaatcaactatagctaatgaactagaaaaaatattatattctcaaggtaaaaaaacatacattcttgatggagacaatatccgacacggattaaataaagatttaggttttacagacaaagatagagttgaaaatataaggcgagttgcagaggtggcaaaacttatgtgtgacgctggactaattgtgatcactgcttttatatcaccatttagattagagagagaaatggctcgatcactttttgaaaagaatgattttaaagaaatttatatttcaactcctttaaaagtagctgaaaaaagagatcctaaaggtttatataaaaaggcaagacaaggtaaaataccaaacttcacaggcatagacagcatctatgaaagtcctattaatcctgaactggaaattgatacctctaaagtttctttaagtaaggctgtaaaaaaaatattgaatattattacttaa

SEQ ID NO: 248318 - DNA, 118 bp, Unknown
  Bacterial polypeptide expressing nucleotide sequence isolated from the Sargasso Sea
attgaaaaaatttattatttctatcgatcaaggaacaacatcatcaagagtaattttatttgatacaaaaggtaatattgtttttgttttcacatatgagtttaaacaatattttcca

SEQ ID NO: 248319 - DNA, 729 bp, Unknown
  Bacterial polypeptide expressing nucleotide sequence isolated from the Sargasso Sea
tatgactagatctcatccattatcaaaatacagaaacattggtatcatggcccatatcgatgctggtaaaacaacaactactgaaagaattttatattatactggtaaatctcacaaaataggtgaagttcatgatggtgctgcaacaatggattggatggaacaagaacaagaaagaggcataactatcacttctgccgctacaacatgtttttggaaagaccatagaataaatataattgatacaccagggcatgtagatttcactattgaagttgaacgatccctaaaagttctagatggagccgtagctgttttcgatggagttgcaggtgttgagcctcaatctgaaactgtctggagacaagcagataaatataaagttcctagaatgtgtttcgtaaacaagttagatagaacaggcgctaatttttttatgtgtgttgatatgatttcggaccgtttgggatcttatcctttagttactcaattacctattggaattgaaagtaatttaaaaggcgtcgttgatttagtatcaaacaatgctatcgtttggcaagacgaaagtttgggagctaaatttgatgttgtagaaatacctgaggaccttaaagaaaaatctgcggagtatagattaaaattaattgaaaaagctgtagaggaagatgatacaataatggagaattatcttaaaggtaacgaaccaacagttgaagaactaaagtt

SEQ ID NO: 248320 - DNA, 628 bp, Unknown
  Bacterial polypeptide expressing nucleotide sequence isolated from the Sargasso Sea
atggaaatagatgtaacaaaaggaaagacagagccaagagatagaggtaacttaaatcctcctgaatttaattcaattgatgaggaaagaagacatggtctagaaagattagcgagtgcttttcgtatgtttgcacactttggtttcgatgaagggcttgcaggccacataacattaagagatccggaacataaggatcatttttgggtgaatccttttggagtacacttcggacagatgaaagtgtctgatttgttattagtaagtcatgatggggatatagtgataggagataggcccgtaaataatgcagcttttgccatccattccagactccatatgaaccatcctgatctaaatgcagcggcgcactcccattcaatgtatggaaaaactttttcaacaatgggaaggttattagagcctatcactcaagattcttgtgctttttatgataaccatgtcctttttgatgactttacaggagttgttcttgagacaagtgagggagatagaattgcagaagcattgggtgataaaaaggcagctatattaaaaaatcatggacttttaacaactggaaaaactgttgatgaagctgcctggggattcctgtcgatggatcgtt

SEQ ID NO: 248321 - DNA, 827 bp, Unknown
  Bacterial polypeptide expressing nucleotide sequence isolated from the Sargasso Sea
catgggtttttggaaagaccataggataaatataattgatacaccagggcatgtagattttactattgaagttgaacgatctctaaaagttttagatggagctgtagcagtttttgacggagttgctggtgtagagcctcaatctgaaactgtctggaggcaagctgataaatataaagttcccagaatgtgttttgtaaacaagttagatagaacaggtgctaattttttcatgtgtgttgacatgatttcagaacgtctgggatcttatcctttagttactcaattacctatcggaattgaaagtaatttaaaaggtgttgttgatttagtgtctaacaacgcaattgtttggcaagacgaaagcttgggagctaaatttgatgtagttgaaatacctgaggatctcaaagaacaatctgaggagtatagaataaaattaattgaaaaagttgtagaggaagatgactcaataatggagaattatctagaaggcaatgaaccaacaattgaagagctaaagttatgtattagaaaaggaactttaaatggttcatttgttcctgttttaactggctcagcatttaaaaataaaggtgttcaaccacttttagatgcagttattgactatatgccttcacccacagacgttgcaaacgtaaaaggtgttgatgttaatgacgacaccaaagaattaacaagaaaatgtgaagataatgaaccttttagcgcattagcttttaaaataatgactgacccatttgttggaagtttaacatttgccagaatttattcaggttcaataaatactaaagacagtgtcttaa

SEQ ID NO: 248322 - DNA, 490 bp, Unknown
  Bacterial polypeptide expressing nucleotide sequence isolated from the Sargasso Sea
agcgagatcatcaaatgtaaatgatggcatctatatcgttccagcttttattggtatgggtgcaccttattggagaccagatgctagaggtttgattacaggtttaactagggatagtaattggcaaagtttagtaagagcaacagtagagtcagttgcttatcaaagttatgatctttttaacgctatgaataaagacgggttgaaacctagaatagtaaaaattgatggtggtatggttgcaaacaattggttttcacaattcttgtcagacacaataaatttaaaagtaattagaccaaaagtattggaaactactgctttaggtgttgctctctttgctggatatcaagttggtgagtttaaatcgttaaatgaaatcaaaaatatttggcaaaaagacagagctttttcgccaaaaatcaaaaattcattgagaaatcaattattacaaggatggaaactagcaattaaaaaaactttggcatag

SEQ ID NO: 248323 - DNA, 564 bp, Unknown
  Bacterial polypeptide expressing nucleotide sequence isolated from the Sargasso Sea
caatacaatggctaagagataaatatttaatgtttaaagattctaaagatacagacgagttttactcaaatgcaaataaagatgaaaatgtaattgcaataccagcactaactggcttaggcgcacctcattggcaacctcaagttagaggtgctttttttggtttaacaagaaatacatctagaaatgaaatagttaaatcaatattagagagcttaagttttcaaacattggaattagttcattgtatggaaaaagattcaaaaattaaaattaaagaaatgagagtagatggaggtatggcaaaaaataataattttgttcaaagtttgtcaaacattttacaaatgaaaataattaaaccaaataataccgaaactacttctcttggtgtcgcctatttatctggaattcatggtggtttaataaaaaatatagatgaaatctctaaacttttggatagaaaaaaaatatataatccaaaaatcaataaatcaattataaaaaaacaattttttagatggcaagaggctacaaaattattaattaaatttcattcttaag

SEQ ID NO: 248324 - DNA, 199 bp, Unknown
  Bacterial polypeptide expressing nucleotide sequence isolated from the Sargasso Sea
atgaaaaaatttttactaagtattgatcagggaactacaagttctagagtaatactttataataaaaattttaaaatcattgacattgttcaaaaacaattaacacaatattttcctaaaaatggatgggtagaacatgatgctctagaaatatggctagatgttaaatcattaatttataaaattataaaaaaaaata

SEQ ID NO: 248325 - DNA, 483 bp, Unknown
  Bacterial polypeptide expressing nucleotide sequence isolated from the Sargasso Sea
cttttgcaattcattcatctcttcatgatgctaggccagatgtaaatgctgcagcccactctcattctatgtatggcaaaactttttcaactttcggcagacttcttgagccgataactcaagattcctgtgctttttttgataatcatgttctctttgatgattacacaggtgtggttctagaaggagatgaaggtaaaagaattgctgccgcaataggtgataaaaaggctgctattcttaaaaatcatggtctcttaactacaggcgggacggtggatgaagcgctttgggctttcttgtcaatggatagatgctgtcaatctcaaattttggcagaatccgttggacagatggaaagaattcctgatgatgttgctcaattgacaaaatcacaagttggttcggatatggctatgtgggcaagttatcagcctctgtacgacttaatgcttgaaaaagatccaagtttcttaaattaag

SEQ ID NO: 248326 - DNA, 513 bp, Unknown
  Bacterial polypeptide expressing nucleotide sequence isolated from the Sargasso Sea
aagcaccagaaacagaaaaaatagcaagatcatcaaatataaatgatggtatctatgtcgttcctgcttttagcggcatgggtgcaccttattggagaccagatgcaagaggtttaattacaggtttaactagggatagtaattggcaaagtttagtaagagcaacagtagagtcagttgcttatcaaagttatgatctttttaacgctatgaataaagacggtttaaaacctagaatagtaaaaattgatggtggtatggttgcaaacaattggttttcacaattcttgtcagacacaataaatttaaaagtaattagaccaaaagtattggaaactaccgcattaggagttgcgctctttgctggatatcaagttggtgagtttaaatcattaaatcaaattaaaaatatttggcaaaaagataaagctttttcaccaaaaattaaaaattcgttgagaaatcaattattacaaggatggaaactagcaattaaaaaaactttggcgtagc

SEQ ID NO: 248327 - DNA, 908 bp, Unknown
  Bacterial polypeptide expressing nucleotide sequence isolated from the Sargasso Sea
ttcgcgcgagtcgttgaccgatgactgcgagatactagtggtgggcgctggatttgcaggcttattactttggtataaattgaaaaacgccggatttgaagatgtccgtttttgtgagaaaggcggcgacgtaggcggtacctggtactggaaccgatatcctggaatcgcctgcgacgtagagtcctatagttacttcccgttgctcgaggagatgggctactttcctaccatgaagttcgcttccggtttcgagatcatggaatattgccaaaaattggcggagaaatttgggttctatgacaagtgtctatttcatacgacagtagagaggaccgtttgggaagaggaagagcaaagctggcgggtgcatacggatcgaggcgatcagatgaaggctcgctacgtcatccttgctaatggtttgttgactactcccaagttagcacggattgaaggtatggaatccttcaagggcgactcgtttcatacgtcccgttggaattacaacgtagacctaaaagataaaagggtcggcatcatcggtacgggcgcgacggccgttcaggtcgtgcctgagatcgcaaaggtcgtgaaggagctctacgtcttccagaggaccccgtcatccatcgacgttagagatcaacgagagacaacccaagaggagatcgatcagtggaagaccgagccggactgggcaaaggccagacgcgcgagattcgcgaaaatctcctcaggtcggactgccctgaaggcaaacgatgattacctggccggtaaggtggctgattttaaggaaaggaaacagcatacgcgtgaactgtcgactgaagagatgatgacgaagcagctggataccaatttccggatcatggagcaaatccgaaacagggtgacaacatagt

SEQ ID NO: 248328 - DNA, 241 bp, Unknown
  Bacterial polypeptide expressing nucleotide sequence isolated from the Sargasso Sea
atggtagacaacgtgcccgccgtcagagaggggctcgagaagggtagtgcgctcgtgggtacggtggacacgtggctggcatggaagctgactggtggagcggggggtgagggcaccaagcacgtgaccgacgtgaccaacgcctcgcgcacgatgctgatggacctcggcagcggcacctggcacacgccatccatcgaaggtaatttccctcgtgcccgcatgaaagcgtggagctgac

SEQ ID NO: 248329 - DNA, 238 bp, Unknown
  Bacterial polypeptide expressing nucleotide sequence isolated from the Sargasso Sea
aatgtcatttatcttagcaatcgaccaaggcacgacttctacccggtcaattatttttgatgagaagcttaaattaatcagtacagcgcaagaagagtttacccagcattttcctcagagtggttgggtcgagcataatccacaggatttattaagtaccacaatcgatacttgcatatcagcattaaatcaaaagtctattaatccaaacaaaatagcggcgattggtattacttaa

SEQ ID NO: 248330 - DNA, 217 bp, Unknown
  Bacterial polypeptide expressing nucleotide sequence isolated from the Sargasso Sea
tatgaaaaaatatatccttactattgatcaaggtacaactagctcaagggttgttttgtatgataataaattcataatcaaaagtattcagcaaaaagaatttaaacaattttttccaaaagatggttgggtagaacatgatgcagaagaaatttggaatgacgtaaaaaaattaatacaattaacaataaaaaaaaataaacttaaatcaactcag

SEQ ID NO: 248331 - DNA, 199 bp, Unknown
  Bacterial polypeptide expressing nucleotide sequence isolated from the Sargasso Sea
ttgaaatcatatattattgctttagaccaaggaacaacaagttcaagagcagtggctttcgatcaggatggctcattggttggaatttctcaaaaagaatttcaacagcactaccccaagtcaggatgggtagaacatgaccctaaggaaatatgggagtcacaatggaatgttttggaagaattaatcaaccatcatg

SEQ ID NO: 248332 - DNA, 856 bp, Unknown
  Bacterial polypeptide expressing nucleotide sequence isolated from the Sargasso Sea
attacatctgcaggactagctatacaacgttctacatttctgttctgggaaaaagaaacttgtaaaccggttacgccagcaattagttggcaagattgtcgagcaagtagtatttctaacagctttcaatcatatggtaaaaagctttggactatcactggtacaccgttaagtgctcattttggaggcccaaaatttttatacatgatacaaaataataaaaacttagcatctaaaatagaaaaaggagaattatactttggttcattaagtgcttttctcacacatgcaattactgggacagttgctatagatcattctatagcatgcaggactatgctatataatattcaaaaaggttattggtcaaaatatgcattagacctgtttcaagttcctataacttgccttccaccattaacgccaacacaacataattatgggaacatgtttgactctaatattttattatctttggtaatcggtgatcaacaggcggcattgattgggcaggggggattacaaaacaattcagttgctgcaaattttggtacatcagctagcgttcaatacaatgtagataaaaaaccgaaaaatatagaaggattaatatctagcgtactatactcaaagaaatccactaaaacttttatggtagaaggaactataaatgggtgtaattcacttttttattatttagaaaatattttaggtattacccataaaaaaatgcaatggaatcaaagaataaaactcgaagaaacagaaggagttttcataccagggtttaatggccttgctgcaccctatggaaaaatggctttgaagacatacgaattgatcttagtgaaaggcc

SEQ ID NO: 248333 - DNA, 491 bp, Unknown
  Bacterial polypeptide expressing nucleotide sequence isolated from the Sargasso Sea
tgctaaatcaaaaaaaaataatgatggtgtatatatagttccggcatttagtggaatgggagctccctattggagaccagatgcaagaggagcaattacgggtttaactagaaatagtgattggaaaagtttagtaagagctgttatcgagtctgttgcatatcaaagttatgatttatttgatgcaatgaaaaaagatggactaaaacctaaactgattaaagttgatggaggaatggtggctaacaattggttttctcaatttttatcagacataataaatttaaatgttattagaccaaagattttagaaacaacagcattaggagctgcacttttagctggatatcagattggagaatttaaatcattaaatgaaattcaagttaattggaaaaaagacagagttttttctccaaaacttaataaatcattgagaaataatttattgcaaggatggaaacaagcaattagaaaaactttagcataat

SEQ ID NO: 248334 - DNA, 324 bp, Unknown
  Bacterial polypeptide expressing nucleotide sequence isolated from the Sargasso Sea
atgactttacgggagttgttttagaaacaagtgaaggagataggattgcagaagcattaggggataaaaaagcagctatattaaaaaatcatggacttttaacaactggaaaaactgtagatgaagctgcttgggggttcttatcgatggatcgatgttgtcaatctcagctattagcagagaatgttggacagatgcaaagaattcctgatgatgtggcagaagtaactaggggtcaggttggctcaccttttggtatgtgggctagttaccaacctatttatgaccttatggtagagaaagacgatagctttttgaattaag

SEQ ID NO: 248335 - DNA, 340 bp, Unknown
  Bacterial polypeptide expressing nucleotide sequence isolated from the Sargasso Sea
gaggtgcttaggggtatggaggtcgatgctaagttggacgttgaagagctcagagtggatggaggcgcatcgctgaacgactggctaatgcagtttcaggcggatgtagcgagtgttcccgtaaggcgtgccccgatagtcgagacgacggcactcggtgctgcgggcctagccggcctgaaggctggtgtctggtcgactgccggggacttcgttcaggcccaagggaaagccagccactttgaaccgggtcaccatgccgctgacagacaggacgcgatggtggggtgggaccgagcagtgcgtgcaactctggcatgggctcgagaccgaggctgat

SEQ ID NO: 248336 - DNA, 151 bp, Unknown
  Bacterial polypeptide expressing nucleotide sequence isolated from the Sargasso Sea
atgactaaaaatggctatattttatccattgatcagggaacaaccagctcaagagctgcattgatctcaagggagggcaatattattgcacaaaaaaatatagaatttaaacagcattttccaaataatggatgggtcgaacatgaccctc

SEQ ID NO: 248337 - DNA, 169 bp, Unknown
  Bacterial polypeptide expressing nucleotide sequence isolated from the Sargasso Sea
atgaaaaaatacatattgtctatcgatcaaggaacaacaagttcaagagttgttctttatgacaataaatttaaaatttgtagtattttacaaaaggaattaaaacagtattttcctaaagatggctgggttgaacatgatgcattagagatatggaaagcatattaaa

SEQ ID NO: 248338 - DNA, 795 bp, Unknown
  Bacterial polypeptide expressing nucleotide sequence isolated from the Sargasso Sea
tatgtctagaaagcatcctttatccaaatacagaaatataggtattatggctcacattgatgctggaaaaactacaactacagaacgtattttatattacacaggcaaatctcataaaattggagaggtacatgatggtgctgcaacaatggattggatggagcaagaacaagaaagaggtatcacaattacatctgcggctacaacgtgcttttggaatgatcatagaataaatattattgatactccaggccatgtcgattttactattgaagttgagaggtctcttaaagttttagatggtgccgttgctgtgtttgatggggttgcaggtgttgaacctcaatctgagacagtttggagacaagctgataaatataacgttcctagaatgtgttttgtaaataaattagatagaactggagctaattttttcatgtgtgttgatatgattacagaaagactaggttcttatccactagtaactcaattacctattggaattgaaagtaatcttaaaggagttgtcgatcttgtttcaaataatgcgatagtgtggcaggatgaaagccttggagcaaagtttgatattgtagatattcctgatgatttaaaagatcaggcagctgagtatagagaaaaattaattgaaaaagctgttgaagaagatgataaaataatggaaaaatatcttgatggtaatgaaccaacagttgaagaattaaaaagttgtataagaaaaggtacaatatcaggatcatttgttccagttttaactggctctgcttttaaaaa

SEQ ID NO: 248339 - DNA, 149 bp, Unknown
  Bacterial polypeptide expressing nucleotide sequence isolated from the Sargasso Sea
tgctcttgaaggatctattttcatagcaggagcaggcgtacaatggttaagggataaaattaaattaataaacaatgcgtatgaaactgaaaaaatagctaaatcaacaaaaagcaataatgaagtttatgttgtcccagcttttagtg

SEQ ID NO: 248340 - DNA, 412 bp, Unknown
  Bacterial polypeptide expressing nucleotide sequence isolated from the Sargasso Sea
tttgctttgggacgatagagacatatttaattttggaatcttacttgaggaaaaaaatcataaaacagatgcaacaaatgcctctagaacaatgttaatgaacctaaaaacaacacagtgggatgagtctcttctcaagatttttaatataccaaaaataatccttcctgaaatatgtccatgtgatgatacatttggctcaattaaagctcatggcatgaaattcccaattacaggagtaataggggatcaacaatcagctctttttggacaaaactgttttgagtttggcgaaatgaaaagtacttatggaacaggttgttttttgatggttaatacaaaagaacaaatccataaatctgaagcgagattgctatcaactgttggatgcatgcttggaaataaaactacc

SEQ ID NO: 248341 - DNA, 370 bp, Unknown
  Bacterial polypeptide expressing nucleotide sequence isolated from the Sargasso Sea
cataacccaagattcctgtgcattttttgatgaccacgtcctatttgatgattttactggtgtagttctagaaactgatgaaggagatagaattgctaatgccttaggagataaaagagctgcaattctaaagaaccatggcttgttaacaactggcgagactgtggatgcagctgtttggggatttctatccatggatagatgttgtcagtctcaaatgattgcagaatcagtaggacaaatggaaagaattcctgatgagaccgcagcaatgactaaagaacaagttggatcagagctaggcatgtgggtcatgtaccaacccatatacgatttaatgctagagaaagacgatagctttttaaattaa

SEQ ID NO: 248342 - DNA, 469 bp, Unknown
  Bacterial polypeptide expressing nucleotide sequence isolated from the Sargasso Sea
ttttatacctgctttaacaggtcttggtgcaccgcattggcaacccaatgcaagaggggctatatttggtctaactagaaatacatcaattccagatattataaaagctgcattagatagtatatcttttcaaacatttgatcttattgaatgcatcaaaaaagatgcaaaaataaaagtaaaagaaattagagttgatggtggtatgattaataatccaaattttcttcaaaatttagctaatgtaactcaagtaaatataattaaacctaataatttagaaactacttctttaggagtggcctatttggcaggtcttaacgcggggttaattaataatacggctcaaatacaaaaactttggaaagtaagtaagatattgcaacctaaaattcaaaaaaatataattagaaaaaagattcaggattggaaaaaatcggtaaaaatattaattaaatttcattcttaa

SEQ ID NO: 248343 - DNA, 878 bp, Unknown
  Bacterial polypeptide expressing nucleotide sequence isolated from the Sargasso Sea
gttttttggaatgatcatagggtaaatattattgatacaccagggcatgttgactttacaatcgaagttgaaagatctcttaaggttcttgatggagcagttgctgtatttgacggtgttgctggagttgagccgcaatcagaaactgtatggcgtcaagctgataaatataatgttcctagaatgtgttttataaacaaattagataggactggagcaaatttcttcatgtgtgtagatatgatacctgaaagattagggtcttatcctcttgtattacaactaccgattggtattgaaagtgatttaaagggtgttgttgatttagtttcaaataatgctatcgtttggcaagatgaaagtcttggtgctaaatttgatattgttgaaattcctgatgatttaaaagaacaagcaaaagaatatagagaaaaattaatagaaaaagttgttgaagaagatgatacaattatggagtcatatttagatggtaaagagccttcaattgatgatttaaaaaaatgtattagacaaggcacaatcaagggatcatttgtacctgtattaacaggttcagcatttaaaaataaaggagttcagccattacttgatgctgtaatagattatatgccatcacctattgatgttgcaagtgttcgtggagtagatgtagaagatgattcaaaagaactttctagaaagtgtgatgacggtgaaccttttagtgctctagcatttaaaattatgacagacccttttgtaggtagtttaacatttacaagaatttattctggaacaattaatacaaaagatactgttttaaattctaactctggaaaaaaagaaaatattggtagaatgcttttaatgcatgcaaa

SEQ ID NO: 248344 - DNA, 744 bp, Unknown
  Bacterial polypeptide expressing nucleotide sequence isolated from the Sargasso Sea
cagccaccgcccgttcgactcaccttcccccctcctctcgcgcctccttcccgcgaaaggcctccgcacgtccctaagtcgtacgttccgagccccgcgaaattccgcggggtcacgacgaacatggagacgtaccccgcgcacccgccgtcgccgacgccgctgacgacggcgaagccgtatcgtaaatccgacgtgcccttcgacgatcgcacgacgacgaaggaacacttcccggcgcaccagccgacgtccccggggccgctccccgtgaagcagtaccagccgtcgccggcgaagttcagctcggcgacgacgaacaaggaacacttccccgcgcacccgccgtcgccgacgccgctgacgacggcgaagccgtatcgtaaatccgacgtgcccttcgacgatcgcacgacgacgaaggaacacttcccggcgcaccagccgacgtccccggggccgctccccgtgaagcagtaccagccgtccccggcgaagttcagctcggcgacgacgaacaaggagacgtacccggcgcacgagccgccggcgaagatgcccccgatcgggctgtgggtggagaacgacagggtggagattttactgcactcgggcgcggagctcccggcgcgatgctcgcgcatgttcagcacgacgagccgcgaccagaccgccgtcgccgtgcgtttcgtccaggggtggtcgcggcgagcgagccagtgcgcgttactcggcgtcttcgag

SEQ ID NO: 248345 - DNA, 169 bp, Unknown
  Bacterial polypeptide expressing nucleotide sequence isolated from the Sargasso Sea
tatgaaatatatagtagcattagatcaaggtacaacaagctctagagcaatactaatcaatgaaaaaggagagttagttggtatcgaacaaaaggaatttaaacaaatctttccaaaacctggatgggttgaaaacatatccatggaaatttttagttctcaaatttaa

SEQ ID NO: 248346 - DNA, 231 bp, Unknown
  Bacterial polypeptide expressing nucleotide sequence isolated from the Sargasso Sea
aacaaaaataaaatggatattagacaatgttgaaggggctaagaagaaagctaaagaaggaaaactatgttttggaacagttgatgcatatctcatgtatgtcttatcaaataaaaaaattcataaaacggatataacaaatgcttctagaaccatgttatttaatataaatactttgtcctgggataattatctcttagatctatttgatattcctgaatcaatgttgcc

SEQ ID NO: 248347 - DNA, 127 bp, Unknown
  Bacterial polypeptide expressing nucleotide sequence isolated from the Sargasso Sea
atgtctttagatgggtatttactctcaatagatcaaggcacaaccagttcacgggccttaattttagatattaaaggaaatattattagtcaaaaaaactttgaatttaaacagtatttcccaaacg

SEQ ID NO: 248348 - DNA, 435 bp, Unknown
  Bacterial polypeptide expressing nucleotide sequence isolated from the Sargasso Sea
taggggctccatactggagaccagatgtcagaggattaattactggaattaccaggaatagtgattggaaaacaattgtaagagctgttctagagtctgttgcatatcaaagttttgatttatttgagtcaatgaaaagtgatggattaagaccaaaaagtattcaagtagatggcggaatgattgcaaataattggttttcacaatttttatcaaacataataaatatgagagtagtaaggccaaaagttttggaaactactgcattaggagcagcaatgttggcaggatatcagtgtggggaaatcaaatcattaaatgaaattaaagttaaattgaaaaaaaataatgttttttctccaaaactaagtaaatctttgagaaataaattattgcaaggatggagacaagcaattagaaaaactttaacataat

SEQ ID NO: 248349 - DNA, 214 bp, Unknown
  Bacterial polypeptide expressing nucleotide sequence isolated from the Sargasso Sea
atgaccaagaaaatcatctctattgaccaaggaactaccagctcaagagcagtcctttttgacgaaaacggtgaattattagattttaaacaaaaggagtttaagcaaaacttcccaaaagacgggtgggtagagcatgaccctgaagaaatttggagttctgtggtggaggttactgaagagttaataaaaggtcacagacttagtgcgagag

SEQ ID NO: 248350 - DNA, 845 bp, Unknown
  Bacterial polypeptide expressing nucleotide sequence isolated from the Sargasso Sea
attactttggtataaattgaaaaacgcgggattcgaagatgtccgtttttgtgagaagggcggcgatgtgggcggtacctggtactggaaccgctatcctgggatcgcctgcgacgtagagtcttatagttacctcccgctgctcgaggagatgggctactttcctaccatgaagttcgcttccggtttcgagatcatggaatattgtcaaaaattggcggagaaatttgggttttatgacaagtgtctctttcatacgacagtagagaggaccatctgggaagaggaggagcaaagctggcgggtacacacggatcggggggaccagatgaaggctcgctacgttatccttgctaatggtttgttgaccactcccaagttagcgcggattgaaggcatggaatccttcaagggcgattcgtttcatacatcccgttggaattataacgtagacctaaaagataaaagggtcggcatcatcgggacgggcgcgacggccgtccaggtcgtgcctgagatcgcaaaggtcgtgaaggagctctacgtcttccagaggaccccgtcatcgattgacgttagagatcaacgagagacaacccaagaggagatcgatcagtggaagaccgagccgggctgggcaaaggcaaggcgcgccagattcgcgaaaatctcctcaggccggactgccttaaaggcaaacgatgattacctggccggtaaggtcgctgattttaaggaaaggaaacagcacacacgtgagctgtcggctgaagagatgatgacgaagcagctggataccaatttccggatcatggagcaaatccgaaacagagtgacaacatagt

SEQ ID NO: 248351 - DNA, 235 bp, Unknown
  Bacterial polypeptide expressing nucleotide sequence isolated from the Sargasso Sea
aaaaaaaaatggtcaaaaaaattattaaaattatttaatataccatcaactattttacctgcggttgttgaaaattcttataactttgaacacacaaatttgtttggcaaatcaatattaattggggggatggcgggtgatcaacaagctgctacaatcggtcaagcatgttttaataaaggtcaatcaaaaagcacatatggtactggatgttttttgcttataaatataggga

SEQ ID NO: 248352 - DNA, 211 bp, Unknown
  Bacterial polypeptide expressing nucleotide sequence isolated from the Sargasso Sea
tatgtcattaagtggttatattctctcaatagatcaagggacaactagttcaagagctttaattttaaatgaattgggccaaatacttgctcaaaaaaatattgaatttaagcaatattatcctaaaaacggatgggtagagcatgatccagttgaaatattacaaacaacaacagacgcaattaagcaagttttagcagagcttaaataa

SEQ ID NO: 248353 - DNA, 610 bp, Unknown
  Bacterial polypeptide expressing nucleotide sequence isolated from the Sargasso Sea
aatggttgtacagaacttttataatcaaaatgaattagatttaatatggaaagaattagatttttacactgaaccaaataaactcttcgatgcaaaagaatatggtggtgttgtagatcggacaaatgcgaaagctatactcttagatgacctttatagaggtgataacaaaaaaaattttagaaatatatcaaatatattaacagttaatcgaaaattatttaattgtggtgtattagataaattttctgaactacatggatgttgtagtatagcacctaagtgtaatcatgatgttactaaagtaagatattatcacaataatgaatattatgatcctcatactgatcgatcagttcagtttttagcattttcttatttttataaagaacccaaaaaatttattggcggtgacttaatattcccgaagtatgattttaaattaccttgtgaaaataattctatggttatttttcctggttgggtggagcatggtgttagaaaagtaaccattgaagactcagattattttgatggttggggtagatattgtatttctagtttctttagttgtagggataaatctttttttgaaaataatgatgactaa

SEQ ID NO: 248354 - DNA, 451 bp, Unknown
  Bacterial polypeptide expressing nucleotide sequence isolated from the Sargasso Sea
aaagttgttggagttaatactctgggtgaaactcaaggacaaaatattaattttgctgttgcagttaatcaagtaaagcaatttattaaagaaaatccttatgttgcaaaagtaaatccgcttaatgcagccatgaaaaaagaatttcctaaagctataactcaggattacaataataacggaactatagatacttggtacattgatactaataataatggtagtgttgatcttgcatttcttgatgataatgaagatggaaaagtagaagctgtattaatcgatgagaatgaaaatggaaaatgggaagcaaccagagttgatgaaaatcaggatggtactatagattatgttttgttagatgaagatgaagatggtaaaaatgatttaattgctactgatgtcgataacgacggtaagtttgataaagtagagcctataaaaagctaac

SEQ ID NO: 248355 - DNA, 536 bp, Unknown
  Bacterial polypeptide expressing nucleotide sequence isolated from the Sargasso Sea
tatgaagctgattgcctcggccagcgagaccgaggccatcgccgccgcacaggccggcaacaatggtgtctatatggtgccggccctgaccggccttggtgcgccgcactgggccccgaacgcgcgcggtgcgatttatggcatcacccgcgacaccggcccggcagactttgtaagggcagcgctggaatcggtagcctaccagacgaacgacctgttcaccgccatcgccggtgacggcattcctgtttccgtgctgcgggttgatggagggatgacggcaaatgactggctgatgcagttccttgccgatattatcaatcttcaggtggaccgtcctgtggtgagggaaaccactgcgctaggcgcggcgatgctggcgctgatgcagagtgatccatctataaccctagatgacttagcgagccgccggcagcacgatgccagcttcacgcccacaatggatgccggagaccggaacagtcttatagccgggtggaatcaggcgatgaagcggacgctgaccgaagggtaat

SEQ ID NO: 248356 - DNA, 754 bp, Unknown
  Bacterial polypeptide expressing nucleotide sequence isolated from the Sargasso Sea
atgaaattgataacaaaaattacaatgattttatttctctttaccagtttaagcgcttgtaacgccattactaggctctctgagttagattctggcccaaaggtaacaccaatatctaatccagttggcaggcctaagtatcggccagttagcatgccgatgccaagtccaaaaaatgttctccacaaagccaactcattgtggagacccggcgcaagaaaattctttagagatcaaagagctggtcaggttggagatatactgacagtgaaactttcactcgaagatagtgctgctctaaaaaacaagaccaccggtgcaagagacgacacagaggatggtgacgtgactaatcttcttggtttagagggcgaatttactgaattcttaccacaaggacttaatgcggcaacagcattaagcttaggaacaaagaaatcgacctcaggtgacggtgcaattgatagatcagaaaaactagcaataacactagcagctgtaatcactcaagtattaccaaacggaaattttgtaatttttgctagacaggagcttaaggtcaattttgaaatgagagaagtgatggttacagggataattagacccgaggatataacctccgcaaatgaaatatggcatactaaaatagcggaaatgagagttgcctatggtggaagaggaacactatcagacctacaacaaccgcgttatggccatcagcttgttgacataatttcccgttctaattccaatt

SEQ ID NO: 248357 - DNA, 769 bp, Unknown
  Bacterial polypeptide expressing nucleotide sequence isolated from the Sargasso Sea
attggatcaaaaagaaaaaggttccttacttccaatagaatgtaaatccattgaggaaacaaggagatataacctagaaagattggcctcaggatttagaatgtttgctcattttggttttgatgaaggaatagctggtcacattacatatagagatcctgaacacgaagatcatttttgggtaaatccttttggaatgcatttcaatcaaatttgtgtctctgatttaatactagtaaacaaggacggtgaagtagtactaggagataagccagtaaatacggctgcatttgcaattcattcatctcttcatgatgcaagaccagatgtaaatgctgcagctcactcgcattctatgtatggcaaaactttttcaactttcggcagacttcttgagccgataactcaagattcctgtgctttttttgataatcatgttctatttgatgattacacaggcgtggttctagaaggagatgaaggtaaaagaattgctgccgcattaggcgataaaaaggctgctattcttaaaaatcatggtctcttaactacaggcgggaccgtggatgaagcgctttgggctttcttatcaatggatagatgctgtcaatctcaaattttggcagaatccgttggacaaatggaaagaattccagatgatgtagctcaattgacaaaatcacaagttggttcggatatggctatgtgggcaagttatcagcctctgtacgacttaatgcttgagaaagatccaagcttcttaaattag

SEQ ID NO: 248358 - DNA, 3250 bp, Unknown
  Bacterial polypeptide expressing nucleotide sequence isolated from the Sargasso Sea
atgcacaaaagtcctggggttgttttcacccatgacaagggaaaaagtcattctagcggaaagcttctttattctgcaagggtgatcccgcaacgaggatcttggcttgattttgaatttgacgcaaaggatgtactttttgtccgtatcgaccgccgcagaaaatttcatgcaacaattctacttagagctttgggttatactgaagaccagcttctaaaatatttttataagtttgaaaaattagatttaagtgatgttaatcctggattggatccagatactcaatcatattacataatgatggacgaggaaattattctggaccagcgacttcagcttcctattactgatccaaaaacaggtgaaattttggtaaattctggacagcgaataaataagcgacttttgaaaaaactccagaaatcaaaggttaaacgttttaatttgacgcttaatgaattgaaaggtcgcattgttgcccaaactatctataaagatggaagtaaggatgaattaattccttgtaacactcctttaactgcagagctgcttactacaatcgctgaaaacggcatcactgaagttgatctactgcacataggccctcaaaatattgcttcacctctacgtgatacgttagcactggacaaattaagttcaccggaacaatcactaattgagctatataaaaagatgaagcctggtgatcccccaactttggaagccgcacatttgatgcttcagaatttcttcttcaaaagagagcgttacagtctttcaaaagttgggaggttaaaattaaatgaaaaactatcccttgatgatcctctggataacacagtacttactgaagaagatattttaaagaccgttaaatatctacttgagctgaaaaggggacagccaaataggatgatagatgatattgaccacctaggaaacagaagagtaaggagcgtaggagaactacttgagacacagttccgtatcgggctggtaagaatggagcgcaccattaaggaacgtatgtctttacaggattctgaaaccatgatgctacacgatatagttaacgcaaaaccagttgccggtgcgattcatgaatttttcgggagtagtcaactttctcaatttatggatcagaccaatccactttctgaaattactcataaacgccgcttgagtgcccttggacccggaggtttaactagggaacgtgctggttttgatgtgcgcgatgtacattcatctcactatggcagaatttgtcctattgaaacaccagaaggtccaaatatcggattgattgcctcgcttgcaacattcggaagggtaaatgaatttgggtttattgaaacaccatacttgaaagtagaaagtagtagagtatccaaaaatgttgaataccttacagcgattgaggaagaaaagtttagtattgcccaggcaaacgccgtactcgataagaaaaagtcttttgtaaatgacttcgtcacttccagagttgggagtgaattcagtacggttttaaaggagaatattgattacatagatatttctccacggcagttagtttctgttgcggctgctatgattcccttccttgaacatgatgatgcaaaccgtgcacttatgggatcaaacatgcaacgacaaggtgtacccctggtaaaacctaaagcaccgctagtgggtaccggaatggaacaccaagtagccatggactcgggaagttgtgttgttgccactcgttcaggcgttgtggataatgttgatgcaggcagagtagttatacaggcggatgtcgatctttccagtgaagactcaatcgtaccggctaacgttgacatataccatttgattaagtatagaagatcaaatcaaaacacatgcataaatcaacgcccattagtaaaaattggtgaccgaattgaagctggtgatgttattgctgacggttcatgcacagagaacggggaacttgcactcggtcaaaacatcaacattgcattcatgccttggcgtggatacaactttgaggattcaataatggtttcgcagcgccttcttcatgaagacagttttacatctgtacatatagatgttcttgacactgttgctcgagatacaaaattaggtaaagaagagatcacaagggatattccaaatgtaagtgaagatgccctcaaaaatcttgatgatagcggaattattgccgttggtacaagcgtcaaatcaaatgatatcttggtgggtaaagtaaccccaaaaggagaatctcaactcaatcctgaagagaaacttcttcgtgcaatttttggtgagaaagccggggacgtcagagatacctcattgcgagttcctcaaggagttgatggagtagttacagatgtagttgtttttaatcgtgaaggggttgaacgtgacgaacgtaccaaacagatagagcaggaactgctagcacgctatgaaaaagatcactacgatgaaatgcgcattgtgcacagtaatcttgtaaatcgtattatttctgttgctgacaaaaagcccctcgttgcagacgtactttcccttcagggcgaattacttgcatcaaaaggcacaaaaataagtcatgaggtacttcatgaaatccctttgaaatcaactgatggaattcagattaaagacaaaaatattaacttaaaaataggaacttttgtacgtaatgctctccagcaaatgtacttactggaaaatgtttatcaagatcgttgcgaaaaagtttctaagggtgatgacctcccaccaggtgtaatccgcatgattaaagtctatattgcaattaagcgaaaactttctgttggagacaaaatggcaggtaggcatggcaacaaaggagttgtttctactgttcagccaattgaaaatatgccgtatatggaggatgggaatcctgttgatatagtacttaatccacttggtgtcccttcacgcatgaatgtcggacaagtccttgagactcaccttggtcgagtcgctaagggcttaggggaaaaagttcaggagttccttgatcagaataatcctgctgaccaaattagaagttttttgaaaaaggtatatgattgtcctatcgctcaaaaacattttgaatctatggatgataacacctttttggagtttgtaaaaaaatacaagccaggcattcatatgtctacaccagtatttgatggagcgaaagagtcggatattcaaaaaatggcag

SEQ ID NO: 248359 - DNA, 611 bp, Unknown
  Bacterial polypeptide expressing nucleotide sequence isolated from the Sargasso Sea
attgtcaagagacctattagcaaagaaaagaaattttcattgggatagcattttcaagattacagctacttgtgcaggtgcgtttgttttactaatcattgtattaatttttggtcaattgttatcagattcttggttaatctgggaaaaagaaggattggcatttgtaacaggagatagatggaatcctgtagaaggccgtgaatcctttggtgcattaccatacatagcaggaacgttagtgacatcattaattgcattatgtattgcagttccactaagtattggaattgcaatgtttctttcagaaattgcacctacaagaattcgagagccaatttcttttgtagtagaattgttagccgcagttccaagtatcatctatggattatggggtttgtttacatttagaatagttttcaaagattggtttgaaagtcctacacatgaagcgctaggcgaacatatctttttgttcagagatgcaccatttggactggacattctaactgcaagtgttgttttagcaataatgattattcctacaatttctgcagtatcacgtgaaattttactggcagttcctgcaattcaaagagaagcagcataca

SEQ ID NO: 248360 - DNA, 571 bp, Unknown
  Bacterial polypeptide expressing nucleotide sequence isolated from the Sargasso Sea
attgtcaagagatctattagcaaagaaaagaaattttcattgggatagcattttcaagattgcagctacttgtgcaggtgcgtttgttttactaatcattgtattaatttttggtcaattgttatcagattcttggttaatctgggaaaaagaaggattggcatttgtaacaggagatagatggaatcctgtagaaggccgtgaatcctttggcgcattaccatacatagcaggaacgttagtgacatcattaattgcattatgcattgcagtgcctctcagtattggaattgcaatgtttctttcagaaattgcacctacaagaattcgagagccaatttcttttgtagtagaattgttagccgcagttccaagtatcatctatggattatggggtttgtttacattcagaatagttttcaaggattggtttgaaagtcccacacatgaagcgctaggggaacatatctttttgttcagagatgcaccatttggactggacattctaactgcaagtgttgttttagcaataatgattattcctacaatttctgcagtatcacgtgaaatt

SEQ ID NO: 248361 - DNA, 1411 bp, Unknown
  Bacterial polypeptide expressing nucleotide sequence isolated from the Sargasso Sea
tatgaattatattgtcattgaccagggaacatcttctactaaagcatttttatttaacgctagcggtcaaattctacatcaaaataggataaaatgttcgttagaaaagcccattccatttcacgttcaaattgaccccttaattattttagaggatataaaaaaactttttatagagatggttcatgtttctgggaattcaactattacatgtgcaggcctggctatacaacgttccacttttctattctgggaaaaagaaacttgtaaaccagtcactccagccattagttggcaagattgtcgagcaagcagtatttctaacagctttcaatcatacagtaaaaagctttggactatcactggcacacccttaagtgcccattttggaggcccaaaatttttatacatgacacaaaataataagaacttagcatctaaaatagaacaaggagaattatactttggttcattaagcgcttttctcacacatgcaattactgggacagctgctatagatcattctatagcatgcaggactatgttatataatattcaaaaaggttattggtcaaaatatgcattagacctgtttcaagttcccataacatgccttccaccattaacgccgacacaacataattatgggaacatgtttgattctaatattttattatcgttggtaatcggcgaccaacaagcggcattgattgggcagggtggattacaaaacaagtcagttgctgcaaattttggtacatcagctagcgttcaatacaatgtaggtaaaaatgcgaaaaaaatagaaggattaatatctagcgtactatactcaaacaaatccactaaaacttttatggtagaaggaactataaatggttgtaattcactattttattatttagaaaatcttttaggtattacccataaaaaaatgcaatggaatcaaagaataaaacttgagaaaactgagggagttttcataccaggatttaatggccttgctgcaccctattggaaaaatggctttgaagacatacgaattgatcttagtgaaaggccaaatgaaatcattagagcggcaatggaatcaattgggtttttagttaatgatattcttaattgtataataaaagcaggtttagatttacctgaaaccttgactgccagcgggggtggtgcaaagagcagtcttttacagtttactgcaaatattacaggtaaaacaattagtcattcattggttaaagataaaacggcctttggaatatataggatattaagtagtaataatcttgatcagatatcaaaagaagcaaccggtgatatattttatcctgaaaaaattcctactttgaagggtaaaactgataaatggaaacagggtattaaaatattggaaagattataa

SEQ ID NO: 248362 - DNA, 391 bp, Unknown
  Bacterial polypeptide expressing nucleotide sequence isolated from the Sargasso Sea
ttggccagacttcttgagccaataacgcaagattcttgtgcttttttgataaatcatgttctctttgatgattacacaggtgtggttttagaaggagatgaaggtaagagaattgcttcagctttgggcgacaaaaaggctgctattctcaaaaatcatggtcttttaactacaggtgggacggttgatgaagcactttgggctttcttgtcaatggatagatgctgtcaatctcaaattttggcggagtccgttggacaaatggaaagaattcctgatgatgtagctcaattgacaaaatcacaggttggttcagatatggcaatgtgggcgagttaccagcctctgtatgacttaatgcttgagaaagatcctagcttcttaaattaga

SEQ ID NO: 248363 - DNA, 421 bp, Unknown
  Bacterial polypeptide expressing nucleotide sequence isolated from the Sargasso Sea
gaaacagcaagaggttcactatttggtttaactagattttcgaataaatcacatatagcaagatctgttcttgaatctgtagccttccaaacatttgagctgcttaaaagtatggaaaaagatttagatattgagtttgaaaatataaaagtagatgggggcatggtagaaaataatttacttatgcaatttcaatctgatattttaaataagtctgttatgtcacaaaatattaatgaaataacttccttaggagttggagttgcaagttatatttatattaaaaaattacctattgaagaaatgggtaaatatttttctacagaaaaaacttggagcccaaatatgaataatgattcaagaattaagacacttagtttatggtataaagctattgagagatctaaaaattggttataag

SEQ ID NO: 248364 - DNA, 360 bp, Unknown
  Bacterial polypeptide expressing nucleotide sequence isolated from the Sargasso Sea
taatggttagagtacatgtgactgattattttgataatctatttggtgagtatggcagcgatgatgcctcattaaataagagcgtagaggttatacaagagaatgaaaggggaatactagttttaataagagatagtggtaaatccattataaacagacttattaccaactcatcttccggtgacaataaatctgagaatgaaaaagatgaactaagaatttatggtatgggcgcacagattctatctgagttaggcgtaaaaaaaatgatacttctaacaaataccgaatggaaatttattggcttggaggcttacggcattgatataatcgagacaaaactactaggtgaattataaa

SEQ ID NO: 248365 - DNA, 700 bp, Unknown
  Bacterial polypeptide expressing nucleotide sequence isolated from the Sargasso Sea
gacgggttgttttataatgactaacacagggtccgaaaaatctctgcctaaagatggtctattaaccactatagcctataggataaatgggcaaacatcctatgcttcagaaggtagtatttttgttgctgggcaagctgttaagtggttaagagaccagttgggtattattcagaatgtaaaagacatagagaaggcttttgttacgacaaaaggggatacgggcggcgtgagtgtcttgccggcttttactggtttgggagcgccccactgggatccagaggctcgtggactaatttccggtttaactcttgataccaccgtcgagcaaatcgtggttgcgaccctccaaagtatcgccttccagatcgctgacctggtaagccttatgctaaaaggtggcccgatagatcaactgcgagtcgacggggggatggccgtgaatgatccattttgccagtttttggcggacatcttaggtcaaaatgttgaccgaccaatcgatacggaaacaactgcaaggggggccgccttattggctggcctcggctcaggtgtttggatggacttaaatgaaataagggccacatggcagacggaaagagtatttgctcctgacatggaacagagtttaagagattcgctagtcaaggaatttgctctctcagtggaaagagctaaattacgcctaaataactga

SEQ ID NO: 248366 - DNA, 997 bp, Unknown
  Bacterial polypeptide expressing nucleotide sequence isolated from the Sargasso Sea
tctgattggaaggagtgatgcatttggacagtctcgtcaggccactggtattggtgcactcatacccatcagtaatgcatcacgtcctcttgttggaggaccaaatgctgcaccgagtggccacgatgacatcacaggccttccacttccgggttctgaattatcagtgtctcaagatgtgactgatgcagacggcatatttgatgtcaggtaccaatggcttcgagatggcgttcccattccgtcagcgacatcaacaacatatagcctgtctccttcggatacaggtaagaaccttgtagtggaagtgtcgtatctcgatggcagaggaaaacgtgaacgtatgacctcggctgccacggaagctctcggtgttcttgagaacgatgggacggctggactggcctttaactcaaccagccagttgtacttgatacgaggatcggcggatgttctgccgcttcaaagggatgtcggcacgcctctccaatcgagtgggctctatggtttttcgattactgctgctgtcgaatcatcttctcaccacaaacttcacttgagacgtttcgacagagagtatcttcttcggattaacgaaggtggcgtactcggctctctgtttcacagtttagaaaatctacacacaataccgcttgatatctcggcccgagaatcttctcacacgttgaacgttgctgcacgagctggtgcctacgagattaatggtgtgcataatccaacgctttttgttcgtcgtggtcagacgtatctgttcaatctgaacgcggcagatcatccattttatcttcagacaactggcgatggctatcggccatcaaacgtatacgccggtggatttactggcaatggccagacaactggtgcgtatcaatgggttgtgtcacaagatgcaccagacgagatcttttatcagtgtgagttccatccagtgatgtttggcaagatcatcatcgtggactcgaccaatactgactga

SEQ ID NO: 248367 - DNA, 703 bp, Unknown
  Bacterial polypeptide expressing nucleotide sequence isolated from the Sargasso Sea
catgaaatctacatatggaacgggttgcttcttaatggtaaatacagaagaaaagccattaaatattgatgaaggattgcttacaacggtggcatatcaattagacaataaagttcattatgctattgaaggtagcatttattcatcaggaaccataattaaatggctccgagataaaatgaaattttttgaaagcgcagaagatagcgagaaatatcttaataagaatggaaatagcaataatgttcttttcttaccagcttttaatggtttaggcgctcctcattggaattcagatatcagagggggtttttatggacttactcaggattcctcaatcgaagatatggtaactgctgcatttcattcaatttcttttcaaactaaagaaattacttccattttggaagagtatgacattcaaataactaatctctcagtagatggcggcatggtgaaaaataactcattttgtcaactacttgcagatactcttaataaaaaaatcattcaaccaaaaaatgttgaatcaactgctattggcgcgtgtaaagtttgcatgctcgcttctggattaagtattaataattcaaaaaaagatgacatgaatgtttttacaccaaatactgaattaacaaagacttatgatagggcctttaatgattggaaatcatatgttgaaaaatcgctaatgactagctga

SEQ ID NO: 248368 - DNA, 796 bp, Unknown
  Bacterial polypeptide expressing nucleotide sequence isolated from the Sargasso Sea
atggaaatagatgtaacaaaaggaaaaacggagccaagaaatagaggtaacttaaaccctcctgaatttaattcaattgatgaggaaaggcgccatggcctggaaaggttagcgagtgcttttcgtatgtttgctcactttggtttcgatgaaggacttgctggccacataacattaagagatccggaacataaggatcatttctgggtgaatccttttggagtgcacttcgggcaaatgaaagtatctgatttattgctagtaagtcatgatggagatattgtaattggggataggcctgtcaacaatgcagcttttgctatccattccagacttcatatgaaccatcctgatcttaatgcagcagcacattctcattcaatgtatggaaaaactttttcatcgatgggtaggttattagaaccaataacgcaagattcttgtgctttttatgacaatcatgtcctttttgatgactttacaggagttgttcttgagacaagtgagggagatagaattgcagaagcattggggaataaaaaagcagctatattaaaaaatcatggactattaacaactggaaaaactgttgatgaagctgcctggggattcctttcaatggatcgatgctgccaatctcagctgctagcagagaatgttggacagatgcaaagaattcctgatgacgtggcagaagtaactagaggtcaggtgggctcaccttttggaatgtgggcaagctaccaacccatatatgaccttatggtagagaaagacgatagctttttgaattaag

SEQ ID NO: 248369 - DNA, 844 bp, Unknown
  Bacterial polypeptide expressing nucleotide sequence isolated from the Sargasso Sea
gttgaaacaaaaggttttttggagagttataccgccaaaattcactccaatatccgactcagtttttaaaaaaattgaatgcgaagatgttgatttaataatttcatgtggaagaaaaagtattattccatcattatttttaaaaaaaaattcaaagaaaaaagtatttaacattcatattcaaaacccaaagataaaacttgataattttgatctagttgtagtgccagagcacgataatcttgatggagataatgtattaaaaacaaaaggagctattcattatttaacaagtgaagaaattgaaaaagacaaagaatatttgtttagtatttcaagcaaattgagggataaaaatataatttctttaataattggtggtcctacccagtattatgattattcagatagaaatatccaagaaattttttcaaaagtaaattatttagttaaagaaaataatcttaatttagtagtcatcccctctatgagaacgccaaagggaactatagaacatgcaaaaatatattttggaaacgatcatttagtattagatggtgttgataaaaaggcctatttaagtgcgcttgcaatatcaaaacatatagttattacgtgcgattcaagctctatgatttcagaggcagctttaacaggcaaaccaatttatattgccactattccacctaaaaaaagcgataaaagatttaaaaattttagaaaattatttcaagaaatgaaaattgttagagaattaggagaaaaattagaaaattggaactatgaaaaattagatgaaacgaatagagtagcaaatatcattaaagataaaattcaattataa

SEQ ID NO: 248370 - DNA, 352 bp, Unknown
  Bacterial polypeptide expressing nucleotide sequence isolated from the Sargasso Sea
gtgcataataataacccttcatattcatatgaatgtttagttaattatgctggtgctactattagttggttaaaaaataacctaaaaattttaaattcagcgaaagaaacaaatcaaattttaaataaaactaaagactctcaaggtgttgtttttgttcctgcattcgttggtttaagttcacctcattggattcctgatagtaaagcaatgatatatggattaacaccatctattaataaaaatcatattataagagccgctcttgagtctatagcatttcagataaaagattatttggatgatttaaaaaaaaataataaaatcaactataatgatatctatatttgat

SEQ ID NO: 248371 - DNA, 1075 bp, Unknown
  Bacterial polypeptide expressing nucleotide sequence isolated from the Sargasso Sea
aatgtcaagaacccatagtttagaaaaatatagaaatattggtataatggctcatattgatgctggtaaaactacaactacagaaagaattttatattatacaggtaaatctcacaaaataggtgaagtccatgatggtgcggcaactatggattggatggagcaggagcaagaaagaggaattacaattacctctgctgccacaacttgtttttggaatgatcatagggtaaatattattgatacaccaggacatgtagactttacaattgaagttgagagatctctcaaggttcttgatggtgcagttgctgtttttgacggtgttgctggagttgaaccacaatcagagactgtttggcgccaagctgataaatacaatgttcctcgaatgtgttttataaacaaattagatagaactggagcaaatttttttatgtgtgtagatatgatacctgaaagattaggttcttatccgcttgtgttacagctcccaataggcattgagagtgatttaaagggtgtcgttgatttagtttcaaataatgccattgtctggcaagatgaaagtcttggtgctaaatttgatattgttgaaataccagatgatttaaaagaacaagcaaaagaatatagagaaaaattagtagaaaaagctgttgaggaagatgacaaaattatggagtcatatttagatggtaacgaaccctcaatcgaggatttaaaaaaatgtattagaaaagggactatcaagggatcatttgttcctgttttaactggttcagcttttaaaaataaaggagttcagccgttacttgacgcagtaatagattatatgccatcacctattgatgtggccagtgttcgtggagtagatgtagaagatgactcaaaagaactgactagaaaatgtgatgacaatgagccttttagcgccctagcatttaaaattatgacagacccttttgtaggtagtctgacatttacaagaatttattctggatcaatcaatacaaaagatacagttttaaattccaactctggaaaaaaagaaaatattggtagaatgctttaa

SEQ ID NO: 248372 - DNA, 703 bp, Unknown
  Bacterial polypeptide expressing nucleotide sequence isolated from the Sargasso Sea
aatgaacaacattagattattttatcaagaaaatttatcaaacaatttaaaagggaaattagataaaaaacaatctcattatatctctaaagtcatgagaattaaagaaaatggaaaatttaatgtattcaacaatgccggagaatgggttgctaaaattatcaggatagcgaatggttttgttgaattcagaatagtgaaacaattaagatcaattgaaaatgcaaatgaaatttggttagctttttctccaattaaatcaaattactttaattttatgatacataaggcaactgaaattggagtaaccagatttattccaatattaactgaaagaacaatggttagaaaattgaatgaaaaaagaattaataaaattattatagaagcgtctgaacaaagtaatagactaaaagttccatctttggataagcttacaaaactagatgctttcttaaaattaaatcaaaatacaaatataatttttggagatataaattcagagaataaaaaaatagatcttaaaaataaaaatccattatgcgttttaataggcccagagggggatttttcattaaaagaaagggaacgtattttaaaactaaaaaatataataccactcaaaataaatgataatattttaagatctgaaactgctgcgatttcaatgatatcaataataagttttaatttattatcttaa

SEQ ID NO: 248373 - DNA, 1615 bp, Unknown
  Bacterial polypeptide expressing nucleotide sequence isolated from the Sargasso Sea
tatgactagatctcatcaattatcaaaatacagaaacattggtataatggcgcatatagatgctggtaaaacaacaaccactgaaaggattttatactatactggcaaatcacataaaattggagaagttcatgatggagctgcaacaatggattggatggaacaagaacaagaaagaggtataactatcacttcagctgctacaacatgtttttggaaagatcatagaataaatataatagatacacctgggcacgttgattttactatcgaagttgaacgatcgctgaaagttttagatggagctgtcgctgtttttgatggagttgccggtgttgagcctcaatctgaaactgtctggagacaagcagataaatataaagttcctagaatgtgctttgtaaacaagttagacagaacaggcgctaatttttttatgtgcgttgatatgatttcagatcgtttaggctcctatccattagtaacgcagttaccaattggaattgagagtaatcttaaaggtgttgtagatttagtttctaataatgccatagtttggcaagacgaaagtttaggagcaaaatttgatattgttgaaatacctgaggatcttaaagaacaatctgcagagtatagactaaaattaattgaaaaagccgtagaggaagatgactcaataatggaaagttaccttgagggtaacgaaccaactattgaagagctaaagttatgtattagaaaaggtactttaaatggctcatttgttcctgttttaactgggtcagcattcaaaaataaaggtgtccaacctcttttagatgcagttattgaatatatgccatcacctacggatgttgcaaatgtaaaaggcgttgatgttaatgacgactctaaagaattaaccagaaaatgtgaagacaatgaaccttttagcgcattagcttttaaaataatgaccgacccatttgttggaagtttgacatttgctagaatttattcaggctcaataaatactaaagacagcgtcttaaattctaattcaggaaaaaaagaaaatataggtagaatgctattaatgcatgcaaataatagagaagaaataaaaacagctaacgcaggtgatatagttgcattggttgggctcaaagatgttacaacaggtgagactttatgtgcatctgataatccaatagttttagaaaaaatggattttcccgatcctgtaattgaagtcgctgttgaacctaagactaaagttgaccatgaaaaaatgggccaagcattaggaagattagctcaagaggatccaagttttagagtcaccactgatcacgaaagtggccaaaccattataaaaggtatgggtgaacttcatcttgaaattcttgttgataggatgaaaagagaatttaaagtagaagcaaatgtcggggctccacaggttgcatatcgtgaaacaatatcaaattcatacgacgttgattacacgcataaaaaacaatctggtggtgcaggccagtttgcaagagtaaaaattaaattcgaacccggagaaccaggaactggttatcaatttataaatcaaattaaaggtggaaatatacctactgaacac

SEQ ID NO: 248374 - DNA, 799 bp, Unknown
  Bacterial polypeptide expressing nucleotide sequence isolated from the Sargasso Sea
aatgaaaaaaattgacacttctgcaggtaaactcccacaaagggaaaaaggttctcttgtcccacaagaattcaaatcaattgatgaagaaagaagacataatcttgaaagattagctagtgcattcagaatgtttgctcattttggatttgatgaaggtctggcgggacatataacctacagagatccagagtacaaagatcacttttgggttaacccatttggggttcactttggtcaaatgtgtgtatctgatctacttttagtcagccatgaaggtgatatagtgcatggtgatagaccagtaaataatgctgcctttgccattcattctaggttgcatatgaagcacgaaaatttaaatgctgcagcccattcacactcaatgtatggaaaaactttttctaccatgggaaggatgctcgaaccaatcacacaagactcttgcgctttctatgataaccatgttttgtttgatgattttacaggggttgttttagagactgatgaaggagacagaatagcagacgcccttggtaataaaaaagcagctatattaaagaaccatggtcttttaactacaggcaagactgttgatgaagcagcttggtcttttttatcaatggatagatgctgtcaatcacaacttcttgcagaaactgttggtcaaatggaaaggattccagacgaagttgcagaaacaactagaggtcaggttgggtctgagtttggcatgtgggcaagctaccagcctatatatgatctcatgctgaagaaagatgatagtttcttgaattaa

SEQ ID NO: 248375 - DNA, 778 bp, Unknown
  Bacterial polypeptide expressing nucleotide sequence isolated from the Sargasso Sea
atgataaataaaaataactatatagtagctatagatcaaggaagtacctctactcgaactgttatttacgaccataaacttaatctcataaacagtagccaaagaaaaacaaaagaaatatatcctgagaatggttgggttgaacaagatcctgaagaaattttgattactgctaaagaaactttgatagaagcaataaatatacctgaaattaataaagaaaatattttatcaattgggataactaatcaaagagaatctatcgtattttggcataaagaaacattgttgccactgagccctgctataagctggcaatgcttaagaggtatagagctttgcaaatatataaaggatactaaattagaatctataattaataaatcaactggattaaaggttgatccatatttttctttttcaaaaattgtttgggcactaaaaaatattgaagccctgtcagacactaaaaatatatgtgttggaacgattgactcatggttattaactaatttagttgaaggaaatccacacctaacagaaatctcaaatgcttctcgaacagggctttataatacggaaaaagaagaatgggatgatgaaatattagaattacttaatatacctaaatctattcttccaaaagtagttcaatcaaactacaattttggatttttaagtgaagacatcttaggtaaaaaaatacctataaatagcatattgggagaccagcaggcttctttatttggacacaaaaaagacaagttccaagaaatag

SEQ ID NO: 248376 - DNA, 404 bp, Unknown
  Bacterial polypeptide expressing nucleotide sequence isolated from the Sargasso Sea
attgtcaagagacctattagcaaagaaaagaaattttcattgggatagcattttcaagattacagctacttgtgcaggtgcgtttgttttactaatcattgtattaatttttggtcaattgttatcagattcttggttaatctgggaaaaagaaggattggcatttgtaacaggagatagatggaatcctgtagaaggccgtgaatcatttggcgcattaccatacatagcaggaacgttagtgacatcattaattgcattatgtattgcagttccacttagcattggaattgcaatgtttctttcagaaattgcacctacaagaattagagagccaatttcttttgtagtagaattgttagccgcagttccaagtatcatctatggattatggggtttgttta

SEQ ID NO: 248377 - DNA, 230 bp, Unknown
  Bacterial polypeptide expressing nucleotide sequence isolated from the Sargasso Sea
atgcacaccccgggtggtgcgtccgacccgcatcgaaaccaccgccatgggcgccgccttcctggctggcctcgccgtcggcttctggaagagctcggaagagctggaagacaagttcagcgtggaccgcgagttcatcccgcagatggaccgcgacgatcgcgccaagcgttacaacggctggaagaaggcggtggaacgttcacgccgctgggcagaagaggagtgat

SEQ ID NO: 248378 - DNA, 522 bp, Unknown
  Bacterial polypeptide expressing nucleotide sequence isolated from the Sargasso Sea
ttattaacaatgcttttgatacggaaacaattgctcaatcaaaaaaaaataatgagggtgtatacgttgtgcctgccttcagtggaatgggagcaccttattggaggcctgatgcaagaggggtaataacaggtttaacaagaaatagtgattggaaaaccttagttagagcagtattagagtcagttgcctatcaaagtaatgatttatttaatgcaatgaaaaaagatggtttaaaaccaactaaacttaagattgatggaggcatggtaaaaaacaactggttttcgcaatttttatctgacatcataaatataaatacagaaagaccaaaggtattagaaacaactggtttaggagtagctttgctagctggatatcaaattggattatttaaatcattatatcaaatcaagaggaaatggaaaaaagataaaatttttaagcctaaaataaaccgaaaagttaggaacgatttaataaatggttggaaattatcagttcagaaagctctattataaa

SEQ ID NO: 248379 - DNA, 910 bp, Unknown
  Bacterial polypeptide expressing nucleotide sequence isolated from the Sargasso Sea
acttgtgcaggtgcgtttgttttactaatcattgtattaatttttggtcaattgttatcagattcttggttaatctgggaaaaagaaggattggcatttgtaacaggagatagatggaatcctgtagaaggccgtgaatcctttggcgcattaccatacatagcaggaacgttagtgacatcattaattgcattatgcattgcagtgcctctcagtattggaattgcaatgtttctttcagaaattgcacctacaagaattcgagagccaatttcttttgtagtagaattgttagccgcagttccaagtatcatctatggattatggggtttgtttacattcagaatagttttcaaggattggtttgaaagtcccacacatgaagcgctaggtgaacatatctttttgttcagagatgcaccatttggactggacattctaactgcaagtgttgttttagcaataatgattattcctacaatttctgcagtatcacgtgaaattttactggcagttcctgcaattcaaagagaagcagcatacatgctaggtgccacaaaatgggaagtatttagaatgtcagtattgccatatgcaaaatcaggtttgattggcgcatcaattctaggattaggtagagcagttggagaaactatggctgttacaatgttaattggaaatgcagttggaccaaaggcatttccgtttggatttttccaacagggaaattcacttgcaagtattattgcaaacgaattcaatgaagcatcaccagtttcattgtactttcctgcactcattggattaggattaattctcttgtttgtatcactaggaatcaatgtatgcgcgcatctgattattcgtagagtaacaaatgcacacgaaggaggtatcaaaggattttgag

SEQ ID NO: 248380 - DNA, 157 bp, Unknown
  Bacterial polypeptide expressing nucleotide sequence isolated from the Sargasso Sea
tatgacgatcattctcgcaattgatgcaggcactacgggtgttcggacgctagctgttaatgaccgtggagatattgtctcctcctcctataaggagttcaaacaatatttccccaaacctgggtgggttgaacatgacccagaagaaatatgggtg

SEQ ID NO: 248381 - DNA, 394 bp, Unknown
  Bacterial polypeptide expressing nucleotide sequence isolated from the Sargasso Sea
aatgggatatataaccattgactcaagcacttcctctacaacagtattagtttttaacgatagtttaaaagttttaaaaagatttcaaaaagaacacaaacaaatttatacaaaagaaggatacattgagcatgacctagaggaaatctttcaaaatttaattgaacttgtaaaacaagcttcctttttatcgcctgaccctaaattcataagtattacaaatcaaagagaaactttttcattatttaaaaaaaaaacaggtaagcccatacataatgcaattgtttggcaatgcacaagaggacaaaaaatttgtgatgatctcttgattaataaagaattaactcaaactattaaaaaaaagactggtctccaaccaaatacctttttttct

SEQ ID NO: 248382 - DNA, 592 bp, Unknown
  Bacterial polypeptide expressing nucleotide sequence isolated from the Sargasso Sea
tatgcactgaaagggtcaatattcatagcaggtgcaggcgttcaatggttaagagataaaataaaatttttaaaaaaagcagcagactccgaaaaaataataaaaaaattaaaagataatcatggcgtttatctggttccagcttttacaggcctcggaacaccatattggaatgcaaaatctagaggtgttttaagtggtttgacaagagacactggtgtaagcgaaattgtaagagcaacagtagagtctgttgggtatcaaacttatgatttatttgaagcaatgaaaaatgatgggcttcgtccaaaaatagttagagtagatggaggtatggtaaaaaataattggttttcacaatttttatcagacataattaatgtaaaagttttaagaccaaaagttgatgagacaaccgcattaggtgcagcttttatggcaggtttaaaaattggagtttacaaatctttaaaagatatttcaaaaaattggtctttagataaaaaattttctccaaaaatgaaaaatttagatagaagaaaattaatttttggatggcagaaagcaattaaaagaacattgataacataat

SEQ ID NO: 248383 - DNA, 756 bp, Unknown
  Bacterial polypeptide expressing nucleotide sequence isolated from the Sargasso Sea
aatgtatttatcaattgatcaaagtacttcatcttctactatttttttatataataaaaaatttaaacttatctgtaagttttctaaagcacataaacaaattcaaaaatctttaggttttgtagagcatgatgcaaacgaaataattaataatattttttttttatttaaaaaaatttcaaaaaaaataaaatttgataaaaacttattccttagtattacaaatcagagagaaactttcgttatatttgataaaaattcaggtaaacctctgcataatgccattgtttggcaatgtagacgagggcaaaaagtttgtgatgaaataaataagtcagtaaaaaataaaaaactaattaagaaaaagacaggtcttactttagatacttatttccctgcctcaaaattaaaagaattattaaattcaaataaaaaaatcaaagataaattaaaaaatggtagtgctttatttgggacaatagatacatatctgatttatcaattaaccaatcaaaaaatatattccactgattatactaatgcatcaagaactcttttttttgataatagctctctatgttggagcaaagatcttttaaaattatttaatttaaatttaaaaaaattaccagaagttagagaaagttcttcaatatttggatacacaaattttaatggtttattaaaaaacaatattcctatttcaggagtcattggtgattcacaagcttcgatttttgcaaatcaatgtttcaa

SEQ ID NO: 248384 - DNA, 334 bp, Unknown
  Bacterial polypeptide expressing nucleotide sequence isolated from the Sargasso Sea
aatgaaatacgtactttccatagatcaaggaacaacaagctcacgtgcaatagtttttgatgaaaatcaaaaaataattgcagaaagtcaaaaagaatatgaacttcaatatccaaatgatggttgggttgaggcaaacccagatgaaatactgagtagtgtaaatgaaacaataaaagaagcattggaaagtgctgatgttgatattgccgcttgcggaatcacgaaccaaagagaaacagtgattgtttgggataggttgacaggtaagcctatatatccggcaattatatggcaggacagaagaacctcagatttatgtaatgatcttaaa

SEQ ID NO: 248385 - DNA, 877 bp, Unknown
  Bacterial polypeptide expressing nucleotide sequence isolated from the Sargasso Sea
tgaagagtgcatttttggctatgagatatttcaatattcaccttcaacttttgcccccgccaatatagtacccatttcttccacctatgctctcggtccgggtgataaacttacaattgacctttatggtgttaagcaagactctgagcaagtcactgtctccagggatggaactatctatttgccttttatgggcagaatgaatgtagcaggattaactttcccagaagctcaaaaggcaataaataagcgtgccgagaaggaattaattggaactgaagtttccatctcactagacgaactaagatccattacagtttatgtattgggtgaagcataccagccgggcgtatatactcttagtgctcttagtactgttaccaattctttattccttagcggtggagtaaataagcaaggttctctaagaaatattcaagtcaaaagaggcggtaagactgtaaaccaatacgacttgtacgatatgctcataaagggcgatactagtacagactttaggttggaagatggtgacacggtatttattccattctttgaaagcaccgtaagagttggcggttcgttcagaaggccctatttgtatgaacttttagatggagaaacccttgaagatgtgatttctttagctggtggttttaaaaatgaagtaagtattaatcctcaagtagagtatacaactattaatagaataactaaccaaagagagacaaccctaatcacttacaatgaagaaacaaaaaccaaattagttctaaatggagatactgtaaatgtatctgaaaattccgaattagaacctctttatgttgaattaacaggacaatttaaaaaacctggagtctacactttaagcaag

SEQ ID NO: 248386 - DNA, 346 bp, Unknown
  Bacterial polypeptide expressing nucleotide sequence isolated from the Sargasso Sea
atgaaatattttttagtaatagatcaggggacatccagcacaagagcaattctttttgatgagaaatttgtcgaggtaaatgtttctcaaaccgaatttaaacaattttttccgaaagatggatgggttgagcatgatgctaatgaaatttttgacacggttgtaagctgtatcaaagacgtaatggaaaagtcagaaacaactcataaagaaatcatagcaattggaatcacgaaccaaagagaaacatgccttttatgggataagaaaggcaaccccttgggtaaggcaattgtttggcaagacagaagaaccgcagaacttgtaataaatcaaaagagagggg

SEQ ID NO: 248387 - DNA, 545 bp, Unknown
  Bacterial polypeptide expressing nucleotide sequence isolated from the Sargasso Sea
gttaaaggatgagttaaaaatagtttcttcaaataaagaaataaaaattatttcgaaaaaaacaaaaaaaaataagatttattttgtgccagcgtttaatggattgggtgcaccctactggaatagaaatgcgagaggtgcaatttatggaataaatagaaatacaaataaatttgatattataaatgcgacaattgaaagtataggatttcaaacaaaagatttattaaatttaattgaaaaggatagcaaaaataaaataaaacaaattagagtagacggaggcatagccaataacaaagattttttgcagtttttaagtaatatattaaacattcatattttacaatcaaagtactctgagtctacagcgctaggtgcggcatatcttgcaggaataggcagtggaataatgaaaatcaataaaattgatagccattggaaaaaagaaaatacttttaaatctaaaataaatattacagaaagaaataaaatttattcaggttggttgaatgcaatagataaaaccttgtataaactataat

SEQ ID NO: 248388 - DNA, 517 bp, Unknown
  Bacterial polypeptide expressing nucleotide sequence isolated from the Sargasso Sea
aaaggcttcagagacagagaaaattataaaaaaactaaaggacaataatggaatctacttagtgcctgcttttactggccttggagctcctcactggaatgcaaactctagaggagtattaagtggaattacaagagacacaagtcctgaagaaattgttagagctacaatagaggcagttgcttatcagacttatgatttatttgaagcaatgaaacatgacggtttaagaccgaaaatagtaaaagttgatggcggtatggtaatgaataattggttttcacaatttttatcagatgttgtaaatgtaaaagttttaagaccaaaagttcaagaaactaccgctgccggtgcagcttttatggccggtctaaaaatcggtgtttataaatccttaaaagatatctcaaaaaattggaaaatagacaaaaacttttctccaaaaatgaaaaatacaaaaagaaatgctctattaaaagaatggggcaaggcagtcaaaagaactttaattaattaa

SEQ ID NO: 248389 - DNA, 757 bp, Unknown
  Bacterial polypeptide expressing nucleotide sequence isolated from the Sargasso Sea
ggtaattggagaccaacaagctgcattggtaggtcaaggttgctttaaaaatggtgatatgaagtcaacttatgggacagggtgttttttaatggttaatacagaaaataagcattatgaaattgatgaaggattacttaccacagtagcttataaactgggtgatgaagttcattacgctattgaaggcagtatctactcttgtgggaatattattcaatggttgagagataaaatggaattttttgctaattcaaaagacagtgaaaagtttcttaacccaaatggcaattcaaataatgtgctttttttgcctgctttcaatggcctgggtgctccattttggaattctgatgtgagaggaggtttttatggaattactcaggattcatctattaatgatatggtcacagcagcctttcaatcaattgcatttcaaacaaaggagataactacaattttagagaattacgatattgaaattaataagttattagttgatggtggtatggtaaacaataatagattttgtcaggttttgtcagataccttaggaaaagatattattcaaccatcaaacgtagaatcaacagctataggggcatgcaaggtagctatgatcgcatctggtgaagatttaataaatattactgatcattctccatcaatttataagccaaatttagatcttgttaaagtctacgaagataatcatgctaaatggaaaggatatttattaaactctttgaaaaattaa

SEQ ID NO: 248390 - DNA, 571 bp, Unknown
  Bacterial polypeptide expressing nucleotide sequence isolated from the Sargasso Sea
attatagattggttaaagaataatctacaagtatttgataattataatgaattagaagatatacttaaaaatacttccattaatagtgagattgtaatggtacctgcttttactggtttaggtgcaccacattggaaaccaaatagtcgggcatctatttcaggtttaacgcgtgattccaataaaaatgagataatagtctcatcagttcagtccatttctttacaaacttatgatcttatgaatgccataaatgaggataccaataagttatttgagaatccccttcatagtattagagttgatggaggtatgacagaaaatgactggtttatgcagaatctttctgatatttgtgacataaaaataagtaaatcaaatgaacaagaagcgactgcattgggcgcagcttcattatcagctcttggctctcaagaaattaataacttaaaagaatttaatgttaatttatataaaaataaggaatttctgccacaaatggaaaatcaaacaagagaagaaataataaaaaattggaataaagcaataaataaaaccatcaatgtctaat

SEQ ID NO: 248391 - DNA, 616 bp, Unknown
  Bacterial polypeptide expressing nucleotide sequence isolated from the Sargasso Sea
attggctaaaaaattaatgaataaaaaacaattattattcggaactattgacagctttttgatttggaaacttacaaaaggccagatccatgcaacagatgcaacaaatgcgagtagaacaatgatttacaacatatcttcaaacaaatgggatgacacaattttaaaaatattgaaaataaaaaaacatatacttccagaagttaaaaactgtgctgacgattatggtcacacacattcatcaattacaggagagtcgataccaataaccggggttgttggagatcaacagtcagcatctataggccaatgttgttttgaaccaggttcattaaaaagcacttatgggacaggcgcttttgttttgcttaataccggttataaaaaaatttattctaagaataggttgctcacaacaattggttacagaattaacggtaaaactacttacgctatggaagggtctatttttattgctggagccggtgttcagtggttaagagatcgaatgaaattttttaaaaaagcatatgaaactgaaaagattttaaaatctttaaatgataataaagatgtttacttggttcctgcatttactggtatgggtgcaccatat

SEQ ID NO: 248392 - DNA, 337 bp, Unknown
  Bacterial polypeptide expressing nucleotide sequence isolated from the Sargasso Sea
atgaattataaaatacttacaatcgaccagggaacaactagttcaagatcaattacatatgatatttatgggggcacaattgaatctagtcaacatgaatatccattaatttaccctgaagatggttgggtagagatagatccacaagtattaatggattcggttataaagtccttaaatgatattaataaagatgatattgaattgatatcaattacaaatcaaagagagactactattgtatgggaaaaacaatctggtaatccgatttataacgacgattgtatggcaggacaggagaacatcgcaatattgcgaaagcatcagatcagatgat

SEQ ID NO: 248393 - DNA, 247 bp, Unknown
  Bacterial polypeptide expressing nucleotide sequence isolated from the Sargasso Sea
atgaaaaaatattttttggtaatagatcaaggaacaacaagttcaagaattgtactgtataataaaaaatttgaaatattcgatattgtccaaaaagaatttaaacaatattttcccaatgaaggatgggtagaacataatgcaacagaaatttgggaagatgttagaaatttaatttcaaaaatattaagaaaaaataagttaaattcaaaaaatataatttcaattggaattccaatcaaagaga

SEQ ID NO: 248394 - DNA, 464 bp, Unknown
  Bacterial polypeptide expressing nucleotide sequence isolated from the Sargasso Sea
atattttgttccagcttttgtgggtttaggagctccttattggaattctaaggtaaggggtgttttatcaggtttgacaaggaataccggacctggagaaattgtaagagcaatcatcgaatctacagcttaccaaagtctagacttattgagcgctatgaaaaaagacggattgagacccaaattcattaaaattgatggtggaatggtaaaaaataattggttttgccaatttttaacagatgtattaaatgttaaaatttacaaatcaaaaactgacgagactacagcgttaggagcagcttttatggccggattacatgtaggtatatttaaatctttaaatgatatttcaaaaaaatggaaattaaaaagtaaatttactcccagaatgaaaaattcagaaagattatatttactcaaaggatggtcacaagctataagaaaaacattattaaactagt

SEQ ID NO: 248395 - DNA, 731 bp, Unknown
  Bacterial polypeptide expressing nucleotide sequence isolated from the Sargasso Sea
aatgtatatttcaatagatcaaagtacttcatcaacaactgtttttttatacaataaaaatttaaagttactcaataaattttctaaacctcataaacaaattcaaaaagtatcaggttatgttgagcatgatgctaatgaaatttataaaaatattcttttactaatcaaaaaaatatcaaaaaaaattaaatatggtaacaatctgtttctcagcattactaatcaaagagaaacttttgtaatctttgatacaataactggaaagccattacataatgctattgtttggcaatgcagaagagggcaaaatatttgtaataaaattaataaatcaacacttaatagaaatttaattaaaaaaaatacaggtttaactcttgatacttattttccagccccaaaactgattcaattattaaatttaaataataatttgaaggaaaaattaaaaaaaggatctgctctttttggaacaatagatacatatttaatatatcgtcttacaaaacaaaaatcttatgttactgattttacaaatgcatctagaactctattttttgataataactcgctgaaatggagtaaaacgttattaaaattatttagtttgaatttaaataaacttccagaagtgaaggaaagctcatcaatttttggatacacaaacgtaaatggtattttaaaagcaaatattccaatttctggtgttatgggagattcacaagcat

SEQ ID NO: 248396 - DNA, 305 bp, Unknown
  Bacterial polypeptide expressing nucleotide sequence isolated from the Sargasso Sea
catgactgttccagcagttctggcaatcgaccaagggaccacggggacgacttgccttgtcatagatgcagacggccgtgtccttggacgtggctactccgaatttaaacagtacttccctaggcctggctgggtcgagcatgatgccaacgagatctgggaggtaacactaagagtcgctcgtgatgcagttgccgatgcgtcgggagccaaagtctgctcgatcggaatcgcgaatcaacgcgaaaccgttgttttgtgggatagggaaaccatcgagcctgttcatcgtgcgatagtgtggc

SEQ ID NO: 248397 - DNA, 121 bp, Unknown
  Bacterial polypeptide expressing nucleotide sequence isolated from the Sargasso Sea
ttgacttctgtacttggggatcaacaagcagcactatttggccaaaactgtataaattcaggtgatgttaaaaatacctatggaaccggttgctttgcgttaacaaatactaggaaatgag

SEQ ID NO: 248398 - DNA, 838 bp, Unknown
  Bacterial polypeptide expressing nucleotide sequence isolated from the Sargasso Sea
cttttgaaattgaccgacgggagggtccatgcaacggatgctactaatgcaagtcgtacgagcttattcaatataaaaactggcaaatgggatccgaggcttttggagattttcaatgttccttgtcaagttcttccagtcgttaaggattcctcccatctttttggggtgaccgctaaatcggttctgggtaaggaaattccaataacagcaattcttggtgatcagcagtctgctgctgtcggtcaagcctgctttgagccggggagtctaaaggcgacctttggaactggcgggtttttattgatcaatactggcacaaaagctctcaagtcaaagtctcgcctgttaactaccattcttttccaaattaataaaaaaatattttatgcaatggagggatcaatttttatcactggtgcagctattcagtggctaagggatgaaatgaaaacgctcaacagcgcgcaagaaagcgagagtctagcgcgccaattagagagcaatgagggcgtttacctggtcccatcgtttacaggatttggagcgccacattggcaaccggaagccagaggagcgatttttgggatcactcggaacactggtcctcgacatttggcaagagcagctttggagtctgtggcctatcaaaccaatgatattattcaaataatgtctgccgagggaactctgcccacggtcctcagagcggatggaggcatggttgataacagttggttcatggggtttcttgctgacattgcgaacataaccgtggatgttccgaaggttaaagaaacaaaaaatctaggggtagccctgatggcggcttatgccc

SEQ ID NO: 248399 - DNA, 538 bp, Unknown
  Bacterial polypeptide expressing nucleotide sequence isolated from the Sargasso Sea
aagagataaaataagactaatcgataatgcgtatgaaacagaaaagattgctcaattaaaaaaagataatgaaggtgtttatgtagtaccagcttttagtggaatgggagccccatactggagaccagatgcaagaggcatcattactggattaaccagaaatagtgattggaaaatttttgttagagcagttatagagtctgttgcatatcaaagttacgatttatttgaatctatgaaaaaagatggacttaaacctaaaatagttaaagttgacggaggaatggtagctaataattggttttctcaattcttatcagatatcatcaatttaaatgtagtaagacctaaagttcaagagacaactgctttgggagtcgctcttttagctgcataccaaattggagaatttaagtctttaaatgaaattcaaaataaatggaaaaaagatagagttttttcaccaaaactaaacaaatcagcaagaaataatttattgcaagggtggaaactagctattagaaaaactttagcataa

SEQ ID NO: 248400 - DNA, 292 bp, Unknown
  Bacterial polypeptide expressing nucleotide sequence isolated from the Sargasso Sea
tatgaaatattttggctgtatagatcaaggaactacaagttcgagatttatagtatttaatgaccagggtcaaattgtcgctagtcaacaacaggaatttacacagtatttaccaaatgaagtttctgtcgaacatgatccaatagaaatttgggattcagttaaaaattgtatttcaaaagtagatgatgaattttcaataaatcaattagatagtattggtattactaatcaaagagaaacaacgcttgcatggcgaaagtcaactggagtgcctttacataatgcttta

SEQ ID NO: 248401 - DNA, 202 bp, Unknown
  Bacterial polypeptide expressing nucleotide sequence isolated from the Sargasso Sea
gttgaaaaattttattgtctccattgatcaaggtaccacttcttcaagagtaatactttttaacaccaaaggaaaaattgaatttgtttcacagtatgaatttaaacaatatttcccaaaaaatgggtgggtagaacataatccaaatgagatttggtcaacaacccttaaagcacttaagaatgttattaatagggccaat

SEQ ID NO: 248402 - DNA, 646 bp, Unknown
  Bacterial polypeptide expressing nucleotide sequence isolated from the Sargasso Sea
gttgctcgacggaattattaccaccgtagccgcatcatcttcaggacaaaaaaagcaatatgttttggaggggtcgatattctctgctggttcgacagttcagtggctgcgagaccagcttggattttttgaagaagctgcggaaacggcagagattgcatctgccctcgatgatagtggaggagttgtcatgatcccgggcttcactggcttgggttcaccgcattgggacgaagaggtacgaggagcatttctgggtattaatcgtgatacgaataagtaccatttaatacgagcgggacttgaggcgattgctcatcagacgagtgatgtaatagacacttttgttcgagccggctatgagatatctgaactgcgtgtcgacggaggtgcagcagcaaacgactggctgatgcagtttcaggccaatattttggatatcccgattctccgtgcagagtttttggaaaatacagcgagaggtgtcgcaggtatggctggtgttgaagcaggcatcattgatttagatgtgatgtctaatcgaccgggagggaagatttttacaaatgagatcgaccctgagacccgtcgaatttcccgagagagatgggcgcacgcactagagacggttagggaattcaaatga

SEQ ID NO: 248403 - DNA, 733 bp, Unknown
  Bacterial polypeptide expressing nucleotide sequence isolated from the Sargasso Sea
ttgtttcaaagaaggaatggtcaaatcaacttatggtacaggttgctttttacttatgaatacaggaaataagtttattgaatctaattctaaattattatcaactacagcttataatatatttgataaaaaagattttgctttggaaggcagtatatttaatgcaggtactgttgttcaatggatgcgcgatgaaatgaattttattgataacgccagcgaggtggaagtactggcaaatagcagccaaaatacaatacaatttattcctgcctttactggtttaggtgcgccttattggaattcagacgttagagggcaaattactggaattactcgtgatacatctaaggctgacattgcaatggctgcactaaaatcagtatgctatcaaacaagagatcttcttgaatgtctactcaacgatactgaagttaagagaaatgaatttacgatgagagtcgacggaggcatgtctaaaaataatcttatgatgcaattattatcaaatataactcagatcagagttgaaagacctgttaatcaagagtctacagcggtcggagctgccttcttggctggtatgaaatctggactatacaaagatgttgcagtcgcagaaaaattgtggaagactgataagacttttgaacctgctatttctttagacgaggcagataaacaatataatggatggctaaaaactgtaaaaggattgattaataatggttaa

SEQ ID NO: 248404 - DNA, 273 bp, Unknown
  Bacterial polypeptide expressing nucleotide sequence isolated from the Sargasso Sea
ggactggctgttttttaatggtcaacacaaaagaaaagatctataaatcagaagcaaaattgctatcaacagttgggtgcatgcttggcaacaaagtctcttacgctcttgaggggagtatcttttcggcaggtacatccattcaatggttaagagatgaaatgagattttttgatgattcttctaaaagtgaagaccttattgacgatgaatttgattcaaagggtgttaatttcattcctgcatttactggtcttggggcgccgcattgaa

SEQ ID NO: 248405 - DNA, 865 bp, Unknown
  Bacterial polypeptide expressing nucleotide sequence isolated from the Sargasso Sea
ctttataatgcgattgtttggcagtgtagaagaggccaaaaaatttgtgataaaattaataaatctagtaaaaatcaatcattaattaaaaaaaatacgggattaaaacttgatacttattttcctgcacccaaattagtaaaattattagataacaaaaagaaattaaaagagaaactaaaaaatggctcagctttatttggcacgattgatacatatttaatatatcgactaacaaataaaaaatcttacgctactgactatacaaacgcatcgagaactttattttttaataataaatcattaaattggagtaaagaattactaaaattatttgatttaaatataaaaatgttacctcaagttaaagagagtgcttcaatttttggatacacgaacttaaaccaaatattaaaagataaaattcctattgcaggtgtgatgggtgattcacaagcatcaatttttgcaaatcaatgttttaataaaggaaacactaaaattactttaggaactggcgcatcaatattaacaaatattggaaatcaatactcttataaaaaaaatacaattactactttatcttatgtctataataataaaccatcttattcttatgaatgtctaataaactatgctggagcaacggtaagttggctgaatagtaatttaaaaataattaataaacctcaggaaacaaatagtatttttacaaaaaccaataattcaaatggagtggtctttattccagcctttgttggtttaagttcgccccactggctcccgaatagcaaaggaatgatttatggtttaacgccatcagtaaataaaaatcatattataagagctgcattagagtcaattg

SEQ ID NO: 248406 - DNA, 289 bp, Unknown
  Bacterial polypeptide expressing nucleotide sequence isolated from the Sargasso Sea
atggcggatcagcctctcctgttggccctggatcagggcaccagcagctccagggctgcactgttcaccgcgtcaggggcgctggtggccagtgccagcgcccctctgccgattcactaccccgcggatggctgggtggagcaggacccgcaggcgatctggaacagtcagcggcaggctctgatcgatctgcacaacgccctcagcgaagagcagcggcaggctgtggttacctgcggcatcaccaaccagcgcgaaaccaccgtgctctggaggcgcagtagcggcg

SEQ ID NO: 248407 - DNA, 786 bp, Unknown
  Bacterial polypeptide expressing nucleotide sequence isolated from the Sargasso Sea
attgacgcgaacatcgggtggatcgaacgcagaacctccattcgcttacaccaatgccgatagttatggtaactacacctatgcactcacatcaacggacctagcgcattttggccaaggttacgatcacttaattgttgcgatgcagtccgatgctgctggaaatacagagagcacgggccctttccagtttgcaatagacaccatactcactcgtgatattgcaatcacgtccattggtggtttggacagcgttgtttccggtaatttcggcgataacctgattgttggtgttgcagaagctggagcaactgttgaattctttgatggcggaaataccaaactcggcgaaacgacagccttgggcgacgacagttttacctatgaactgacagtgaataatttgatcacccttggccagggtggtgacaagaaaattacggcgagacagacggacgttgctggtaatacagagaactcgcaggagtttcagtttgaggttgataccaacctcactcctccgctttcggtttcgtcaattggtggtgtggacagcgttgtctctggtaatagcgacgacaacctgattgttggtgttgcggaagttggatcaactattgaattgtttgatggcgaaaataccaaactcggcgaaacgacggctttgggcgacgacagtttcacctatgagctcacaagtgataatttgagcactattggtgagggcgataagaaagatctcatggtgctacagaccgacgttgccggtaatacaacaacattgca

SEQ ID NO: 248408 - DNA, 235 bp, Unknown
  Bacterial polypeptide expressing nucleotide sequence isolated from the Sargasso Sea
ctgggcgaccagcaagcagcagcaataggtcaagcatgttatgaaaaaggatcagtcaaaagcacttatggtacaggagccttcttattaatgaatactcgtgaaaaaaagatcatctcaaaaaataaattaataactacaatttgttacagaataaataataaaactacatatgctttagaagggtctatatttattgcaggtgctggtgtgcaatggcttagagatacaacat

SEQ ID NO: 248409 - DNA, 440 bp, Unknown
  Bacterial polypeptide expressing nucleotide sequence isolated from the Sargasso Sea
atattctaaaaacaggttgttgacgaccattgtttatagaataaacggtaaaaccacctatgctcttgaaggttcaattttcattgctggtgcaggcgttcaatgggtaagagaccgaatgaagtttataaaaaaagcttctgatactgaaaaaattgttaaatcattaaaagataatgctggaatttatttggttcctgcttttaccggaataggagctccttattggaatgcaaatgctagaggagttttgagcggaataacaagagacacggggccaaaagaaatcgtgagagctataatcgagtcagttgcttaccaaacatacgatttatttgaagctatgaaacatgacggcttgagacctaaacttgtaaaagttgatggtggaatggttatgaataattggttctctcaatatttagcagacatgattaatg

SEQ ID NO: 248410 - DNA, 538 bp, Unknown
  Bacterial polypeptide expressing nucleotide sequence isolated from the Sargasso Sea
gctatttgcagatgtttcagaaacgcagaagatggcagagtctgtttctgattcgggaggtgtttatgtggttccggcttttgtaggacttggtgcaccacactgggacccttatgcccgaggaacaattttgggcttgagccgcgacaccaaccgtaatcacattgttcgtgcctcgctggaagcaattgcttttcagtcggctgaagtgttgcagagcattgccaaagatactagtcatgaaatcaaggaactgcgtattgacggcggagcagcagcaaacgactttctctgtcagttccaagctgacgttttggggctgcatgtaaatcgacctcagattcttgaaacaaccgccatgggcgcagcattcctggcaggactttcagttggaatctggaaggatcaggaagaaatcagcaagttatggaagcagaaaaaaatattctctccgaatatttccagggaagattcagcacgcatgatggaaggatggggccgtgcagtagagcgtgcaaaagaatggattgtttcctga

SEQ ID NO: 248411 - DNA, 237 bp, Unknown
  Bacterial polypeptide expressing nucleotide sequence isolated from the Sargasso Sea
cctgggtacaaaaaagaaaaaaacaccttggtatagattaaatattgtgaaaaaatttcttgttgctattgatcaaggcactacatcaacaagagtaattttatttgatattaaaggtaatataaaatttatatcacaattggagtttaaacaatactttccaaaaaatggttgggtagagcacaatccaaatgaaatttggcagactacacttaagtcgttaaaaaaagttataca

SEQ ID NO: 248412 - DNA, 178 bp, Unknown
  Bacterial polypeptide expressing nucleotide sequence isolated from the Sargasso Sea
atgaaaaaatttataatttctattgatcaaggaactacttcgagtagagcaatattgtttgatttaaaaggaaaacctatttttatttcacaaaaagaatttacacagtattttcctagggatggttgggttgaacatgatccagaggagatatggaaaactactttaaaagtttaaa

SEQ ID NO: 248413 - DNA, 248 bp, Unknown
  Bacterial polypeptide expressing nucleotide sequence isolated from the Sargasso Sea
ttgcttcgaaccaggatctttaaaaagcacttatggaacaggagcttttgttttattaaatacaggttataaaaaaatttactctaaaaatagattgttaacgaccatagcatatagaattaatggcaagacaacttatgcgatggaaggatctatttttattgctggtgctggtgttcaatggcttagagatcgaatgaagttttttaaaaaagcttatgaaactgaaaaaatattaaggtctttaa

SEQ ID NO: 248414 - DNA, 541 bp, Unknown
  Bacterial polypeptide expressing nucleotide sequence isolated from the Sargasso Sea
gttgagagataaaataaagttgataaataatgcatatgaaactgaacaaattgctaaatcaaaaaaaaataacgagggtgtttatattgttcctgcatttagtggaataggagcgccgtattggaggtcagacgcaagaggattgattacaggcctaactaggaatagcgattggaaaagtttagtcagggcagttgtagaatctgttgcgtatcaaagttttgatttatttgaatctatgaaaaaagatgggctaaaaccaaaaataattaaagtggatggtggaatggtagcaaacaattggtttgcacagtttttatcagatacgattaatttaaaagtagtgagaccaaaagtttcagaaactactgcattaggtgtagcattattagcaggatatcaaattagagaattcaaatctttaaatgaaattaaagctaaatggaaaaaagatagagttttttcaccaaaacttaacaaatctttgagaaataagttattgcaaggttggagacaagcaattagaaaaactttagcataa

SEQ ID NO: 248415 - DNA, 802 bp, Unknown
  Bacterial polypeptide expressing nucleotide sequence isolated from the Sargasso Sea
atgtatttgtctatagatcaaagcacctcatcaacaactatttttttatacaacaaaaatttaaaattactaaacaaggtaactaaatctcacaaacaaattcaaaaaggatctggttatgttgagcacgatactaatgaaatttttaaaaatattcttttcctagtaaaaaaaatatcaaaaaaaattaaatataatagtaacttatttttaagtattactaatcaaagagaaacttttgtaatctttgataaaatgacaggaaaacctctacataatgctattgtttggcaatgtagaagggggcagcatatatgtgataaaattaataaatcaaaattaaatagaaatttaataaaaaaaaatactggtctaacactagatacatattttccagctccaaaacttgttcaattattaaatttaaataaaaaattaaaagaaaaattaaaaaatggctcagctctttttggaacaatagatacttatttaatataccgtcttacaaaacaaaaatcttatgctacagacttcacaaacgcatctagaactctattttttgataataaatctcttaaatggagtaaaaaattactaaatttattcaatttaaatttaaaaacacttccagaagtaaaggaaagttcgtcaatttttggatatacaaatatcaatggtattttaaataaaaaaattcctatagcaggcgttatgggagactctcaagcatctatatttgctaatcaatgttttaataaaggaaacacaaagattacacttggaacaggagcttcaatttaac
